(19) United States
(12) Patent Application Publication
(10) Pub. No.: US 2016/0331844 A1
(43) Pub. Date: Nov. 17, 2016

(54) RNA CONTAINING COMPOSITION FOR TREATMENT OF TUMOR DISEASES

(71) Applicant: CureVac AG, Tübingen (DE)

(72) Inventors: Mariola FOTIN-MLECZEK, Sindelfingen (DE); Aleksandra KOWALCZYK, Tübingen (DE); Regina HEIDENREICH, Tübingen (DE); Patrick BAUMHOF, Dusslingen (DE); Jochen PROBST, Wolfschlugen (DE); Karl-Josef KALLEN, Königsdorf (DE)

(21) Appl. No.: 15/136,295

(22) Filed: Apr. 22, 2016

(30) Foreign Application Priority Data
Apr. 22, 2015 (EP) 15001191.4

(51) Int. Cl. A61K 48/00; A61K 39/145; C12N 7/00; C07K 16/28; A61K 39/395; C07K 16/30; C12N 15/117; A61K 45/06; A61K 9/00; A61K 39/39; A61K 38/20; A61K 38/17

(52) U.S. Cl. CPC A61K 48/005; A61K 38/208; A61K 39/145; C12N 7/00; C07K 16/2878; A61K 38/1774; C07K 16/30; C12N 15/117; A61K 45/06; A61K 9/0019; A61K 48/0041; A61K 39/39; A61K 39/39558; A61K 38/177; A61K 2039/53

(57) ABSTRACT

The present invention relates to RNA containing compositions for use in the treatment or prophylaxis of tumor and/or cancer diseases, to a pharmaceutical composition, to a kit and to uses of the RNA containing compositions for the treatment or prophylaxis of tumor and/or cancer diseases.

[0001] This application claims the priority of European Application No. 15001191.4, filed Apr. 22, 2015, the entirety of which is incorporated herein by reference.

[0002] The sequence listing that is contained in the file named “CRVCP0175US.txt”, which is 18,426 KB (as measured in Microsoft Windows) and was created on Apr. 22, 2016, is filed herewith by electronic submission and is incorporated herein by reference.

### INTRODUCTION

[0003] The present invention relates to RNA containing compositions for use in the treatment or prophylaxis of tumor and/or cancer diseases, to a pharmaceutical composition, to a kit and to uses of the RNA containing compositions for the treatment or prophylaxis of tumor and/or cancer diseases.

[0004] Cancer, also known as malignant tumor, describes a group of diseases involving abnormal cell growth with the potential to invade or spread to other parts of the body. In 2012, about 14.1 million new cases of cancer occurred globally (not including skin cancer other than melanoma).

[0005] The standard treatments of cancer include chemotherapy, radiation and surgery, wherein these treatments are applied individually or in combination. Other treatments apply cancer immunotherapy which is focused on stimulating the immune system through vaccination or adoptive cellular immunotherapy to elicit an anti-tumor response.

[0006] Some approaches use gene therapy and genetic vaccination for treatment of cancer or other tumor diseases. Gene therapy and genetic vaccination are molecular medicine methods which are based on the introduction of nucleic acids into cells or into tissues of a patient. Subsequently the information coded by the nucleic acids introduced is processed in the organism, i.e. resulting in expression of a therapeutic peptide or protein or expression of an antigen which is coded by the nucleic acids.

[0007] Conventional gene therapeutic methods, including gene therapy and genetic vaccination are based on the use of DNA molecules in order to transfer the desired genetic information into the cell. Various methods have been developed for introducing DNA into cells, such as calcium phosphate transfection, polybrene transfection, protoplast fusion, electroporation, microinjection and lipofection. DNA viruses may likewise be used as a DNA vehicle achieving a very high transfection rate. The use of DNA entails the risk of the DNA being inserted into an intact gene of the host cell's genome by e.g. recombination. In this case the affected gene may be mutated and inactivated or may give rise to misinformation. Another risk of using DNA as a pharmaceutical agent is the risk of inducing pathogenic anti-drug antibodies (anti-DNA antibodies) in the patient, which may result in a (possibly fatal) immune response.

[0008] The use of RNA as a gene therapeutic agent or genetic vaccine is substantially safer, because RNA does not involve the risk of being integrated into the genome inducing an undesired pathogenic induction of anti-drug antibodies.

[0009] Thus RNA expression systems have considerable advantages over DNA expression systems in gene therapy and in genetic vaccination although it is known in the prior art or rather assumed for a long time that the instability of mRNA or of RNA in general may be problem in the application of medical methods based on RNA expression systems.

[0010] The instability of RNA is in particular due to RNA-degrading enzymes (ribonucleases-RNases). There are also many further processes which destabilize RNA, wherein interaction between the RNA and proteins often appears to play a crucial role. Some measures for increasing the stability of RNA have been proposed, so enabling the use thereof as a gene therapy agent or RNA vaccine.

[0011] For solving the problem of ex vivo RNA stability the European patent application EP 1 083 232 A1 describes a method for introducing RNA, in particular mRNA, into cells and organisms, in which the RNA forms a complex with a cationic peptide or protein.

[0012] The application of mRNA is known for the treatment and/or prophylaxis of cancer. For example the international patent application WO 03/051401 A2 describes a pharmaceutical composition comprising at least one mRNA, which contains at least one region that codes for an antigen from a tumor, combined with an aqueous solvent and preferably with a cytokine e.g. GM-CSF. The pharmaceutical composition is proposed to be used for therapy and/or prophylaxis against cancer.

[0013] The international patent application WO 2006/008154 A1 discloses an mRNA mixture for vaccinating against tumor diseases, wherein at least one type of mRNA contains at least one tumor antigen-coding region. At least one other mRNA contains at least one type of an immunogenic protein-coding region.

[0014] Nevertheless there is still a need for an effective treatment of tumor diseases and especially for the treatment of cancer. Therefore it is the object of the underlying invention to provide an approach for effective treatment of tumor diseases wherein tumor tissue and cancer cells are specifically destroyed.

[0015] This object is solved by the subject matter of the claims. Particularly, the object underlying the present invention is solved according to a first aspect by an RNA containing composition for use in the treatment or prophylaxis of tumor and/or cancer diseases. According to further aspects of the invention the object is solved by a pharmaceutical composition, by a kit or kit of parts, and by a method of treatment of tumor or cancer diseases.

### DEFINITIONS

[0016] For the sake of clarity and readability the following scientific background information and definitions are provided. Any technical features disclosed thereby can be part of each and every embodiment of the invention. Additional definitions and explanations can be provided in the context of this disclosure.

[0017] Immune system: The immune system may protect organisms from infection. If a pathogen breaks through a physical barrier of an organism and enters this organism, the innate immune system provides an immediate, but non-specific response. If pathogens evade this innate response, vertebrates possess a second layer of protection, the adaptive immune system. Here, the immune system adapts its response during an infection to improve its recognition of the pathogen. This improved response is then retained after the pathogen has been eliminated, in the form of an immunological memory, and allows the adaptive immune system to mount faster and stronger attacks each time this pathogen is encountered. According to this, the immune system comprises the innate and the adaptive immune system. Each of these two parts contains so called humoral and cellular components.

[0018] Immune response: An immune response may typically either be a specific reaction of the adaptive immune system to a particular antigen (so called specific or adaptive immune response) or an unspecific reaction of the innate immune system (so called unspecific or innate immune response).

[0019] Adaptive immune system: The adaptive immune system is composed of highly specialized, systemic cells and processes that eliminate or prevent pathogenic growth. The adaptive immune response provides the vertebrate immune system with the ability to recognize and remember specific pathogens (to generate immunity), and to mount stronger attacks each time the pathogen is encountered. The system is highly adaptable because of somatic hypermutation (a process of increased frequency of somatic mutations), and V(D)J recombination (an irreversible genetic recombination of antigen receptor gene segments). This mechanism allows a small number of genes to generate a vast number of different antigen receptors, which are then uniquely expressed on each individual lymphocyte. Because the gene rearrangement leads to an irreversible change in the DNA of each cell, all of the progeny (offspring) of that cell will then inherit genes encoding the same receptor specificity, including the Memory B cells and Memory T cells that are the keys to long-lived specific immunity. Immune network theory is a theory of how the adaptive immune system works, that is based on interactions between the variable regions of the receptors of T cells, B cells and of molecules made by T cells and B cells that have variable regions.

[0020] Adaptive immune response: The adaptive immune response is typically understood to be antigen-specific. Antigen specificity allows for the generation of responses that are tailored to specific antigens, pathogens or pathogen-infected cells. The ability to mount these tailored responses is maintained in the body by “memory cells”. Should a pathogen infect the body more than once, these specific memory cells are used to quickly eliminate it. In this context, the first step of an adaptive immune response is the activation of naïve antigen-specific T cells or different immune cells able to induce an antigen-specific immune response by antigen-presenting cells. This occurs in the lymphoid tissues and organs through which naïve T cells are constantly passing. Cell types that can serve as antigen-presenting cells are inter alia dendritic cells, macrophages, and B cells. Each of these cells has a distinct function in eliciting immune responses. Dendritic cells take up antigens by phagocytosis and macropinocytosis and are stimulated by contact with e.g. a foreign antigen to migrate to the local lymphoid tissue, where they differentiate into mature dendritic cells. Macrophages ingest particulate antigens such as bacteria and are induced by infectious agents or other appropriate stimuli to express MHC molecules. The unique ability of B cells to bind and internalize soluble protein antigens via their receptors may also be important to induce T cells. Presenting the antigen on MHC molecules leads to activation of T cells which induces their proliferation and differentiation into armed effector T cells. The most important function of effector T cells is the killing of infected cells by CD8+ cytotoxic T cells and the activation of macrophages by Th1 cells which together make up cell-mediated immunity, and the activation of B cells by both Th2 and Th1 cells to produce different classes of antibody, thus driving the humoral immune response. T cells recognize an antigen by their T cell receptors which do not recognize and bind antigen directly, but instead recognize short peptide fragments e.g. of pathogen-derived protein antigens, which are bound to MHC molecules on the surfaces of other cells.

[0021] Cellular immunity/cellular immune response: Cellular immunity relates typically to the activation of macrophages, natural killer cells (NK), antigen-specific cytotoxic T-lymphocytes, and the release of various cytokines in response to an antigen. In a more general way, cellular immunity is not related to antibodies but to the activation of cells of the immune system. A cellular immune response is characterized e.g. by activating antigen-specific cytotoxic T-lymphocytes that are able to induce apoptosis in body cells displaying epitopes of an antigen on their surface, such as virus-infected cells, cells with intracellular bacteria, and cancer cells displaying tumor antigens; activating macrophages and natural killer cells, enabling them to destroy pathogens; and stimulating cells to secrete a variety of cytokines that influence the function of other cells involved in adaptive immune responses and innate immune responses.

[0022] Humoral immunity/humoral immune response: Humoral immunity refers typically to antibody production and the accessory processes that may accompany it. A humoral immune response may be typically characterized, e.g., by Th2 activation and cytokine production, germinal center formation and isotype switching, affinity maturation and memory cell generation. Humoral immunity also typically may refer to the effector functions of antibodies, which include pathogen and toxin neutralization, classical complement activation, and opsonin promotion of phagocytosis and pathogen elimination.

[0023] Innate immune system: The innate immune system, also known as non-specific immune system, comprises the cells and mechanisms that defend the host from infection by other organisms in a non-specific manner. This means that the cells of the innate system recognize and respond to pathogens in a generic way, but unlike the adaptive immune system, it does not confer long-lasting or protective immunity to the host. The innate immune system may be e.g. activated by ligands of pathogen-associated molecular patterns (PAMP) receptors, e.g. Toll-like receptors (TLRs) or other auxiliary substances such as lipopolysaccharides, TNF-alpha, CD40 ligand, or cytokines, monokines, lymphokines, interleukins or chemokines, immunostimulatory nucleic acids, immunostimulatory RNA (isRNA), CpG-DNA, antibacterial agents, or anti-viral agents. Typically a response of the innate immune system includes recruiting immune cells to sites of infection, through the production of chemical factors, including specialized chemical mediators, called cytokines; activation of the complement cascade; identification and removal of foreign substances present in organs, tissues, the blood and lymph, by specialized white blood cells; activation of the adaptive immune system through a process known as antigen presentation; and/or acting as a physical and chemical barrier to infectious agents.

[0024] Adjuvant/adjuvant component: An adjuvant or an adjuvant component in the broadest sense is typically a (e.g. pharmacological or immunological) agent or composition that may modify, e.g. enhance, the efficacy of other agents, such as a drug or vaccine. Conventionally the term refers in the context of the invention to a compound or composition that serves as a carrier or auxiliary substance for immunogens and/or other pharmaceutically active compounds. It is to be interpreted in a broad sense and refers to a broad spectrum of substances that are able to increase the immunogenicity of antigens incorporated into or co-administered with an adjuvant in question. In the context of the present invention an adjuvant will preferably enhance the specific immunogenic effect of the active agents of the present invention. Typically, “adjuvant” or “adjuvant component” has the same meaning and can be used mutually. Adjuvants may be divided, e.g., into immuno potentiators, antigenic delivery systems or even combinations thereof.

[0025] The term “adjuvant” is typically understood not to comprise agents which confer immunity by themselves. An adjuvant assists the immune system unspecifically to enhance the antigen-specific immune response by e.g. promoting presentation of an antigen to the immune system or induction of an unspecific innate immune response. Furthermore, an adjuvant may preferably e.g. modulate the antigen-specific immune response by e.g. shifting the dominating Th2-based antigen specific response to a more Th1-based antigen specific response or vice versa. Accordingly, an adjuvant may favourably modulate cytokine expression/secretion, antigen presentation, type of immune response etc.

[0026] Immunostimulatory/immunostimulating RNA: An immunostimulatory/immunostimulating RNA (isRNA) in the context of the invention may typically be a RNA that is able to induce an innate immune response itself. It usually does not have an open reading frame and thus does not provide a peptide-antigen or immunogen but elicits an innate immune response e.g. by binding to a specific kind of Toll-like-receptor (TLR) or other suitable receptors. Therefore immunostimulatory/immunostimulating RNAs are preferably non-coding RNAs. However, of course also mRNAs having an open reading frame and coding for a peptide/protein (e.g. an antigenic function) may induce an innate immune response.

[0027] Antigen: The term “antigen” refers typically to a substance which may be recognized by the immune system and may be capable of triggering an antigen-specific immune response, e.g. by formation of antibodies or antigen-specific T-cells as part of an adaptive immune response. An antigen may be a protein or peptide. In this context, the first step of an adaptive immune response is the activation of naïve antigen-specific T cells by antigen-presenting cells. This occurs in the lymphoid tissues and organs through which naïve T cells are constantly passing. The three cell types that can serve as antigen-presenting cells are dendritic cells, macrophages, and B cells. Each of these cells has a distinct function in eliciting immune responses. Tissue dendritic cells take up antigens by phagocytosis and macropinocytosis and are stimulated by infection to migrate to the local lymphoid tissue, where they differentiate into mature dendritic cells. Macrophages ingest particulate antigens such as bacteria and are induced by infectious agents to express MHC class II molecules. The unique ability of B cells to bind and internalize soluble protein antigens via their receptors may be important to induce T cells. By presenting the antigen on MHC molecules leads to activation of T cells which induces their proliferation and differentiation into armed effector T cells. The most important function of effector T cells is the killing of infected cells by CD8+ cytotoxic T cells and the activation of macrophages by Th1 cells which together make up cell-mediated immunity, and the activation of B cells by both Th2 and Th1 cells to produce different classes of antibody, thus driving the humoral immune response. T cells recognize an antigen by their T cell receptors which does not recognize and bind antigen directly, but instead recognize short peptide fragments e.g. of pathogens' protein antigens, which are bound to MHC molecules on the surfaces of other cells.

[0028] T cells fall into two major classes that have different effector functions. The two classes are distinguished by the expression of the cell-surface proteins CD4 and CD8. These two types of T cells differ in the class of MHC molecule that they recognize. There are two classes of MHC molecules—MHC class I and MHC class II molecules—which differ in their structure and expression pattern on tissues of the body. CD4+ T cells bind to a MHC class II molecule and CD8+ T cells to a MHC class I molecule. MHC class I and MHC class II molecules have distinct distributions among cells that reflect the different effector functions of the T cells that recognize them. MHC class I molecules present peptides of cytosolic and nuclear origin e.g. from pathogens, commonly viruses, to CD8+ T cells, which differentiate into cytotoxic T cells that are specialized to kill any cell that they specifically recognize. Almost all cells express MHC class I molecules, although the level of constitutive expression varies from one cell type to the next. But not only pathogenic peptides from viruses are presented by MHC class I molecules, also self-antigens like tumor antigens are presented by them. MHC class I molecules bind peptides from proteins degraded in the cytosol and transported in the endoplasmic reticulum. The CD8+ T cells that recognize MHC class I:peptide complexes at the surface of infected cells are specialized to kill any cells displaying foreign peptides and so rid the body of cells infected with viruses and other cytosolic pathogens. The main function of CD4+ T cells (CD4+ helper T cells) that recognize MHC class II molecules is to activate other effector cells of the immune system. Thus MHC class II molecules are normally found on B lymphocytes, dendritic cells, and macrophages, cells that participate in immune responses, but not on other tissue cells. Macrophages, for example, are activated to kill the intravesicular pathogens they harbour, and B cells to secrete immunoglobulins against foreign molecules. MHC class II molecules are prevented from binding to peptides in the endoplasmic reticulum and thus MHC class II molecules bind peptides from proteins which are degraded in endosomes. They can capture peptides from pathogens that have entered the vesicular system of macrophages, or from antigens internalized by immature dendritic cells or the immunoglobulin receptors of B cells. Pathogens that accumulate in large numbers inside macrophage and dendritic cell vesicles tend to stimulate the differentiation of Th1 cells, whereas extracellular antigens tend to stimulate the production of Th2 cells. Th1 cells activate the microbicidal properties of macrophages and induce B cells to make IgG antibodies that are very effective of opsonising extracellular pathogens for ingestion by phagocytic cells, whereas Th2 cells initiate the humoral response by activating naïve B cells to secrete IgM, and induce the production of weakly opsonising antibodies such as IgG1 and IgG3 (mouse) and IgG2 and IgG4 (human) as well as IgA and IgE (mouse and human).

[0029] Epitope (also called “antigen determinant”): T cell epitopes may comprise fragments preferably having a length of about 6 to about 20 or even more amino acids, e.g. fragments as processed and presented by MHC class I molecules, preferably having a length of about 8 to about 10 amino acids, e.g. 8, 9, or 10, (or even 11, or 12 amino acids), or fragments as processed and presented by MHC class II molecules, preferably having a length of about 13 or more amino acids, e.g. 13, 14, 15, 16, 17, 18, 19, 20 or even more amino acids, wherein these fragments may be selected from any part of the amino acid sequence. These fragments are typically recognized by T cells in form of a complex consisting of the peptide fragment and an MHC molecule. B cell epitopes are typically fragments located on the outer surface of (native) protein or peptide antigens.

[0030] Vaccine: A vaccine is typically understood to be a prophylactic or therapeutic material providing at least one antigen or antigenic function. The antigen or antigenic function may stimulate the body's adaptive immune system to provide an adaptive immune response.

[0031] Antigen-providing mRNA: An antigen-providing mRNA may typically be an mRNA, having at least one open reading frame that can be translated by a cell or an organism provided with that mRNA. The product of this translation is a peptide or protein that may act as an antigen, preferably as an immunogen. The product may also be a fusion protein composed of more than one immunogen, e.g. a fusion protein that consist of two or more epitopes, peptides or proteins, wherein the epitopes, peptides or proteins may be linked by linker sequences.

[0032] Bi-/multicistronic mRNA: An bi-/multicistronic mRNA typically may have two (bicistronic) or more (multicistronic) coding sequences (cds) (also often referred to as open reading frames (ORF)). A coding sequence/an open reading frame in this context is a sequence of several nucleotide triplets (codons) that can be translated into a peptide or protein. Translation of such an mRNA yields two (bicistronic) or more (multicistronic) distinct translation products (provided the coding sequences/ORFs are not identical). For expression in eukaryotes such mRNAs may for example comprise an internal ribosomal entry site (IRES) sequence.

[0033] 5′-CAP-Structure: A 5′-CAP is typically a modified nucleotide (CAP analogue), particularly a guanine nucleotide, added to the 5′ end of an mRNA molecule. Preferably, the 5′-CAP is added using a 5′-5′-triphosphate linkage (also named m7GpppN). Further examples of 5′-CAP structures include glyceryl, inverted deoxy abasic residue (moiety), 4′,5′ methylene nucleotide, 1-(beta-D-erythrofuranosyl) nucleotide, 4′-thio nucleotide, carbocyclic nucleotide, 1,5-anhydrohexitol nucleotide, L-nucleotides, alpha-nucleotide, modified base nucleotide, threo-pentofuranosyl nucleotide, acyclic 3′,4′-seco nucleotide, acyclic 3,4-dihydroxybutyl nucleotide, acyclic 3,5 dihydroxypentyl nucleotide, 3′-3′-inverted nucleotide moiety, 3′-3′-inverted abasic moiety, 3′-2′-inverted nucleotide moiety, 3′-2′-inverted abasic moiety, 1,4-butanediol phosphate, 3′-phosphoramidate, hexylphosphate, aminohexyl phosphate, 3′-phosphate, 3′phosphorothioate, phosphorodithioate, or bridging or non-bridging methylphosphonate moiety. These modified 5′-CAP structures may be used in the context of the present invention to modify the mRNA sequence of the inventive composition. Further modified 5′-CAP structures which may be used in the context of the present invention are CAP1 (additional methylation of the ribose of the adjacent nucleotide of m7GpppN), CAP2 (additional methylation of the ribose of the 2^{nd} nucleotide downstream of the m7GpppN), CAP3 (additional methylation of the ribose of the 3^{rd} nucleotide downstream of the m7GpppN), CAP4 (additional methylation of the ribose of the 4^{th} nucleotide downstream of the m7GpppN), ARCA (anti-reverse CAP analogue), modified ARCA (e.g. phosphothioate modified ARCA), inosine, N1-methyl-guanosine, 2′-fluoro-guanosine, 7-deaza-guanosine, 8-oxo-guanosine, 2-amino-guanosine, LNA-guanosine, and 2-azido-guanosine.

[0034] In the context of the present invention, a 5′ cap structure may also be formed in chemical RNA synthesis or RNA in vitro transcription (co-transcriptional capping) using cap analogues, or a cap structure may be formed in vitro using capping enzymes (e.g., commercially available capping kits)

[0035] Cap analogue: A cap analogue refers to a non-polymerizable di-nucleotide that has cap functionality in that it facilitates translation or localization, and/or prevents degradation of the RNA molecule when incorporated at the 5′ end of the RNA molecule. Non-polymerizable means that the cap analogue will be incorporated only at the 5′terminus because it does not have a 5′ triphosphate and therefore cannot be extended in the 3′ direction by a template-dependent RNA polymerase.

[0036] Cap analogues include, but are not limited to, a chemical structure selected from the group consisting of m7GpppG, m7GpppA, m7GpppC; unmethylated cap analogues (e.g., GpppG); dimethylated cap analogue (e.g., m2,7GpppG), trimethylated cap analogue (e.g., m2,2,7GpppG), dimethylated symmetrical cap analogues (e.g., m7Gpppm7G), or anti reverse cap analogues (e.g., ARCA; m7,2′OmeGpppG, m7,2′dGpppG, m7,3′OmeGpppG, m7,3′dGpppG and their tetraphosphate derivatives) (Stepinski et al., 2001. RNA 7(10):1486-95).

[0037] Further cap analogues have been described previously (U.S. Pat. No. 7,074,596, WO 2008/016473, WO 2008/157688, WO 2009/149253, WO 2011/015347, and WO 2013/059475). The synthesis of N⁷-(4-chlorophenoxyethyl) substituted dinucleotide cap analogues has been described recently (Kore et al. (2013) Bioorg. Med. Chem. 21(15): 4570-4).

[0038] Fragments of proteins: “Fragments” of proteins or peptides in the context of the present invention may, typically, comprise a sequence of a protein or peptide as defined herein, which is, with regard to its amino acid sequence (or its encoded nucleic acid molecule), N-terminally and/or C-terminally truncated compared to the amino acid sequence of the original (native) protein (or its encoded nucleic acid molecule). Such truncation may thus occur either on the amino acid level or correspondingly on the nucleic acid level. A sequence identity with respect to such a fragment as defined herein may therefore preferably refer to the entire protein or peptide as defined herein or to the entire (coding) nucleic acid molecule of such a protein or peptide. In the context of antigens such fragment may have a length of about 6 to about 20 or even more amino acids, e.g. fragments as processed and presented by MHC class I molecules, preferably having a length of about 8 to about 10 amino acids, e.g. 8, 9, or 10, (or even 6, 7, 11, or 12 amino acids), or fragments as processed and presented by MHC class II molecules, preferably having a length of about 13 or more amino acids, e.g. 13, 14, 15, 16, 17, 18, 19, 20 or even more amino acids, wherein these fragments may be selected from any part of the amino acid sequence. These fragments are typically recognized by T-cells in form of a complex consisting of the peptide fragment and an MHC molecule, i.e. the fragments are typically not recognized in their native form. Fragments of proteins or peptides (e.g. in the context of antigens) may comprise at least one epitope of those proteins or peptides. Furthermore also domains of a protein, like the extracellular domain, the intracellular domain or the transmembrane domain and shortened or truncated versions of a protein may be understood to comprise a fragment of a protein. Preferably, a fragment of a protein comprises a functional fragment of the protein, which means that the fragment exerts the same effect or functionality as the whole protein it is derived from.

[0039] Variants of proteins: “Variants” of proteins or peptides as defined in the context of the present invention may be generated, having an amino acid sequence which differs from the original sequence in one or more mutation(s), such as one or more substituted, inserted and/or deleted amino acid(s). Preferably, these fragments and/or variants have the same biological function or specific activity compared to the full-length native protein, e.g. its specific antigenic property. “Variants” of proteins or peptides as defined in the context of the present invention may comprise conservative amino acid substitution(s) compared to their native, i.e. non-mutated physiological, sequence. Those amino acid sequences as well as their encoding nucleotide sequences in particular fall under the term variants as defined herein. Substitutions in which amino acids, which originate from the same class, are exchanged for one another are called conservative substitutions. In particular, these are amino acids having aliphatic side chains, positively or negatively charged side chains, aromatic groups in the side chains or amino acids, the side chains of which can enter into hydrogen bridges, e.g. side chains which have a hydroxyl function. This means that e.g. an amino acid having a polar side chain is replaced by another amino acid having a likewise polar side chain, or, for example, an amino acid characterized by a hydrophobic side chain is substituted by another amino acid having a likewise hydrophobic side chain (e.g. serine (threonine) by threonine (serine) or leucine (isoleucine) by isoleucine (leucine)). Insertions and substitutions are possible, in particular, at those sequence positions which cause no modification to the three-dimensional structure or do not affect the binding region. Modifications to a three-dimensional structure by insertion(s) or deletion(s) can easily be determined e.g. using CD spectra (circular dichroism spectra) (Urry, 1985, Absorption, Circular Dichroism and ORD of Polypeptides, in: Modern Physical Methods in Biochemistry, Neuberger et al. (ed.), Elsevier, Amsterdam).

[0040] A “variant” of a protein or peptide may have at least 70%, 75%, 80%, 85%, 90%, 95%, 98% or 99% amino acid identity over a stretch of 10, 20, 30, 50, 75 or 100 amino acids of such protein or peptide. Furthermore, variants of proteins or peptides as defined herein, which may be encoded by a nucleic acid molecule, may also comprise those sequences, wherein nucleotides of the encoding nucleic acid sequence are exchanged according to the degeneration of the genetic code, without leading to an alteration of the respective amino acid sequence of the protein or peptide, i.e. the amino acid sequence or at least part thereof may not differ from the original sequence within the above meaning. Preferably, a variant of a protein comprises a functional variant of the protein, which means that the variant exerts the same effect or functionality as the protein it is derived from.

[0041] Identity of a sequence: In order to determine the percentage to which two sequences are identical, e.g. nucleic acid sequences or amino acid sequences as defined herein, preferably the amino acid sequences encoded by a nucleic acid sequence of the polymeric carrier as defined herein or the amino acid sequences themselves, the sequences can be aligned in order to be subsequently compared to one another. Therefore, e.g. a position of a first sequence may be compared with the corresponding position of the second sequence. If a position in the first sequence is occupied by the same component (residue) as is the case at a position in the second sequence, the two sequences are identical at this position. If this is not the case, the sequences differ at this position. If insertions occur in the second sequence in comparison to the first sequence, gaps can be inserted into the first sequence to allow a further alignment. If deletions occur in the second sequence in comparison to the first sequence, gaps can be inserted into the second sequence to allow a further alignment. The percentage to which two sequences are identical is then a function of the number of identical positions divided by the total number of positions including those positions which are only occupied in one sequence. The percentage to which two sequences are identical can be determined using a mathematical algorithm. A preferred, but not limiting, example of a mathematical algorithm which can be used is the algorithm of Karlin et al. (1993), PNAS USA, 90:5873-5877 or Altschul et al. (1997), Nucleic Acids Res., 25:3389-3402. Such an algorithm is integrated in the BLAST program. Sequences which are identical to the sequences of the present invention to a certain extent can be identified by this program.

[0042] Monocistronic mRNA: A monocistronic mRNA may typically be an mRNA, that comprises only one coding sequence (open reading frame). A coding sequence/open reading frame in this context is a sequence of several nucleotide triplets (codons) that can be translated into a peptide or protein.

[0043] Nucleic acid: The term nucleic acid means any DNA or RNA molecule and is used synonymous with polynucleotide. Wherever herein reference is made to a nucleic acid or nucleic acid sequence encoding a particular protein and/or peptide, said nucleic acid or nucleic acid sequence, respectively, preferably also comprises regulatory sequences allowing in a suitable host, e.g. a human being, its expression, i.e. transcription and/or translation of the nucleic acid sequence encoding the particular protein or peptide.

[0044] Peptide: A peptide is a polymer of amino acid monomers. Usually the monomers are linked by peptide bonds. The term “peptide” does not limit the length of the polymer chain of amino acids. In some embodiments of the present invention a peptide may for example contain less than 50 monomer units. Longer peptides are also called polypeptides, typically having 50 to 600 monomeric units, more specifically 50 to 300 monomeric units.

[0045] Pharmaceutically effective amount: A pharmaceutically effective amount in the context of the invention is typically understood to be an amount that is sufficient to induce an immune response or to trigger the desired therapeutical effect.

[0046] Protein: A protein typically consists of one or more peptides and/or polypeptides folded into 3-dimensional form, facilitating a biological function.

[0047] Poly(C) sequence: A poly(C) sequence is typically a long sequence of cytosine nucleotides, typically about 10 to about 200 cytosine nucleotides, preferably about 10 to about 100 cytosine nucleotides, more preferably about 10 to about 70 cytosine nucleotides or even more, preferably about 20 to about 50, or even about 20 to about 30 cytosine nucleotides. A poly(C) sequence may preferably be located 3′ of the coding region comprised by a nucleic acid.

[0048] Poly(A) tail: A poly(A) tail also called “3′-poly(A) tail” or “Poly(A) sequence” is typically a long homopolymeric sequence of adenosine nucleotides of up to about 400 adenosine nucleotides, e.g. from about 25 to about 400, preferably from about 50 to about 400, more preferably from about 50 to about 300, even more preferably from about 50 to about 250, most preferably from about 60 to about 250 adenosine nucleotides, added to the 3′ end of an mRNA. In the context of the present invention, the poly(A) tail of an mRNA is preferably derived from a DNA template by RNA in vitro transcription. Alternatively, the poly(A) sequence may also be obtained in vitro by common methods of chemical synthesis without being necessarily transcribed from a DNA-progenitor. Moreover, poly(A) sequences, or poly(A) tails may be generated by enzymatic polyadenylation of the RNA.

[0049] Stabilized nucleic acid: A stabilized nucleic acid, typically, exhibits a modification increasing resistance to in vivo degradation (e.g. degradation by an exo- or endo-nuclease) and/or ex vivo degradation (e.g. by the manufacturing process prior to vaccine administration, e.g. in the course of the preparation of the vaccine solution to be administered). Stabilization of RNA can, e.g., be achieved by providing a 5′-CAP-Structure, a poly(A) tail, or any other UTR-modification. It can also be achieved by backbone-modification or modification of the G/C-content or the C-content of the nucleic acid. Various other methods are known in the art and conceivable in the context of the invention.

[0050] Carrier/polymeric carrier: A carrier in the context of the invention may typically be a compound that facilitates transport and/or complexation of another compound. Said carrier may form a complex with said other compound. A polymeric carrier is a carrier that is formed of a polymer.

[0051] Cationic component: The term “cationic component” typically refers to a charged molecule, which is positively charged (cation) at a pH value of typically about 1 to 9, preferably of a pH value of or below 9 (e.g. 5 to 9), of or below 8 (e.g. 5 to 8), of or below 7 (e.g. 5 to 7), most preferably at physiological pH values, e.g. about 7.3 to 7.4. Accordingly, a cationic peptide, protein or polymer according to the present invention is positively charged under physiological conditions, particularly under physiological salt conditions of the cell in vivo. A cationic peptide or protein preferably contains a larger number of cationic amino acids, e.g. a larger number of Arg, His, Lys or Orn than other amino acid residues (in particular more cationic amino acids than anionic amino acid residues like Asp or Glu) or contains blocks predominantly formed by cationic amino acid residues. The definition “cationic” may also refer to “polycationic” components.

[0052] Vehicle: A vehicle is an agent, e.g. a carrier, that may typically be used within a pharmaceutical composition or vaccine for facilitating administering of the components of the pharmaceutical composition or vaccine to an individual. 3′-untranslated region (3′-UTR): A 3′-UTR is typically the part of an mRNA which is located between the protein coding region (i.e. the open reading frame) and the poly(A) sequence of the mRNA. A 3′-UTR of the mRNA is not translated into an amino acid sequence. The 3′-UTR sequence is generally encoded by the gene which is transcribed into the respective mRNA during the gene expression process. The genomic sequence is first transcribed into pre-mature mRNA, which comprises optional introns. The pre-mature mRNA is then further processed into mature mRNA in a maturation process. This maturation process comprises the steps of 5′-capping, splicing the pre-mature mRNA to excise optional introns and modifications of the 3′-end, such as polyadenylation of the 3′-end of the pre-mature mRNA and optional endo- or exonuclease cleavages etc. In the context of the present invention, a 3′-UTR corresponds to the sequence of a mature mRNA which is located 3′ to the stop codon of the protein coding region, preferably immediately 3′ to the stop codon of the protein coding region, and which extends to the 5′-side of the poly(A) sequence, preferably to the nucleotide immediately 5′ to the poly(A) sequence. The term “corresponds to” means that the 3′-UTR sequence may be an RNA sequence, such as in the mRNA sequence used for defining the 3′-UTR sequence, or a DNA sequence which corresponds to such RNA sequence. In the context of the present invention, the term “a 3′-UTR of a gene”, such as “a 3′-UTR of an albumin gene”, is the sequence which corresponds to the 3′-UTR of the mature mRNA derived from this gene, i.e. the mRNA obtained by transcription of the gene and maturation of the pre-mature mRNA. The term “3′-UTR of a gene” encompasses the DNA sequence and the RNA sequence of the 3′-UTR.

[0053] 5′-untranslated region (5′-UTR): A 5′-UTR is typically understood to be a particular section of messenger RNA (mRNA). It is located 5′ of the open reading frame of the mRNA. Typically, the 5′-UTR starts with the transcriptional start site and ends one nucleotide before the start codon of the open reading frame. The 5′-UTR may comprise elements for controlling gene expression, also called regulatory elements. Such regulatory elements may be, for example, ribosomal binding sites or a 5′-Terminal Oligopyrimidine Tract. The 5′-UTR may be posttranscriptionally modified, for example by addition of a 5′-CAP. In the context of the present invention, a 5′UTR corresponds to the sequence of a mature mRNA which is located between the 5′-CAP and the start codon. Preferably, the 5′-UTR corresponds to the sequence which extends from a nucleotide located 3′ to the 5′-CAP, preferably from the nucleotide located immediately 3′ to the 5′-CAP, to a nucleotide located 5′ to the start codon of the protein coding region, preferably to the nucleotide located immediately 5′ to the start codon of the protein coding region. The nucleotide located immediately 3′ to the 5′-CAP of a mature mRNA typically corresponds to the transcriptional start site. The term “corresponds to” means that the 5′-UTR sequence may be an RNA sequence, such as in the mRNA sequence used for defining the 5′-UTR sequence, or a DNA sequence which corresponds to such RNA sequence. In the context of the present invention, the term “a 5′-UTR of a gene”, such as “a 5′-UTR of a TOP gene”, is the sequence which corresponds to the 5′-UTR of the mature mRNA derived from this gene, i.e. the mRNA obtained by transcription of the gene and maturation of the pre-mature mRNA. The term “5′-UTR of a gene” encompasses the DNA sequence and the RNA sequence of the 5′-UTR.

[0054] 5′ Terminal Oligopyrimidine Tract (TOP): The 5′ terminal oligopyrimidine tract (TOP) is typically a stretch of pyrimidine nucleotides located at the 5′ terminal region of a nucleic acid molecule, such as the 5′ terminal region of certain mRNA molecules or the 5′ terminal region of a functional entity, e.g. the transcribed region, of certain genes. The sequence starts with a cytidine, which usually corresponds to the transcriptional start site, and is followed by a stretch of usually about 3 to 30 pyrimidine nucleotides. For example, the TOP may comprise 3, 4, 5, 6, 7, 8, 9, 10, 11, 12, 13, 14, 15, 16, 17, 18, 19, 20, 21, 22, 23, 24, 25, 26, 27, 28, 29, 30 or even more nucleotides. The pyrimidine stretch and thus the 5′ TOP ends one nucleotide 5′ to the first purine nucleotide located downstream of the TOP. mRNA that contains a 5′ terminal oligopyrimidine tract is often referred to as TOP mRNA. Accordingly, genes that provide such messenger RNAs are referred to as TOP genes. TOP sequences have, for example, been found in genes and mRNAs encoding peptide elongation factors and ribosomal proteins.

[0055] TOP motif: In the context of the present invention, a TOP motif is a nucleic acid sequence which corresponds to a 5′ TOP as defined above. Thus, a TOP motif in the context of the present invention is preferably a stretch of pyrimidine nucleotides having a length of 3-30 nucleotides. Preferably, the TOP-motif consists of at least 3 pyrimidine nucleotides, preferably at least 4 pyrimidine nucleotides, preferably at least 5 pyrimidine nucleotides, more preferably at least 6 nucleotides, more preferably at least 7 nucleotides, most preferably at least 8 pyrimidine nucleotides, wherein the stretch of pyrimidine nucleotides preferably starts at its 5′ end with a cytosine nucleotide. In TOP genes and TOP mRNAs, the TOP-motif preferably starts at its 5′ end with the transcriptional start site and ends one nucleotide 5′ to the first purine residue in said gene or mRNA. A TOP motif in the sense of the present invention is preferably located at the 5′end of a sequence which represents a 5′-UTR or at the 5′ end of a sequence which codes for a 5′-UTR. Thus, preferably, a stretch of 3 or more pyrimidine nucleotides is called “TOP motif” in the sense of the present invention if this stretch is located at the 5′ end of a respective sequence, such as the inventive mRNA, the 5′-UTR element of the inventive mRNA, or the nucleic acid sequence which is derived from the 5′-UTR of a TOP gene as described herein. In other words, a stretch of 3 or more pyrimidine nucleotides which is not located at the 5′-end of a 5′-UTR or a 5′-UTR element but anywhere within a 5′-UTR or a 5′-UTR element is preferably not referred to as “TOP motif”.

[0056] TOP gene: TOP genes are typically characterised by the presence of a 5′ terminal oligopyrimidine tract. Furthermore, most TOP genes are characterized by a growth-associated translational regulation. However, also TOP genes with a tissue specific translational regulation are known. As defined above, the 5′-UTR of a TOP gene corresponds to the sequence of a 5′-UTR of a mature mRNA derived from a TOP gene, which preferably extends from the nucleotide located 3′ to the 5′-CAP to the nucleotide located 5′ to the start codon. A 5′-UTR of a TOP gene typically does not comprise any start codons, preferably no upstream AUGs (uAUGs) or upstream open reading frames (uORFs). Therein, upstream AUGs and upstream open reading frames are typically understood to be AUGs and open reading frames that occur 5′ of the start codon (AUG) of the open reading frame that should be translated. The 5′-UTRs of TOP genes are generally rather short. The lengths of 5′-UTRs of TOP genes may vary between 20 nucleotides up to 500 nucleotides, and are typically less than about 200 nucleotides, preferably less than about 150 nucleotides, more preferably less than about 100 nucleotides. Exemplary 5′-UTRs of TOP genes in the sense of the present invention are the nucleic acid sequences extending from the nucleotide at position 5 to the nucleotide located immediately 5′ to the start codon (e.g. the ATG) in the sequences according to SEQ ID Nos. 1-1363, SEQ ID NO. 1395, SEQ ID NO. 1421 and SEQ ID NO. 1422 of the international patent application WO2013/143700 or homologs or variants thereof, whose disclosure is incorporated herewith by reference. In this context a particularly preferred fragment of a 5′UTR of a TOP gene is a 5′-UTR of a TOP gene lacking the 5′ TOP motif. The term ‘5′UTR of a TOP gene’ preferably refers to the 5′-UTR of a naturally occurring TOP gene.

[0057] Chemical synthesis of RNA: Chemical synthesis of relatively short fragments of oligonucleotides with defined chemical structure provides a rapid and inexpensive access to custom-made oligonucleotides of any desired sequence. Whereas enzymes synthesize DNA and RNA only in the 5′ to 3′ direction, chemical oligonucleotide synthesis does not have this limitation, although it is most often carried out in the opposite, i.e. the 3′ to 5′ direction. Currently, the process is implemented as solid-phase synthesis using the phosphoramidite method and phosphoramidite building blocks derived from protected nucleosides (A, C, G, and U), or chemically modified nucleosides.

[0058] To obtain the desired oligonucleotide, the building blocks are sequentially coupled to the growing oligonucleotide chain on a solid phase in the order required by the sequence of the product in a fully automated process. Upon the completion of the chain assembly, the product is released from the solid phase to the solution, deprotected, and collected. The occurrence of side reactions sets practical limits for the length of synthetic oligonucleotides (up to about 200 nucleotide residues), because the number of errors increases with the length of the oligonucleotide being synthesized. Products are often isolated by HPLC to obtain the desired oligonucleotides in high purity.

[0059] Chemically synthesized oligonucleotides find a variety of applications in molecular biology and medicine. They are most commonly used as antisense oligonucleotides, small interfering RNA, primers for DNA sequencing and amplification, probes for detecting complementary DNA or RNA via molecular hybridization, tools for the targeted introduction of mutations and restriction sites, and for the synthesis of artificial genes.

[0060] RNA In vitro transcription: The terms “RNA in vitro transcription” or “in vitro transcription” relate to a process wherein RNA is synthesized in a cell-free system (in vitro). DNA, particularly plasmid DNA, is used as template for the generation of RNA transcripts. RNA may be obtained by DNA-dependent in vitro transcription of an appropriate DNA template, which according to the present invention is preferably a linearized plasmid DNA template. The promoter for controlling in vitro transcription can be any promoter for any DNA-dependent RNA polymerase. Particular examples of DNA-dependent RNA polymerases are the T7, T3, and SP6 RNA polymerases. A DNA template for in vitro RNA transcription may be obtained by cloning of a nucleic acid, in particular cDNA corresponding to the respective RNA to be in vitro transcribed, and introducing it into an appropriate vector for in vitro transcription, for example into plasmid DNA. In a preferred embodiment of the present invention the DNA template is linearized with a suitable restriction enzyme, before it is transcribed in vitro. The cDNA may be obtained by reverse transcription of mRNA or chemical synthesis. Moreover, the DNA template for in vitro RNA synthesis may also be obtained by gene synthesis.

[0061] Methods for in vitro transcription are known in the art (see, e.g., Geall et al. (2013) Semin. Immunol. 25(2): 152-159; Brunelle et al. (2013) Methods Enzymol. 530:101-14). Reagents used in said method typically include:

[0062] 1) a linearized DNA template with a promoter sequence that has a high binding affinity for its respective RNA polymerase such as bacteriophage-encoded RNA polymerases;

[0063] 2) ribonucleoside triphosphates (NTPs) for the four bases (adenine, cytosine, guanine and uracil);

[0064] 3) optionally a cap analogue as defined above (e.g. m7G(5′)ppp(5′)G (m7G));

[0065] 4) a DNA-dependent RNA polymerase capable of binding to the promoter sequence within the linearized DNA template (e.g. T7, T3 or SP6 RNA polymerase);

[0066] 5) optionally a ribonuclease (RNase) inhibitor to inactivate any contaminating RNase;

[0067] 6) optionally a pyrophosphatase to degrade pyrophosphate, which may inhibit transcription;

[0068] 7) MgCl₂, which supplies Mg²⁺ ions as a co-factor for the polymerase;

[0069] 8) a buffer to maintain a suitable pH value, which can also contain antioxidants (e.g. DTT), and/or polyamines such as spermidine at optimal concentrations.

[0070] RNA, mRNA: RNA is the usual abbreviation for ribonucleic acid. It is a nucleic acid molecule, i.e. a polymer consisting of nucleotide monomers. These nucleotides are usually adenosine monophosphate (AMP), uridine monophosphate (UMP), guanosine monophosphate (GMP) and cytidine monophosphate (CMP) monomers or analogues thereof, which are connected to each other along a so-called backbone. The backbone is formed by phosphodiester bonds between the sugar, i.e. ribose, of a first and a phosphate moiety of a second, adjacent monomer. The specific order of the monomers, i.e. the order of the bases linked to the sugar/phosphate-backbone, is called the RNA sequence. Usually RNA may be obtainable by transcription of a DNA sequence, e.g., inside a cell. In eukaryotic cells, transcription is typically performed inside the nucleus or the mitochondria. In vivo, transcription of DNA usually results in the so-called premature RNA (also called pre-mRNA, precursor mRNA or heterogeneous nuclear RNA) which has to be processed into so-called messenger RNA, usually abbreviated as mRNA. Processing of the premature RNA, e.g. in eukaryotic organisms, comprises a variety of different posttranscriptional modifications such as splicing, 5′-capping, polyadenylation, export from the nucleus or the mitochondria and the like. The sum of these processes is also called maturation of RNA. The mature messenger RNA usually provides the nucleotide sequence that may be translated into an amino acid sequence of a particular peptide or protein. Typically, a mature mRNA comprises a 5′-cap, optionally a 5′UTR, an open reading frame, optionally a 3′UTR and a poly(A) tail.

[0071] In addition to messenger RNA, several non-coding types of RNA exist which may be involved in regulation of transcription and/or translation, and immunostimulation. Within the present invention the term “RNA” further encompasses any type of single stranded (ssRNA) or double stranded RNA (d5RNA) molecule known in the art, such as viral RNA, retroviral RNA and replicon RNA, small interfering RNA (siRNA), antisense RNA (asRNA), circular RNA (circRNA), ribozymes, aptamers, riboswitches, immunostimulating/immunostimulatory RNA, transfer RNA (tRNA), ribosomal RNA (rRNA), small nuclear RNA (snRNA), small nucleolar RNA (snoRNA), microRNA (miRNA), and Piwi-interacting RNA (piRNA).

[0072] Fragment of a nucleic acid sequence, particularly an RNA: A fragment of a nucleic acid sequence consists of a continuous stretch of nucleotides corresponding to a continuous stretch of nucleotides in the full-length nucleic acid sequence which is the basis for the nucleic acid sequence of the fragment, which represents at least 20%, preferably at least 30%, more preferably at least 40%, more preferably at least 50%, even more preferably at least 60%, even more preferably at least 70%, even more preferably at least 80%, and most preferably at least 90% of the full-length nucleic acid sequence. Such a fragment, in the sense of the present invention, is preferably a functional fragment of the full-length nucleic acid sequence.

[0073] Variant of a nucleic acid sequence, particularly anRNA: A variant of a nucleic acid sequence refers to a variant of nucleic acid sequences which forms the basis of a nucleic acid sequence. For example, a variant nucleic acid sequence may exhibit one or more nucleotide deletions, insertions, additions and/or substitutions compared to the nucleic acid sequence from which the variant is derived. Preferably, a variant of a nucleic acid sequence is at least 40%, preferably at least 50%, more preferably at least 60%, more preferably at least 70%, even more preferably at least 80%, even more preferably at least 90%, most preferably at least 95% identical to the nucleic acid sequence the variant is derived from. Preferably, the variant is a functional variant. A “variant” of a nucleic acid sequence may have at least 70%, 75%, 80%, 85%, 90%, 95%, 98% or 99% nucleotide identity over a stretch of 10, 20, 30, 50, 75 or 100 nucleotide of such nucleic acid sequence.

[0074] Intratumoral administration/application: The term “intratumoral administration/application” refers to the direct delivery of a pharmaceutical composition into or adjacent to a tumor or cancer and/or immediate vicinity of a tumor or cancer. Multiple injections into separate regions of the tumor or cancer are also included. Furthermore, intratumoral administration/application includes delivery of a pharmaceutical composition into one or more metastases.

[0075] Methods for intratumoral delivery of drugs are known in the art (Brincker, 1993. Crit. Rev. Oncol. Hematol. 15(2):91-8; Celikoglu et al., 2008. Cancer Therapy 6, 545-552). For example, the pharmaceutical composition can be administered by conventional needle injection, needle-free jet injection or electroporation or combinations thereof into the tumor or cancer tissue. The pharmaceutical composition can be injected directly into the tumor or cancer (tissue) with great precision using computer tomograpy, ultrasound, gamma camera imaging, positron emission tomography, or magnetic resonance tumor imaging. Further procedures are selected from the group including, but not limited to, direct intratumoral injection by endoscopy, bronchoscopy, cystoscopy, colonoscopy, laparoscope and catheterization.

[0076] Decoy receptors: Decoy receptors recognize certain growth factors or cytokines with high affinity and specificity, but are structurally incapable of signaling or presenting the agonist to signaling receptor complexes. They act as a molecular trap for the agonist and for signaling receptor components. A decoy receptor, or sink receptor, is a receptor that binds a ligand, inhibiting it from binding to its normal receptor. For instance, the receptor VEGFR-1 can prevent vascular endothelial growth factor (VEGF) from binding to the VEGFR-2.

[0077] Dominant negative receptors: Dominant negative receptors are variants of the particular receptor comprising dominant-negative (DN) mutations as leading to mutant polypeptides that disrupt the activity of the wild-type receptor when overexpressed.

### DETAILED DESCRIPTION OF THE INVENTION

[0078] The RNA containing composition according to the invention comprises at least one RNA and is particularly provided for use in the treatment or prophylaxis of tumor and/or cancer diseases, wherein the RNA containing composition is preferably applied/administered intratumorally. It is especially preferred that the RNA containing composition is injected directly into tumor tissue. Alternatively, it is especially preferred that the RNA containing composition is injected adjacent to or in close proximity to a tumor tissue and/or metastasis.

[0079] It has been found by the inventors that intratumoral application respectively administration of the RNA containing composition according to the invention is capable of effectively treating tumor and/or cancer diseases and related disorders. It has been shown that intratumoral application is surprisingly effective in decreasing tumor size. Moreover the application of the RNA containing composition according to the invention was able to increase survival in animal models.

[0080] The at least one RNA of the RNA containing composition may be selected from the group consisting of chemically modified or unmodified RNA, single-stranded or double-stranded RNA, coding or non-coding RNA, mRNA, oligoribonucleotide, viral RNA, retroviral RNA, replicon RNA, tRNA, rRNA, immunostimulatory RNA, microRNA, siRNA, small nuclear RNA (snRNA), small-hairpin (sh) RNA riboswitch, RNA aptamer, RNA decoy, antisense RNA, a ribozyme, or any combination thereof. In specific embodiments the at least one RNA of the RNA containing composition is selected from a coding RNA or a non-coding RNA.

[0081] Coding RNA:

[0082] According to a preferred embodiment of the invention the at least one RNA of the RNA containing composition comprises at least one coding region encoding at least one peptide or protein. Preferably, the coding RNA is selected from the group consisting of mRNA, viral RNA, retroviral RNA, and replicon RNA.

[0083] In preferred embodiments of the invention the at least one RNA of the RNA containing composition codes for at least one cytokine and/or for at least one chemokine and/or for at least one suicide gene product, and/or at least one immunogenic protein or peptide and/or for at least one cell death/apoptosis inducer and/or for at least one angiogenesis inhibitor and/or for at least one heat shock protein and/or for at least one tumor antigen and/or for at least one β-catenin inhibitor and/or for at least one activator of the STING (stimulator of interferon genes) pathway and/or at least one checkpoint modulator and/or at least one antibody, and/or at least one dominant negative receptor, and/or at least one decoy receptor, and/or at least one inhibitor of myeloid derived suppressor cells (MDSCs), and/or at least one IDO pathway inhibitor, and/or at least one protein or peptide that bind inhibitors of apoptosis, or fragments or variants thereof as will be outlined in more detail below.

[0084] 1. Cytokines

[0085] In a preferred embodiment of the inventive RNA containing composition the RNA comprises at least one coding region that codes for at least one cytokine, or a fragment or variant thereof.

[0086] Preferably the cytokine is an interleukin (IL). One or more interleukins may be chosen e.g. from the following list: IL-1α, IL-1β, IL-1ra (antagonist), IL-2, IL-3, IL-4, IL-5, IL-6, IL-7, IL-8, IL-9, IL-10; IL-11, IL-12, IL-13, IL14, IL-15, IL-16, IL-17A, IL-17B, EL-17C, IL-17D, IL-17E, IL-17F, IL-18, IL-19, IL-20, IL-21, IL-22, IL-23, IL-24, IL-25, IL-26, IL-27, IL-28A/B, IL-29, IL-30, IL-31, IL-32, IL-33, IL-35. Moreover the cytokine may be one or more cytokines chosen from the TNF family, e.g. chosen from the following list: TNF, especially TNFα, LTα, LTβ, LIGHT, TWEAK, APRIL, BAFF, TL1A, GITRL, OX40L, CD40L (CD154), FASL, CD27L, CD30L, 4-1BBL, TRAIL, RANK ligand. Further examples of preferred cytokines may be chosen from the following list: FLT3 ligand, G-CSF, GM-CSF, IFNα/β/ω, IFNγ, LIF, M-CSF, MIF, OSM, Stem Cell Factor, TGFβ1, TGFβ2, TGFβ3, TSLP ligand.

[0087] Particularly preferred are cytokines chosen from the following list: IL-12, IL-15, IL-2, IFNγ, TNFα, IL-18, IFNα, IL-1β, IL-32, IL-7, IL-21, IL-8, GM-CSF.

[0088] In an especially preferred embodiment of the invention the RNA of the inventive composition codes for Interleukin-12 or CD40L. It has been shown by the inventors, that mRNA coding for this cytokines is especially effective when applied in the inventive approach. Particularly preferred are RNA sequences according to SEQ ID Nos. 1, 3, 4194, 4195, 4196, 4197, 4198, 4199, 4200 encoding IL-12. Furthermore RNA sequences according to SEQ ID Nos. 3898, 3899, 3900, 3901, 3902, 3903, 3904, 10073, encoding CD40L are particularly preferred.

[0089] According to preferred embodiments in the context of the present invention cytokines may be selected from any cytokine selected from the group consisting of 4-1BBL; Apo2L/TRAIL; APRIL; BAFF; CD27L; CD30L; CD40L_(CD154); CXCL8; EL-17C; FasL; FLT3_ligand; G-CSF; GITRL; GM-CSF; IFNalpha; IFNB; IFNG; IFNomega; IL-1_alpha; IL-1_beta; IL-10; IL-11; IL-12; IL-12A; IL-13; IL-14; IL-15; IL-16; IL-17A; IL-17B; IL-17D; IL-17F; IL-18; IL-19; IL-1ra_(antagonist); IL-2; IL-20; IL-21; IL-22; IL-23; IL-24; IL-25; IL-26; IL-27A; IL-27B; IL-28A; IL-28B; IL-29; IL-3; IL-31; IL-32; IL-33; IL-37; IL-4; IL-5; IL-6; IL-7; IL-9; LIF; LIGHT; LTalpha; LTbeta; M-CSF; MIF; OSM; OX40L; RANK_ligand; Stem_Cell_Factor; TGFbeta1; TGFbeta2; TGFbeta3; TL1A; TNF; TWEAK, preferably as disclosed in Table 1. Particularly preferred in this context are the RNA sequences encoding a cytokine according to Table 1.

TABLE 1
Cytokines:

| | | | RNA | |
|---|---|---|---|---|
| | | Protein | Sequence | |
| | | Sequence | wild type | Optimized |
| | | SEQ ID | SEQ ID | RNA Sequence |
| Gene Name | Protein Accession No. | NO: | NO: | SEQ ID NO: |
| 4-1BBL | UniProtKB: P41273 | 3849 | 3850 | 3851, 3852, 3853, |
| | | | | 3854, 3855, 3856 |
| APRIL | UniProtKB: O75888 | 3857 | 3858 | 3859, 3860, 3861, |
| | | | | 3862, 3863, 3864 |
| BAFF | UniProtKB: Q5H8V1 | 3865 | 3866 | 3867, 3868, 3869, |
| | | | | 3870, 3871, 3872 |
| BAFF | UniProtKB: Q9Y275 | 3873 | 3874 | 3875, 3876, 3877, |
| | | | | 3878, 3879, 3880 |
| CD27L | UniProtKB: P32970 | 3881 | 3882 | 3883, 3884, 3885, |
| | | | | 3886, 3887, 3888 |
| CD30L | UniProtKB: P32971 | 3889 | 3890 | 3891, 3892, 3893, |
| | | | | 3894, 3895, 3896 |
| CD40L_(CD154) | UniProtKB: P29965 | 3897 | 3898 | 3899, 3900, 3901, |
| | | | | 3902, 3903, 3904 |
| EL-17C | UniProtKB: Q9P0M4 | 3905 | 3906 | 3907, 3908, 3909, |
| | | | | 3910, 3911, 3912 |
| FLT3_ligand | Genbank: AAA90950.1 | 3913 | 3914 | 3915, 3916, 3917, |
| | | | | 3918, 3919, 3920 |
| FLT3_ligand | UniProtKB: P49771 | 3921 | 3922 | 3923, 3924, 3925, |
| | | | | 3926, 3927, 3928 |
| G-CSF | UniProtKB: P09919 | 3929 | 3930 | 3931, 3932, 3933, |
| | | | | 3934, 3935, 3936 |
| GITRL | UniProtKB: Q9UNG2 | 3937 | 3938 | 3939, 3940, 3941, |
| | | | | 3942, 3943, 3944 |
| GM-CSF | UniProtKB: P04141 | 3945 | 3946 | 3947, 3948, 3949, |
| | | | | 3950, 3951, 3952 |
| IFNalpha | UniProtKB: G9JKF1 | 3953 | 3954 | 3955, 3956, 3957, |
| | | | | 3958, 3959, 3960 |
| IFNalpha | UniProtKB: P01562 | 3961 | 3962 | 3963, 3964, 3965, |
| | | | | 3966, 3967, 3968 |
| IFNalpha | UniProtKB: P01563 | 3969 | 3970 | 3971, 3972, 3973, |
| | | | | 3974, 3975, 3976 |
| IFNalpha | UniProtKB: P01566 | 3977 | 3978 | 3979, 3980, 3981, |
| | | | | 3982, 3983, 3984 |
| IFNalpha | UniProtKB: P01567 | 3985 | 3986 | 3987, 3988, 3989, |
| | | | | 3990, 3991, 3992 |
| IFNalpha | UniProtKB: P01568 | 3993 | 3994 | 3995, 3996, 3997, |
| | | | | 3998, 3999, 4000 |
| IFNalpha | UniProtKB: P01569 | 4001 | 4002 | 4003, 4004, 4005, |
| | | | | 4006, 4007, 4008 |
| IFNalpha | UniProtKB: P01570 | 4009 | 4010 | 4011, 4012, 4013, |
| | | | | 4014, 4015, 4016 |
| IFNalpha | UniProtKB: P01571 | 4017 | 4018 | 4019, 4020, 4021, |
| | | | | 4022, 4023, 4024 |
| IFNalpha | UniProtKB: P05013 | 4025 | 4026 | 4027, 4028, 4029, |
| | | | | 4030, 4031, 4032 |
| IFNalpha | UniProtKB: P05014 | 4033 | 4034 | 4035, 4036, 4037, |
| | | | | 4038, 4039, 4040 |
| IFNalpha | UniProtKB: P05015 | 4041 | 4042 | 4043, 4044, 4045, |
| | | | | 4046, 4047, 4048 |
| IFNalpha | UniProtKB: P32881 | 4049 | 4050 | 4051, 4052, 4053, |
| | | | | 4054, 4055, 4056 |
| IFNalpha | UniProtKB: Q14618 | 4057 | 4058 | 4059, 4060, 4061, |
| | | | | 4062, 4063, 4064 |
| IFNalpha | UniProtKB: Q86UP4 | 4065 | 4066 | 4067, 4068, 4069, |
| | | | | 4070, 4071, 4072 |
| IFNB | UniProtKB: P01574 | 4073 | 4074 | 4075, 4076, 4077, |
| | | | | 4078, 4079, 4080 |
| IFNB | UniProtKB: Q15943 | 4081 | 4082 | 4083, 4084, 4085, |
| | | | | 4086, 4087, 4088 |
| IFNG | UniProtKB: P01579 | 4089 | 4090 | 4091, 4092, 4093, |
| | | | | 4094, 4095, 4096 |
| IFNG | UniProtKB: Q14609 | 4097 | 4098 | 4099, 4100, 4101, |
| | | | | 4102, 4103, 4104 |
| IFNG | UniProtKB: Q14610 | 4105 | 4106 | 4107, 4108, 4109, |
| | | | | 4110, 4111, 4112 |
| IFNG | UniProtKB: Q14611 | 4113 | 4114 | 4115, 4116, 4117, |
| | | | | 4118, 4119, 4120 |
| IFNG | UniProtKB: Q14612 | 4121 | 4122 | 4123, 4124, 4125, |
| | | | | 4126, 4127, 4128 |
| IFNG | UniProtKB: Q14613 | 4129 | 4130 | 4131, 4132, 4133, |
| | | | | 4134, 4135, 4136 |
| IFNG | UniProtKB: Q14614 | 4137 | 4138 | 4139, 4140, 4141, |
| | | | | 4142, 4143, 4144 |
| IFNG | UniProtKB: Q14615 | 4145 | 4146 | 4147, 4148, 4149, |
| | | | | 4150, 4151, 4152 |
| IFNG | UniProtKB: Q8NHY9 | 4153 | 4154 | 4155, 4156, 4157, |
| | | | | 4158, 4159, 4160 |
| IFNomega | UniProtKB: P05000 | 4161 | 4162 | 4163, 4164, 4165, |
| | | | | 4166, 4167, 4168 |
| IL-10 | UniProtKB: P22301 | 4169 | 4170 | 4171, 4172, 4173, |
| | | | | 4174, 4175, 4176 |
| IL-11 | UniProtKB: P20809 | 4177 | 4178 | 4179, 4180, 4181, |
| | | | | 4182, 4183, 4184 |
| IL-12A | UniProtKB: P29459 | 4185 | 4186 | 4187, 4188, 4189, |
| | | | | 4190, 4191, 4192 |
| IL-12 | UniProtKB: P29460 | 4193 | 4194 | 4195, 4196, 4197, |
| | | | | 4198, 4199, 4200 |
| IL-13 | UniProtKB: P35225 | 4201 | 4202 | 4203, 4204, 4205, |
| | | | | 4206, 4207, 4208 |
| IL-14 | UniProtKB: P40222 | 4209 | 4210 | 4211, 4212, 4213, |
| | | | | 4214, 4215, 4216 |
| IL-15 | UniProtKB: P40933 | 4217 | 4218 | 4219, 4220, 4221, |
| | | | | 4222, 4223, 4224 |
| IL-16 | UniProtKB: Q14005 | 4225 | 4226 | 4227, 4228, 4229, |
| | | | | 4230, 4231, 4232 |
| IL-17A | UniProtKB: Q16552 | 4233 | 4234 | 4235, 4236, 4237, |
| | | | | 4238, 4239, 4240 |
| IL-17B | UniProtKB: Q9NRM6 | 4241 | 4242 | 4243, 4244, 4245, |
| | | | | 4246, 4247, 4248 |
| IL-17B | UniProtKB: Q9UHF5 | 4249 | 4250 | 4251, 4252, 4253, |
| | | | | 4254, 4255, 4256 |
| IL-17D | UniProtKB: Q8TAD2 | 4257 | 4258 | 4259, 4260, 4261, |
| | | | | 4262, 4263, 4264 |
| IL-17F | UniProtKB: F1JZ09 | 4265 | 4266 | 4267, 4268, 4269, |
| | | | | 4270, 4271, 4272 |
| IL-17F | UniProtKB: Q96PD4 | 4273 | 4274 | 4275, 4276, 4277, |
| | | | | 4278, 4279, 4280 |
| IL-18 | UniProtKB: A0A024R3E0 | 4281 | 4282 | 4283, 4284, 4285, |
| | | | | 4286, 4287, 4288 |
| IL-18 | UniProtKB: B0YJ28 | 4289 | 4290 | 4291, 4292, 4293, |
| | | | | 4294, 4295, 4296 |
| IL-18 | UniProtKB: Q14116 | 4297 | 4298 | 4299, 4300, 4301, |
| | | | | 4302, 4303, 4304 |
| IL-19 | UniProtKB: Q9UHD0 | 4305 | 4306 | 4307, 4308, 4309, |
| | | | | 4310, 4311, 4312 |
| IL-1_alpha | UniProtKB: P01583 | 4313 | 4314 | 4315, 4316, 4317, |
| | | | | 4318, 4319, 4320 |
| IL-1_beta | UniProtKB: P01584 | 4321 | 4322 | 4323, 4324, 4325, |
| | | | | 4326, 4327, 4328 |
| IL-1ra_(antagonist) | UniProtKB: P18510-2 | 4329 | 4330 | 4331, 4332, 4333, |
| | | | | 4334, 4335, 4336 |
| IL-1ra_(antagonist) | UniProtKB: P18510-3 | 4337 | 4338 | 4339, 4340, 4341, |
| | | | | 4342, 4343, 4344 |
| IL-1ra_(antagonist) | UniProtKB: P18510 | 4345 | 4346 | 4347, 4348, 4349, |
| | | | | 4350, 4351, 4352 |
| IL-20 | UniProtKB: Q9NYY1 | 4353 | 4354 | 4355, 4356, 4357, |
| | | | | 4358, 4359, 4360 |
| IL-21 | RefSeq: NP_001193935.1 | 4361 | 4362 | 4363, 4364, 4365, |
| | | | | 4366, 4367, 4368 |
| IL-21 | RefSeq: NP_068575.1 | 4369 | 4370 | 4371, 4372, 4373, |
| | | | | 4374, 4375, 4376 |
| IL-22 | UniProtKB: Q9GZX6 | 4377 | 4378 | 4379, 4380, 4381, |
| | | | | 4382, 4383, 4384 |
| IL-23 | UniProtKB: Q9NPF7 | 4385 | 4386 | 4387, 4388, 4389, |
| | | | | 4390, 4391, 4392 |
| IL-24 | UniProtKB: Q13007 | 4393 | 4394 | 4395, 4396, 4397, |
| | | | | 4398, 4399, 4400 |
| IL-24 | UniProtKB: Q2YHE6 | 4401 | 4402 | 4403, 4404, 4405, |
| | | | | 4406, 4407, 4408 |
| IL-25 | UniProtKB: Q969H8 | 4409 | 4410 | 4411, 4412, 4413, |
| | | | | 4414, 4415, 4416 |
| IL-25 | UniProtKB: Q9H293 | 4417 | 4418 | 4419, 4420, 4421, |
| | | | | 4422, 4423, 4424 |
| IL-26 | UniProtKB: Q9NPH9 | 4425 | 4426 | 4427, 4428, 4429, |
| | | | | 4430, 4431, 4432 |
| IL-27A | UniProtKB: Q8NEV9 | 4433 | 4434 | 4435, 4436, 4437, |
| | | | | 4438, 4439, 4440 |
| IL-27B | UniProtKB: Q14213 | 4441 | 4442 | 4443, 4444, 4445, |
| | | | | 4446, 4447, 4448 |
| IL-28A | UniProtKB: Q8IZJ0 | 4449 | 4450 | 4451, 4452, 4453, |
| | | | | 4454, 4455, 4456 |
| IL-28B | UniProtKB: Q8IZI9 | 4457 | 4458 | 4459, 4460, 4461, |
| | | | | 4462, 4463, 4464 |
| IL-29 | UniProtKB: Q8IU54 | 4465 | 4466 | 4467, 4468, 4469, |
| | | | | 4470, 4471, 4472 |
| IL-2 | UniProtKB: P60568 | 4473 | 4474 | 4475, 4476, 4477, |
| | | | | 4478, 4479, 4480 |
| IL-2 | UniProtKB: Q0GK43 | 4481 | 4482 | 4483, 4484, 4485, |
| | | | | 4486, 4487, 4488 |
| IL-2 | UniProtKB: Q13169 | 4489 | 4490 | 4491, 4492, 4493, |
| | | | | 4494, 4495, 4496 |
| IL-2 | UniProtKB: Q6NZ91 | 4497 | 4498 | 4499, 4500, 4501, |
| | | | | 4502, 4503, 4504 |
| IL-2 | UniProtKB: Q6NZ93 | 4505 | 4506 | 4507, 4508, 4509, |
| | | | | 4510, 4511, 4512 |
| IL-31 | UniProtKB: Q6EBC2 | 4513 | 4514 | 4515, 4516, 4517, |
| | | | | 4518, 4519, 4520 |
| IL-32 | UniProtKB: P24001 | 4521 | 4522 | 4523, 4524, 4525, |
| | | | | 4526, 4527, 4528 |
| IL-33 | UniProtKB: O95760 | 4529 | 4530 | 4531, 4532, 4533, |
| | | | | 4534, 4535, 4536 |
| IL-37 | UniProtKB: Q9NZH6 | 4537 | 4538 | 4539, 4540, 4541, |
| | | | | 4542, 4543, 4544 |
| IL-3 | UniProtKB: P08700 | 4545 | 4546 | 4547, 4548, 4549, |
| | | | | 4550, 4551, 4552 |
| IL-3 | UniProtKB: Q6NZ78 | 4553 | 4554 | 4555, 4556, 4557, |
| | | | | 4558, 4559, 4560 |
| IL-3 | UniProtKB: Q6NZ79 | 4561 | 4562 | 4563, 4564, 4565, |
| | | | | 4566, 4567, 4568 |
| IL-4 | UniProtKB: P05112-2 | 4569 | 4570 | 4571, 4572, 4573, |
| | | | | 4574, 4575, 4576 |
| IL-4 | UniProtKB: P05112 | 4577 | 4578 | 4579, 4580, 4581, |
| | | | | 4582, 4583, 4584 |
| IL-5 | UniProtKB: P05113 | 4585 | 4586 | 4587, 4588, 4589, |
| | | | | 4590, 4591, 4592 |
| IL-6 | UniProtKB: P05231 | 4593 | 4594 | 4595, 4596, 4597, |
| | | | | 4598, 4599, 4600 |
| IL-7 | UniProtKB: A8K673 | 4601 | 4602 | 4603, 4604, 4605, |
| | | | | 4606, 4607, 4608 |
| IL-7 | UniProtKB: P13232 | 4609 | 4610 | 4611, 4612, 4613, |
| | | | | 4614, 4615, 4616 |
| IL-9 | UniProtKB: P15248 | 4617 | 4618 | 4619, 4620, 4621, |
| | | | | 4622, 4623, 4624 |
| LIF | UniProtKB: P15018 | 4625 | 4626 | 4627, 4628, 4629, |
| | | | | 4630, 4631, 4632 |
| LIGHT | UniProtKB: O43557 | 4633 | 4634 | 4635, 4636, 4637, |
| | | | | 4638, 4639, 4640 |
| LTalpha | UniProtKB: B4DVZ8 | 4641 | 4642 | 4643, 4644, 4645, |
| | | | | 4646, 4647, 4648 |
| LTalpha | UniProtKB: P01374 | 4649 | 4650 | 4651, 4652, 4653, |
| | | | | 4654, 4655, 4656 |
| LTalpha | UniProtKB: P09960 | 4657 | 4658 | 4659, 4660, 4661, |
| | | | | 4662, 4663, 4664 |
| LTalpha | UniProtKB: Q5ST95 | 4665 | 4666 | 4667, 4668, 4669, |
| | | | | 4670, 4671, 4672 |
| LTalpha | UniProtKB: Q5STV3 | 4673 | 4674 | 4675, 4676, 4677, |
| | | | | 4678, 4679, 4680 |
| LTalpha | UniProtKB: Q6FG55 | 4681 | 4682 | 4683, 4684, 4685, |
| | | | | 4686, 4687, 4688 |
| LTbeta | UniProtKB: Q06643 | 4689 | 4690 | 4691, 4692, 4693, |
| | | | | 4694, 4695, 4696 |
| LTbeta | UniProtKB: Q5STB2 | 4697 | 4698 | 4699, 4700, 4701, |
| | | | | 4702, 4703, 4704 |
| M-CSF | UniProtKB: P09603 | 4705 | 4706 | 4707, 4708, 4709, |
| | | | | 4710, 4711, 4712 |
| MIF | UniProtKB: A6MUU8 | 4713 | 4714 | 4715, 4716, 4717, |
| | | | | 4718, 4719, 4720 |
| MIF | UniProtKB: P14174 | 4721 | 4722 | 4723, 4724, 4725, |
| | | | | 4726, 4727, 4728 |
| OSM | UniProtKB: P13725 | 4729 | 4730 | 4731, 4732, 4733, |
| | | | | 4734, 4735, 4736 |
| OX40L | UniProtKB: P23510 | 4737 | 4738 | 4739, 4740, 4741, |
| | | | | 4742, 4743, 4744 |
| OX40L | UniProtKB: P43489 | 4745 | 4746 | 4747, 4748, 4749, |
| | | | | 4750, 4751, 4752 |
| RANK_ligand | UniProtKB: O14788 | 4753 | 4754 | 4755, 4756, 4757, |
| | | | | 4758, 4759, 4760 |
| Stem_Cell_Factor | UniProtKB: P21583-2 | 4761 | 4762 | 4763, 4764, 4765, |
| | | | | 4766, 4767, 4768 |
| Stem_Cell_Factor | UniProtKB: P21583 | 4769 | 4770 | 4771, 4772, 4773, |
| | | | | 4774, 4775, 4776 |
| TGFbeta1 | UniProtKB: A0A024R0P8 | 4777 | 4778 | 4779, 4780, 4781, |
| | | | | 4782, 4783, 4784 |
| TGFbeta1 | UniProtKB: P01137 | 4785 | 4786 | 4787, 4788, 4789, |
| | | | | 4790, 4791, 4792 |
| TGFbeta2 | UniProtKB: P61812 | 4793 | 4794 | 4795, 4796, 4797, |
| | | | | 4798, 4799, 4800 |
| TGFbeta3 | UniProtKB: A5YM40 | 4801 | 4802 | 4803, 4804, 4805, |
| | | | | 4806, 4807, 4808 |
| TGFbeta3 | UniProtKB: P10600 | 4809 | 4810 | 4811, 4812, 4813, |
| | | | | 4814, 4815, 4816 |
| TL1A | UniProtKB: O95150 | 4817 | 4818 | 4819, 4820, 4821, |
| | | | | 4822, 4823, 4824 |
| TWEAK | UniProtKB: Q4ACW9 | 4825 | 4826 | 4827, 4828, 4829, |
| | | | | 4830, 4831, 4832 |
| CXCL8 | UniProtKB: P10145 | 5265 | 5266 | 5267, 5268, 5269, |
| | | | | 5270, 5271, 5272 |
| Apo2L/TRAIL | UniProtKB: P50591 | 6897 | 6898 | 6899, 6900, 6901, |
| | | | | 6902, 6903, 6904 |
| FasL | UniProtKB: P48023 | 7321 | 7322 | 7323, 7324, 7325, |
| | | | | 7326, 7327, 7328 |
| TNF | UniProtKB: P01375 | 7369 | 7370 | 7371, 7372, 7373, |
| | | | | 7374, 7375, 7376 |
| TNF | UniProtKB: Q5STB3 | 7377 | 7378 | 7379, 7380, 7381, |
| | | | | 7382, 7383, 7384 |

[0090] According to the present invention, in a more preferred embodiment, the inventive composition comprises at least one RNA, preferably an mRNA comprising at least one coding region encoding at least one cytokine or a fragment or variant thereof, wherein the at least one coding region comprises an RNA sequence being identical or at least 50%, 60%, 70%, 75%, 80%, 81%, 82%, 83%, 84%, 85%, 86%, 87%, 88%, 89%, 90%, 91%, 92%, 93%, 94%, 95%, 96%, 97%, 98%, 99% identical to the RNA sequences according to the SEQ ID Nos as disclosed in Table 1.

[0091] 2. Chemokines:

[0092] In a further preferred embodiment of the inventive RNA containing composition the RNA comprises at least one coding region that codes for at least one chemokine, or a fragment or variant thereof.

[0093] Chemokines are chemotactic cytokines that control the migratory patterns and positioning of immune cells, as reviewed by Griffith et al., 2014. Annu. Rev. Immunol. 32:659-702 (PMID 24655300). Chemokine function is critical for all immune cell movement ranging from the migration required for immune cell development and homeostasis, to that required for the generation of primary and amnestic cellular and humoral immune responses, to the pathologic recruitment of immune cells in disease. Chemokines constitute the largest family of cytokines, consisting of approximately 50 endogenous chemokine ligands in humans and mice.

[0094] According to preferred embodiments in the context of the present invention chemokines may be selected from any chemokine selected from the group consisting of CCL1; CCL11; CCL12; CCL13; CCL14; CCL15; CCL16; CCL17; CCL18; CCL19; CCL2; CCL20; CCL21; CCL22; CCL24; CCL25; CCL26; CCL27; CCL28; CCL3; CCL4; CCL5; CCL6; CCL7; CCL8; CCL9; CX3CL1; CXCL1; CXCL10; CXCL11; CXCL12; CXCL13; CXCL14; CXCL15; CXCL2; CXCL3; CXCL4; CXCL5; CXCL6; CXCL7; CXCL8; CXCL9; XCL1; XCL2, preferably as disclosed in Table 2. Particularly preferred in this context are the RNA sequences encoding a chemokine according to Table 2.

TABLE 2
Chemokines

| | | | RNA | |
|---|---|---|---|---|
| | | Protein | Sequence | |
| | | Sequence | wild type | |
| | | SEQ ID | SEQ ID | RNA Sequence |
| Gene Name | Protein Accession No. | NO: | NO: | SEQ ID NO: |
| CCL11 | UniProtKB: P51671 | 4833 | 4834 | 4835, 4836, 4837, 4838, |
| | | | | 4839, 4840 |
| CCL11 | UniProtKB: Q6I9T4 | 4841 | 4842 | 4843, 4844, 4845, 4846, |
| | | | | 4847, 4848 |
| CCL12 | UniProtKB: Q62401 | 4849 | 4850 | 4851, 4852, 4853, 4854, |
| | | | | 4855, 4856 |
| CCL13 | UniProtKB: Q99616 | 4857 | 4858 | 4859, 4860, 4861, 4862, |
| | | | | 4863, 4864 |
| CCL14 | UniProtKB: Q16627 | 4865 | 4866 | 4867, 4868, 4869, 4870, |
| | | | | 4871, 4872 |
| CCL15 | UniProtKB: Q16663 | 4873 | 4874 | 4875, 4876, 4877, 4878, |
| | | | | 4879, 4880 |
| CCL16 | UniProtKB: O15467 | 4881 | 4882 | 4883, 4884, 4885, 4886, |
| | | | | 4887, 4888 |
| CCL17 | UniProtKB: Q92583 | 4889 | 4890 | 4891, 4892, 4893, 4894, |
| | | | | 4895, 4896 |
| CCL18 | UniProtKB: P55774 | 4897 | 4898 | 4899, 4900, 4901, 4902, |
| | | | | 4903, 4904 |
| CCL19 | UniProtKB: Q6IBD6 | 4905 | 4906 | 4907, 4908, 4909, 4910, |
| | | | | 4911, 4912 |
| CCL19 | UniProtKB: Q99731 | 4913 | 4914 | 4915, 4916, 4917, 4918, |
| | | | | 4919, 4920 |
| CCL1 | UniProtKB: P22362 | 4921 | 4922 | 4923, 4924, 4925, 4926, |
| | | | | 4927, 4928 |
| CCL20 | UniProtKB: P78556 | 4929 | 4930 | 4931, 4932, 4933, 4934, |
| | | | | 4935, 4936 |
| CCL21 | UniProtKB: O00585 | 4937 | 4938 | 4939, 4940, 4941, 4942, |
| | | | | 4943, 4944 |
| CCL22 | UniProtKB: O00626 | 4945 | 4946 | 4947, 4948, 4949, 4950, |
| | | | | 4951, 4952 |
| CCL24 | UniProtKB: O00175 | 4953 | 4954 | 4955, 4956, 4957, 4958, |
| | | | | 4959, 4960 |
| CCL25 | UniProtKB: O15444 | 4961 | 4962 | 4963, 4964, 4965, 4966, |
| | | | | 4967, 4968 |
| CCL26 | UniProtKB: Q9Y258 | 4969 | 4970 | 4971, 4972, 4973, 4974, |
| | | | | 4975, 4976 |
| CCL27 | UniProtKB: Q5VZ77 | 4977 | 4978 | 4979, 4980, 4981, 4982, |
| | | | | 4983, 4984 |
| CCL28 | UniProtKB: A0N0Q3 | 4985 | 4986 | 4987, 4988, 4989, 4990, |
| | | | | 4991, 4992 |
| CCL28 | UniProtKB: Q9NRJ3 | 4993 | 4994 | 4995, 4996, 4997, 4998, |
| | | | | 4999, 5000 |
| CCL2 | UniProtKB: P13500 | 5001 | 5002 | 5003, 5004, 5005, 5006, |
| | | | | 5007, 5008 |
| CCL3 | UniProtKB: A0N0R1 | 5009 | 5010 | 5011, 5012, 5013, 5014, |
| | | | | 5015, 5016 |
| CCL3 | UniProtKB: P10147 | 5017 | 5018 | 5019, 5020, 5021, 5022, |
| | | | | 5023, 5024 |
| CCL4 | UniProtKB: P13236 | 5025 | 5026 | 5027, 5028, 5029, 5030, |
| | | | | 5031, 5032 |
| CCL4 | UniProtKB: Q7M4M2 | 5033 | 5034 | 5035, 5036, 5037, 5038, |
| | | | | 5039, 5040 |
| CCL5 | UniProtKB: D0EI67 | 5041 | 5042 | 5043, 5044, 5045, 5046, |
| | | | | 5047, 5048 |
| CCL5 | UniProtKB: P13501 | 5049 | 5050 | 5051, 5052, 5053, 5054, |
| | | | | 5055, 5056 |
| CCL6 | UniProtKB: P27784 | 5057 | 5058 | 5059, 5060, 5061, 5062, |
| | | | | 5063, 5064 |
| CCL7 | UniProtKB: P80098 | 5065 | 5066 | 5067, 5068, 5069, 5070, |
| | | | | 5071, 5072 |
| CCL7 | UniProtKB: Q7Z7Q8 | 5073 | 5074 | 5075, 5076, 5077, 5078, |
| | | | | 5079, 5080 |
| CCL8 | UniProtKB: H0UIC7 | 5081 | 5082 | 5083, 5084, 5085, 5086, |
| | | | | 5087, 5088 |
| CCL8 | UniProtKB: P80075 | 5089 | 5090 | 5091, 5092, 5093, 5094, |
| | | | | 5095, 5096 |
| CCL9 | UniProtKB: P51670 | 5097 | 5098 | 5099, 5100, 5101, 5102, |
| | | | | 5103, 5104 |
| CX3CL1 | UniProtKB: A0N0N7 | 5105 | 5106 | 5107, 5108, 5109, 5110, |
| | | | | 5111, 5112 |
| CX3CL1 | UniProtKB: P78423 | 5113 | 5114 | 5115, 5116, 5117, 5118, |
| | | | | 5119, 5120 |
| CX3CL1 | UniProtKB: Q6I9S9 | 5121 | 5122 | 5123, 5124, 5125, 5126, |
| | | | | 5127, 5128 |
| CXCL10 | UniProtKB: A0A024RDA4 | 5129 | 5130 | 5131, 5132, 5133, 5134, |
| | | | | 5135, 5136 |
| CXCL10 | UniProtKB: P02778 | 5137 | 5138 | 5139, 5140, 5141, 5142, |
| | | | | 5143, 5144 |
| CXCL11 | UniProtKB: O14625 | 5145 | 5146 | 5147, 5148, 5149, 5150, |
| | | | | 5151, 5152 |
| CXCL12 | UniProtKB: P48061 | 5153 | 5154 | 5155, 5156, 5157, 5158, |
| | | | | 5159, 5160 |
| CXCL13 | UniProtKB: L8E878 | 5161 | 5162 | 5163, 5164, 5165, 5166, |
| | | | | 5167, 5168 |
| CXCL13 | UniProtKB: O43927 | 5169 | 5170 | 5171, 5172, 5173, 5174, |
| | | | | 5175, 5176 |
| CXCL14 | UniProtKB: O95715 | 5177 | 5178 | 5179, 5180, 5181, 5182, |
| | | | | 5183, 5184 |
| CXCL15 | UniProtKB: Q9WVL7 | 5185 | 5186 | 5187, 5188, 5189, 5190, |
| | | | | 5191, 5192 |
| CXCL1 | UniProtKB: P09341 | 5193 | 5194 | 5195, 5196, 5197, 5198, |
| | | | | 5199, 5200 |
| CXCL2 | UniProtKB: A0A024RDD9 | 5201 | 5202 | 5203, 5204, 5205, 5206, |
| | | | | 5207, 5208 |
| CXCL2 | UniProtKB: P19875 | 5209 | 5210 | 5211, 5212, 5213, 5214, |
| | | | | 5215, 5216 |
| CXCL3 | UniProtKB: P19876 | 5217 | 5218 | 5219, 5220, 5221, 5222, |
| | | | | 5223, 5224 |
| CXCL4 | UniProtKB: P02776 | 5225 | 5226 | 5227, 5228, 5229, 5230, |
| | | | | 5231, 5232 |
| CXCL5 | UniProtKB: P42830 | 5233 | 5234 | 5235, 5236, 5237, 5238, |
| | | | | 5239, 5240 |
| CXCL5 | UniProtKB: Q6I9S7 | 5241 | 5242 | 5243, 5244, 5245, 5246, |
| | | | | 5247, 5248 |
| CXCL6 | UniProtKB: P80162 | 5249 | 5250 | 5251, 5252, 5253, 5254, |
| | | | | 5255, 5256 |
| CXCL7 | UniProtKB: P02775 | 5257 | 5258 | 5259, 5260, 5261, 5262, |
| | | | | 5263, 5264 |
| CXCL8 | UniProtKB: P10145 | 5265 | 5266 | 5267, 5268, 5269, 5270, |
| | | | | 5271, 5272 |
| CXCL9 | UniProtKB: L8E8X0 | 5273 | 5274 | 5275, 5276, 5277, 5278, |
| | | | | 5279, 5280 |
| CXCL9 | UniProtKB: Q07325 | 5281 | 5282 | 5283, 5284, 5285, 5286, |
| | | | | 5287, 5288 |
| XCL1 | UniProtKB: P47992 | 5289 | 5290 | 5291, 5292, 5293, 5294, |
| | | | | 5295, 5296 |
| XCL2 | UniProtKB: Q9UBD3 | 5297 | 5298 | 5299, 5300, 5301, 5302, |
| | | | | 5303, 5304 |

[0095] In this context particularly preferred are chemokines chosen from the following list: CXCL9, CXCL10, CCL5, XCL1, CCL20, CCL19, CCL21, CCL2, CCL3, CCL16, and CXCL12.

[0096] According to the present invention, in a more preferred embodiment, the inventive composition comprises at least one RNA, preferably an mRNA comprising at least one coding region encoding at least one chemokine or a fragment or variant thereof, wherein the at least one coding region comprises an RNA sequence being identical or at least 50%, 60%, 70%, 75%, 80%, 81%, 82%, 83%, 84%, 85%, 86%, 87%, 88%, 89%, 90%, 91%, 92%, 93%, 94%, 95%, 96%, 97%, 98%, 99% identical to the RNA sequences according to the SEQ ID Nos as disclosed in Table 2.

[0097] 3. Suicide Gene Products

[0098] In a further preferred embodiment of the inventive RNA containing composition the RNA codes for at least one so-called suicide gene product, especially for a suicide enzyme, preferably for a nucleotide metabolizing enzyme. Preferably the RNA is used in combination with a prodrug which is a substrate of the suicide gene product, especially the suicide enzyme, and which is converted to a cytotoxic compound by the suicide gene product. The appropriate prodrug may be added to the inventive RNA composition or it may be administered separately to the patient.

[0099] One or more preferred suicide enzymes may be chosen from the following list: thymidine kinase, preferably a viral thymidine kinase, more preferrably Herpes simplex virus thymidine kinase, Varicella zoster thymidine kinase; a plant thymidine kinase, preferably a tomato thymidine kinase; cytosine deaminase, preferably bacterial cytosine deaminase or Yeast cytosine deaminase; deoxynucleoside kinase, preferably Drosophila melanogaster deoxynucleoside kinase; deoxycytidine kinase, preferably a mammalian deoxycytidine kinase, purine nucleoside phosphorylase, preferably a bacterial purine nucleoside phosphorylase.

[0100] It is already known that suicide gene therapy is a promising treatment for cancer (Ardiani et al., 2012. Curr. Gene Ther. 12(2):77-91. PMID: 22384805). This approach is based on the successful delivery and expression of the suicide gene in tumor cells. The suicide gene encodes an enzyme with the unique ability to activate an otherwise ineffective prodrug. Following suicide gene expression in transfected cells, an appropriate prodrug is administered and is converted to a cytotoxic compound by the actions of the suicide gene product. As most suicide genes encode enzymes belonging to the class of nucleotide metabolizing enzymes, the general mode of action of activated prodrugs is interference with DNA synthesis that consequently results in induction of apoptosis. The potency of these drugs is maximized in cancer cells due to their greater proliferative rate as compared to normal cells. Because of the prospect to preferentially deliver genes to tumor cells, this strategy has the potential to offer selective tumor killing while sparing normal cells, a feature that standard chemotherapeutic and radiotherapy approaches do not generally afford.

[0101] The following table 3 (Ardiani et al., 2012. Curr. Gene Ther. 12(2):77-91. PMID: 22384805) summarizes preferred nucleotide metabolizing enzymes usable in the inventive approach. The table includes variants and mutants of such enzymes which were generated by protein engineering strategies.

TABLE 3
Suicide enzymes

| | | | | | Drug |
|---|---|---|---|---|---|
| | | Natural | | Variants/ | inhibitors |
| Enzyme | Source gene | substrate | Prodrug | Mutants | action* |
| Herpes | Herpes | Thymidine | Ganciclovir (GCV), | Mutant 30 | 1 |
| Simplex | Simplex Virus 1 | | acyclovir (ACV) | Mutant 75 | 1 |
| Virus | (HSV-1) | | | SR39 | 1 |
| Thymidine | Thymidine | | | A168H | 1 |
| Kinase | Kinase (TK) | | | A167Y | 1 |
| (HSVTK) | | | | Q125N | 1, 2 |
| Bacterial | Escherichia coli - | Cytosine | 5-Fluorocytosine | D314 | 1, 2, 4 |
| Cytosine | codA | | (5-FC) | mutants | |
| Deaminase | | | | bCD1525 | 1, 2, 4 |
| (bCD) | | | | | |
| Yeast | Saccharomyces | Cytosine | 5-FC | yCD triple | 1, 2, 4 |
| Cytosine | cerevisiae - | | | D92E | 1, 2, 4 |
| Deaminase | fcy1 | | | | |
| (yCD) | Drosophila | | | | |
| Drosophila | melanogaster - | All four | azidothymidine | MuD | 1, 5 |
| melanogaster | dNK | deoxy-ribo- | (AZT), | B5 | 1 |
| Deoxynucleoside | | nucleo- | dideoxycytoinse | B10 | 1, 3 |
| Kinase | | sides | (ddC); | M88R | 1 |
| (Dm-dNK) | | | CdA; | HDHD-12, | 1, 5 |
| | | | 9-beta-D- | HD-16 | |
| | | | arabinofuranosyl- | R4.V3 | 1 |
| | | | 2-fluoroadenine | | |
| | | | (F-AraA); | | |
| | | | GCV, 9-beta-D- | | |
| | | | arabinosylguanine | | |
| | | | (AraG); 2′,3′- | | |
| | | | didehydro-3′- | | |
| | | | deoxythymidine | | |
| | | | (D4T); | | |
| | | | 2′,3′- | | |
| | | | Dideoxythymidine | | |
| | | | (ddT) | | |
| Deoxy- | Homo sapiens - | Deoxy- | 2′,2′-difluoro- | DMMA, | 1, 3 |
| cytidine | dCK | cytidine | deoxycytidine | DMLA | |
| Kinase (dCK) | | | (dFdC), AraA, β-L- | EpTK6 | 1, 3, 5 |
| | | | thymidine (L-dT) | Ser-74 | 1, 3 |
| | | | AZT | | |
| | | | cytarabine 5′- | | |
| | | | monophosphate | | |
| | | | (AraC) | | |
| Purine | Escherichia coli - | Purine ribo- | 9-(6-deoxy-α-L- | M64V | 1, 4 |
| Nucleoside | deoD | nucleo- | talofuranosyl)-6- | | |
| Phosphor- | | sides | methylpurine | | |
| ylase (PNP) | | | (Me(talo)-MeP-R) | | |

*Drug inhibitory action. 1: DNA synthesis; 2: Thymidylate synthetase; 3: Ribonucleotide reductase; 4: RNA/protein synthesis; 5: Reverse transcriptase.

[0102] Herpes simplex virus type 1 thymidine kinase (HSVTK, EC 2.7.1.21), a homodimer with a subunit molecular mass of 45 kDa, is responsible for the phosphorylation of thymidine, deoxycytidine, deoxythymidylate (dTMP) as well as various pharmaceutically important pyrimidine and guanosine analogs. Of particular note, HSVTK is responsible for the initial and rate limiting phosphorylation of the antiviral guanosine analogs acyclovir (ACV) and ganciclovir (GCV). Once monophosphorylated these analogs can be further phosphorylated by endogenous enzymes (guanylate kinase and nucleoside diphosphokinase) before being incorporated into nascent DNA to cause double strand destabilization and, subsequently, cell death.

[0103] Moreover, the Varicella zoster virus thymidine kinase (VZV-tk) may be used e.g. in conjunction with the prodrug 6-methoxypurine arabinoside (ara-M) or 1-(2′-deoxy-2-flioro-b-D-arabinofuranosyl)-5-iodouracil (FIAU). Other examples are thymidine kinases of Aleutian disease virus (ADV), respiratory syncytial virus (RSV) and cytomegalovirus (CMV).

[0104] Cytosine deaminase (CD; EC 3.5.4.1) is an enzyme in the pyrimidine salvage pathway that catalyzes the deamination of cytosine to form uracil and ammonia. CD from E. coli (bCD) is a hexamer of 48 kDA subunits with a catalytic metal iron. This enzyme is absent in mammals and uniquely present in fungi and bacteria. It is used in suicide gene therapy because of its ability to deaminate the anti-fungal drug, 5-fluorocytosine (5FC), to 5-fluorouracil (5FU), a potent anti-neoplastic drug. UPRT (Uracil phosphoribosyltransferase) may be used as potential enhancer.

[0105] Saccharomyces cerevisiae or Yeast cytosine deaminase (yCD, EC 3.5.4.1) is a homodimer of 17.5 kDa subunits and has been shown to be more active towards 5FC than bCD (22-fold lower Kₘ) with a slightly better catalytic efficiency (k_{cat}/Kₘ) toward 5FC relative to its natural substrate cytosine.

[0106] Drosophila melanogaster deoxyribonucleoside kinase (Dm-dNK; EC 2.7.1.145) is a 29 kDa homodimeric, multisubstrate kinase able to phosphorylate all four natural deoxyribonucleosides required for DNA synthesis. In addition to its broad substrate specificity, Dm-dNK exhibits higher catalytic rates toward these natural deoxynucleosides and several nucleoside analogs as compared to mammalian deoxynucleoside kinases. Due to these distinctive characteristics Dm-dNK is a especially preferred enzyme for the inventive suicide gene therapy application.

[0107] Human deoxycytidine kinase (dCK; EC 2.7.1.74) is a 30.5 kDa homodimeric enzyme in the salvage pathway of deoxyribonucleosides and is responsible for activating all natural deoxyribonucleosides, excluding thymidine, as precursors for DNA synthesis. Due to its broad substrate specificity, dCK is able to activate multiple nucleoside analogs effective against different types of cancer. However, wild type dCK is intrinsically a relatively poor catalyst with low turnover rates and prodrug activation is dependent on its expression levels. Indeed, nucleoside analogs that are efficient substrates of dCK, such as cytarabine (AraC), fludarabine (F-AraA), cladribine (CdA), and gemcitabine (dFdC), are effective anti-leukemic agents as lymphoblasts have been shown to have high dCK expression levels whereas cancer cells lacking dCK activity are resistant to these same analogs. Therefore dCK is an especially preferred enzyme for the inventive approach.

[0108] Preferably the RNA of the inventive RNA containing composition is used in combination with further components which enhance the cytotoxic effect of the treatment. It is especially preferred to use the RNA in combination with RNA coding for connexins and/or with a protein of the connexin family or parts or fragments thereof. Connexins are transmembrane proteins which form gap junctions between cells. They allow transfer of e.g. molecules between neighboring cells thereby enabling the transfer of cytoxic substances.

[0109] Although suicide gene therapy is a fairly new anti-cancer approach, the concept was originally described more than two decades ago in 1986 by Moolten (Moolten, 1986. Cancer Res. 46(10):5276-81). He also proposed the existence of what is currently known as the bystander effect, now widely recognized as a fundamental feature of suicide gene therapy success. By definition the bystander effect is the extension of cytotoxic effects from transfected cells to non-transfected neighboring cells such that complete tumor regression is observed when only a small subpopulation of tumor cells is successfully transfected. This phenomenon is crucial to the overall effectiveness of suicide gene therapy today due to low transfection efficiencies achievable by available delivery systems.

[0110] The bystander effect is thought to occur via two major mechanisms: local and immune-mediated. The local mechanism involves the killing of untransfected nearby cells due to the transfer of toxic materials or suicide enzymes through gap junctions, apoptotic vesicles or through diffusion of soluble toxic metabolites. Gap junctions are important in cell-cell interactions and are responsible for the transfer of ions, nucleotides and small molecules to adjacent cells. The transfer of toxic drugs through gap junctions, however, may not be available in certain types of tumors that down regulate intracellular gap junction communication and display disorganized and non-functional gap junctions. To address this problem, several studies have increased the expression of connexins, the building blocks of gap junctions, and demonstrated that enhanced bystander and cell killing effects were achieved.

[0111] Accumulating evidence from in vivo experiments suggests that the immune-mediated bystander effect plays an important role in tumor regression as well. The presence of inflammatory infiltrates, chemokines, and cytokines have been found elevated in regressing tumors of immune competent animals receiving suicide gene therapy treatment. These cytokines and chemokines further induce the production of immune-regulatory molecules able to stimulate a more robust anti-cancer effect and additionally, because death of transfected cells is through apoptosis, numerous inflammatory signals may be released to evoke a potent immune response. Therefore the combination of the inventive composition with connexins or with RNA coding for connexins is especially preferred, because it strengthens the bystander effect thereby increasing the efficiency of the inventive RNA containing composition.

[0112] According to preferred embodiments in the context of the present invention suicide gene products may be selected from any suicide gene product selected from the group consisting of Cytosine_Deaminase_codA; Cytosine_Deaminase_fcy1; Deoxy-cytidine_Kinase_dCK; Deoxynucleoside_Kinase_dNK; Purine_Nucleoside_Phosphorylase_deoD; Thymidine_Kinase_TK, preferably as disclosed in Table 4. Particularly preferred in this context are the RNA sequences encoding a suicide gene product according to Table 4.

TABLE 4
Suicide Gene Products

| | | | RNA | |
|---|---|---|---|---|
| | | Protein | Sequence | RNA |
| | Protein | Sequence | wild type | Sequence |
| Gene Name | Accession No. | SEQ ID NO: | SEQ ID NO: | SEQ ID NO: |
| Cytosine_Deaminase_codA | UniProtKB: | 5305 | 5306 | 5307, 5308, 5309, |
| | A0A024KS17 | | | 5310, 5311, 5312 |
| Cytosine_Deaminase_codA | UniProtKB: | 5313 | 5314 | 5315, 5316, 5317, |
| | A0A0H2V4N7 | | | 5318, 5319, 5320 |
| Cytosine_Deaminase_codA | UniProtKB: | 5321 | 5322 | 5323, 5324, 5325, |
| | A0A0H2YX33 | | | 5326, 5327, 5328 |
| Cytosine_Deaminase_codA | UniProtKB: | 5329 | 5330 | 5331, 5332, 5333, |
| | F4NM90 | | | 5334, 5335, 5336 |
| Cytosine_Deaminase_codA | UniProtKB: | 5337 | 5338 | 5339, 5340, 5341, |
| | H9UNZ4 | | | 5342, 5343, 5344 |
| Cytosine_Deaminase_codA | UniProtKB: | 5345 | 5346 | 5347, 5348, 5349, |
| | Q1RFJ5 | | | 5350, 5351, 5352 |
| Cytosine_Deaminase_codA | UniProtKB: | 5353 | 5354 | 5355, 5356, 5357, |
| | Q2VP09 | | | 5358, 5359, 5360 |
| Cytosine_Deaminase_codA | UniProtKB: | 5361 | 5362 | 5363, 5364, 5365, |
| | Q53ZC8 | | | 5366, 5367, 5368 |
| Cytosine_Deaminase_codA | UniProtKB: | 5369 | 5370 | 5371, 5372, 5373, |
| | Q6Q8Q1 | | | 5374, 5375, 5376 |
| Cytosine_Deaminase_codA | UniProtKB: | 5377 | 5378 | 5379, 5380, 5381, |
| | W8ZNH5 | | | 5382, 5383, 5384 |
| Cytosine_Deaminase_fcy1 | UniProtKB: | 5385 | 5386 | 5387, 5388, 5389, |
| | A0A023ZJG6 | | | 5390, 5391, 5392 |
| Cytosine_Deaminase_fcy1 | UniProtKB: | 5393 | 5394 | 5395, 5396, 5397, |
| | A0A024XGF7 | | | 5398, 5399, 5400 |
| Cytosine_Deaminase_fcy1 | UniProtKB: | 5401 | 5402 | 5403, 5404, 5405, |
| | A0A024XUW9 | | | 5406, 5407, 5408 |
| Cytosine_Deaminase_fcy1 | UniProtKB: | 5409 | 5410 | 5411, 5412, 5413, |
| | A0A0C5ITD0 | | | 5414, 5415, 5416 |
| Cytosine_Deaminase_fcy1 | UniProtKB: | 5417 | 5418 | 5419, 5420, 5421, |
| | A0A0D4WVI5 | | | 5422, 5423, 5424 |
| Cytosine_Deaminase_fcy1 | UniProtKB: | 5425 | 5426 | 5427, 5428, 5429, |
| | A0A0D4WY08 | | | 5430, 5431, 5432 |
| Cytosine_Deaminase_fcy1 | UniProtKB: | 5433 | 5434 | 5435, 5436, 5437, |
| | A0A0D4WZA2 | | | 5438, 5439, 5440 |
| Cytosine_Deaminase_fcy1 | UniProtKB: | 5441 | 5442 | 5443, 5444, 5445, |
| | A0A0D4WZQ5 | | | 5446, 5447, 5448 |
| Cytosine_Deaminase_fcy1 | UniProtKB: | 5449 | 5450 | 5451, 5452, 5453, |
| | A0A0D4X0R8 | | | 5454, 5455, 5456 |
| Cytosine_Deaminase_fcy1 | UniProtKB: | 5457 | 5458 | 5459, 5460, 5461, |
| | A0A0D4X195 | | | 5462, 5463, 5464 |
| Cytosine_Deaminase_fcy1 | UniProtKB: | 5465 | 5466 | 5467, 5468, 5469, |
| | A0A0D4X2R9 | | | 5470, 5471, 5472 |
| Cytosine_Deaminase_fcy1 | UniProtKB: | 5473 | 5474 | 5475, 5476, 5477, |
| | A0A0D4X3Q1 | | | 5478, 5479, 5480 |
| Cytosine_Deaminase_fcy1 | UniProtKB: | 5481 | 5482 | 5483, 5484, 5485, |
| | A0A0D4X4K1 | | | 5486, 5487, 5488 |
| Cytosine_Deaminase_fcy1 | UniProtKB: | 5489 | 5490 | 5491, 5492, 5493, |
| | A0A0D4X5B7 | | | 5494, 5495, 5496 |
| Cytosine_Deaminase_fcy1 | UniProtKB: | 5497 | 5498 | 5499, 5500, 5501, |
| | A0A0D4X7R4 | | | 5502, 5503, 5504 |
| Cytosine_Deaminase_fcy1 | UniProtKB: | 5505 | 5506 | 5507, 5508, 5509, |
| | A0A0D4X7X4 | | | 5510, 5511, 5512 |
| Cytosine_Deaminase_fcy1 | UniProtKB: | 5513 | 5514 | 5515, 5516, 5517, |
| | A0A0D4XA07 | | | 5518, 5519, 5520 |
| Cytosine_Deaminase_fcy1 | UniProtKB: | 5521 | 5522 | 5523, 5524, 5525, |
| | A0A0D4XA25 | | | 5526, 5527, 5528 |
| Cytosine_Deaminase_fcy1 | UniProtKB: | 5529 | 5530 | 5531, 5532, 5533, |
| | A0A0D4XAV6 | | | 5534, 5535, 5536 |
| Cytosine_Deaminase_fcy1 | UniProtKB: | 5537 | 5538 | 5539, 5540, 5541, |
| | A0A0D4XCJ5 | | | 5542, 5543, 5544 |
| Cytosine_Deaminase_fcy1 | UniProtKB: | 5545 | 5546 | 5547, 5548, 5549, |
| | A0A0D4XDL4 | | | 5550, 5551, 5552 |
| Cytosine_Deaminase_fcy1 | UniProtKB: | 5553 | 5554 | 5555, 5556, 5557, |
| | A0A0D4XG53 | | | 5558, 5559, 5560 |
| Cytosine_Deaminase_fcy1 | UniProtKB: | 5561 | 5562 | 5563, 5564, 5565, |
| | A0A0D4XGH3 | | | 5566, 5567, 5568 |
| Cytosine_Deaminase_fcy1 | UniProtKB: | 5569 | 5570 | 5571, 5572, 5573, |
| | A0A0D4XHD4 | | | 5574, 5575, 5576 |
| Cytosine_Deaminase_fcy1 | UniProtKB: | 5577 | 5578 | 5579, 5580, 5581, |
| | A0A0D4XIK5 | | | 5582, 5583, 5584 |
| Cytosine_Deaminase_fcy1 | UniProtKB: | 5585 | 5586 | 5587, 5588, 5589, |
| | A0A0D4XJR4 | | | 5590, 5591, 5592 |
| Cytosine_Deaminase_fcy1 | UniProtKB: | 5593 | 5594 | 5595, 5596, 5597, |
| | A0A0D4XL36 | | | 5598, 5599, 5600 |
| Cytosine_Deaminase_fcy1 | UniProtKB: | 5601 | 5602 | 5603, 5604, 5605, |
| | A0A0D4XNH2 | | | 5606, 5607, 5608 |
| Cytosine_Deaminase_fcy1 | UniProtKB: | 5609 | 5610 | 5611, 5612, 5613, |
| | A0A0D4XNS1 | | | 5614, 5615, 5616 |
| Cytosine_Deaminase_fcy1 | UniProtKB: | 5617 | 5618 | 5619, 5620, 5621, |
| | A0A0D4XQY5 | | | 5622, 5623, 5624 |
| Cytosine_Deaminase_fcy1 | UniProtKB: | 5625 | 5626 | 5627, 5628, 5629, |
| | A0A0D4XS80 | | | 5630, 5631, 5632 |
| Cytosine_Deaminase_fcy1 | UniProtKB: | 5633 | 5634 | 5635, 5636, 5637, |
| | A0A0D4XS82 | | | 5638, 5639, 5640 |
| Cytosine_Deaminase_fcy1 | UniProtKB: | 5641 | 5642 | 5643, 5644, 5645, |
| | A0A0D4XTC2 | | | 5646, 5647, 5648 |
| Cytosine_Deaminase_fcy1 | UniProtKB: | 5649 | 5650 | 5651, 5652, 5653, |
| | A0A0D4XUZ4 | | | 5654, 5655, 5656 |
| Cytosine_Deaminase_fcy1 | UniProtKB: | 5657 | 5658 | 5659, 5660, 5661, |
| | A0A0D4XW26 | | | 5662, 5663, 5664 |
| Cytosine_Deaminase_fcy1 | UniProtKB: | 5665 | 5666 | 5667, 5668, 5669, |
| | A0A0D4XXD1 | | | 5670, 5671, 5672 |
| Cytosine_Deaminase_fcy1 | UniProtKB: | 5673 | 5674 | 5675, 5676, 5677, |
| | A0A0D4XYH3 | | | 5678, 5679, 5680 |
| Cytosine_Deaminase_fcy1 | UniProtKB: | 5681 | 5682 | 5683, 5684, 5685, |
| | A0A0D4XZT0 | | | 5686, 5687, 5688 |
| Cytosine_Deaminase_fcy1 | UniProtKB: | 5689 | 5690 | 5691, 5692, 5693, |
| | A0A0D4Y164 | | | 5694, 5695, 5696 |
| Cytosine_Deaminase_fcy1 | UniProtKB: | 5697 | 5698 | 5699, 5700, 5701, |
| | A0A0D4Y2A8 | | | 5702, 5703, 5704 |
| Cytosine_Deaminase_fcy1 | UniProtKB: | 5705 | 5706 | 5707, 5708, 5709, |
| | A0A0D4Y3N1 | | | 5710, 5711, 5712 |
| Cytosine_Deaminase_fcy1 | UniProtKB: | 5713 | 5714 | 5715, 5716, 5717, |
| | A0A0D4Y5S3 | | | 5718, 5719, 5720 |
| Cytosine_Deaminase_fcy1 | UniProtKB: | 5721 | 5722 | 5723, 5724, 5725, |
| | A0A0D4Y5Y1 | | | 5726, 5727, 5728 |
| Cytosine_Deaminase_fcy1 | UniProtKB: | 5729 | 5730 | 5731, 5732, 5733, |
| | A0A0D4Y7I2 | | | 5734, 5735, 5736 |
| Cytosine_Deaminase_fcy1 | UniProtKB: | 5737 | 5738 | 5739, 5740, 5741, |
| | A0A0D4Y8S5 | | | 5742, 5743, 5744 |
| Cytosine_Deaminase_fcy1 | UniProtKB: | 5745 | 5746 | 5747, 5748, 5749, |
| | A0A0D4YAR2 | | | 5750, 5751, 5752 |
| Cytosine_Deaminase_fcy1 | UniProtKB: | 5753 | 5754 | 5755, 5756, 5757, |
| | A0A0D4YBY2 | | | 5758, 5759, 5760 |
| Cytosine_Deaminase_fcy1 | UniProtKB: | 5761 | 5762 | 5763, 5764, 5765, |
| | A0A0D4YCB3 | | | 5766, 5767, 5768 |
| Cytosine_Deaminase_fcy1 | UniProtKB: | 5769 | 5770 | 5771, 5772, 5773, |
| | A0A0D4YEC2 | | | 5774, 5775, 5776 |
| Cytosine_Deaminase_fcy1 | UniProtKB: | 5777 | 5778 | 5779, 5780, 5781, |
| | A0A0D4YF30 | | | 5782, 5783, 5784 |
| Cytosine_Deaminase_fcy1 | UniProtKB: | 5785 | 5786 | 5787, 5788, 5789, |
| | A0A0D4YGU2 | | | 5790, 5791, 5792 |
| Cytosine_Deaminase_fcy1 | UniProtKB: | 5793 | 5794 | 5795, 5796, 5797, |
| | A0A0D4YHN3 | | | 5798, 5799, 5800 |
| Cytosine_Deaminase_fcy1 | UniProtKB: | 5801 | 5802 | 5803, 5804, 5805, |
| | A0A0D4YIU4 | | | 5806, 5807, 5808 |
| Cytosine_Deaminase_fcy1 | UniProtKB: | 5809 | 5810 | 5811, 5812, 5813, |
| | A0A0D4YJ74 | | | 5814, 5815, 5816 |
| Cytosine_Deaminase_fcy1 | UniProtKB: | 5817 | 5818 | 5819, 5820, 5821, |
| | A0A0D4YKC5 | | | 5822, 5823, 5824 |
| Cytosine_Deaminase_fcy1 | UniProtKB: | 5825 | 5826 | 5827, 5828, 5829, |
| | A0A0D4YMN8 | | | 5830, 5831, 5832 |
| Cytosine_Deaminase_fcy1 | UniProtKB: | 5833 | 5834 | 5835, 5836, 5837, |
| | A0A0D4YMV6 | | | 5838, 5839, 5840 |
| Cytosine_Deaminase_fcy1 | UniProtKB: | 5841 | 5842 | 5843, 5844, 5845, |
| | A0A0D4YPP6 | | | 5846, 5847, 5848 |
| Cytosine_Deaminase_fcy1 | UniProtKB: | 5849 | 5850 | 5851, 5852, 5853, |
| | A0A0D4YRD4 | | | 5854, 5855, 5856 |
| Cytosine_Deaminase_fcy1 | UniProtKB: | 5857 | 5858 | 5859, 5860, 5861, |
| | A0A0D4YS13 | | | 5862, 5863, 5864 |
| Cytosine_Deaminase_fcy1 | UniProtKB: | 5865 | 5866 | 5867, 5868, 5869, |
| | A0A0D4YTJ7 | | | 5870, 5871, 5872 |
| Cytosine_Deaminase_fcy1 | UniProtKB: | 5873 | 5874 | 5875, 5876, 5877, |
| | A0A0D4YUX9 | | | 5878, 5879, 5880 |
| Cytosine_Deaminase_fcy1 | UniProtKB: | 5881 | 5882 | 5883, 5884, 5885, |
| | A0A0D4YV34 | | | 5886, 5887, 5888 |
| Cytosine_Deaminase_fcy1 | UniProtKB: | 5889 | 5890 | 5891, 5892, 5893, |
| | A0A0D4YXE1 | | | 5894, 5895, 5896 |
| Cytosine_Deaminase_fcy1 | UniProtKB: | 5897 | 5898 | 5899, 5900, 5901, |
| | A0A0D4YYM6 | | | 5902, 5903, 5904 |
| Cytosine_Deaminase_fcy1 | UniProtKB: | 5905 | 5906 | 5907, 5908, 5909, |
| | A0A0D4YZB7 | | | 5910, 5911, 5912 |
| Cytosine_Deaminase_fcy1 | UniProtKB: | 5913 | 5914 | 5915, 5916, 5917, |
| | A0A0D4Z060 | | | 5918, 5919, 5920 |
| Cytosine_Deaminase_fcy1 | UniProtKB: | 5921 | 5922 | 5923, 5924, 5925, |
| | A0A0D4Z1S2 | | | 5926, 5927, 5928 |
| Cytosine_Deaminase_fcy1 | UniProtKB: | 5929 | 5930 | 5931, 5932, 5933, |
| | A0A0D4Z2L6 | | | 5934, 5935, 5936 |
| Cytosine_Deaminase_fcy1 | UniProtKB: | 5937 | 5938 | 5939, 5940, 5941, |
| | A0A0D4Z4A1 | | | 5942, 5943, 5944 |
| Cytosine_Deaminase_fcy1 | UniProtKB: | 5945 | 5946 | 5947, 5948, 5949, |
| | A0A0D4Z552 | | | 5950, 5951, 5952 |
| Cytosine_Deaminase_fcy1 | UniProtKB: | 5953 | 5954 | 5955, 5956, 5957, |
| | A0A0D4Z6N6 | | | 5958, 5959, 5960 |
| Cytosine_Deaminase_fcy1 | UniProtKB: | 5961 | 5962 | 5963, 5964, 5965, |
| | A0A0D4Z800 | | | 5966, 5967, 5968 |
| Cytosine_Deaminase_fcy1 | UniProtKB: | 5969 | 5970 | 5971, 5972, 5973, |
| | A0A0D4Z9V2 | | | 5974, 5975, 5976 |
| Cytosine_Deaminase_fcy1 | UniProtKB: | 5977 | 5978 | 5979, 5980, 5981, |
| | A0A0D4ZB52 | | | 5982, 5983, 5984 |
| Cytosine_Deaminase_fcy1 | UniProtKB: | 5985 | 5986 | 5987, 5988, 5989, |
| | A0A0D4ZCA2 | | | 5990, 5991, 5992 |
| Cytosine_Deaminase_fcy1 | UniProtKB: | 5993 | 5994 | 5995, 5996, 5997, |
| | A0A0D4ZCG3 | | | 5998, 5999, 6000 |
| Cytosine_Deaminase_fcy1 | UniProtKB: | 6001 | 6002 | 6003, 6004, 6005, |
| | A0A0D4ZEM2 | | | 6006, 6007, 6008 |
| Cytosine_Deaminase_fcy1 | UniProtKB: | 6009 | 6010 | 6011, 6012, 6013, |
| | A0A0D4ZFD0 | | | 6014, 6015, 6016 |
| Cytosine_Deaminase_fcy1 | UniProtKB: | 6017 | 6018 | 6019, 6020, 6021, |
| | A0A0D4ZGR1 | | | 6022, 6023, 6024 |
| Cytosine_Deaminase_fcy1 | UniProtKB: | 6025 | 6026 | 6027, 6028, 6029, |
| | A0A0D4ZIM2 | | | 6030, 6031, 6032 |
| Cytosine_Deaminase_fcy1 | UniProtKB: | 6033 | 6034 | 6035, 6036, 6037, |
| | A0A0D4ZJC0 | | | 6038, 6039, 6040 |
| Cytosine_Deaminase_fcy1 | UniProtKB: | 6041 | 6042 | 6043, 6044, 6045, |
| | A0A0D4ZK17 | | | 6046, 6047, 6048 |
| Cytosine_Deaminase_fcy1 | UniProtKB: | 6049 | 6050 | 6051, 6052, 6053, |
| | A0A0D4ZMC8 | | | 6054, 6055, 6056 |
| Cytosine_Deaminase_fcy1 | UniProtKB: | 6057 | 6058 | 6059, 6060, 6061, |
| | A0A0D4ZMX9 | | | 6062, 6063, 6064 |
| Cytosine_Deaminase_fcy1 | UniProtKB: | 6065 | 6066 | 6067, 6068, 6069, |
| | A0A0D4ZP21 | | | 6070, 6071, 6072 |
| Cytosine_Deaminase_fcy1 | UniProtKB: | 6073 | 6074 | 6075, 6076, 6077, |
| | A0A0D4ZQ62 | | | 6078, 6079, 6080 |
| Cytosine_Deaminase_fcy1 | UniProtKB: | 6081 | 6082 | 6083, 6084, 6085, |
| | A0A0D4ZQ92 | | | 6086, 6087, 6088 |
| Cytosine_Deaminase_fcy1 | UniProtKB: | 6089 | 6090 | 6091, 6092, 6093, |
| | A0A0D4ZS31 | | | 6094, 6095, 6096 |
| Cytosine_Deaminase_fcy1 | UniProtKB: | 6097 | 6098 | 6099, 6100, 6101, |
| | A0A0D4ZS87 | | | 6102, 6103, 6104 |
| Cytosine_Deaminase_fcy1 | UniProtKB: | 6105 | 6106 | 6107, 6108, 6109, |
| | A0A0D4ZTS6 | | | 6110, 6111, 6112 |
| Cytosine_Deaminase_fcy1 | UniProtKB: | 6113 | 6114 | 6115, 6116, 6117, |
| | A0A0D4ZUK0 | | | 6118, 6119, 6120 |
| Cytosine_Deaminase_fcy1 | UniProtKB: | 6121 | 6122 | 6123, 6124, 6125, |
| | A0A0D4ZVN6 | | | 6126, 6127, 6128 |
| Cytosine_Deaminase_fcy1 | UniProtKB: | 6129 | 6130 | 6131, 6132, 6133, |
| | A0A0D4ZWP2 | | | 6134, 6135, 6136 |
| Cytosine_Deaminase_fcy1 | UniProtKB: | 6137 | 6138 | 6139, 6140, 6141, |
| | A0A0D4ZX07 | | | 6142, 6143, 6144 |
| Cytosine_Deaminase_fcy1 | UniProtKB: | 6145 | 6146 | 6147, 6148, 6149, |
| | Q12178 | | | 6150, 6151, 6152 |
| Cytosine_Deaminase_fcy1 | UniProtKB: | 6153 | 6154 | 6155, 6156, 6157, |
| | W7PK48 | | | 6158, 6159, 6160 |
| Cytosine_Deaminase_fcy1 | UniProtKB: | 6161 | 6162 | 6163, 6164, 6165, |
| | W7R647 | | | 6166, 6167, 6168 |
| Deoxy-cytidine_Kinase_dCK | UniProtKB: | 6169 | 6170 | 6171, 6172, 6173, |
| | P27707 | | | 6174, 6175, 6176 |
| Deoxynucleoside_Kinase_dNK | UniProtKB: | 6177 | 6178 | 6179, 6180, 6181, |
| | Q540Z9 | | | 6182, 6183, 6184 |
| Deoxynucleoside_Kinase_dNK | UniProtKB: | 6185 | 6186 | 6187, 6188, 6189, |
| | Q9XZT6 | | | 6190, 6191, 6192 |
| Purine_Nucleoside_{—} | UniProtKB: | 6193 | 6194 | 6195, 6196, 6197, |
| Phosphorylase_deoD | A0A023Z7B9 | | | 6198, 6199, 6200 |
| Purine_Nucleoside_{—} | UniProtKB: | 6201 | 6202 | 6203, 6204, 6205, |
| Phosphorylase_deoD | A0A024KMI2 | | | 6206, 6207, 6208 |
| Purine_Nucleoside_{—} | UniProtKB: | 6209 | 6210 | 6211, 6212, 6213, |
| Phosphorylase_deoD | A0A0E0SRY5 | | | 6214, 6215, 6216 |
| Purine_Nucleoside_{—} | UniProtKB: | 6217 | 6218 | 6219, 6220, 6221, |
| Phosphorylase_deoD | A0A0E0U7I4 | | | 6222, 6223, 6224 |
| Purine_Nucleoside_{—} | UniProtKB: | 6225 | 6226 | 6227, 6228, 6229, |
| Phosphorylase_deoD | A0A0E0VFI3 | | | 6230, 6231, 6232 |
| Purine_Nucleoside_{—} | UniProtKB: | 6233 | 6234 | 6235, 6236, 6237, |
| Phosphorylase_deoD | A0A0E0Y455 | | | 6238, 6239, 6240 |
| Purine_Nucleoside_{—} | UniProtKB: | 6241 | 6242 | 6243, 6244, 6245, |
| Phosphorylase_deoD | A0A0E1M7E2 | | | 6246, 6247, 6248 |
| Purine_Nucleoside_{—} | UniProtKB: | 6249 | 6250 | 6251, 6252, 6253, |
| Phosphorylase_deoD | A0A0E3KJD7 | | | 6254, 6255, 6256 |
| Purine_Nucleoside_{—} | UniProtKB: | 6257 | 6258 | 6259, 6260, 6261, |
| Phosphorylase_deoD | A0A0F6CCW6 | | | 6262, 6263, 6264 |
| Purine_Nucleoside_{—} | UniProtKB: | 6265 | 6266 | 6267, 6268, 6269, |
| Phosphorylase_deoD | A0A0F6FGI8 | | | 6270, 6271, 6272 |
| Purine_Nucleoside_{—} | UniProtKB: | 6273 | 6274 | 6275, 6276, 6277, |
| Phosphorylase_deoD | A0A0F6GWR2 | | | 6278, 6279, 6280 |
| Purine_Nucleoside_{—} | UniProtKB: | 6281 | 6282 | 6283, 6284, 6285, |
| Phosphorylase_deoD | A0A0G2SIK5 | | | 6286, 6287, 6288 |
| Purine_Nucleoside_{—} | UniProtKB: | 6289 | 6290 | 6291, 6292, 6293, |
| Phosphorylase_deoD | A0A0G3J9R6 | | | 6294, 6295, 6296 |
| Purine_Nucleoside_{—} | UniProtKB: | 6297 | 6298 | 6299, 6300, 6301, |
| Phosphorylase_deoD | A0A0G3J9Y2 | | | 6302, 6303, 6304 |
| Purine_Nucleoside_{—} | UniProtKB: | 6305 | 6306 | 6307, 6308, 6309, |
| Phosphorylase_deoD | A0A0G3KD68 | | | 6310, 6311, 6312 |
| Purine_Nucleoside_{—} | UniProtKB: | 6313 | 6314 | 6315, 6316, 6317, |
| Phosphorylase_deoD | A0A0H2Z6H1 | | | 6318, 6319, 6320 |
| Purine_Nucleoside_{—} | UniProtKB: | 6321 | 6322 | 6323, 6324, 6325, |
| Phosphorylase_deoD | A0A0H3EQW1 | | | 6326, 6327, 6328 |
| Purine_Nucleoside_{—} | UniProtKB: | 6329 | 6330 | 6331, 6332, 6333, |
| Phosphorylase_deoD | A0A0H3XF09 | | | 6334, 6335, 6336 |
| Purine_Nucleoside_{—} | UniProtKB: | 6337 | 6338 | 6339, 6340, 6341, |
| Phosphorylase_deoD | A0A0J9WZC9 | | | 6342, 6343, 6344 |
| Purine_Nucleoside_{—} | UniProtKB: | 6345 | 6346 | 6347, 6348, 6349, |
| Phosphorylase_deoD | A7ZVS7 | | | 6350, 6351, 6352 |
| Purine_Nucleoside_{—} | UniProtKB: | 6353 | 6354 | 6355, 6356, 6357, |
| Phosphorylase_deoD | A8A8B3 | | | 6358, 6359, 6360 |
| Purine_Nucleoside_{—} | UniProtKB: | 6361 | 6362 | 6363, 6364, 6365, |
| Phosphorylase_deoD | B1IS35 | | | 6366, 6367, 6368 |
| Purine_Nucleoside_{—} | UniProtKB: | 6369 | 6370 | 6371, 6372, 6373, |
| Phosphorylase_deoD | B1LEI9 | | | 6374, 6375, 6376 |
| Purine_Nucleoside_{—} | UniProtKB: | 6377 | 6378 | 6379, 6380, 6381, |
| Phosphorylase_deoD | B1XFJ4 | | | 6382, 6383, 6384 |
| Purine_Nucleoside_{—} | UniProtKB: | 6385 | 6386 | 6387, 6388, 6389, |
| Phosphorylase_deoD | B3HEI4 | | | 6390, 6391, 6392 |
| Purine_Nucleoside_{—} | UniProtKB: | 6393 | 6394 | 6395, 6396, 6397, |
| Phosphorylase_deoD | B5Z4R6 | | | 6398, 6399, 6400 |
| Purine_Nucleoside_{—} | UniProtKB: | 6401 | 6402 | 6403, 6404, 6405, |
| Phosphorylase_deoD | B6I6N1 | | | 6406, 6407, 6408 |
| Purine_Nucleoside_{—} | UniProtKB: | 6409 | 6410 | 6411, 6412, 6413, |
| Phosphorylase_deoD | B7LEN0 | | | 6414, 6415, 6416 |
| Purine_Nucleoside_{—} | UniProtKB: | 6417 | 6418 | 6419, 6420, 6421, |
| Phosphorylase_deoD | B7LXU6 | | | 6422, 6423, 6424 |
| Purine_Nucleoside_{—} | UniProtKB: | 6425 | 6426 | 6427, 6428, 6429, |
| Phosphorylase_deoD | B7MNJ1 | | | 6430, 6431, 6432 |
| Purine_Nucleoside_{—} | UniProtKB: | 6433 | 6434 | 6435, 6436, 6437, |
| Phosphorylase_deoD | B7N2V8 | | | 6438, 6439, 6440 |
| Purine_Nucleoside_{—} | UniProtKB: | 6441 | 6442 | 6443, 6444, 6445, |
| Phosphorylase_deoD | B7NH52 | | | 6446, 6447, 6448 |
| Purine_Nucleoside_{—} | UniProtKB: | 6449 | 6450 | 6451, 6452, 6453, |
| Phosphorylase_deoD | B7NW64 | | | 6454, 6455, 6456 |
| Purine_Nucleoside_{—} | UniProtKB: | 6457 | 6458 | 6459, 6460, 6461, |
| Phosphorylase_deoD | B7UR12 | | | 6462, 6463, 6464 |
| Purine_Nucleoside_{—} | UniProtKB: | 6465 | 6466 | 6467, 6468, 6469, |
| Phosphorylase_deoD | C3SE47 | | | 6470, 6471, 6472 |
| Purine_Nucleoside_{—} | UniProtKB: | 6473 | 6474 | 6475, 6476, 6477, |
| Phosphorylase_deoD | C4ZT66 | | | 6478, 6479, 6480 |
| Purine_Nucleoside_{—} | UniProtKB: | 6481 | 6482 | 6483, 6484, 6485, |
| Phosphorylase_deoD | C8TQD7 | | | 6486, 6487, 6488 |
| Purine_Nucleoside_{—} | UniProtKB: | 6489 | 6490 | 6491, 6492, 6493, |
| Phosphorylase_deoD | C8U157 | | | 6494, 6495, 6496 |
| Purine_Nucleoside_{—} | UniProtKB: | 6497 | 6498 | 6499, 6500, 6501, |
| Phosphorylase_deoD | C8UN92 | | | 6502, 6503, 6504 |
| Purine_Nucleoside_{—} | UniProtKB: | 6505 | 6506 | 6507, 6508, 6509, |
| Phosphorylase_deoD | D3GY24 | | | 6510, 6511, 6512 |
| Purine_Nucleoside_{—} | UniProtKB: | 6513 | 6514 | 6515, 6516, 6517, |
| Phosphorylase_deoD | D3QNE6 | | | 6518, 6519, 6520 |
| Purine_Nucleoside_{—} | UniProtKB: | 6521 | 6522 | 6523, 6524, 6525, |
| Phosphorylase_deoD | D6I4N2 | | | 6526, 6527, 6528 |
| Purine_Nucleoside_{—} | UniProtKB: | 6529 | 6530 | 6531, 6532, 6533, |
| Phosphorylase_deoD | D6IHU2 | | | 6534, 6535, 6536 |
| Purine_Nucleoside_{—} | UniProtKB: | 6537 | 6538 | 6539, 6540, 6541, |
| Phosphorylase_deoD | D6J6A4 | | | 6542, 6543, 6544 |
| Purine_Nucleoside_{—} | UniProtKB: | 6545 | 6546 | 6547, 6548, 6549, |
| Phosphorylase_deoD | E0J437 | | | 6550, 6551, 6552 |
| Purine_Nucleoside_{—} | UniProtKB: | 6553 | 6554 | 6555, 6556, 6557, |
| Phosphorylase_deoD | E2QLE4 | | | 6558, 6559, 6560 |
| Purine_Nucleoside_{—} | UniProtKB: | 6561 | 6562 | 6563, 6564, 6565, |
| Phosphorylase_deoD | E3PFG7 | | | 6566, 6567, 6568 |
| Purine_Nucleoside_{—} | UniProtKB: | 6569 | 6570 | 6571, 6572, 6573, |
| Phosphorylase_deoD | E8YEH0 | | | 6574, 6575, 6576 |
| Purine_Nucleoside_{—} | UniProtKB: | 6577 | 6578 | 6579, 6580, 6581, |
| Phosphorylase_deoD | F4NLK2 | | | 6582, 6583, 6584 |
| Purine_Nucleoside_{—} | UniProtKB: | 6585 | 6586 | 6587, 6588, 6589, |
| Phosphorylase_deoD | F4SEX7 | | | 6590, 6591, 6592 |
| Purine_Nucleoside_{—} | UniProtKB: | 6593 | 6594 | 6595, 6596, 6597, |
| Phosphorylase_deoD | F4STB8 | | | 6598, 6599, 6600 |
| Purine_Nucleoside_{—} | UniProtKB: | 6601 | 6602 | 6603, 6604, 6605, |
| Phosphorylase_deoD | F4T9F1 | | | 6606, 6607, 6608 |
| Purine_Nucleoside_{—} | UniProtKB: | 6609 | 6610 | 6611, 6612, 6613, |
| Phosphorylase_deoD | F4UXB7 | | | 6614, 6615, 6616 |
| Purine_Nucleoside_{—} | UniProtKB: | 6617 | 6618 | 6619, 6620, 6621, |
| Phosphorylase_deoD | F4VN60 | | | 6622, 6623, 6624 |
| Purine_Nucleoside_{—} | UniProtKB: | 6625 | 6626 | 6627, 6628, 6629, |
| Phosphorylase_deoD | F4VQF8 | | | 6630, 6631, 6632 |
| Purine_Nucleoside_{—} | UniProtKB: | 6633 | 6634 | 6635, 6636, 6637, |
| Phosphorylase_deoD | H9V0H4 | | | 6638, 6639, 6640 |
| Purine_Nucleoside_{—} | UniProtKB: | 6641 | 6642 | 6643, 6644, 6645, |
| Phosphorylase_deoD | J7QV83 | | | 6646, 6647, 6648 |
| Purine_Nucleoside_{—} | UniProtKB: | 6649 | 6650 | 6651, 6652, 6653, |
| Phosphorylase_deoD | P0ABP8 | | | 6654, 6655, 6656 |
| Purine_Nucleoside_{—} | UniProtKB: | 6657 | 6658 | 6659, 6660, 6661, |
| Phosphorylase_deoD | Q0T8S9 | | | 6662, 6663, 6664 |
| Purine_Nucleoside_{—} | UniProtKB: | 6665 | 6666 | 6667, 6668, 6669, |
| Phosphorylase_deoD | Q1R259 | | | 6670, 6671, 6672 |
| Purine_Nucleoside_{—} | UniProtKB: | 6673 | 6674 | 6675, 6676, 6677, |
| Phosphorylase_deoD | W8ZSE4 | | | 6678, 6679, 6680 |
| Purine_Nucleoside_{—} | UniProtKB: | 6681 | 6682 | 6683, 6684, 6685, |
| Phosphorylase_deoD | X5FDR9 | | | 6686, 6687, 6688 |
| Thymidine_Kinase_TK | UniProtKB: | 6689 | 6690 | 6691, 6692, 6693, |
| | B2CPP5 | | | 6694, 6695, 6696 |
| Thymidine_Kinase_TK | UniProtKB: | 6697 | 6698 | 6699, 6700, 6701, |
| | B2CPP6 | | | 6702, 6703, 6704 |
| Thymidine_Kinase_TK | UniProtKB: | 6705 | 6706 | 6707, 6708, 6709, |
| | B2CPP7 | | | 6710, 6711, 6712 |
| Thymidine_Kinase_TK | UniProtKB: | 6713 | 6714 | 6715, 6716, 6717, |
| | B2CPP8 | | | 6718, 6719, 6720 |
| Thymidine_Kinase_TK | UniProtKB: | 6721 | 6722 | 6723, 6724, 6725, |
| | B2CPP9 | | | 6726, 6727, 6728 |
| Thymidine_Kinase_TK | UniProtKB: | 6729 | 6730 | 6731, 6732, 6733, |
| | B2CPQ0 | | | 6734, 6735, 6736 |
| Thymidine_Kinase_TK | UniProtKB: | 6737 | 6738 | 6739, 6740, 6741, |
| | B2CPQ2 | | | 6742, 6743, 6744 |
| Thymidine_Kinase_TK | UniProtKB: | 6745 | 6746 | 6747, 6748, 6749, |
| | B2CPQ3 | | | 6750, 6751, 6752 |
| Thymidine_Kinase_TK | UniProtKB: | 6753 | 6754 | 6755, 6756, 6757, |
| | B2CPQ4 | | | 6758, 6759, 6760 |
| Thymidine_Kinase_TK | UniProtKB: | 6761 | 6762 | 6763, 6764, 6765, |
| | B2CPQ5 | | | 6766, 6767, 6768 |
| Thymidine_Kinase_TK | UniProtKB: | 6769 | 6770 | 6771, 6772, 6773, |
| | O72346 | | | 6774, 6775, 6776 |
| Thymidine_Kinase_TK | UniProtKB: | 6777 | 6778 | 6779, 6780, 6781, |
| | P06478 | | | 6782, 6783, 6784 |
| Thymidine_Kinase_TK | UniProtKB: | 6785 | 6786 | 6787, 6788, 6789, |
| | P08333 | | | 6790, 6791, 6792 |
| Thymidine_Kinase_TK | UniProtKB: | 6793 | 6794 | 6795, 6796, 6797, |
| | Q9DLP2 | | | 6798, 6799, 6800 |
| Thymidine_Kinase_TK | UniProtKB: | 6801 | 6802 | 6803, 6804, 6805, |
| | Q9ENS0 | | | 6806, 6807, 6808 |
| Thymidine_Kinase_TK | UniProtKB: | 6809 | 6810 | 6811, 6812, 6813, |
| | Q9ENS1 | | | 6814, 6815, 6816 |
| Thymidine_Kinase_TK | UniProtKB: | 6817 | 6818 | 6819, 6820, 6821, |
| | Q9ENS2 | | | 6822, 6823, 6824 |
| Thymidine_Kinase_TK | UniProtKB: | 6825 | 6826 | 6827, 6828, 6829, |
| | Q9ENS3 | | | 6830, 6831, 6832 |
| Thymidine_Kinase_TK | UniProtKB: | 6833 | 6834 | 6835, 6836, 6837, |
| | Q9ENS4 | | | 6838, 6839, 6840 |
| Thymidine_Kinase_TK | UniProtKB: | 6841 | 6842 | 6843, 6844, 6845, |
| | Q9ENS5 | | | 6846, 6847, 6848 |
| Thymidine_Kinase_TK | UniProtKB: | 6849 | 6850 | 6851, 6852, 6853, |
| | Q9IYZ7 | | | 6854, 6855, 6856 |
| Thymidine_Kinase_TK | UniProtKB: | 6857 | 6858 | 6859, 6860, 6861, |
| | Q9IYZ9 | | | 6862, 6863, 6864 |
| Thymidine_Kinase_TK | UniProtKB: | 6865 | 6866 | 6867, 6868, 6869, |
| | Q9IZ02 | | | 6870, 6871, 6872 |
| Thymidine_Kinase_TK | UniProtKB: | 6873 | 6874 | 6875, 6876, 6877, |
| | Q9IZ03 | | | 6878, 6879, 6880 |
| Thymidine_Kinase_TK | UniProtKB: | 6881 | 6882 | 6883, 6884, 6885, |
| | Q9IZ07 | | | 6886, 6887, 6888 |
| Thymidine_Kinase_TK | UniProtKB: | 6889 | 6890 | 6891, 6892, 6893, |
| | Q9QNF7 | | | 6894, 6895, 6896 |

[0113] According to the present invention, in a more preferred embodiment, the inventive composition comprises at least one RNA, preferably an mRNA comprising at least one coding region encoding at least one suicide gene product or a fragment or variant thereof, wherein the at least one coding region comprises an RNA sequence being identical or at least 50%, 60%, 70%, 75%, 80%, 81%, 82%, 83%, 84%, 85%, 86%, 87%, 88%, 89%, 90%, 91%, 92%, 93%, 94%, 95%, 96%, 97%, 98%, 99% identical to the RNA sequences according to the SEQ ID Nos as disclosed in Table 4.

[0114] 4. Immunogenic Proteins or Peptides

[0115] Preferably the RNA, preferably mRNA of the inventive RNA composition codes for at least one immunogenic protein or peptide, especially a protein or peptide of a pathogen, preferably a viral pathogen, or a fragment or variant thereof. By using RNA which codes for an immunogenic protein or peptide which is preferably a pathogenic antigen it is possible to utilize preexisting immunity against such antigens for treatment of tumor and/or cancer diseases. The memory immune response is triggered and the immune system is strengthened for attacking tumor cells.

[0116] This embodiment of the invention is based on the recognition that in principle every organism with an immune system exhibits “memory immune responses” against certain foreign molecules (antigens), for example proteins, in particular viral or bacterial proteins. If an organism has already been infected at an earlier point in time with the antigen an immune response against e.g. the viral protein has already been triggered by this infection. The immune system has a “memory” of this response and stores it. As consequence of a reinfection with the antigen the immune response is reactivated. Such reactivation may proceed by administration of an RNA, preferably mRNA coding for the antigen, wherein the preferred intratumoral administration according to the invention is especially effective. By reactivation of the memory immune response against e.g. viral pathogens it is possible to destroy tumor cells effectively.

[0117] Preferred examples of immunogenic proteins or peptides for this embodiment of the invention are proteins or peptides of widespread pathogens, i.e. pathogens with which every organism, in particular mammals, preferably humans, has a high probability of being infected at least once in his/her lifetime. These include, for example, any structural or non-structural protein or peptide of:
[0118] influenza virus type A or B or any other orthomyxovirus (influenza type C),
[0119] picornaviruses, such as rhinovirus or hepatitis A virus,
[0120] togaviruses, such as alphavirus or rubivirus, e.g. Sindbis, Semliki-Forest or rubeolavirus (measles virus),
[0121] rubella virus (German measles virus),
[0122] coronaviruses, in particular subtypes HCV-229E or HCV-OC43,
[0123] rhabdoviruses, such as rabies virus,
[0124] paramyxoviruses, such as mumps virus,
[0125] reoviruses, such as group A, B or C rotavirus,
[0126] hepadnaviruses, such as hepatitis B virus,
[0127] papoviruses, such as human papillomaviruses (HPV) of any serotype, especially from 1 to 75,
[0128] adenoviruses, in particular type 1 to 47,
[0129] herpesviruses, such as Herpes simplex virus 1, 2 or 3,
[0130] cytomegalovirus (CMV), preferably CMVpp65,
[0131] Epstein Barr virus (EBV),
[0132] vaccinia viruses and
[0133] the bacterium Chiamydophila pneumoniae (Chlamydia pneumoniae).

[0134] Further examples of preferred immunogenic proteins or peptides are proteins or peptides of pathogens which only seldom infect an organism. Nevertheless RNA coding for one or more of these proteins or peptides may be effective in the inventive approach. These proteins or peptide include, for example, any structural or non-structural protein or peptide of:
[0135] Flaviviruses, such as dengue virus type 1 to 4, yellow fever virus, West Nile virus, Japanese encephalitis virus
[0136] hepatitis C virus,
[0137] caliciviruses,
[0138] filoviruses, such as Ebola virus,
[0139] bornaviruses,
[0140] bunyaviruses, such as Rift Valley fever virus,
[0141] arenaviruses, such as LCMV (lymphocytic choriomeningitis virus) or hemorrhagic fever viruses,
[0142] retroviruses, such as HIV and
[0143] parvoviruses.

[0144] Preferably the RNA of the inventive mRNA composition codes for influenza nucleoprotein (NP). It has been shown by the inventors that the use of a composition containing mRNA coding for influenza nucleoprotein is especially effective in reducing tumor size, when applied according to the inventive approach. In this context an mRNA encoding an Influenza nucleoprotein according to SEQ ID NO. 6 is particularly preferred.

[0145] 5. Cell Death Inducers and Apoptosis Inducers:

[0146] In the broadest sense, an apoptosis inducer or cell death inducer has to be understood as a molecule inducing autophagy, cornification, excitotoxicity, necrosis, Wallerian degeneration, entosis, mitotic catastrophe, necroptosis and pyroptosis (reviewed in Kroemer, G., et al. “Classification of cell death: recommendations of the Nomenclature Committee on Cell Death 2009.” Cell Death & Differentiation 16.1 (2009): 3-11.).

[0147] In a further preferred embodiment of the inventive RNA containing composition the RNA codes for at least one apoptosis inducer, preferably an apoptosis inducer chosen from the group consisting of the Bcl-2 family and tumor suppressor protein p53 and ligands of transmembrane death receptors, especially the TNF (tumor necrosis factor) receptor gene superfamily, pro-apoptic receptor agonists and Beclin-1.

[0148] A particularly preferred apoptosis inducer in the context of the present invention is Beclin-1 (derived from the BECN1 gene). It is known in the art that Beclin-1 interacts with Bcl-2, BCL2L2, GOPC and MAP1LC3A to regulate autophagy and cell death.

[0149] Apoptosis provides an important barrier against cancer. However, specific mutations (e.g. mutation of the tumor suppressor gene p53) enable some tumor cells to escape apoptotic death and become more malignant. By using an mRNA coding for at least one apoptosis inducer it is possible to reactivate apoptosis which is an important and effective system of the organism to eliminate cancer cells.

[0150] Preferred examples of apoptosis inducers may be chosen from the following list: Bcl-10, Bax, Bak, Bid, Bad, Bim, Bik, Blk, Cytochrome c, Caspases, especially Caspase 3, Caspase 6, Caspase 7, Caspase 8, Caspase 9, Death domain, especially of Fas, preferably FasL, TNFα, Apo2L/TRAIL, agonist of DR4 and/or DR5, Apo3L, DR4 agonistic antibody, DR5 agonistic antibody, protein kinase R (PKR) (preferably constitutive active PKR), Granzyme B.

[0151] Two signalling pathways initiate apoptosis: the intrinsic pathway acts through intracellular Bcl-2 proteins, the extrinsic pathway through cell-surface pro-apoptotic receptors.

[0152] The intrinsic signaling pathway for programmed cell death involves non-receptor-mediated intracellular signals, inducing activities in the mitochondria that initiate apoptosis. Stimuli for the intrinsic pathway include viral infections or damage to the cell by toxins, free radicals, or radiation. Damage to the cellular DNA can also induce the activation of the intrinsic pathway for programmed cell death. These stimuli induce changes in the inner mitochondrial membrane that result in the loss of transmembrane potential, causing the release of pro-apoptotic proteins into the cytosol. Pro-apoptotic proteins activate caspases that mediate the destruction of the cell through many pathways. These proteins also translocate into the cellular nucleus, inducing DNA fragmentation, a hallmark of apoptosis. The regulation of pro-apoptotic events in the mitochondria occurs through activity of members of the Bcl-2 family of proteins and the tumor suppressor protein p53. Members of the Bcl-2 family of proteins may be pro-apoptotic or anti-apoptotic. The anti-apoptotic proteins are Bcl-2, Bcl-x, Bcl-xL, Bcl-XS, Bcl-w, and BAG. Pro-apoptotic proteins include Bcl-10, Bax, Bak, Bid, Bad, Bim, Bik, and Blk (Elmore, 2007. Toxicol Pathol. 35(4):495-516 (PMID: 17562483)), which are especially preferred for the inventive approach.

[0153] The extrinsic signaling pathway leading to apoptosis involves transmembrane death receptors that are members of the tumor necrosis factor (TNF) receptor gene superfamily. Members of this receptor family bind to extrinsic ligands and transduce intracellular signals that ultimately result in the destruction of the cell. The most well characterized ligands of these receptors to date are FasL, TNFα, Apo2L, and Apo3L. Corresponding receptors are FasR, TNFR1, DR3, and DR4/DR5. Molecules that stimulate the activity of these pro-apoptotic proteins or activate these receptors are currently under evaluation for their therapeutic potential in the treatment of cancer, including hematologic malignancies (Elmore, 2007. Toxicol Pathol. 35(4):495-516 (PMID: 17562483)). These extrinsic ligands are further especially preferred examples for use in the inventive approach.

[0154] New molecular insights have inspired the development of pro-apoptotic receptor agonists (PARAs), including the recombinant human protein apoptosis ligand 2/TNF-related apoptosis-inducing ligand (Apo2L/TRAIL). In addition, agonistic monoclonal antibodies to its signalling receptors DR4 (TRAILR1) and DR5 (TRAILR2) are under development. Mapatumumab is an example of a DR4 agonist antibody. Examples of DR5 agonistic antibodies include Lexatumumab, Apomab, AMG655, CS-1008 and LBY-135 (Ashkenazi, 2008. Nat. Rev. Drug Discov. 7(12):1001-12 (PMID: 18989337)).

[0155] The following table 5 summarizes some preferred apoptosis inducers.

TABLE 5
Apoptosis inducers

| | |
|---|---|
| Gene/Agent | Example |

Intrinsic pathway

Bcl-10
Bax
Bak
Bid
Bad
Bim
Bik
Blk
Cytochrome c
Caspase 3, 6, 7, 8, 9

Extrinsic pathway

| | |
|---|---|
| FasL | |
| TNFα | |
| Apo2L/TRAIL | |
| Apo3L | |
| DR4 agonist antibody | Mapatumumab |
| DR5 agonist antibody | Lexatumumab, Apomab, |
| | AMG655, CS-1008, LBY-135 |

Other

Granzyme B

[0156] According to preferred embodiments in the context of the present invention apoptosis inducers may be selected from any apoptosis inducer selected from the group consisting of Apo2L/TRAIL; Apo3L; Bad; Bak; Bax; Bcl-10; Bid; Bik; Bim; Blk; Caspase_3; Caspase_6; Caspase_7; Caspase_8; Caspase_9; Cytochrome_c; FasL; Granzyme_B; TNF, preferably as disclosed in Table 6. Particularly preferred in this context are the RNA sequences encoding an apoptosis inducer according to Table 6.

TABLE 6
Apoptosis inducers:

| | | | RNA | Optimized |
|---|---|---|---|---|
| | | Protein | Sequence | RNA |
| | | Sequence | wild type | Sequence |
| Gene Name | Protein Accession No. | SEQ ID NO: | SEQ ID NO: | SEQ ID NO: |
| Apo2L/TRAIL | UniProtKB: P50591 | 6897 | 6898 | 6899, 6900, 6901, 6902, |
| | | | | 6903, 6904 |
| Apo3L | UniProtKB: O43508 | 6905 | 6906 | 6907, 6908, 6909, 6910, |
| | | | | 6911, 6912 |
| Bad | UniProtKB: A0A024R562 | 6913 | 6914 | 6915, 6916, 6917, 6918, |
| | | | | 6919, 6920 |
| Bad | UniProtKB: Q92934 | 6921 | 6922 | 6923, 6924, 6925, 6926, |
| | | | | 6927, 6928 |
| Bak | UniProtKB: Q16611 | 6929 | 6930 | 6931, 6932, 6933, 6934, |
| | | | | 6935, 6936 |
| Bak | UniProtKB: Q8NFF3 | 6937 | 6938 | 6939, 6940, 6941, 6942, |
| | | | | 6943, 6944 |
| Bax | UniProtKB: A0A0C4MVT1 | 6945 | 6946 | 6947, 6948, 6949, 6950, |
| | | | | 6951, 6952 |
| Bax | UniProtKB: A0A0C4MW46 | 6953 | 6954 | 6955, 6956, 6957, 6958, |
| | | | | 6959, 6960 |
| Bax | UniProtKB: A0A0C4MWS3 | 6961 | 6962 | 6963, 6964, 6965, 6966, |
| | | | | 6967, 6968 |
| Bax | UniProtKB: I6LPK7 | 6969 | 6970 | 6971, 6972, 6973, 6974, |
| | | | | 6975, 6976 |
| Bax | UniProtKB: K4JQN1 | 6977 | 6978 | 6979, 6980, 6981, 6982, |
| | | | | 6983, 6984 |
| Bax | UniProtKB: Q07812 | 6985 | 6986 | 6987, 6988, 6989, 6990, |
| | | | | 6991, 6992 |
| Bcl-10 | UniProtKB: O95999 | 6993 | 6994 | 6995, 6996, 6997, 6998, |
| | | | | 6999, 7000 |
| Bid | UniProtKB: A8ASI8 | 7001 | 7002 | 7003, 7004, 7005, 7006, |
| | | | | 7007, 7008 |
| Bid | UniProtKB: B2ZP78 | 7009 | 7010 | 7011, 7012, 7013, 7014, |
| | | | | 7015, 7016 |
| Bid | UniProtKB: B2ZP79 | 7017 | 7018 | 7019, 7020, 7021, 7022, |
| | | | | 7023, 7024 |
| Bid | UniProtKB: P55957 | 7025 | 7026 | 7027, 7028, 7029, 7030, |
| | | | | 7031, 7032 |
| Bik | UniProtKB: A0A024R4X6 | 7033 | 7034 | 7035, 7036, 7037, 7038, |
| | | | | 7039, 7040 |
| Bik | UniProtKB: Q13323 | 7041 | 7042 | 7043, 7044, 7045, 7046, |
| | | | | 7047, 7048 |
| Bim | UniProtKB: O43521 | 7049 | 7050 | 7051, 7052, 7053, 7054, |
| | | | | 7055, 7056 |
| Blk | UniProtKB: P51451 | 7057 | 7058 | 7059, 7060, 7061, 7062, |
| | | | | 7063, 7064 |
| Caspase_3 | UniProtKB: P42574 | 7065 | 7066 | 7067, 7068, 7069, 7070, |
| | | | | 7071, 7072 |
| Caspase_6 | UniProtKB: P55212 | 7073 | 7074 | 7075, 7076, 7077, 7078, |
| | | | | 7079, 7080 |
| Caspase_7 | UniProtKB: P55210 | 7081 | 7082 | 7083, 7084, 7085, 7086, |
| | | | | 7087, 7088 |
| Caspase_8 | UniProtKB: B5BU46 | 7089 | 7090 | 7091, 7092, 7093, 7094, |
| | | | | 7095, 7096 |
| Caspase_8 | UniProtKB: B6CGU5 | 7097 | 7098 | 7099, 7100, 7101, 7102, |
| | | | | 7103, 7104 |
| Caspase_8 | UniProtKB: C3S3G0 | 7105 | 7106 | 7107, 7108, 7109, 7110, |
| | | | | 7111, 7112 |
| Caspase_8 | UniProtKB: Q14790 | 7113 | 7114 | 7115, 7116, 7117, 7118, |
| | | | | 7119, 7120 |
| Caspase_9 | UniProtKB: A0A024R8F1 | 7121 | 7122 | 7123, 7124, 7125, 7126, |
| | | | | 7127, 7128 |
| Caspase_9 | UniProtKB: A0A024R8I4 | 7129 | 7130 | 7131, 7132, 7133, 7134, |
| | | | | 7135, 7136 |
| Caspase_9 | UniProtKB: P55211 | 7137 | 7138 | 7139, 7140, 7141, 7142, |
| | | | | 7143, 7144 |
| Caspase_9 | UniProtKB: Q9H257 | 7145 | 7146 | 7147, 7148, 7149, 7150, |
| | | | | 7151, 7152 |
| Cytochrome_c | UniProtKB: A0A024R9B7 | 7153 | 7154 | 7155, 7156, 7157, 7158, |
| | | | | 7159, 7160 |
| Cytochrome_c | UniProtKB: A0A024RAP6 | 7161 | 7162 | 7163, 7164, 7165, 7166, |
| | | | | 7167, 7168 |
| Cytochrome_c | UniProtKB: A0A024RBN6 | 7169 | 7170 | 7171, 7172, 7173, 7174, |
| | | | | 7175, 7176 |
| Cytochrome_c | UniProtKB: A0A024RBY9 | 7177 | 7178 | 7179, 7180, 7181, 7182, |
| | | | | 7183, 7184 |
| Cytochrome_c | UniProtKB: B8XYC5 | 7185 | 7186 | 7187, 7188, 7189, 7190, |
| | | | | 7191, 7192 |
| Cytochrome_c | UniProtKB: G4XXL9 | 7193 | 7194 | 7195, 7196, 7197, 7198, |
| | | | | 7199, 7200 |
| Cytochrome_c | UniProtKB: H0UI06 | 7201 | 7202 | 7203, 7204, 7205, 7206, |
| | | | | 7207, 7208 |
| Cytochrome_c | UniProtKB: H6SG12 | 7209 | 7210 | 7211, 7212, 7213, 7214, |
| | | | | 7215, 7216 |
| Cytochrome_c | UniProtKB: H6SG13 | 7217 | 7218 | 7219, 7220, 7221, 7222, |
| | | | | 7223, 7224 |
| Cytochrome_c | UniProtKB: H6SG14 | 7225 | 7226 | 7227, 7228, 7229, 7230, |
| | | | | 7231, 7232 |
| Cytochrome_c | UniProtKB: H6SG15 | 7233 | 7234 | 7235, 7236, 7237, 7238, |
| | | | | 7239, 7240 |
| Cytochrome_c | UniProtKB: O95101 | 7241 | 7242 | 7243, 7244, 7245, 7246, |
| | | | | 7247, 7248 |
| Cytochrome_c | UniProtKB: P08574 | 7249 | 7250 | 7251, 7252, 7253, 7254, |
| | | | | 7255, 7256 |
| Cytochrome_c | UniProtKB: P99999 | 7257 | 7258 | 7259, 7260, 7261, 7262, |
| | | | | 7263, 7264 |
| Cytochrome_c | UniProtKB: Q496I0 | 7265 | 7266 | 7267, 7268, 7269, 7270, |
| | | | | 7271, 7272 |
| Cytochrome_c | UniProtKB: Q53XN1 | 7273 | 7274 | 7275, 7276, 7277, 7278, |
| | | | | 7279, 7280 |
| Cytochrome_c | UniProtKB: Q6FGA0 | 7281 | 7282 | 7283, 7284, 7285, 7286, |
| | | | | 7287, 7288 |
| Cytochrome_c | UniProtKB: Q6FGI7 | 7289 | 7290 | 7291, 7292, 7293, 7294, |
| | | | | 7295, 7296 |
| Cytochrome_c | UniProtKB: Q71U45 | 7297 | 7298 | 7299, 7300, 7301, 7302, |
| | | | | 7303, 7304 |
| Cytochrome_c | UniProtKB: Q86WV2 | 7305 | 7306 | 7307, 7308, 7309, 7310, |
| | | | | 7311, 7312 |
| Cytochrome_c | UniProtKB: Q9UEG9 | 7313 | 7314 | 7315, 7316, 7317, 7318, |
| | | | | 7319, 7320 |
| FasL | UniProtKB: P48023 | 7321 | 7322 | 7323, 7324, 7325, 7326, |
| | | | | 7327, 7328 |
| Granzyme_B | UniProtKB: J3KQ52 | 7329 | 7330 | 7331, 7332, 7333, 7334, |
| | | | | 7335, 7336 |
| Granzyme_B | UniProtKB: Q67BC3 | 7337 | 7338 | 7339, 7340, 7341, 7342, |
| | | | | 7343, 7344 |
| Granzyme_B | UniProtKB: Q6XGZ2 | 7345 | 7346 | 7347, 7348, 7349, 7350, |
| | | | | 7351, 7352 |
| Granzyme_B | UniProtKB: Q6XGZ3 | 7353 | 7354 | 7355, 7356, 7357, 7358, |
| | | | | 7359, 7360 |
| Granzyme_B | UniProtKB: Q6XGZ4 | 7361 | 7362 | 7363, 7364, 7365, 7366, |
| | | | | 7367, 7368 |
| TNF | UniProtKB: P01375 | 7369 | 7370 | 7371, 7372, 7373, 7374, |
| | | | | 7375, 7376 |
| TNF | UniProtKB: Q5STB3 | 7377 | 7378 | 7379, 7380, 7381, 7382, |
| | | | | 7383, 7384 |

[0157] According to the present invention, in a more preferred embodiment, the inventive composition comprises at least one RNA, preferably an mRNA comprising at least one coding region encoding at least one apoptosis inducer or cell death inducer or a fragment or variant thereof, wherein the at least one coding region comprises an RNA sequence being identical or at least 50%, 60%, 70%, 75%, 80%, 81%, 82%, 83%, 84%, 85%, 86%, 87%, 88%, 89%, 90%, 91%, 92%, 93%, 94%, 95%, 96%, 97%, 98%, 99% identical to the RNA sequences according to the SEQ ID Nos as disclosed in Table 6.

[0158] 6. Angiogenesis Inhibitors

[0159] In a further preferred embodiment of the inventive RNA containing composition the at least one RNA, preferably mRNA codes for at least one angiogenesis modulator or inhibitor, preferably an endogenous angiogenesis inhibitor or a fragment or variant thereof. Tumor growth and survival depend on angiogenesis to provide a path for delivery of oxygen and nutrients to tumor cells. By using RNA coding for at least one angiogenesis inhibitor according to the inventive approach it is possible to block angiogenesis in a localized manner, namely within the tumor tissue, thereby providing an effective method for stopping tumor growth and decreasing tumor volume. Preferred examples of angiogenesis inhibitors according to the invention may be chosen from the following list: interferon alpha (IFN-α), (interferon beta) IFN-β, interferon gamma (IFN-γ), CXCL9, CXCL10, interleukin 12 (IL-12), platelet factor 4 (PF-4), tumor necrosis factor alpha (TNF-α), soluble fms-like tyrosine kinase 1 (sFLT-1), Fetal Liver Kinase 1 (FLK-1), Angiostatin, Endostatin, Vasostatin, Canstatin, Tumstatin, 16 kD prolacin fragment, tissue inhibitor of metalloproteinases 1 (TIMP-1), tissue inhibitor of metalloproteinases 2 (TIMP-2), tissue inhibitor of metalloproteinases 3 (TIMP-3), thrombospondin 1 (TSP-1), thrombospondin 2 (TSP-2), Maspin, PEX, soluble Tyrosine-protein kinase receptor 1 (sTie1), soluble Angiopoietin-1 receptor 2 (sTie2), Angiopoietin-1, Angiopoietin-2, Antivascular endothelial growth factor receptor 2 (VEGFR2) antibody (e.g. Alacizumab, Ramucirumab), Anti-vascular endothelial growth factor (VEGF) antibody (e.g. Brolucizumab, Ranibizumab, Bevacizumab), and Anti-vascular endothelial growth factor receptor 1 (VEGFR1) antibody (e.g. Icrucumab).

[0160] Without this process of blood vessel recruitment, tumor growth is limited to 1 to 2 mm², the diffusion limit of oxygen. Already in 1971, Folkman proposed that tumor growth could be arrested by blocking angiogenesis (Folkman, 1972. N. Engl. J. Med. 285(21):1182-6).

[0161] Angiogenesis is a multistep process of new blood vessel formation from preexisting vasculature that includes the activation, proliferation and migration of endothelial cells (ECs), disruption of vascular basement membranes, remodeling of the extracellular matrix of tissues, formation of vascular tubes and networks, recruitment of supporting cells, including smooth muscle cells and pericytes, and connection to the pre-existing vascular network.

[0162] Within a given microenvironment, the angiogenic response results from a balance between pro-angiogenic and anti-angiogenic factors, secreted both by tumor cells and components of the stroma; the prevalence of the former determines the “angiogenic switch”, resulting in the activation of angiogenesis followed by tumor outgrowth (Hanahan and Folkman, 1996. Cell 86(3):353-64).

[0163] Gene therapy based strategies of angiogenesis inhibition and especially the approach according to the present invention have several advantages compared with conventional modalities of administration of anti-angiogenic drugs. First of all, since effective suppression of pathological angiogenesis may eventually require chronic treatment, the gene therapy strategy according to the invention is useful to achieve selective delivery to affected tissues and prolonged expression of the therapeutic agents. Gene therapy in general also represents a method for circumventing the production problems of many recombinant proteins including their stability and solubility; adequate production of anti-angiogenic factors by recombinant engineering methods has been sometimes problematic (e.g. for angiostatin) and may limit their clinical application. Moreover gene transfer usage allows the correct folding of proteic agents and their stability in vivo since they are assembled in their physiologic environment. A particularly attractive feature of the inventive approach is the possibility of targeting gene delivery to selective tissues, namely tumor tissue, thus achieving localized gene expression and high regional drug concentrations without increasing the systemic levels of the therapeutic agents and thereby resulting in an improved therapeutic index.

[0164] Angiogenesis inhibitors are heterogeneous in origin and potency, and their growing list includes proteolysis products of larger molecules with a different function, such as angiostatin, endostatin and vasostatin, modulators of vascular endothelial growth factor activity, such as soluble FLT-1 (sFLT-1), and some cytokines/chemokines with marked anti-endothelial activity, such as IL-12, IFN-α, and CXCL10. The following table 8 (adapted from Persano et al., 2007. Mol. Aspects Med. 28(1):87-114. PMID: 17306361) summarizes the preferred angiogenesis inhibitors which may be used in the inventive approach. According to preferred embodiments in the context of the present invention angiogenesis inhibitors may be selected from any endogenous angiogenesis inhibitor selected from the group consisting of Angiopoietin-2; Angiostatin; Canstatin; CXCL10; CXCL4; CXCL9; Endostatin; FLK-1; IFNalpha; IFNB; IFNG; IL-12; PEX; PRL; SERPINB5; sFLT-1; sTie2; TIMP-1; TIMP-2; TIMP-3; TNF; TSP-1; TSP-2; Tumstatin; Vasostatin, preferably as disclosed in Table 7. Particularly preferred in this context are the RNA sequences encoding an angiogenesis inhibitor according to Table 7.

TABLE 7
Endogenous angiogenesis inhibitors

| | | | RNA | Optimized |
|---|---|---|---|---|
| | | Protein | Sequence | RNA |
| | | Sequence | wild type | Sequence |
| Gene Name | Protein Accession No. | SEQ ID NO: | SEQ ID NO: | SEQ ID NO: |
| IFNalpha | UniProtKB: G9JKF1 | 3953 | 3954 | 3955, 3956, 3957, 3958, 3959, |
| | | | | 3960 |
| IFNalpha | UniProtKB: P01562 | 3961 | 3962 | 3963, 3964, 3965, 3966, 3967, |
| | | | | 3968 |
| IFNalpha | UniProtKB: P01563 | 3969 | 3970 | 3971, 3972, 3973, 3974, 3975, |
| | | | | 3976 |
| IFNalpha | UniProtKB: P01566 | 3977 | 3978 | 3979, 3980, 3981, 3982, 3983, |
| | | | | 3984 |
| IFNalpha | UniProtKB: P01567 | 3985 | 3986 | 3987, 3988, 3989, 3990, 3991, |
| | | | | 3992 |
| IFNalpha | UniProtKB: P01568 | 3993 | 3994 | 3995, 3996, 3997, 3998, 3999, |
| | | | | 4000 |
| IFNalpha | UniProtKB: P01569 | 4001 | 4002 | 4003, 4004, 4005, 4006, 4007, |
| | | | | 4008 |
| IFNalpha | UniProtKB: P01570 | 4009 | 4010 | 4011, 4012, 4013, 4014, 4015, |
| | | | | 4016 |
| IFNalpha | UniProtKB: P01571 | 4017 | 4018 | 4019, 4020, 4021, 4022, 4023, |
| | | | | 4024 |
| IFNalpha | UniProtKB: P05013 | 4025 | 4026 | 4027, 4028, 4029, 4030, 4031, |
| | | | | 4032 |
| IFNalpha | UniProtKB: P05014 | 4033 | 4034 | 4035, 4036, 4037, 4038, 4039, |
| | | | | 4040 |
| IFNalpha | UniProtKB: P05015 | 4041 | 4042 | 4043, 4044, 4045, 4046, 4047, |
| | | | | 4048 |
| IFNalpha | UniProtKB: P32881 | 4049 | 4050 | 4051, 4052, 4053, 4054, 4055, |
| | | | | 4056 |
| IFNalpha | UniProtKB: Q14618 | 4057 | 4058 | 4059, 4060, 4061, 4062, 4063, |
| | | | | 4064 |
| IFNalpha | UniProtKB: Q86UP4 | 4065 | 4066 | 4067, 4068, 4069, 4070, 4071, |
| | | | | 4072 |
| IFNB | UniProtKB: P01574 | 4073 | 4074 | 4075, 4076, 4077, 4078, 4079, |
| | | | | 4080 |
| IFNB | UniProtKB: Q15943 | 4081 | 4082 | 4083, 4084, 4085, 4086, 4087, |
| | | | | 4088 |
| IFNG | UniProtKB: P01579 | 4089 | 4090 | 4091, 4092, 4093, 4094, 4095, |
| | | | | 4096 |
| IFNG | UniProtKB: Q14609 | 4097 | 4098 | 4099, 4100, 4101, 4102, 4103, |
| | | | | 4104 |
| IFNG | UniProtKB: Q14610 | 4105 | 4106 | 4107, 4108, 4109, 4110, 4111, |
| | | | | 4112 |
| IFNG | UniProtKB: Q14611 | 4113 | 4114 | 4115, 4116, 4117, 4118, 4119, |
| | | | | 4120 |
| IFNG | UniProtKB: Q14612 | 4121 | 4122 | 4123, 4124, 4125, 4126, 4127, |
| | | | | 4128 |
| IFNG | UniProtKB: Q14613 | 4129 | 4130 | 4131, 4132, 4133, 4134, 4135, |
| | | | | 4136 |
| IFNG | UniProtKB: Q14614 | 4137 | 4138 | 4139, 4140, 4141, 4142, 4143, |
| | | | | 4144 |
| IFNG | UniProtKB: Q14615 | 4145 | 4146 | 4147, 4148, 4149, 4150, 4151, |
| | | | | 4152 |
| IFNG | UniProtKB: Q8NHY9 | 4153 | 4154 | 4155, 4156, 4157, 4158, 4159, |
| | | | | 4160 |
| IL-12 | UniProtKB: P29460 | 4193 | 4194 | 4195, 4196, 4197, 4198, 4199, |
| | | | | 4200 |
| CXCL10 | UniProtKB: A0A024RDA4 | 5129 | 5130 | 5131, 5132, 5133, 5134, 5135, |
| | | | | 5136 |
| CXCL10 | UniProtKB: P02778 | 5137 | 5138 | 5139, 5140, 5141, 5142, 5143, |
| | | | | 5144 |
| CXCL4 | UniProtKB: P02776 | 5225 | 5226 | 5227, 5228, 5229, 5230, 5231, |
| | | | | 5232 |
| CXCL9 | UniProtKB: L8E8X0 | 5273 | 5274 | 5275, 5276, 5277, 5278, 5279, |
| | | | | 5280 |
| CXCL9 | UniProtKB: Q07325 | 5281 | 5282 | 5283, 5284, 5285, 5286, 5287, |
| | | | | 5288 |
| TNF | UniProtKB: P01375 | 7369 | 7370 | 7371, 7372, 7373, 7374, 7375, |
| | | | | 7376 |
| TNF | UniProtKB: Q5STB3 | 7377 | 7378 | 7379, 7380, 7381, 7382, 7383, |
| | | | | 7384 |
| Angiopoietin-2 | UniProtKB: B2R6E3 | 7385 | 7386 | 7387, 7388, 7389, 7390, 7391, |
| | | | | 7392 |
| Angiopoietin-2 | UniProtKB: O15123 | 7393 | 7394 | 7395, 7396, 7397, 7398, 7399, |
| | | | | 7400 |
| Angiostatin | UniProtKB: A0A0F7G8J1 | 7401 | 7402 | 7403, 7404, 7405, 7406, 7407, |
| | | | | 7408 |
| Angiostatin | UniProtKB: P00747 | 7409 | 7410 | 7411, 7412, 7413, 7414, 7415, |
| | | | | 7416 |
| Angiostatin | UniProtKB: Q5TEH5 | 7417 | 7418 | 7419, 7420, 7421, 7422, 7423, |
| | | | | 7424 |
| Canstatin | UniProtKB: P08572 | 7425 | 7426 | 7427, 7428, 7429, 7430, 7431, |
| | | | | 7432 |
| Endostatin | Homo_sapiens | 7433 | 7434 | 7435, 7436, 7437, 7438, 7439, |
| | | | | 7440 |
| FLK-1 | UniProtKB: P35968 | 7441 | 7442 | 7443, 7444, 7445, 7446, 7447, |
| | | | | 7448 |
| PEX | UniProtKB: P78562 | 7449 | 7450 | 7451, 7452, 7453, 7454, 7455, |
| | | | | 7456 |
| PRL | UniProtKB: P01236 | 7457 | 7458 | 7459, 7460, 7461, 7462, 7463, |
| | | | | 7464 |
| SERPINB5 | UniProtKB: P36952 | 7465 | 7466 | 7467, 7468, 7469, 7470, 7471, |
| | | | | 7472 |
| sFLT-1 | UniProtKB: H9N1E7 | 7473 | 7474 | 7475, 7476, 7477, 7478, 7479, |
| | | | | 7480 |
| sFLT-1 | UniProtKB: H9N1E8 | 7481 | 7482 | 7483, 7484, 7485, 7486, 7487, |
| | | | | 7488 |
| sFLT-1 | UniProtKB: L7RSL3 | 7489 | 7490 | 7491, 7492, 7493, 7494, 7495, |
| | | | | 7496 |
| sFLT-1 | UniProtKB: P17948 | 7497 | 7498 | 7499, 7500, 7501, 7502, 7503, |
| | | | | 7504 |
| sTie2 | UniProtKB: B5A953 | 7505 | 7506 | 7507, 7508, 7509, 7510, 7511, |
| | | | | 7512 |
| TIMP-1 | UniProtKB: P01033 | 7513 | 7514 | 7515, 7516, 7517, 7518, 7519, |
| | | | | 7520 |
| TIMP-2 | UniProtKB: P16035 | 7521 | 7522 | 7523, 7524, 7525, 7526, 7527, |
| | | | | 7528 |
| TIMP-3 | UniProtKB: P35625 | 7529 | 7530 | 7531, 7532, 7533, 7534, 7535, |
| | | | | 7536 |
| TSP-1 | UniProtKB: P07996 | 7537 | 7538 | 7539, 7540, 7541, 7542, 7543, |
| | | | | 7544 |
| TSP-2 | UniProtKB: P35442 | 7545 | 7546 | 7547, 7548, 7549, 7550, 7551, |
| | | | | 7552 |
| Tumstatin | UniProtKB: Q01955 | 7553 | 7554 | 7555, 7556, 7557, 7558, 7559, |
| | | | | 7560 |
| Vasostatin | UniProtKB: P10645 | 7561 | 7562 | 7563, 7564, 7565, 7566, 7567, |
| | | | | 7568 |

[0165] According to the present invention, in a more preferred embodiment, the inventive composition comprises at least one RNA, preferably an mRNA comprising at least one coding region encoding at least one angiogenesis inhibitor or a fragment or variant thereof, wherein the at least one coding region comprises an RNA sequence being identical or at least 50%, 60%, 70%, 75%, 80%, 81%, 82%, 83%, 84%, 85%, 86%, 87%, 88%, 89%, 90%, 91%, 92%, 93%, 94%, 95%, 96%, 97%, 98%, 99% identical to the RNA sequences according to the SEQ ID Nos as disclosed in Table 7.

[0166] 7. Heat Shock Proteins

[0167] In a further preferred embodiment of the inventive RNA containing composition the RNA codes for at least one heat shock protein (HSP) or a fragment or variant thereof. Preferably, the heat shock protein may be chosen from the following list: HSP27, HSP47 (serpin H1), HSP60, HSP70, HSC70, GRP78 (BiP), HSP90, HSP110, GRP94 (gp96), GRP170 (ORP150), PDI/PDIA, CRT/CALR.

[0168] As reviewed by Graner et al. (Graner M W, Lillehei K O, Katsanis E. Endoplasmic reticulum chaperones and their roles in the immunogenicity of cancer vaccines. Front Oncol. 2015 Jan. 6; 4:379. doi: 10.3389/fonc.2014.00379) heat shock proteins play essential cellular housekeeping functions and are indispensible during protein synthesis, folding and transport across intracellular membranes as well as protein degradation. HSPs belong to a multiprotein family of chaperons which consists of, but is not limited to, HSP27, HSP47 (serpin H1), HSP60, HSP70, HSC70, GRP78 (BiP), HSP90, HSP110, GRP94 (gp96), GRP170 (ORP150), PDI/PDIA, CRT/CALR. In addition to the intracellular functions as chaperons, HSPs have been shown to play an important extracellular role as simulators of the immune responses particularly in tumor settings. Various literature reports demonstrated that tumor-derived HSP-peptide complexes induce anti-tumor immune responses very efficiently. The molecular mechanism of these observations has been elucidated. HSPs as chaperons have the capacity to bind denatured peptides including the antigenic ones and those complexes are internalized by antigen presenting cells (APCs) which eventually leads to antigen presentation and induction of immunity. In addition to their chaperon function, HSPs have been shown to trigger danger signals in the tumor microenvironment and thus stimulate macrophages and dendritic cells (DCs) to produce proinflammatory cytokines and enhance the induced immune responses.

[0169] According to preferred embodiments in the context of the present invention heat shock proteins may be selected from any heat shock protein selected from the group consisting of calreticulin; GRP170_(ORP150); GRP78_(BiP); GRP94_(gp96); HSC70; HSP110; HSP27; HSP47_(serpin_H1); HSP60; HSP70; HSP90; PDI/PDIA, preferably as disclosed in Table 8. Particularly preferred in this context are the RNA sequences encoding a heat shock protein according to Table 8.

TABLE 8
Heat shock proteins

| | | | RNA | Optimized |
|---|---|---|---|---|
| | | Protein | Sequence | RNA |
| | | Sequence | wild type | Sequence |
| Gene Name | Protein Accession No. | SEQ ID NO: | SEQ ID NO: | SEQ ID NO: |
| calreticulin | UniProtKB: B4DHR1 | 7569 | 7570 | 7571, 7572, 7573, 7574, |
| | | | | 7575, 7576 |
| calreticulin | UniProtKB: B4E2Y9 | 7577 | 7578 | 7579, 7580, 7581, 7582, |
| | | | | 7583, 7584 |
| calreticulin | UniProtKB: P27797 | 7585 | 7586 | 7587, 7588, 7589, 7590, |
| | | | | 7591, 7592 |
| calreticulin | UniProtKB: Q96L12 | 7593 | 7594 | 7595, 7596, 7597, 7598, |
| | | | | 7599, 7600 |
| GRP170_(ORP150) | UniProtKB: Q9Y4L1 | 7601 | 7602 | 7603, 7604, 7605, 7606, |
| | | | | 7607, 7608 |
| GRP78_(BiP) | UniProtKB: P11021 | 7609 | 7610 | 7611, 7612, 7613, 7614, |
| | | | | 7615, 7616 |
| GRP94_(gp96) | UniProtKB: P14625 | 7617 | 7618 | 7619, 7620, 7621, 7622, |
| | | | | 7623, 7624 |
| HSC70 | UniProtKB: P11142 | 7625 | 7626 | 7627, 7628, 7629, 7630, |
| | | | | 7631, 7632 |
| HSP110 | UniProtKB: Q92598 | 7633 | 7634 | 7635, 7636, 7637, 7638, |
| | | | | 7639, 7640 |
| HSP27 | UniProtKB: P04792 | 7641 | 7642 | 7643, 7644, 7645, 7646, |
| | | | | 7647, 7648 |
| HSP47_(serpin_H1) | UniProtKB: P50454 | 7649 | 7650 | 7651, 7652, 7653, 7654, |
| | | | | 7655, 7656 |
| HSP60 | UniProtKB: A0A024R3X4 | 7657 | 7658 | 7659, 7660, 7661, 7662, |
| | | | | 7663, 7664 |
| HSP60 | UniProtKB: B3GQS7 | 7665 | 7666 | 7667, 7668, 7669, 7670, |
| | | | | 7671, 7672 |
| HSP60 | UniProtKB: P10809 | 7673 | 7674 | 7675, 7676, 7677, 7678, |
| | | | | 7679, 7680 |
| HSP60 | UniProtKB: Q0VDF9 | 7681 | 7682 | 7683, 7684, 7685, 7686, |
| | | | | 7687, 7688 |
| HSP70 | UniProtKB: P38646 | 7689 | 7690 | 7691, 7692, 7693, 7694, |
| | | | | 7695, 7696 |
| HSP90 | UniProtKB: P07900 | 7697 | 7698 | 7699, 7700, 7701, 7702, |
| | | | | 7703, 7704 |
| HSP90 | UniProtKB: P08238 | 7705 | 7706 | 7707, 7708, 7709, 7710, |
| | | | | 7711, 7712 |
| PDI/PDIA | UniProtKB: P07237 | 7713 | 7714 | 7715, 7716, 7717, 7718, |
| | | | | 7719, 7720 |
| PDI/PDIA | UniProtKB: Q6YPB00 | 7721 | 7722 | 7723, 7724, 7725, 7726, |
| | | | | 7727, 7728 |
| PDI/PDIA | UniProtKB: Q71S60 | 7729 | 7730 | 7731, 7732, 7733, 7734, |
| | | | | 7735, 7736 |

[0170] According to the present invention, in a more preferred embodiment, the inventive composition comprises at least one RNA, preferably an mRNA comprising at least one coding region encoding at least one heat shock protein or a fragment or variant thereof, wherein the at least one coding region comprises an RNA sequence being identical or at least 50%, 60%, 70%, 75%, 80%, 81%, 82%, 83%, 84%, 85%, 86%, 87%, 88%, 89%, 90%, 91%, 92%, 93%, 94%, 95%, 96%, 97%, 98%, 99% identical to the RNA sequences according to the SEQ ID Nos as disclosed in Table 8.

[0171] 8. Tumor Antigens

[0172] In a further preferred embodiment of the inventive RNA containing composition the composition may contain RNA, preferably mRNA which codes for at least one tumor antigen or a fragment or variant thereof, which are used for vaccination to induce an adaptive immune response according to the invention.

[0173] In this context tumor antigens are particularly preferred to be encoded by RNA, preferably mRNA comprised in the inventive RNA composition. It is particularly preferred that the inventive RNA composition comprises at least one RNA encoding at least one tumor antigen or a fragment or variant thereof.

[0174] Tumor antigens are preferably located on the surface of the (tumor) cell. Tumor antigens may also be selected from proteins, which are overexpressed in tumor cells compared to a normal cell. Furthermore, tumor antigens also includes antigens expressed in cells which are (were) not themselves (or originally not themselves) degenerated but are associated with the supposed tumor. Antigens which are connected with tumor-supplying vessels or (re)formation thereof, in particular those antigens which are associated with neovascularization, e.g. growth factors, such as VEGF, bFGF etc., are also included herein. Antigens connected with a tumor furthermore include antigens from cells or tissues, typically embedding the tumor. Further, some substances (usually proteins or peptides) are expressed in patients suffering (knowingly or not-knowingly) from a cancer disease and they occur in increased concentrations in the body fluids of said patients. These substances are also referred to as “tumor antigens”, however they are not antigens in the stringent meaning of an immune response inducing substance. The class of tumor antigens can be divided further into tumor-specific antigens (TSAs) and tumor-associated-antigens (TAAs). TSAs can only be presented by tumor cells and never by normal “healthy” cells. They typically result from a tumor specific mutation. TAAs, which are more common, are usually presented by both tumor and healthy cells. These antigens are recognized and the antigen-presenting cell can be destroyed by cytotoxic T cells. Additionally, tumor antigens can also occur on the surface of the tumor in the form of, e.g., a mutated receptor. In this case, they can be recognized by antibodies.

[0175] Further, tumor associated antigens may be classified as tissue-specific antigens, also called melanocyte-specific antigens, cancer-testis antigens and tumor-specific antigens. Cancer-testis antigens are typically understood to be peptides or proteins of germ-line associated genes which may be activated in a wide variety of tumors. Human cancer-testis antigens may be further subdivided into antigens which are encoded on the X chromosome, so-called CT-X antigens, and those antigens which are not encoded on the X chromosome, the so-called (non-X CT antigens). Cancer-testis antigens which are encoded on the X-chromosome comprises, for example, the family of melanoma antigen genes, the so-called MAGE-family. The genes of the MAGE-family may be characterised by a shared MAGE homology domain (MHD). Each of these antigens, i.e. melanocyte-specific antigens, cancer-testis antigens and tumor-specific antigens, may elicit autologous cellular and humoral immune response. Accordingly, the tumor antigen encoded by the inventive nucleic acid sequence is preferably a melanocyte-specific antigen, a cancer-testis antigen or a tumor-specific antigens, preferably it may be a CT-X antigen, a non-X CT-antigens, a binding partner for a CT-X antigen or a binding partner for a non-X CT-antigen or a tumor-specific antigen, more preferably a CT-X antigen, a binding partner for a non-X CT-antigen or a tumor-specific antigen.

[0176] Particular preferred tumor antigens are selected from the list consisting of 5T4, 707-AP, 9D7, AFP, AlbZIP HPG1, alpha-5-beta-1-integrin, alpha-5-beta-6-integrin, alpha-actinin-4/m, alpha-methylacyl-coenzyme A racemase, ART-4, ARTC1/m, B7H4, BAGE-1, BCL-2, bcr/abl, beta-catenin/m, BING-4, BRCA1/m, BRCA2/m, CA 15-3/CA 27-29, CA 19-9, CA72-4, CA125, calreticulin, CAMEL, CASP-8/m, cathepsin B, cathepsin L, CD19, CD20, CD22, CD25, CDE30, CD33, CD4, CD52, CD55, CD56, CD80, CDC27/m, CDK4/m, CDKN2A/m, CEA, CLCA2, CML28, CML66, COA-1/m, coactosin-like protein, collage XXIII, COX-2, CT-9/BRD6, Cten, cyclin B1, cyclin D1, cyp-B, CYPB1, DAM-10, DAM-6, DEK-CAN, EFTUD2/m, EGFR, ELF2/m, EMMPRIN, EpCam, EphA2, EphA3, ErbB3, ETV6-AML1, EZH2, FGF-5, FN, Frau-1, G250, GAGE-1, GAGE-2, GAGE-3, GAGE-4, GAGE-5, GAGE-6, GAGE7b, GAGE-8, GDEP, GnT-V, gp100, GPC3, GPNMB/m, HAGE, HAST-2, hepsin, Her2/neu, HERV-K-MEL, HLA-A*0201-R17I, HLA-A11/m, HLA-A2/m, HNE, homeobox NKX3.1, HOM-TES-14/SCP-1, HOM-TES-85, HPV-E6, HPV-E7, HSP70-2M, HST-2, hTERT, iCE, IGF-1R, IL-13Ra2, IL-2R, IL-5, immature laminin receptor, kallikrein-2, kallikrein-4, Ki67, KIAA0205, KIAA0205/m, KK-LC-1, K-Ras/m, LAGE-A1, LDLR-FUT, MAGE-A1, MAGE-A2, MAGE-A3, MAGE-A4, MAGE-A6, MAGE-A9, MAGE-A10, MAGE-A12, MAGE-B1, MAGE-B2, MAGE-B3, MAGE-B4, MAGE-B5, MAGE-B6, MAGE-B10, MAGE-B16, MAGE-B17, MAGE-C1, MAGE-C2, MAGE-C3, MAGE-D1, MAGE-D2, MAGE-D4, MAGE-E1, MAGE-E2, MAGE-F1, MAGE-H1, MAGEL2, mammaglobin A, MART-1/melan-A, MART-2, MART-2/m, matrix protein 22, MC1R, M-CSF, ME1/m, mesothelin, MG50/PXDN, MMP11, MN/CA IX-antigen, MRP-3, MUC-1, MUC-2, MUM-1/m, MUM-2/m, MUM-3/m, myosin class I/m, NA88-A, N-acetylglucosaminyltransferase-V, Neo-PAP, Neo-PAP/m, NFYC/m, NGEP, NMP22, NPM/ALK, N-Ras/m, NSE, NY-ESO-B, NY-ESO-1, OA1, OFA-iLRP, OGT, OGT/m, OS-9, OS-9/m, osteocalcin, osteopontin, p15, p190 minor bcr-abl, p53, p53/m, PAGE-4, PAI-1, PAI-2, PAP, PART-1, PATE, PDEF, Pim-1-Kinase, Pin-1, Pml/PARalpha, POTE, PRAME, PRDX5/m, prostein, proteinase-3, PSA, PSCA, PSGR, PSM, PSMA, PTPRK/m, RAGE-1, RBAF600/m, RHAMM/CD168, RU1, RU2, S-100, SAGE, SART-1, SART-2, SART-3, SCC, SIRT2/m, Sp17, SSX-1, SSX-2/HOM-MEL-40, SSX-4, STAMP-1, STEAP-1, survivin, survivin-2B, SYT-SSX-1, SYT-SSX-2, TA-90, TAG-72, TARP, TEL-AML1, TGFbeta, TGFbetaRII, TGM-4, TPI/m, TRAG-3, TRG, TRP-1, TRP-2/6b, TRP/INT2, TRP-p8, tyrosinase, UPA, VEGFR1, VEGFR-2/FLK-1, and WT1. Such tumor antigens preferably may be selected from the group consisting of p53, CA125, EGFR, Her2/neu, hTERT, PAP, MAGE-A1, MAGE-A3, Mesothelin, MUC-1, GP100, MART-1, Tyrosinase, PSA, PSCA, PSMA, STEAP-1, VEGF, VEGFR1, VEGFR2, Ras, CEA or WT1, and more preferably from PAP, MAGE-A3, WT1, and MUC-1. Such tumor antigens preferably may be selected from the group consisting of MAGE-A1 (e.g. MAGE-A1 according to accession number M77481), MAGE-A2, MAGE-A3, MAGE-A6 (e.g. MAGE-A6 according to accession number NM_005363), MAGE-C1, MAGE-C2, melan-A (e.g. melan-A according to accession number NM_005511), GP100 (e.g. GP100 according to accession number M77348), tyrosinase (e.g. tyrosinase according to accession number NM_000372), surviving (e.g. survivin according to accession number AF077350), CEA (e.g. CEA according to accession number NM_004363), Her-2/neu (e.g. Her-2/neu according to accession number M11730), WT1 (e.g. WT1 according to accession number NM_000378), PRAME (e.g. PRAME according to accession number NM_006115), EGFRI (epidermal growth factor receptor 1) (e.g. EGFRI (epidermal growth factor receptor 1) according to accession number AF288738), MUC1, mucin-1 (e.g. mucin-1 according to accession number NM_002456), SEC61G (e.g. SEC61G according to accession number NM_014302), hTERT (e.g. hTERT accession number NM_198253), 5T4 (e.g. 5T4 according to accession number NM_006670), TRP-2 (e.g. TRP-2 according to accession number NM_001922), STEAP1, PCA, PSA, PSMA, etc.

[0177] According to preferred embodiments in the context of the present invention tumor antigens may be selected from any tumor antigen selected from the group consisting of 1A01_HLA-A/m; 1A02; 5T4; ACRBP; AFP; AKAP4; alpha-actinin-_4/m; alpha-methylacyl-coenzyme_A_racemase; ANDR; ART-4; ARTC1/m; AURKB; B2MG; B3GN5; B4GN1; B7H4; BAGE-1; BASI; BCL-2; bcr/abl; beta-catenin/m; BING-4; BIRC7; BRCA1/m; BY55; calreticulin; CAMEL; CASPA; Caspase_8; cathepsin_B; cathepsin_L; CD1A; CD1B; CD1C; CD1D; CD1E; CD20; CD22; CD276; CD33; CD3E; CD3Z; CD4; CD44_Isoform_1; CD44_Isoform_6; CD52; CD55; CD56; CD80; CD86; CD8A; CDC27/m; CDE30; CDK4/m; CDKN2A/m; CEA; CEAM6; CH3L2; CLCA2; CML28; CML66; COA-1/m; coactosin-like_protein; collagen_XXIII; COX-2; CP1B1; CSAG2; CT-_9/BRD6; CT45A1; CT55; CTAG2_Isoform_LAGE-1A; CTAG2_Isoform_LAGE-1B; CTCFL; Cten; cyclin_B1; cyclin_D1; cyp-B; DAM-10; DEP1A; E7; EF1A2; EFTUD2/m; EGFR; EGLN3; ELF2/m; EMMPRIN; EpCam; EphA2; EphA3; ErbB3; ERBB4; ERG; ETV6; EWS; EZH2; FABP7; FCGR3A_Version_1; FCGR3A_Version_2; FGF5; FGFR2; fibronectin; FOS; FOXP3; FUT1; G250; GAGE-1; GAGE-2; GAGE-3; GAGE-4; GAGE-5; GAGE-6; GAGE7b; GAGE-8_(GAGE-2D); GASR; GnT-V; GPC3; GPNMB/m; GRM3; HAGE; hepsin; Her2/neu; HLA-A2/m; homeobox_NKX3.1; HOM-TES-85; HPG1; HS71A; HS71B; HST-2; hTERT; iCE; IF2B3; IL-10; IL-13Ra2; IL2-RA; IL2-RB; IL2-RG; IL-5; IMP3; ITA5; ITB1; ITB6; kallikrein-2; kallikrein-4; KI20A; KIAA0205; KIF2C; KK-LC-1; LDLR; LGMN; LIRB2; LY6K; MAGA5; MAGA8; MAGAB; MAGE-_B1; MAGE-_E1; MAGE-A1; MAGE-A10; MAGE-A12; MAGE-A2; MAGE-A3; MAGE-A4; MAGE-A6; MAGE-A9; MAGE-B10; MAGE-B16; MAGE-B17; MAGE-B2; MAGE-B3; MAGE-B4; MAGE-B5; MAGE-B6; MAGE-C1; MAGE-C2; MAGE-C3; MAGE-D1; MAGE-D2; MAGE-D4; MAGE-E1_(MAGE1); MAGE-E2; MAGE-F1; MAGE-H1; MAGEL2; mammaglobin_A; MART-1/melan-A; MART-2; MC1_R; M-CSF; mesothelin; MITF; MMP1_1; MMP7; MUC-1; MUM-1/m; MUM-2/m; MYO1A; MYO1B; MYO1C; MYO1D; MYO1E; MYO1F; MYO1G; MYO1H; NA17; NA88-A; Neo-PAP; NFYC/m; NGEP; N-myc; NPM; NRCAM; NSE; NUF2; NY-ESO-1; OA1; OGT; OS-9; osteocalcin; osteopontin; p53; PAGE-4; PAI-1; PAI-2; PAP; PATE; PAX3; PAX5; PD1L1; PDCD1; PDEF; PECA1; PGCB; PGFRB; Pim-1_-Kinase; Pin-1; PLAC1; PMEL; PML; POTE; POTEF; PRAME; PRDX5/m; PRM2; prostein; proteinase-3; PSA; PSB9; PSCA; PSGR; PSM; PTPRC; RAB8A; RAGE-1; RARA; RASH; RASK; RASN; RGS5; RHAMM/CD168; RHOC; RSSA; RU1; RU2; RUNX1; S-100; SAGE; SART-_1; SART-2; SART-3; SEPR; SERPINB5; SIA7F; SIA8A; SIAT9; SIRT2/m; SOX10; SP17; SPNXA; SPXN3; SSX-1; SSX-2; SSX3; SSX-4; ST1A1; STAG2; STAMP-1; STEAP-1; survivin; Survivin-2B; SYCP1; SYT-SSX-1; SYT-SSX-2; TARP; TCRg; TF2AA; TGFbeta1; TGFR2; TGM-4; TIE2; TKTL1; TPI/m; TRGV11; TRGV9; TRPC1; TRP-p8; TSG10; TSPY1; TVC_(TRGV3); TX101; tyrosinase; TYRP1; TYRP2; UPA; VEGFR1; WT1; XAGE1, preferably as disclosed in Table 9. Particularly preferred in this context are the RNA sequences encoding a tumor antigen according to Table 9.

TABLE 9
Tumor antigens

| | | | RNA | Optimized |
|---|---|---|---|---|
| | | Protein | Sequence | RNA |
| | | Sequence | wild type | Sequence |
| Gene Name | Protein Accession No. | SEQ ID NO: | SEQ ID NO: | SEQ ID NO: |
| 1A01_HLA-A/m | UniProtKB: P30443 | 398 | 399 | 400, 401, 402, 403, 404 |
| 1A02 | UniProtKB: P01892 | 405 | 406 | 407, 408, 409, 410, 411 |
| 5T4 | UniProtKB: Q13641 | 412 | 413 | 414, 415, 416, 417, 418 |
| ACRBP | UniProtKB: Q8NEB7 | 419 | 420 | 421, 422, 423, 424, 425 |
| AFP | UniProtKB: P02771 | 426 | 427 | 428, 429, 430, 431, 432 |
| AKAP4 | UniProtKB: Q5JQC9 | 433 | 434 | 435, 436, 437, 438, 439 |
| alpha-actinin-_4/m | UniProtKB: B4DSX0 | 440 | 441 | 442, 443, 444, 445, 446 |
| alpha-actinin-_4/m | UniProtKB: B4E337 | 447 | 448 | 449, 450, 451, 452, 453 |
| alpha-actinin-_4/m | UniProtKB: O43707 | 454 | 455 | 456, 457, 458, 459, 460 |
| alpha-methylacyl- | UniProtKB: A0A024RE16 | 461 | 462 | 463, 464, 465, 466, 467 |
| coenzyme_A_racemase | | | | |
| alpha-methylacyl- | UniProtKB: A8KAC3 | 468 | 469 | 470, 471, 472, 473, 474 |
| coenzyme_A_racemase | | | | |
| ANDR | UniProtKB: P10275 | 475 | 476 | 477, 478, 479, 480, 481 |
| ART-4 | UniProtKB: Q9ULX3 | 482 | 483 | 484, 485, 486, 487, 488 |
| ARTC1/m | UniProtKB: P52961 | 489 | 490 | 491, 492, 493, 494, 495 |
| AURKB | UniProtKB: Q96GD4 | 496 | 497 | 498, 499, 500, 501, 502 |
| B2MG | UniProtKB: P61769 | 503 | 504 | 505, 506, 507, 508, 509 |
| B3GN5 | UniProtKB: Q9BYG0 | 510 | 511 | 512, 513, 514, 515, 516 |
| B4GN1 | UniProtKB: Q00973 | 517 | 518 | 519, 520, 521, 522, 523 |
| B7H4 | UniProtKB: Q7Z7D3 | 524 | 525 | 526, 527, 528, 529, 530 |
| BAGE-1 | UniProtKB: Q13072 | 531 | 532 | 533, 534, 535, 536, 537 |
| BASI | UniProtKB: P35613 | 538 | 539 | 540, 541, 542, 543, 544 |
| BCL-2 | UniProtKB: A9QXG9 | 545 | 546 | 547, 548, 549, 550, 551 |
| bcr/abl | UniProtKB: A9UEZ4 | 552 | 553 | 554, 555, 556, 557, 558 |
| bcr/abl | UniProtKB: A9UEZ7 | 559 | 560 | 561, 562, 563, 564, 565 |
| bcr/abl | UniProtKB: A9UEZ8 | 566 | 567 | 568, 569, 570, 571, 572 |
| bcr/abl | UniProtKB: A9UEZ9 | 573 | 574 | 575, 576, 577, 578, 579 |
| bcr/abl | UniProtKB: A9UF00 | 580 | 581 | 582, 583, 584, 585, 586 |
| bcr/abl | UniProtKB: A9UF01 | 587 | 588 | 589, 590, 591, 592, 593 |
| bcr/abl | UniProtKB: A9UF03 | 594 | 595 | 596, 597, 598, 599, 600 |
| bcr/abl | UniProtKB: A9UF04 | 601 | 602 | 603, 604, 605, 606, 607 |
| bcr/abl | UniProtKB: A9UF05 | 608 | 609 | 610, 611, 612, 613, 614 |
| bcr/abl | UniProtKB: A9UF06 | 615 | 616 | 617, 618, 619, 620, 621 |
| bcr/abl | UniProtKB: A9UF08 | 622 | 623 | 624, 625, 626, 627, 628 |
| beta-catenin/m | UniProtKB: P35222 | 629 | 630 | 631, 632, 633, 634, 635 |
| beta-catenin/m | UniProtKB: Q8WYA6 | 636 | 637 | 638, 639, 640, 641, 642 |
| BING-4 | UniProtKB: O15213 | 643 | 644 | 645, 646, 647, 648, 649 |
| BIRC7 | UniProtKB: Q96CA5 | 650 | 651 | 652, 653, 654, 655, 656 |
| BRCA1/m | UniProtKB: A0A024R1V0 | 657 | 658 | 659, 660, 661, 662, 663 |
| BRCA1/m | UniProtKB: A0A024R1V7 | 664 | 665 | 666, 667, 668, 669, 670 |
| BRCA1/m | UniProtKB: A0A024R1Z8 | 671 | 672 | 673, 674, 675, 676, 677 |
| BRCA1/m | UniProtKB: A0A068BFX7 | 678 | 679 | 680, 681, 682, 683, 684 |
| BRCA1/m | UniProtKB: C6YB45 | 685 | 686 | 687, 688, 689, 690, 691 |
| BRCA1/m | UniProtKB: C6YB47 | 692 | 693 | 694, 695, 696, 697, 698 |
| BRCA1/m | UniProtKB: G3XAC3 | 699 | 700 | 701, 702, 703, 704, 705 |
| BY55 | UniProtKB: O95971 | 706 | 707 | 708, 709, 710, 711, 712 |
| CAMEL | UniProtKB: O95987 | 713 | 714 | 715, 716, 717, 718, 719 |
| CASPA | UniProtKB: Q92851-4 | 720 | 721 | 722, 723, 724, 725, 726 |
| cathepsin_B | UniProtKB: A0A024R374 | 727 | 728 | 729, 730, 731, 732, 733 |
| cathepsin_B | UniProtKB: P07858 | 734 | 735 | 736, 737, 738, 739, 740 |
| cathepsin_L | UniProtKB: A0A024R276 | 741 | 742 | 743, 744, 745, 746, 747 |
| cathepsin_L | UniProtKB: P07711 | 748 | 749 | 750, 751, 752, 753, 754 |
| cathepsin_L | UniProtKB: Q9HBQ7 | 755 | 756 | 757, 758, 759, 760, 761 |
| CD1A | UniProtKB: P06126 | 762 | 763 | 764, 765, 766, 767, 768 |
| CD1B | UniProtKB: P29016 | 769 | 770 | 771, 772, 773, 774, 775 |
| CD1C | UniProtKB: P29017 | 776 | 777 | 778, 779, 780, 781, 782 |
| CD1D | UniProtKB: P15813 | 783 | 784 | 785, 786, 787, 788, 789 |
| CD1E | UniProtKB: P15812 | 790 | 791 | 792, 793, 794, 795, 796 |
| CD20 | UniProtKB: P11836 | 797 | 798 | 799, 800, 801, 802, 803 |
| CD22 | UniProtKB: O60926 | 804 | 805 | 806, 807, 808, 809, 810 |
| CD22 | UniProtKB: P20273 | 811 | 812 | 813, 814, 815, 816, 817 |
| CD22 | UniProtKB: Q0EAF5 | 818 | 819 | 820, 821, 822, 823, 824 |
| CD276 | UniProtKB: Q5ZPR3 | 825 | 826 | 827, 828, 829, 830, 831 |
| CD33 | UniProtKB: B4DF51 | 832 | 833 | 834, 835, 836, 837, 838 |
| CD33 | UniProtKB: P20138 | 839 | 840 | 841, 842, 843, 844, 845 |
| CD33 | UniProtKB: Q546G0 | 846 | 847 | 848, 849, 850, 851, 852 |
| CD3E | UniProtKB: P07766 | 853 | 854 | 855, 856, 857, 858, 859 |
| CD3Z | UniProtKB: P20963 | 860 | 861 | 862, 863, 864, 865, 866 |
| CD44_Isoform_1 | UniProtKB: P16070 | 867 | 868 | 869, 870, 871, 872, 873 |
| CD44_Isoform_6 | UniProtKB: P16070-6 | 874 | 875 | 876, 877, 878, 879, 880 |
| CD4 | UniProtKB: P01730 | 881 | 882 | 883, 884, 885, 886, 887 |
| CD52 | UniProtKB: P31358 | 888 | 889 | 890, 891, 892, 893, 894 |
| CD52 | UniProtKB: Q6IBD0 | 895 | 896 | 897, 898, 899, 900, 901 |
| CD52 | UniProtKB: V9HWN9 | 902 | 903 | 904, 905, 906, 907, 908 |
| CD55 | UniProtKB: B1AP15 | 909 | 910 | 911, 912, 913, 914, 915 |
| CD55 | UniProtKB: D3DT85 | 916 | 917 | 918, 919, 920, 921, 922 |
| CD55 | UniProtKB: D3DT86 | 923 | 924 | 925, 926, 927, 928, 929 |
| CD55 | UniProtKB: P08174 | 930 | 931 | 932, 933, 934, 935, 936 |
| CD56 | UniProtKB: P13591 | 937 | 938 | 939, 940, 941, 942, 943 |
| CD80 | UniProtKB: A0N0P2 | 944 | 945 | 946, 947, 948, 949, 950 |
| CD80 | UniProtKB: P33681 | 951 | 952 | 953, 954, 955, 956, 957 |
| CD86 | UniProtKB: P42081 | 958 | 959 | 960, 961, 962, 963, 964 |
| CD8A | UniProtKB: P01732 | 965 | 966 | 967, 968, 969, 970, 971 |
| CDC27/m | UniProtKB: G5EA36 | 972 | 973 | 974, 975, 976, 977, 978 |
| CDC27/m | UniProtKB: P30260 | 979 | 980 | 981, 982, 983, 984, 985 |
| CDE30 | UniProtKB: P28908 | 986 | 987 | 988, 989, 990, 991, 992 |
| CDK4/m | UniProtKB: A0A024RBB6 | 993 | 994 | 995, 996, 997, 998, 999 |
| CDK4/m | UniProtKB: P11802 | 1000 | 1001 | 1002, 1003, 1004, |
| | | | | 1005, 1006 |
| CDK4/m | UniProtKB: Q6LC83 | 1007 | 1008 | 1009, 1010, 1011, |
| | | | | 1012, 1013 |
| CDK4/m | UniProtKB: Q96BE9 | 1014 | 1015 | 1016, 1017, 1018, |
| | | | | 1019, 1020 |
| CDKN2A/m | UniProtKB: D1LYX3 | 1021 | 1022 | 1023, 1024, 1025, |
| | | | | 1026, 1027 |
| CDKN2A/m | UniProtKB: G3XAG3 | 1028 | 1029 | 1030, 1031, 1032, |
| | | | | 1033, 1034 |
| CDKN2A/m | UniProtKB: K7PML8 | 1035 | 1036 | 1037, 1038, 1039, |
| | | | | 1040, 1041 |
| CDKN2A/m | UniProtKB: L8E941 | 1042 | 1043 | 1044, 1045, 1046, |
| | | | | 1047, 1048 |
| CDKN2A/m | UniProtKB: Q8N726 | 1049 | 1050 | 1051, 1052, 1053, |
| | | | | 1054, 1055 |
| CEA | RefSeq: NP_004354 | 1056 | 1057 | 1058, 1059, 1060, |
| | | | | 1061, 1062 |
| CEAM6 | UniProtKB: P40199 | 1063 | 1064 | 1065, 1066, 1067, |
| | | | | 1068, 1069 |
| CH3L2 | UniProtKB: Q15782 | 1070 | 1071 | 1072, 1073, 1074, |
| | | | | 1075, 1076 |
| CLCA2 | UniProtKB: Q9UQC9 | 1077 | 1078 | 1079, 1080, 1081, |
| | | | | 1082, 1083 |
| CML28 | UniProtKB: Q9NQT4 | 1084 | 1085 | 1086, 1087, 1088, |
| | | | | 1089, 1090 |
| CML66 | UniProtKB: Q96RS6 | 1091 | 1092 | 1093, 1094, 1095, |
| | | | | 1096, 1097 |
| COA-1/m | UniProtKB: Q5T124 | 1098 | 1099 | 1100, 1101, 1102, |
| | | | | 1103, 1104 |
| coactosin-like_protein | UniProtKB: Q14019 | 1105 | 1106 | 1107, 1108, 1109, |
| | | | | 1110, 1111 |
| collagen_XXIII | UniProtKB: L8EAS4 | 1112 | 1113 | 1114, 1115, 1116, |
| | | | | 1117, 1118 |
| collagen_XXIII | UniProtKB: Q86Y22 | 1119 | 1120 | 1121, 1122, 1123, |
| | | | | 1124, 1125 |
| COX-2 | UniProtKB: Q6ZYK7 | 1126 | 1127 | 1128, 1129, 1130, |
| | | | | 1131, 1132 |
| CP1B1 | UniProtKB: Q16678 | 1133 | 1134 | 1135, 1136, 1137, |
| | | | | 1138, 1139 |
| CSAG2 | UniProtKB: Q9Y5P2-2 | 1140 | 1141 | 1142, 1143, 1144, |
| | | | | 1145, 1146 |
| CSAG2 | UniProtKB: Q9Y5P2 | 1147 | 1148 | 1149, 1150, 1151, |
| | | | | 1152, 1153 |
| CT45A1 | UniProtKB: Q5HYN5 | 1154 | 1155 | 1156, 1157, 1158, |
| | | | | 1159, 1160 |
| CT55 | UniProtKB: Q8WUE5 | 1161 | 1162 | 1163, 1164, 1165, |
| | | | | 1166, 1167 |
| CT-_9/BRD6 | UniProtKB: Q58F21 | 1168 | 1169 | 1170, 1171, 1172, |
| | | | | 1173, 1174 |
| CTAG2_Isoform_LAGE- | UniProtKB: O75638-2 | 1175 | 1176 | 1177, 1178, 1179, |
| 1A | | | | 1180, 1181 |
| CTAG2_Isoform_LAGE- | UniProtKB: O75638 | 1182 | 1183 | 1184, 1185, 1186, |
| 1B | | | | 1187, 1188 |
| CTCFL | UniProtKB: Q8NI51 | 1189 | 1190 | 1191, 1192, 1193, |
| | | | | 1194, 1195 |
| Cten | UniProtKB: Q8IZW8 | 1196 | 1197 | 1198, 1199, 1200, |
| | | | | 1201, 1202 |
| cyclin_B1 | UniProtKB: P14635 | 1203 | 1204 | 1205, 1206, 1207, |
| | | | | 1208, 1209 |
| cyclin_D1 | UniProtKB: P24385 | 1210 | 1211 | 1212, 1213, 1214, |
| | | | | 1215, 1216 |
| cyp-B | UniProtKB: P23284 | 1217 | 1218 | 1219, 1220, 1221, |
| | | | | 1222, 1223 |
| DAM-10 | UniProtKB: P43366 | 1224 | 1225 | 1226, 1227, 1228, |
| | | | | 1229, 1230 |
| DEP1A | UniProtKB: Q5TB30 | 1231 | 1232 | 1233, 1234, 1235, |
| | | | | 1236, 1237 |
| E7 | UniProtKB: P03129 | 1238 | 1239 | 1240, 1241, 1242, |
| | | | | 1243, 1244 |
| E7 | UniProtKB: P06788 | 1245 | 1246 | 1247, 1248, 1249, |
| | | | | 1250, 1251 |
| E7 | UniProtKB: P17387 | 1252 | 1253 | 1254, 1255, 1256, |
| | | | | 1257, 1258 |
| E7 | UniProtKB: P06429 | 1259 | 1260 | 1261, 1262, 1263, |
| | | | | 1264, 1265 |
| E7 | UniProtKB: P27230 | 1266 | 1267 | 1268, 1269, 1270, |
| | | | | 1271, 1272 |
| E7 | UniProtKB: P24837 | 1273 | 1274 | 1275, 1276, 1277, |
| | | | | 1278, 1279 |
| E7 | UniProtKB: P21736 | 1280 | 1281 | 1282, 1283, 1284, |
| | | | | 1285, 1286 |
| E7 | UniProtKB: P26558 | 1287 | 1288 | 1289, 1290, 1291, |
| | | | | 1292, 1293 |
| E7 | UniProtKB: P36831 | 1294 | 1295 | 1296, 1297, 1298, |
| | | | | 1299, 1300 |
| E7 | UniProtKB: P36833 | 1301 | 1302 | 1303, 1304, 1305, |
| | | | | 1306, 1307 |
| E7 | UniProtKB: Q9QCZ1 | 1308 | 1309 | 1310, 1311, 1312, |
| | | | | 1313, 1314 |
| E7 | UniProtKB: Q81965 | 1315 | 1316 | 1317, 1318, 1319, |
| | | | | 1320, 1321 |
| E7 | UniProtKB: Q80956 | 1322 | 1323 | 1324, 1325, 1326, |
| | | | | 1327, 1328 |
| EF1A2 | UniProtKB: Q05639 | 1329 | 1330 | 1331, 1332, 1333, |
| | | | | 1334, 1335 |
| EFTUD2/m | UniProtKB: Q15029 | 1336 | 1337 | 1338, 1339, 1340, |
| | | | | 1341, 1342 |
| EGFR | UniProtKB: A0A0B4J1Y5 | 1343 | 1344 | 1345, 1346, 1347, |
| | | | | 1348, 1349 |
| EGFR | UniProtKB: E7BSV0 | 1350 | 1351 | 1352, 1353, 1354, |
| | | | | 1355, 1356 |
| EGFR | UniProtKB: L0R6G1 | 1357 | 1358 | 1359, 1360, 1361, |
| | | | | 1362, 1363 |
| EGFR | UniProtKB: P00533-2 | 1364 | 1365 | 1366, 1367, 1368, |
| | | | | 1369, 1370 |
| EGFR | UniProtKB: P00533 | 1371 | 1372 | 1373, 1374, 1375, |
| | | | | 1376, 1377 |
| EGFR | UniProtKB: Q147T7 | 1378 | 1379 | 1380, 1381, 1382, |
| | | | | 1383, 1384 |
| EGFR | UniProtKB: Q504U8 | 1385 | 1386 | 1387, 1388, 1389, |
| | | | | 1390, 1391 |
| EGFR | UniProtKB: Q8NDU8 | 1392 | 1393 | 1394, 1395, 1396, |
| | | | | 1397, 1398 |
| EGLN3 | UniProtKB: Q9H6Z9 | 1399 | 1400 | 1401, 1402, 1403, |
| | | | | 1404, 1405 |
| ELF2/m | UniProtKB: B7Z720 | 1406 | 1407 | 1408, 1409, 1410, |
| | | | | 1411, 1412 |
| EMMPRIN | UniProtKB: Q54A51 | 1413 | 1414 | 1415, 1416, 1417, |
| | | | | 1418, 1419 |
| EpCam | UniProtKB: P16422 | 1420 | 1421 | 1422, 1423, 1424, |
| | | | | 1425, 1426 |
| EphA2 | UniProtKB: P29317 | 1427 | 1428 | 1429, 1430, 1431, |
| | | | | 1432, 1433 |
| EphA3 | UniProtKB: P29320 | 1434 | 1435 | 1436, 1437, 1438, |
| | | | | 1439, 1440 |
| EphA3 | UniProtKB: Q6P4R6 | 1441 | 1442 | 1443, 1444, 1445, |
| | | | | 1446, 1447 |
| ErbB3 | UniProtKB: B3KWG5 | 1448 | 1449 | 1450, 1451, 1452, |
| | | | | 1453, 1454 |
| ErbB3 | UniProtKB: B4DGQ7 | 1455 | 1456 | 1457, 1458, 1459, |
| | | | | 1460, 1461 |
| ERBB4 | UniProtKB: Q15303 | 1462 | 1463 | 1464, 1465, 1466, |
| | | | | 1467, 1468 |
| ERG | UniProtKB: P11308 | 1469 | 1470 | 1471, 1472, 1473, |
| | | | | 1474, 1475 |
| ETV6 | UniProtKB: P41212 | 1476 | 1477 | 1478, 1479, 1480, |
| | | | | 1481, 1482 |
| EWS | UniProtKB: Q01844 | 1483 | 1484 | 1485, 1486, 1487, |
| | | | | 1488, 1489 |
| EZH2 | UniProtKB: F2YMM1 | 1490 | 1491 | 1492, 1493, 1494, |
| | | | | 1495, 1496 |
| EZH2 | UniProtKB: G3XAL2 | 1497 | 1498 | 1499, 1500, 1501, |
| | | | | 1502, 1503 |
| EZH2 | UniProtKB: L0R855 | 1504 | 1505 | 1506, 1507, 1508, |
| | | | | 1509, 1510 |
| EZH2 | UniProtKB: Q15910 | 1511 | 1512 | 1513, 1514, 1515, |
| | | | | 1516, 1517 |
| EZH2 | UniProtKB: S4S3R8 | 1518 | 1519 | 1520, 1521, 1522, |
| | | | | 1523, 1524 |
| FABP7 | UniProtKB: O15540 | 1525 | 1526 | 1527, 1528, 1529, |
| | | | | 1530, 1531 |
| FCGR3A_Version_1 | UniProtKB: P08637 | 1532 | 1533 | 1534, 1535, 1536, |
| | | | | 1537, 1538 |
| FCGR3A_Version_2 | CCDS: CCDS1232.1 | 1539 | 1540 | 1541, 1542, 1543, |
| | | | | 1544, 1545 |
| FGF5 | UniProtKB: P12034 | 1546 | 1547 | 1548, 1549, 1550, |
| | | | | 1551, 1552 |
| FGF5 | UniProtKB: Q60518 | 1553 | 1554 | 1555, 1556, 1557, |
| | | | | 1558, 1559 |
| FGFR2 | UniProtKB: P21802 | 1560 | 1561 | 1562, 1563, 1564, |
| | | | | 1565, 1566 |
| fibronectin | UniProtKB: A0A024R5I6 | 1567 | 1568 | 1569, 1570, 1571, |
| | | | | 1572, 1573 |
| fibronectin | UniProtKB: A0A024RB01 | 1574 | 1575 | 1576, 1577, 1578, |
| | | | | 1579, 1580 |
| fibronectin | UniProtKB: A0A024RDT9 | 1581 | 1582 | 1583, 1584, 1585, |
| | | | | 1586, 1587 |
| fibronectin | UniProtKB: A0A024RDV5 | 1588 | 1589 | 1590, 1591, 1592, |
| | | | | 1593, 1594 |
| fibronectin | UniProtKB: A6NH44 | 1595 | 1596 | 1597, 1598, 1599, |
| | | | | 1600, 1601 |
| fibronectin | UniProtKB: A8K6A5 | 1602 | 1603 | 1604, 1605, 1606, |
| | | | | 1607, 1608 |
| fibronectin | UniProtKB: B2R627 | 1609 | 1610 | 1611, 1612, 1613, |
| | | | | 1614, 1615 |
| fibronectin | UniProtKB: B3KXM5 | 1616 | 1617 | 1618, 1619, 1620, |
| | | | | 1621, 1622 |
| fibronectin | UniProtKB: B4DIC5 | 1623 | 1624 | 1625, 1626, 1627, |
| | | | | 1628, 1629 |
| fibronectin | UniProtKB: B4DN21 | 1630 | 1631 | 1632, 1633, 1634, |
| | | | | 1635, 1636 |
| fibronectin | UniProtKB: B4DS98 | 1637 | 1638 | 1639, 1640, 1641, |
| | | | | 1642, 1643 |
| fibronectin | UniProtKB: B4DTH2 | 1644 | 1645 | 1646, 1647, 1648, |
| | | | | 1649, 1650 |
| fibronectin | UniProtKB: B4DTK1 | 1651 | 1652 | 1653, 1654, 1655, |
| | | | | 1656, 1657 |
| fibronectin | UniProtKB: B4DU16 | 1658 | 1659 | 1660, 1661, 1662, |
| | | | | 1663, 1664 |
| fibronectin | UniProtKB: B7Z3W5 | 1665 | 1666 | 1667, 1668, 1669, |
| | | | | 1670, 1671 |
| fibronectin | UniProtKB: B7Z939 | 1672 | 1673 | 1674, 1675, 1676, |
| | | | | 1677, 1678 |
| fibronectin | UniProtKB: G5E9X3 | 1679 | 1680 | 1681, 1682, 1683, |
| | | | | 1684, 1685 |
| fibronectin | UniProtKB: Q9H382 | 1686 | 1687 | 1688, 1689, 1690, |
| | | | | 1691, 1692 |
| FOS | UniProtKB: P01100 | 1693 | 1694 | 1695, 1696, 1697, |
| | | | | 1698, 1699 |
| FOXP3 | UniProtKB: Q9BZS1 | 1700 | 1701 | 1702, 1703, 1704, |
| | | | | 1705, 1706 |
| FUT1 | UniProtKB: P19526 | 1707 | 1708 | 1709, 1710, 1711, |
| | | | | 1712, 1713 |
| G250 | UniProtKB: Q16790 | 1714 | 1715 | 1716, 1717, 1718, |
| | | | | 1719, 1720 |
| GAGE-1 | Genbank: AAA82744 | 1721 | 1722 | 1723, 1724, 1725, |
| | | | | 1726, 1727 |
| GAGE-2 | UniProtKB: Q6NT46 | 1728 | 1729 | 1730, 1731, 1732, |
| | | | | 1733, 1734 |
| GAGE-3 | UniProtKB: Q13067 | 1735 | 1736 | 1737, 1738, 1739, |
| | | | | 1740, 1741 |
| GAGE-4 | UniProtKB: Q13068 | 1742 | 1743 | 1744, 1745, 1746, |
| | | | | 1747, 1748 |
| GAGE-5 | UniProtKB: Q13069 | 1749 | 1750 | 1751, 1752, 1753, |
| | | | | 1754, 1755 |
| GAGE-6 | UniProtKB: Q13070 | 1756 | 1757 | 1758, 1759, 1760, |
| | | | | 1761, 1762 |
| GAGE7b | UniProtKB: O76087 | 1763 | 1764 | 1765, 1766, 1767, |
| | | | | 1768, 1769 |
| GAGE-8_(GAGE-2D) | UniProtKB: Q9UEU5 | 1770 | 1771 | 1772, 1773, 1774, |
| | | | | 1775, 1776 |
| GASR | UniProtKB: P32239 | 1777 | 1778 | 1779, 1780, 1781, |
| | | | | 1782, 1783 |
| GnT-V | UniProtKB: Q09328 | 1784 | 1785 | 1786, 1787, 1788, |
| | | | | 1789, 1790 |
| GPC3 | UniProtKB: I6QJG3 | 1791 | 1792 | 1793, 1794, 1795, |
| | | | | 1796, 1797 |
| GPC3 | UniProtKB: P51654 | 1798 | 1799 | 1800, 1801, 1802, |
| | | | | 1803, 1804 |
| GPC3 | UniProtKB: Q8IYG2 | 1805 | 1806 | 1807, 1808, 1809, |
| | | | | 1810, 1811 |
| GPNMB/m | UniProtKB: A0A024RA55 | 1812 | 1813 | 1814, 1815, 1816, |
| | | | | 1817, 1818 |
| GPNMB/m | UniProtKB: Q14956 | 1819 | 1820 | 1821, 1822, 1823, |
| | | | | 1824, 1825 |
| GPNMB/m | UniProtKB: Q8IXJ5 | 1826 | 1827 | 1828, 1829, 1830, |
| | | | | 1831, 1832 |
| GPNMB/m | UniProtKB: Q96F58 | 1833 | 1834 | 1835, 1836, 1837, |
| | | | | 1838, 1839 |
| GRM3 | UniProtKB: Q14832 | 1840 | 1841 | 1842, 1843, 1844, |
| | | | | 1845, 1846 |
| HAGE | UniProtKB: Q9NXZ2 | 1847 | 1848 | 1849, 1850, 1851, |
| | | | | 1852, 1853 |
| hepsin | UniProtKB: B2ZDQ2 | 1854 | 1855 | 1856, 1857, 1858, |
| | | | | 1859, 1860 |
| hepsin | UniProtKB: P05981 | 1861 | 1862 | 1863, 1864, 1865, |
| | | | | 1866, 1867 |
| Her2/neu | UniProtKB: B4DTR1 | 1868 | 1869 | 1870, 1871, 1872, |
| | | | | 1873, 1874 |
| Her2/neu | UniProtKB: L8E8G2 | 1875 | 1876 | 1877, 1878, 1879, |
| | | | | 1880, 1881 |
| Her2/neu | UniProtKB: P04626 | 1882 | 1883 | 1884, 1885, 1886, |
| | | | | 1887, 1888 |
| Her2/neu | UniProtKB: Q9UK79 | 1889 | 1890 | 1891, 1892, 1893, |
| | | | | 1894, 1895 |
| HLA-A2/m | UniProtKB: Q95387 | 1896 | 1897 | 1898, 1899, 1900, |
| | | | | 1901, 1902 |
| HLA-A2/m | UniProtKB: Q9MYF8 | 1903 | 1904 | 1905, 1906, 1907, |
| | | | | 1908, 1909 |
| homeobox_NKX3.1 | UniProtKB: Q99801 | 1910 | 1911 | 1912, 1913, 1914, |
| | | | | 1915, 1916 |
| HOM-TES-85 | UniProtKB: B2RBQ6 | 1917 | 1918 | 1919, 1920, 1921, |
| | | | | 1922, 1923 |
| HOM-TES-85 | UniProtKB: Q9P127 | 1924 | 1925 | 1926, 1927, 1928, |
| | | | | 1929, 1930 |
| HPG1 | Pubmed: 12543784 | 1931 | 1932 | 1933, 1934, 1935, |
| | | | | 1936, 1937 |
| HS71A | UniProtKB: P0DMV8 | 1938 | 1939 | 1940, 1941, 1942, |
| | | | | 1943, 1944 |
| HS71B | UniProtKB: P0DMV9 | 1945 | 1946 | 1947, 1948, 1949, |
| | | | | 1950, 1951 |
| HST-2 | UniProtKB: P10767 | 1952 | 1953 | 1954, 1955, 1956, |
| | | | | 1957, 1958 |
| hTERT | UniProtKB: O94807 | 1959 | 1960 | 1961, 1962, 1963, |
| | | | | 1964, 1965 |
| iCE | UniProtKB: O00748 | 1966 | 1967 | 1968, 1969, 1970, |
| | | | | 1971, 1972 |
| IF2B3 | UniProtKB: O00425 | 1973 | 1974 | 1975, 1976, 1977, |
| | | | | 1978, 1979 |
| IL-13Ra2 | UniProtKB: Q14627 | 1980 | 1981 | 1982, 1983, 1984, |
| | | | | 1985, 1986 |
| IL2-RA | UniProtKB: P01589 | 1987 | 1988 | 1989, 1990, 1991, |
| | | | | 1992, 1993 |
| IL2-RB | UniProtKB: P14784 | 1994 | 1995 | 1996, 1997, 1998, |
| | | | | 1999, 2000 |
| IL2-RG | UniProtKB: P31785 | 2001 | 2002 | 2003, 2004, 2005, |
| | | | | 2006, 2007 |
| IMP3 | UniProtKB: Q9NV31 | 2008 | 2009 | 2010, 2011, 2012, |
| | | | | 2013, 2014 |
| ITA5 | UniProtKB: P08648 | 2015 | 2016 | 2017, 2018, 2019, |
| | | | | 2020, 2021 |
| ITB1 | UniProtKB: P05556 | 2022 | 2023 | 2024, 2025, 2026, |
| | | | | 2027, 2028 |
| ITB6 | UniProtKB: P18564 | 2029 | 2030 | 2031, 2032, 2033, |
| | | | | 2034, 2035 |
| kallikrein-2 | UniProtKB: A0A024R4J4 | 2036 | 2037 | 2038, 2039, 2040, |
| | | | | 2041, 2042 |
| kallikrein-2 | UniProtKB: A0A024R4N3 | 2043 | 2044 | 2045, 2046, 2047, |
| | | | | 2048, 2049 |
| kallikrein-2 | UniProtKB: B0AZU9 | 2050 | 2051 | 2052, 2053, 2054, |
| | | | | 2055, 2056 |
| kallikrein-2 | UniProtKB: B4DU77 | 2057 | 2058 | 2059, 2060, 2061, |
| | | | | 2062, 2063 |
| kallikrein-2 | UniProtKB: P20151 | 2064 | 2065 | 2066, 2067, 2068, |
| | | | | 2069, 2070 |
| kallikrein-2 | UniProtKB: Q6T774 | 2071 | 2072 | 2073, 2074, 2075, |
| | | | | 2076, 2077 |
| kallikrein-2 | UniProtKB: Q6T775 | 2078 | 2079 | 2080, 2081, 2082, |
| | | | | 2083, 2084 |
| kallikrein-4 | UniProtKB: A0A0C4DFQ5 | 2085 | 2086 | 2087, 2088, 2089, |
| | | | | 2090, 2091 |
| kallikrein-4 | UniProtKB: Q5BQA0 | 2092 | 2093 | 2094, 2095, 2096, |
| | | | | 2097, 2098 |
| kallikrein-4 | UniProtKB: Q96PT0 | 2099 | 2100 | 2101, 2102, 2103, |
| | | | | 2104, 2105 |
| kallikrein-4 | UniProtKB: Q96PT1 | 2106 | 2107 | 2108, 2109, 2110, |
| | | | | 2111, 2112 |
| kallikrein-4 | UniProtKB: Q9Y5K2 | 2113 | 2114 | 2115, 2116, 2117, |
| | | | | 2118, 2119 |
| KI20A | UniProtKB: O95235 | 2120 | 2121 | 2122, 2123, 2124, |
| | | | | 2125, 2126 |
| KIAA0205 | UniProtKB: Q92604 | 2127 | 2128 | 2129, 2130, 2131, |
| | | | | 2132, 2133 |
| KIF2C | UniProtKB: Q99661 | 2134 | 2135 | 2136, 2137, 2138, |
| | | | | 2139, 2140 |
| KK-LC-1 | UniProtKB: Q5H943 | 2141 | 2142 | 2143, 2144, 2145, |
| | | | | 2146, 2147 |
| LDLR | UniProtKB: P01130 | 2148 | 2149 | 2150, 2151, 2152, |
| | | | | 2153, 2154 |
| LGMN | UniProtKB: Q99538 | 2155 | 2156 | 2157, 2158, 2159, |
| | | | | 2160, 2161 |
| LIRB2 | UniProtKB: Q8N423 | 2162 | 2163 | 2164, 2165, 2166, |
| | | | | 2167, 2168 |
| LY6K | UniProtKB: Q17RY6 | 2169 | 2170 | 2171, 2172, 2173, |
| | | | | 2174, 2175 |
| MAGA5 | UniProtKB: P43359 | 2176 | 2177 | 2178, 2179, 2180, |
| | | | | 2181, 2182 |
| MAGA8 | UniProtKB: P43361 | 2183 | 2184 | 2185, 2186, 2187, |
| | | | | 2188, 2189 |
| MAGAB | UniProtKB: P43364 | 2190 | 2191 | 2192, 2193, 2194, |
| | | | | 2195, 2196 |
| MAGE-A10 | UniProtKB: A0A024RC14 | 2197 | 2198 | 2199, 2200, 2201, |
| | | | | 2202, 2203 |
| MAGE-A12 | UniProtKB: P43365 | 2204 | 2205 | 2206, 2207, 2208, |
| | | | | 2209, 2210 |
| MAGE-A1 | UniProtKB: P43355 | 2211 | 2212 | 2213, 2214, 2215, |
| | | | | 2216, 2217 |
| MAGE-A2 | UniProtKB: P43356 | 2218 | 2219 | 2220, 2221, 2222, |
| | | | | 2223, 2224 |
| MAGE-A3 | UniProtKB: P43357 | 2225 | 2226 | 2227, 2228, 2229, |
| | | | | 2230, 2231 |
| MAGE-A4 | UniProtKB: A0A024RC12 | 2232 | 2233 | 2234, 2235, 2236, |
| | | | | 2237, 2238 |
| MAGE-A4 | UniProtKB: P43358 | 2239 | 2240 | 2241, 2242, 2243, |
| | | | | 2244, 2245 |
| MAGE-A4 | UniProtKB: Q1RN33 | 2246 | 2247 | 2248, 2249, 2250, |
| | | | | 2251, 2252 |
| MAGE-A6 | UniProtKB: A8K072 | 2253 | 2254 | 2255, 2256, 2257, |
| | | | | 2258, 2259 |
| MAGE-A6 | UniProtKB: P43360 | 2260 | 2261 | 2262, 2263, 2264, |
| | | | | 2265, 2266 |
| MAGE-A6 | UniProtKB: Q6FHI5 | 2267 | 2268 | 2269, 2270, 2271, |
| | | | | 2272, 2273 |
| MAGE-A9 | UniProtKB: P43362 | 2274 | 2275 | 2276, 2277, 2278, |
| | | | | 2279, 2280 |
| MAGE-B10 | UniProtKB: Q96LZ2 | 2281 | 2282 | 2283, 2284, 2285, |
| | | | | 2286, 2287 |
| MAGE-B16 | UniProtKB: A2A368 | 2288 | 2289 | 2290, 2291, 2292, |
| | | | | 2293, 2294 |
| MAGE-B17 | UniProtKB: A8MXT2 | 2295 | 2296 | 2297, 2298, 2299, |
| | | | | 2300, 2301 |
| MAGE-_B1 | UniProtKB: Q96TG1 | 2302 | 2303 | 2304, 2305, 2306, |
| | | | | 2307, 2308 |
| MAGE-B2 | UniProtKB: O15479 | 2309 | 2310 | 2311, 2312, 2313, |
| | | | | 2314, 2315 |
| MAGE-B3 | UniProtKB: O15480 | 2316 | 2317 | 2318, 2319, 2320, |
| | | | | 2321, 2322 |
| MAGE-B4 | UniProtKB: O15481 | 2323 | 2324 | 2325, 2326, 2327, |
| | | | | 2328, 2329 |
| MAGE-B5 | UniProtKB: Q9BZ81 | 2330 | 2331 | 2332, 2333, 2334, |
| | | | | 2335, 2336 |
| MAGE-B6 | UniProtKB: Q8N7X4 | 2337 | 2338 | 2339, 2340, 2341, |
| | | | | 2342, 2343 |
| MAGE-C1 | UniProtKB: O60732 | 2344 | 2345 | 2346, 2347, 2348, |
| | | | | 2349, 2350 |
| MAGE-C2 | UniProtKB: Q9UBF1 | 2351 | 2352 | 2353, 2354, 2355, |
| | | | | 2356, 2357 |
| MAGE-C3 | UniProtKB: Q8TD91 | 2358 | 2359 | 2360, 2361, 2362, |
| | | | | 2363, 2364 |
| MAGE-D1 | UniProtKB: Q9Y5V3 | 2365 | 2366 | 2367, 2368, 2369, |
| | | | | 2370, 2371 |
| MAGE-D2 | UniProtKB: Q9UNF1 | 2372 | 2373 | 2374, 2375, 2376, |
| | | | | 2377, 2378 |
| MAGE-D4 | UniProtKB: Q96JG8 | 2379 | 2380 | 2381, 2382, 2383, |
| | | | | 2384, 2385 |
| MAGE-_E1 | UniProtKB: Q6IAI7 | 2386 | 2387 | 2388, 2389, 2390, |
| | | | | 2391, 2392 |
| MAGE-E1_(MAGE1) | UniProtKB: Q9HCI5 | 2393 | 2394 | 2395, 2396, 2397, |
| | | | | 2398, 2399 |
| MAGE-E2 | UniProtKB: Q8TD90 | 2400 | 2401 | 2402, 2403, 2404, |
| | | | | 2405, 2406 |
| MAGE-F1 | UniProtKB: Q9HAY2 | 2407 | 2408 | 2409, 2410, 2411, |
| | | | | 2412, 2413 |
| MAGE-H1 | UniProtKB: Q9H213 | 2414 | 2415 | 2416, 2417, 2418, |
| | | | | 2419, 2420 |
| MAGEL2 | UniProtKB: Q9UJ55 | 2421 | 2422 | 2423, 2424, 2425, |
| | | | | 2426, 2427 |
| mammaglobin_A | UniProtKB: Q13296 | 2428 | 2429 | 2430, 2431, 2432, |
| | | | | 2433, 2434 |
| mammaglobin_A | UniProtKB: Q6NX70 | 2435 | 2436 | 2437, 2438, 2439, |
| | | | | 2440, 2441 |
| MART-1/melan-A | UniProtKB: Q16655 | 2442 | 2443 | 2444, 2445, 2446, |
| | | | | 2447, 2448 |
| MART-2 | UniProtKB: Q5VTY9 | 2449 | 2450 | 2451, 2452, 2453, |
| | | | | 2454, 2455 |
| MC1_R | UniProtKB: Q01726 | 2456 | 2457 | 2458, 2459, 2460, |
| | | | | 2461, 2462 |
| MC1_R | UniProtKB: Q1JUL4 | 2463 | 2464 | 2465, 2466, 2467, |
| | | | | 2468, 2469 |
| MC1_R | UniProtKB: Q1JUL6 | 2470 | 2471 | 2472, 2473, 2474, |
| | | | | 2475, 2476 |
| MC1_R | UniProtKB: Q1JUL8 | 2477 | 2478 | 2479, 2480, 2481, |
| | | | | 2482, 2483 |
| MC1_R | UniProtKB: Q1JUL9 | 2484 | 2485 | 2486, 2487, 2488, |
| | | | | 2489, 2490 |
| MC1_R | UniProtKB: Q1JUM0 | 2491 | 2492 | 2493, 2494, 2495, |
| | | | | 2496, 2497 |
| MC1_R | UniProtKB: Q1JUM2 | 2498 | 2499 | 2500, 2501, 2502, |
| | | | | 2503, 2504 |
| MC1_R | UniProtKB: Q1JUM3 | 2505 | 2506 | 2507, 2508, 2509, |
| | | | | 2510, 2511 |
| MC1_R | UniProtKB: Q1JUM4 | 2512 | 2513 | 2514, 2515, 2516, |
| | | | | 2517, 2518 |
| MC1_R | UniProtKB: Q1JUM5 | 2519 | 2520 | 2521, 2522, 2523, |
| | | | | 2524, 2525 |
| MC1_R | UniProtKB: Q6UR92 | 2526 | 2527 | 2528, 2529, 2530, |
| | | | | 2531, 2532 |
| MC1_R | UniProtKB: Q6UR94 | 2533 | 2534 | 2535, 2536, 2537, |
| | | | | 2538, 2539 |
| MC1_R | UniProtKB: Q6UR95 | 2540 | 2541 | 2542, 2543, 2544, |
| | | | | 2545, 2546 |
| MC1_R | UniProtKB: Q6UR96 | 2547 | 2548 | 2549, 2550, 2551, |
| | | | | 2552, 2553 |
| MC1_R | UniProtKB: Q6UR97 | 2554 | 2555 | 2556, 2557, 2558, |
| | | | | 2559, 2560 |
| MC1_R | UniProtKB: Q6UR98 | 2561 | 2562 | 2563, 2564, 2565, |
| | | | | 2566, 2567 |
| MC1_R | UniProtKB: Q6UR99 | 2568 | 2569 | 2570, 2571, 2572, |
| | | | | 2573, 2574 |
| MC1_R | UniProtKB: Q6URA0 | 2575 | 2576 | 2577, 2578, 2579, |
| | | | | 2580, 2581 |
| MC1_R | UniProtKB: Q86YW1 | 2582 | 2583 | 2584, 2585, 2586, |
| | | | | 2587, 2588 |
| MC1_R | UniProtKB: V9Q5S2 | 2589 | 2590 | 2591, 2592, 2593, |
| | | | | 2594, 2595 |
| MC1_R | UniProtKB: V9Q671 | 2596 | 2597 | 2598, 2599, 2600, |
| | | | | 2601, 2602 |
| MC1_R | UniProtKB: V9Q783 | 2603 | 2604 | 2605, 2606, 2607, |
| | | | | 2608, 2609 |
| MC1_R | UniProtKB: V9Q7F1 | 2610 | 2611 | 2612, 2613, 2614, |
| | | | | 2615, 2616 |
| MC1_R | UniProtKB: V9Q8N1 | 2617 | 2618 | 2619, 2620, 2621, |
| | | | | 2622, 2623 |
| MC1_R | UniProtKB: V9Q977 | 2624 | 2625 | 2626, 2627, 2628, |
| | | | | 2629, 2630 |
| MC1_R | UniProtKB: V9Q9P5 | 2631 | 2632 | 2633, 2634, 2635, |
| | | | | 2636, 2637 |
| MC1_R | UniProtKB: V9Q9R8 | 2638 | 2639 | 2640, 2641, 2642, |
| | | | | 2643, 2644 |
| MC1_R | UniProtKB: V9QAE0 | 2645 | 2646 | 2647, 2648, 2649, |
| | | | | 2650, 2651 |
| MC1_R | UniProtKB: V9QAR2 | 2652 | 2653 | 2654, 2655, 2656, |
| | | | | 2657, 2658 |
| MC1_R | UniProtKB: V9QAW3 | 2659 | 2660 | 2661, 2662, 2663, |
| | | | | 2664, 2665 |
| MC1_R | UniProtKB: V9QB02 | 2666 | 2667 | 2668, 2669, 2670, |
| | | | | 2671, 2672 |
| MC1_R | UniProtKB: V9QB58 | 2673 | 2674 | 2675, 2676, 2677, |
| | | | | 2678, 2679 |
| MC1_R | UniProtKB: V9QBY6 | 2680 | 2681 | 2682, 2683, 2684, |
| | | | | 2685, 2686 |
| MC1_R | UniProtKB: V9QC17 | 2687 | 2688 | 2689, 2690, 2691, |
| | | | | 2692, 2693 |
| MC1_R | UniProtKB: V9QC66 | 2694 | 2695 | 2696, 2697, 2698, |
| | | | | 2699, 2700 |
| MC1_R | UniProtKB: V9QCQ4 | 2701 | 2702 | 2703, 2704, 2705, |
| | | | | 2706, 2707 |
| MC1_R | UniProtKB: V9QDF4 | 2708 | 2709 | 2710, 2711, 2712, |
| | | | | 2713, 2714 |
| MC1_R | UniProtKB: V9QDN7 | 2715 | 2716 | 2717, 2718, 2719, |
| | | | | 2720, 2721 |
| MC1_R | UniProtKB: V9QDQ6 | 2722 | 2723 | 2724, 2725, 2726, |
| | | | | 2727, 2728 |
| mesothelin | UniProtKB: Q13421 | 2729 | 2730 | 2731, 2732, 2733, |
| | | | | 2734, 2735 |
| MITF | UniProtKB: O75030-8 | 2736 | 2737 | 2738, 2739, 2740, |
| | | | | 2741, 2742 |
| MITF | UniProtKB: O75030-9 | 2743 | 2744 | 2745, 2746, 2747, |
| | | | | 2748, 2749 |
| MITF | UniProtKB: O75030 | 2750 | 2751 | 2752, 2753, 2754, |
| | | | | 2755, 2756 |
| MMP1_1 | UniProtKB: B3KQS8 | 2757 | 2758 | 2759, 2760, 2761, |
| | | | | 2762, 2763 |
| MMP7 | UniProtKB: P09237 | 2764 | 2765 | 2766, 2767, 2768, |
| | | | | 2769, 2770 |
| MUC-1 | Genbank: AAA60019 | 2771 | 2772 | 2773, 2774, 2775, |
| | | | | 2776, 2777 |
| MUM-1/m | RefSeq: NP_116242 | 2778 | 2779 | 2780, 2781, 2782, |
| | | | | 2783, 2784 |
| MUM-2/m | UniProtKB: Q9Y5R8 | 2785 | 2786 | 2787, 2788, 2789, |
| | | | | 2790, 2791 |
| MYO1A | UniProtKB: Q9UBC5 | 2792 | 2793 | 2794, 2795, 2796, |
| | | | | 2797, 2798 |
| MYO1B | UniProtKB: O43795 | 2799 | 2800 | 2801, 2802, 2803, |
| | | | | 2804, 2805 |
| MYO1C | UniProtKB: O00159 | 2806 | 2807 | 2808, 2809, 2810, |
| | | | | 2811, 2812 |
| MYO1D | UniProtKB: O94832 | 2813 | 2814 | 2815, 2816, 2817, |
| | | | | 2818, 2819 |
| MYO1E | UniProtKB: Q12965 | 2820 | 2821 | 2822, 2823, 2824, |
| | | | | 2825, 2826 |
| MYO1F | UniProtKB: O00160 | 2827 | 2828 | 2829, 2830, 2831, |
| | | | | 2832, 2833 |
| MYO1G | UniProtKB: B0I1T2 | 2834 | 2835 | 2836, 2837, 2838, |
| | | | | 2839, 2840 |
| MYO1H | RefSeq: NP_001094891 | 2841 | 2842 | 2843, 2844, 2845, |
| | | | | 2846, 2847 |
| NA17 | UniProtKB: Q3V5L5 | 2848 | 2849 | 2850, 2851, 2852, |
| | | | | 2853, 2854 |
| NA88-A | Pubmed: 10790436 | 2855 | 2856 | 2857, 2858, 2859, |
| | | | | 2860, 2861 |
| Neo-PAP | UniProtKB: Q9BWT3 | 2862 | 2863 | 2864, 2865, 2866, |
| | | | | 2867, 2868 |
| NFYC/m | UniProtKB: Q13952 | 2869 | 2870 | 2871, 2872, 2873, |
| | | | | 2874, 2875 |
| NGEP | UniProtKB: Q6IWH7 | 2876 | 2877 | 2878, 2879, 2880, |
| | | | | 2881, 2882 |
| NPM | UniProtKB: P06748 | 2883 | 2884 | 2885, 2886, 2887, |
| | | | | 2888, 2889 |
| NRCAM | UniProtKB: Q92823 | 2890 | 2891 | 2892, 2893, 2894, |
| | | | | 2895, 2896 |
| NSE | UniProtKB: P09104 | 2897 | 2898 | 2899, 2900, 2901, |
| | | | | 2902, 2903 |
| NUF2 | UniProtKB: Q9BZD4 | 2904 | 2905 | 2906, 2907, 2908, |
| | | | | 2909, 2910 |
| NY-ESO-1 | UniProtKB: P78358 | 2911 | 2912 | 2913, 2914, 2915, |
| | | | | 2916, 2917 |
| OA1 | UniProtKB: P51810 | 2918 | 2919 | 2920, 2921, 2922, |
| | | | | 2923, 2924 |
| OGT | UniProtKB: O15294 | 2925 | 2926 | 2927, 2928, 2929, |
| | | | | 2930, 2931 |
| OS-9 | UniProtKB: B4DH11 | 2932 | 2933 | 2934, 2935, 2936, |
| | | | | 2937, 2938 |
| OS-9 | UniProtKB: B4E321 | 2939 | 2940 | 2941, 2942, 2943, |
| | | | | 2944, 2945 |
| OS-9 | UniProtKB: B7Z8E7 | 2946 | 2947 | 2948, 2949, 2950, |
| | | | | 2951, 2952 |
| OS-9 | UniProtKB: Q13438 | 2953 | 2954 | 2955, 2956, 2957, |
| | | | | 2958, 2959 |
| osteocalcin | UniProtKB: P02818 | 2960 | 2961 | 2962, 2963, 2964, |
| | | | | 2965, 2966 |
| osteopontin | UniProtKB: A0A024RDE2 | 2967 | 2968 | 2969, 2970, 2971, |
| | | | | 2972, 2973 |
| osteopontin | UniProtKB: A0A024RDE6 | 2974 | 2975 | 2976, 2977, 2978, |
| | | | | 2979, 2980 |
| osteopontin | UniProtKB: A0A024RDJ0 | 2981 | 2982 | 2983, 2984, 2985, |
| | | | | 2986, 2987 |
| osteopontin | UniProtKB: B7Z351 | 2988 | 2989 | 2990, 2991, 2992, |
| | | | | 2993, 2994 |
| osteopontin | UniProtKB: F2YQ21 | 2995 | 2996 | 2997, 2998, 2999, |
| | | | | 3000, 3001 |
| osteopontin | UniProtKB: P10451 | 3002 | 3003 | 3004, 3005, 3006, |
| | | | | 3007, 3008 |
| p53 | UniProtKB: P04637 | 3009 | 3010 | 3011, 3012, 3013, |
| | | | | 3014, 3015 |
| PAGE-4 | UniProtKB: O60829 | 3016 | 3017 | 3018, 3019, 3020, |
| | | | | 3021, 3022 |
| PAI-1 | UniProtKB: P05121 | 3023 | 3024 | 3025, 3026, 3027, |
| | | | | 3028, 3029 |
| PAI-2 | UniProtKB: P05120 | 3030 | 3031 | 3032, 3033, 3034, |
| | | | | 3035, 3036 |
| PAP | UniProtKB: Q06141 | 3037 | 3038 | 3039, 3040, 3041, |
| | | | | 3042, 3043 |
| PAP | UniProtKB: Q53S56 | 3044 | 3045 | 3046, 3047, 3048, |
| | | | | 3049, 3050 |
| PATE | UniProtKB: Q8WXA2 | 3051 | 3052 | 3053, 3054, 3055, |
| | | | | 3056, 3057 |
| PAX3 | UniProtKB: P23760 | 3058 | 3059 | 3060, 3061, 3062, |
| | | | | 3063, 3064 |
| PAX5 | UniProtKB: Q02548 | 3065 | 3066 | 3067, 3068, 3069, |
| | | | | 3070, 3071 |
| PD1L1 | UniProtKB: Q9NZQ7 | 3072 | 3073 | 3074, 3075, 3076, |
| | | | | 3077, 3078 |
| PDCD1 | UniProtKB: Q15116 | 3079 | 3080 | 3081, 3082, 3083, |
| | | | | 3084, 3085 |
| PDEF | UniProtKB: O95238 | 3086 | 3087 | 3088, 3089, 3090, |
| | | | | 3091, 3092 |
| PECA1 | UniProtKB: P16284 | 3093 | 3094 | 3095, 3096, 3097, |
| | | | | 3098, 3099 |
| PGCB | UniProtKB: Q96GW7 | 3100 | 3101 | 3102, 3103, 3104, |
| | | | | 3105, 3106 |
| PGFRB | UniProtKB: P09619 | 3107 | 3108 | 3109, 3110, 3111, |
| | | | | 3112, 3113 |
| Pim-1_-Kinase | UniProtKB: A0A024RD25 | 3114 | 3115 | 3116, 3117, 3118, |
| | | | | 3119, 3120 |
| Pin-1 | UniProtKB: O15428 | 3121 | 3122 | 3123, 3124, 3125, |
| | | | | 3126, 3127 |
| Pin-1 | UniProtKB: Q13526 | 3128 | 3129 | 3130, 3131, 3132, |
| | | | | 3133, 3134 |
| Pin-1 | UniProtKB: Q49AR7 | 3135 | 3136 | 3137, 3138, 3139, |
| | | | | 3140, 3141 |
| PLAC1 | UniProtKB: Q9HBJ0 | 3142 | 3143 | 3144, 3145, 3146, |
| | | | | 3147, 3148 |
| PMEL | UniProtKB: P40967 | 3149 | 3150 | 3151, 3152, 3153, |
| | | | | 3154, 3155 |
| PML | UniProtKB: P29590 | 3156 | 3157 | 3158, 3159, 3160, |
| | | | | 3161, 3162 |
| POTEF | UniProtKB: A5A3E0 | 3163 | 3164 | 3165, 3166, 3167, |
| | | | | 3168, 3169 |
| POTE | UniProtKB: Q86YR6 | 3170 | 3171 | 3172, 3173, 3174, |
| | | | | 3175, 3176 |
| PRAME | UniProtKB: A0A024R1E6 | 3177 | 3178 | 3179, 3180, 3181, |
| | | | | 3182, 3183 |
| PRAME | UniProtKB: P78395 | 3184 | 3185 | 3186, 3187, 3188, |
| | | | | 3189, 3190 |
| PRDX5/m | UniProtKB: P30044 | 3191 | 3192 | 3193, 3194, 3195, |
| | | | | 3196, 3197 |
| PRM2 | UniProtKB: P04554 | 3198 | 3199 | 3200, 3201, 3202, |
| | | | | 3203, 3204 |
| prostein | UniProtKB: Q96JT2 | 3205 | 3206 | 3207, 3208, 3209, |
| | | | | 3210, 3211 |
| proteinase-3 | UniProtKB: D6CHE9 | 3212 | 3213 | 3214, 3215, 3216, |
| | | | | 3217, 3218 |
| proteinase-3 | UniProtKB: P24158 | 3219 | 3220 | 3221, 3222, 3223, |
| | | | | 3224, 3225 |
| PSA | UniProtKB: P55786 | 3226 | 3227 | 3228, 3229, 3230, |
| | | | | 3231, 3232 |
| PSB9 | UniProtKB: P28065 | 3233 | 3234 | 3235, 3236, 3237, |
| | | | | 3238, 3239 |
| PSCA | UniProtKB: D3DWI6 | 3240 | 3241 | 3242, 3243, 3244, |
| | | | | 3245, 3246 |
| PSCA | UniProtKB: O43653 | 3247 | 3248 | 3249, 3250, 3251, |
| | | | | 3252, 3253 |
| PSGR | UniProtKB: Q9H255 | 3254 | 3255 | 3256, 3257, 3258, |
| | | | | 3259, 3260 |
| PSM | UniProtKB: Q04609 | 3261 | 3262 | 3263, 3264, 3265, |
| | | | | 3266, 3267 |
| PTPRC | RefSeq: NP_002829 | 3268 | 3269 | 3270, 3271, 3272, |
| | | | | 3273, 3274 |
| RAB8A | UniProtKB: P61006 | 3275 | 3276 | 3277, 3278, 3279, |
| | | | | 3280, 3281 |
| RAGE-1 | UniProtKB: Q9UQ07 | 3282 | 3283 | 3284, 3285, 3286, |
| | | | | 3287, 3288 |
| RARA | UniProtKB: P10276 | 3289 | 3290 | 3291, 3292, 3293, |
| | | | | 3294, 3295 |
| RASH | UniProtKB: P01112 | 3296 | 3297 | 3298, 3299, 3300, |
| | | | | 3301, 3302 |
| RASK | UniProtKB: P01116 | 3303 | 3304 | 3305, 3306, 3307, |
| | | | | 3308, 3309 |
| RASN | UniProtKB: P01111 | 3310 | 3311 | 3312, 3313, 3314, |
| | | | | 3315, 3316 |
| RGS5 | UniProtKB: O15539 | 3317 | 3318 | 3319, 3320, 3321, |
| | | | | 3322, 3323 |
| RHAMM/CD168 | UniProtKB: O75330 | 3324 | 3325 | 3326, 3327, 3328, |
| | | | | 3329, 3330 |
| RHOC | UniProtKB: P08134 | 3331 | 3332 | 3333, 3334, 3335, |
| | | | | 3336, 3337 |
| RSSA | UniProtKB: P08865 | 3338 | 3339 | 3340, 3341, 3342, |
| | | | | 3343, 3344 |
| RU1 | UniProtKB: Q9UHJ3 | 3345 | 3346 | 3347, 3348, 3349, |
| | | | | 3350, 3351 |
| RU2 | UniProtKB: Q9UHG0 | 3352 | 3353 | 3354, 3355, 3356, |
| | | | | 3357, 3358 |
| RUNX1 | UniProtKB: Q01196 | 3359 | 3360 | 3361, 3362, 3363, |
| | | | | 3364, 3365 |
| S-100 | UniProtKB: V9HW39 | 3366 | 3367 | 3368, 3369, 3370, |
| | | | | 3371, 3372 |
| SAGE | UniProtKB: Q9NXZ1 | 3373 | 3374 | 3375, 3376, 3377, |
| | | | | 3378, 3379 |
| SART-_1 | UniProtKB: O43290 | 3380 | 3381 | 3382, 3383, 3384, |
| | | | | 3385, 3386 |
| SART-2 | UniProtKB: Q9UL01 | 3387 | 3388 | 3389, 3390, 3391, |
| | | | | 3392, 3393 |
| SART-3 | UniProtKB: Q15020 | 3394 | 3395 | 3396, 3397, 3398, |
| | | | | 3399, 3400 |
| SEPR | UniProtKB: Q12884 | 3401 | 3402 | 3403, 3404, 3405, |
| | | | | 3406, 3407 |
| SIA7F | UniProtKB: Q969X2 | 3408 | 3409 | 3410, 3411, 3412, |
| | | | | 3413, 3414 |
| SIA8A | UniProtKB: Q92185 | 3415 | 3416 | 3417, 3418, 3419, |
| | | | | 3420, 3421 |
| SIAT9 | UniProtKB: Q9UNP4 | 3422 | 3423 | 3424, 3425, 3426, |
| | | | | 3427, 3428 |
| SIRT2/m | UniProtKB: A0A024R0G8 | 3429 | 3430 | 3431, 3432, 3433, |
| | | | | 3434, 3435 |
| SIRT2/m | UniProtKB: Q8IXJ6 | 3436 | 3437 | 3438, 3439, 3440, |
| | | | | 3441, 3442 |
| SOX10 | UniProtKB: P56693 | 3443 | 3444 | 3445, 3446, 3447, |
| | | | | 3448, 3449 |
| SP17 | UniProtKB: Q15506 | 3450 | 3451 | 3452, 3453, 3454, |
| | | | | 3455, 3456 |
| SPNXA | UniProtKB: Q9NS26 | 3457 | 3458 | 3459, 3460, 3461, |
| | | | | 3462, 3463 |
| SPXN3 | UniProtKB: Q5MJ09 | 3464 | 3465 | 3466, 3467, 3468, |
| | | | | 3469, 3470 |
| SSX-1 | UniProtKB: Q16384 | 3471 | 3472 | 3473, 3474, 3475, |
| | | | | 3476, 3477 |
| SSX-2 | UniProtKB: Q16385 | 3478 | 3479 | 3480, 3481, 3482, |
| | | | | 3483, 3484 |
| SSX3 | UniProtKB: Q99909 | 3485 | 3486 | 3487, 3488, 3489, |
| | | | | 3490, 3491 |
| SSX-4 | UniProtKB: O60224 | 3492 | 3493 | 3494, 3495, 3496, |
| | | | | 3497, 3498 |
| ST1A1 | UniProtKB: P50225 | 3499 | 3500 | 3501, 3502, 3503, |
| | | | | 3504, 3505 |
| STAG2 | UniProtKB: Q8N3U4-2 | 3506 | 3507 | 3508, 3509, 3510, |
| | | | | 3511, 3512 |
| STAMP-1 | UniProtKB: Q8NFT2 | 3513 | 3514 | 3515, 3516, 3517, |
| | | | | 3518, 3519 |
| STEAP-1 | UniProtKB: A0A024RA63 | 3520 | 3521 | 3522, 3523, 3524, |
| | | | | 3525, 3526 |
| STEAP-1 | UniProtKB: Q9UHE8 | 3527 | 3528 | 3529, 3530, 3531, |
| | | | | 3532, 3533 |
| Survivin-2B | UniProtKB: O15392-2 | 3534 | 3535 | 3536, 3537, 3538, |
| | | | | 3539, 3540 |
| survivin | UniProtKB: O15392 | 3541 | 3542 | 3543, 3544, 3545, |
| | | | | 3546, 3547 |
| SYCP1 | UniProtKB: A0A024R0I2 | 3548 | 3549 | 3550, 3551, 3552, |
| | | | | 3553, 3554 |
| SYCP1 | UniProtKB: B7ZLS9 | 3555 | 3556 | 3557, 3558, 3559, |
| | | | | 3560, 3561 |
| SYCP1 | UniProtKB: Q15431 | 3562 | 3563 | 3564, 3565, 3566, |
| | | | | 3567, 3568 |
| SYCP1 | UniProtKB: Q3MHC4 | 3569 | 3570 | 3571, 3572, 3573, |
| | | | | 3574, 3575 |
| SYT-SSX-1 | UniProtKB: A4PIV7 | 3576 | 3577 | 3578, 3579, 3580, |
| | | | | 3581, 3582 |
| SYT-SSX-1 | UniProtKB: A4PIV8 | 3583 | 3584 | 3585, 3586, 3587, |
| | | | | 3588, 3589 |
| SYT-SSX-2 | UniProtKB: A4PIV9 | 3590 | 3591 | 3592, 3593, 3594, |
| | | | | 3595, 3596 |
| SYT-SSX-2 | UniProtKB: A4PIW0 | 3597 | 3598 | 3599, 3600, 3601, |
| | | | | 3602, 3603 |
| TARP | UniProtKB: Q0VGM3 | 3604 | 3605 | 3606, 3607, 3608, |
| | | | | 3609, 3610 |
| TCRg | UniProtKB: A2JGV3 | 3611 | 3612 | 3613, 3614, 3615, |
| | | | | 3616, 3617 |
| TF2AA | UniProtKB: P52655 | 3618 | 3619 | 3620, 3621, 3622, |
| | | | | 3623, 3624 |
| TGFR2 | UniProtKB: P37173 | 3625 | 3626 | 3627, 3628, 3629, |
| | | | | 3630, 3631 |
| TGM-4 | UniProtKB: B2R7D1 | 3632 | 3633 | 3634, 3635, 3636, |
| | | | | 3637, 3638 |
| TIE2 | UniProtKB: Q02763 | 3639 | 3640 | 3641, 3642, 3643, |
| | | | | 3644, 3645 |
| TKTL1 | UniProtKB: P51854 | 3646 | 3647 | 3648, 3649, 3650, |
| | | | | 3651, 3652 |
| TPI/m | UniProtKB: P60174 | 3653 | 3654 | 3655, 3656, 3657, |
| | | | | 3658, 3659 |
| TRGV11 | UniProtKB: Q99601 | 3660 | 3661 | 3662, 3663, 3664, |
| | | | | 3665, 3666 |
| TRGV9 | UniProtKB: A4D1X2 | 3667 | 3668 | 3669, 3670, 3671, |
| | | | | 3672, 3673 |
| TRGV9 | UniProtKB: Q99603 | 3674 | 3675 | 3676, 3677, 3678, |
| | | | | 3679, 3680 |
| TRGV9 | UniProtKB: Q99604 | 3681 | 3682 | 3683, 3684, 3685, |
| | | | | 3686, 3687 |
| TRPC1 | UniProtKB: P48995 | 3688 | 3689 | 3690, 3691, 3692, |
| | | | | 3693, 3694 |
| TRP-p8 | UniProtKB: Q7Z2W7 | 3695 | 3696 | 3697, 3698, 3699, |
| | | | | 3700, 3701 |
| TSG10 | UniProtKB: Q9BZW7 | 3702 | 3703 | 3704, 3705, 3706, |
| | | | | 3707, 3708 |
| TSPY1 | UniProtKB: Q01534 | 3709 | 3710 | 3711, 3712, 3713, |
| | | | | 3714, 3715 |
| TVC_(TRGV3) | Genbank: M13231.1 | 3716 | 3717 | 3718, 3719, 3720, |
| | | | | 3721, 3722 |
| TX101 | UniProtKB: Q9BY14-2 | 3723 | 3724 | 3725, 3726, 3727, |
| | | | | 3728, 3729 |
| tyrosinase | UniProtKB: A0A024DBG7 | 3730 | 3731 | 3732, 3733, 3734, |
| | | | | 3735, 3736 |
| tyrosinase | UniProtKB: L8B082 | 3737 | 3738 | 3739, 3740, 3741, |
| | | | | 3742, 3743 |
| tyrosinase | UniProtKB: L8B086 | 3744 | 3745 | 3746, 3747, 3748, |
| | | | | 3749, 3750 |
| tyrosinase | UniProtKB: L8B0B9 | 3751 | 3752 | 3753, 3754, 3755, |
| | | | | 3756, 3757 |
| tyrosinase | UniProtKB: O75767 | 3758 | 3759 | 3760, 3761, 3762, |
| | | | | 3763, 3764 |
| tyrosinase | UniProtKB: P14679 | 3765 | 3766 | 3767, 3768, 3769, |
| | | | | 3770, 3771 |
| tyrosinase | UniProtKB: U3M8N0 | 3772 | 3773 | 3774, 3775, 3776, |
| | | | | 3777, 3778 |
| tyrosinase | UniProtKB: U3M9D5 | 3779 | 3780 | 3781, 3782, 3783, |
| | | | | 3784, 3785 |
| tyrosinase | UniProtKB: U3M9J2 | 3786 | 3787 | 3788, 3789, 3790, |
| | | | | 3791, 3792 |
| TYRP1 | UniProtKB: P17643 | 3793 | 3794 | 3795, 3796, 3797, |
| | | | | 3798, 3799 |
| TYRP2 | UniProtKB: P40126 | 3800 | 3801 | 3802, 3803, 3804, |
| | | | | 3805, 3806 |
| UPA | UniProtKB: Q96NZ9 | 3807 | 3808 | 3809, 3810, 3811, |
| | | | | 3812, 3813 |
| VEGFR1 | UniProtKB: B5A924 | 3814 | 3815 | 3816, 3817, 3818, |
| | | | | 3819, 3820 |
| WT1 | UniProtKB: A0A0H5AUY0 | 3821 | 3822 | 3823, 3824, 3825, |
| | | | | 3826, 3827 |
| WT1 | UniProtKB: P19544 | 3828 | 3829 | 3830, 3831, 3832, |
| | | | | 3833, 3834 |
| WT1 | UniProtKB: Q06250 | 3835 | 3836 | 3837, 3838, 3839, |
| | | | | 3840, 3841 |
| XAGE1 | UniProtKB: Q9HD64 | 3842 | 3843 | 3844, 3845, 3846, |
| | | | | 3847, 3848 |
| IL-10 | UniProtKB: P22301 | 4169 | 4170 | 4171, 4172, 4173, |
| | | | | 4174, 4175, 4176 |
| IL-5 | UniProtKB: P05113 | 4585 | 4586 | 4587, 4588, 4589, |
| | | | | 4590, 4591, 4592 |
| M-CSF | UniProtKB: P09603 | 4705 | 4706 | 4707, 4708, 4709, |
| | | | | 4710, 4711, 4712 |
| TGFbeta1 | UniProtKB: P01137 | 4785 | 4786 | 4787, 4788, 4789, |
| | | | | 4790, 4791, 4792 |
| Caspase_8 | UniProtKB: Q14790 | 7113 | 7114 | 7115, 7116, 7117, |
| | | | | 7118, 7119, 7120 |
| SERPINB5 | UniProtKB: P36952 | 7465 | 7466 | 7467, 7468, 7469, |
| | | | | 7470, 7471, 7472 |
| calreticulin | UniProtKB: B4DHR1 | 7569 | 7570 | 7571, 7572, 7573, |
| | | | | 7574, 7575, 7576 |
| calreticulin | UniProtKB: B4E2Y9 | 7577 | 7578 | 7579, 7580, 7581, |
| | | | | 7582, 7583, 7584 |
| calreticulin | UniProtKB: P27797 | 7585 | 7586 | 7587, 7588, 7589, |
| | | | | 7590, 7591, 7592 |
| calreticulin | UniProtKB: Q96L12 | 7593 | 7594 | 7595, 7596, 7597, |
| | | | | 7598, 7599, 7600 |
| N-myc | UniProtKB: P04198 | 9987 | 9988 | 9989, 9990, 9991, |
| | | | | 9992, 9993, 9994 |

[0178] According to the present invention, in a more preferred embodiment, the inventive composition comprises at least one RNA, preferably an mRNA comprising at least one coding region encoding at least one tumor antigen or a fragment or variant thereof, wherein the at least one coding region comprises an RNA sequence being identical or at least 50%, 60%, 70%, 75%, 80%, 81%, 82%, 83%, 84%, 85%, 86%, 87%, 88%, 89%, 90%, 91%, 92%, 93%, 94%, 95%, 96%, 97%, 98%, 99% identical to the RNA sequences according to the SEQ ID Nos as disclosed in Table 9.

[0179] Furthermore tumor antigens also may encompass idiotypic antigens associated with a cancer or tumor disease, particularly lymphoma or a lymphoma associated disease, wherein said idiotypic antigen is an immunoglobulin idiotype of a lymphoid blood cell or a T cell receptor idiotype of a lymphoid blood cell.

[0180] In a particularly preferred embodiment the inventive RNA composition comprises at least one RNA, wherein the at least one RNA encodes the following antigens:
[0181] STEAP (Six Transmembrane Epithelial Antigen of the Prostate);
[0182] PSA (Prostate-Specific Antigen),
[0183] PSMA (Prostate-Specific Membrane Antigen),
[0184] PSCA (Prostate Stem Cell Antigen);
[0185] PAP (Prostatic Acid Phosphatase), and
[0186] MUC1 (Mucin 1).

[0187] In another particularly preferred embodiment the inventive RNA composition comprises at least one RNA, wherein the at least one RNA encodes the following antigens:
[0188] 5T4 (Trophoblast glycoprotein, TPBG);
[0189] Survivin (Baculoviral IAP repeat-containing protein 5; BIRC5),
[0190] NY-ESO-1 (New York esophageal squamous cell carcinoma 1; CTAG1B),
[0191] MAGE-C1 (Melanoma antigen family C1);
[0192] MAGE-C2 (Melanoma antigen family C2), and
[0193] MUC1 (Mucin 1).

[0194] 9. β-Catenin Inhibitors

[0195] In a further preferred embodiment of the inventive RNA containing composition the RNA, preferably mRNA codes for at least one β-catenin inhibitor or a fragment or variant thereof. Preferably the RNA encoding the at least one β-catenin inhibitor encodes an inhibitory protein or dominant negative mutant protein of the β-catenin pathway. Particular preferred β-catenin inhibitors according to the present invention comprise TAT-NLS-BLBD-6, axin-1, TCF-4, GSK-3b, DKK-1, Dvl-1 derivatives or fragments thereof.

[0196] As reviewed by Thakur and Mishra (Thakur R, Mishra D P. Pharmacological modulation of beta-catenin and its applications in cancer therapy. J Cell Mol Med. 2013 April; 17(4):449-56. doi: 10.1111/jcmm.12033) beta-catenin (β-catenin) is a multifunctional protein which plays an important role in physiological homeostasis. It acts both as a transcriptional regulator and an adaptor protein for intracellular adhesion. β-catenin is necessary for the establishment and maintenance of epithelial layers and provides a linkage between intracellular junctions and cytoskeletal proteins. β-catenin is regulated by Wnt signaling. In the absence of Wnt downstream signal β-catenin is phosphorylated which leads to its ubiquitination and eventually protein degradation. Various literature reports have linked β-catenin to the malignant transformation of normal cells. For example, Wnt signaling and β-catenin nuclear localization was associated with differentiation of hepatocytes into a tumoral phenotype. Similarly, in lung epithelial and pancreatic cells, activation of β-catenin was sufficient for induction of oncogenic transformation. In addition to being a driving force of malignant transformation, abnormal β-catenin expression and localization has been associated with increased metastatic potential. Recently, it has been shown that β-catenin signaling prevents T cell infiltration and anti-tumor immunity strongly limiting the potential effects of immunotherapies. Since β-catenin plays an important and detrimental role in tumorigenesis, it has been proposed as a putative drug target.

[0197] 10. STING-Pathway Activators

[0198] In a further preferred embodiment of the inventive RNA containing composition the RNA, preferably mRNA codes for at least one activator of the STING (stimulator of interferon genes) pathway or a fragment or variant thereof. Preferably, the RNA encoding the at least one activator (stimulator) of the STING pathway encodes an activating protein or a constitutively active protein of the STING pathway, preferably DDX41, STING, cGAS, IRF3, TBK1 or STAT6 or a fragment or variant thereof.

[0199] As reviewed by Woo et al. (Woo S R, Corrales L, Gajewski T F. The STING pathway and the T cell-inflamed tumor microenvironment. Trends Immunol. 2015 Mar. 7. pii: S1471-4906(15)00019-8. doi: 10.1016/j.it.2015.02.003) and Dubensky et al. (Dubensky T W Jr, Kanne D B, Leong M L. Rationale, progress and development of vaccines utilizing STING-activating cyclic dinucleotide adjuvants. Ther Adv Vaccines. 2013 November; 1(4):131-43. doi: 10.1177/2051013613501988) the so-called STING pathway (STING—stimulator of interferon genes) is responsible for sensing of cytoplasmic DNA and induction of proinflammatory mediators. After binding of DNA in cytoplasm, STING activates signaling via TANK-binding kinase 1 (TBK-1)/IRF-3 axis which results in production of IFN-β. This pathway was shown to play an important role in sensing of DNA viruses as well as some autoimmune disorders. Recent data have identified STING pathway as absolutely necessary to induce spontaneous T cell priming against tumor antigens in vivo. Tumor DNA was detected within tumor-infiltrating DCs, which led to IFN-β production and T cell activation. Thus, intratumoral application of small molecules STING pathway agonists has demonstrated their efficacy in tumor-bearing animals. Agonists of the STING pathway has been also evaluated as vaccine adjuvants showing potency to induce cellular and humoral immunity in vaccinated hosts.

[0200] 11. Checkpoint Modulators

[0201] In a further preferred embodiment of the inventive RNA containing composition the RNA, preferably mRNA comprises at least one coding region that codes for at least one checkpoint modulator or a fragment or variant thereof.

[0202] Negative regulatory T cell surface molecules were discovered which are upregulated in activated T cells to dampen their activity, resulting in less effective killing of tumor cells. These inhibitory molecules were termed negative co-stimulatory molecules due to their homology to the T cell co-stimulatory molecule CD28. These proteins, also referred to as immune checkpoint proteins, function in multiple pathways including the attenuation of early activation signals, competition for positive co-stimulation and direct inhibition of antigen presenting cells (Bour-Jordan et al., 2011. Immunol Rev. 241(1):180-205).

[0203] In preferred embodiments of the present invention the checkpoint modulator is a modulator of B7-1/CD80, B7-2/CD86, B7-H1/PD-L1, B7-H2, B7-H3, B7-H4, B7-H6, B7-H7/HHLA2, BTLA, CD28, CD28H/IGPR-1, CTLA-4, ICOS, PD-1, PD-L2/B7-DC, PDCD6, VISTA/B7-H5/PD-1H, BTN1A1/Butyrophilin, BTN2A1, BTN2A2/Butyrophilin 2A2, BTN3A1/2, BTN3A2, BTN3A3, BTNL2/Butyrophilin-like 2, BTNL3, BTNL4, BTNL6, BTNL8, BTNL9, BTNL10, CD277/BTN3A1, LAIR1, LAIR2, CD96, CD155/PVR, CRTAM, DNAM-1/CD226, Nectin-2/CD112, Nectin-3, TIGIT, LILRA3/CD85e, LILRA4/CD85g/ILT7, LILRB1/CD85j/ILT2, LILRB2/CD85d/ILT4, LILRB3/CD85a/ILT5, LILRB4/CD85k/ILT3, 4-1BB/TNFRSF9/CD137, 4-1BB Ligand/TNFSF9, BAFF/BLyS/TNFSF13B, BAFF R/TNFRSF13C, CD27/TNFRSF7, CD27 Ligand/TNFSF7, CD30/TNFRSF8, CD30 Ligand/TNFSF8, CD40/TNFRSF5, CD40 Ligand/TNFSF5, DR3/TNFRSF25, GITR/TNFRSF18, GITR Ligand/TNFSF18, HVEM/TNFRSF14, LIGHT/TNFSF14, Lymphotoxin-alpha/TNF-beta, OX40/TNFRSF4, OX40 Ligand/TNFSF4, RELT/TNFRSF19L, TACI/TNFRSF13B, TL1A/TNFSF15, TNF-alpha, TNF RII/TNFRSF1B, 2B4/CD244/SLAMF4, BLAME/SLAMF8, CD2, CD2F-10/SLAMF9, CD48/SLAMF2, CD58/LFA-3, CD84/SLAMF5, CD229/SLAMF3, CRACC/SLAMF7, NTB-A/SLAMF6, SLAM/CD150, TIM-1/KIM-1/HAVCR, TIM-3, TIM-4, CD7, CD96, CD160, CD200, CD300a/LMIR1, CRTAM, DAP12, Dectin-1/CLEC7A, DPPIV/CD26, EphB6, Integrin alpha 4 beta 1, Integrin alpha 4 beta 7/LPAM-1, LAG-3, TIM-1/KIM-1/HAVCR, TIM-4, TSLP R, or any combinations thereof.

[0204] In the context of the present invention a checkpoint modulator is defined herein as a molecule preferably a protein e.g. an antibody, a dominant negative receptor, a decoy receptor, or a ligand or a fragment or variant thereof, which modulates the function of an immune checkpoint protein, e.g. it inhibits or reduces the activity of checkpoint inhibitors (or inhibitory checkpoint molecules) or it stimulates the activity of checkpoint stimulators (or stimulatory checkpoint molecules). Therefore checkpoint modulators as defined herein, influence the activity of checkpoint molecules.

[0205] In this context inhibitory checkpoint molecules are defined as checkpoint inhibitors and can be used synonymously. In addition stimulatory checkpoint molecules are defined as checkpoint stimulators and can be used synonymously.

[0206] Preferable inhibitory checkpoint molecules that may be inhibited by a checkpoint modulator in the context of the invention are PD-1, PD-L1, CTLA-4, PD-L2, LAG3, TIM3/HAVCR2, 2B4, A2aR, B7H3, B7H4, BTLA, CD30, CD160, GAL9, HVEM, IDO1, IDO2, KIR, LAIR1 and VISTA.

[0207] Preferable stimulatory checkpoint molecules that may be stimulated by a checkpoint modulator in the context of the invention are CD2, CD27, CD28, CD40, CD137, CD226, CD276, GITR, ICOS, OX-40 and CD70.

[0208] Preferably, the checkpoint modulator is selected from agonistic antibodies, antagonistic antibodies, ligands, dominant negative receptors, and decoy receptors or combinations thereof.

[0209] Methods for generating and using mRNA-encoded antibodies are known in the art (e.g. WO2008/083949).

[0210] Preferably, the agonistic antibody is chosen from the following list: anti-4-1BB, anti-OX40, anti-GITR, anti-CD28, anti-CD27, anti-CD-40anti-ICOS, anti-TNFRSF25, and anti-LIGHT.

[0211] OX40 is a member of the TNFR-superfamily of receptors, and is expressed on the surface of antigen-activated mammalian CD4+ and CD8+ T lymphocytes. OX40 ligand (OX40L, also known as gp34, ACT-4-L, and CD252) is a protein that specifically interacts with the OX40 receptor. The term OX40L includes the entire OX40 ligand, soluble OX40 ligand, and fusion proteins comprising a functionally active portion of OX40 ligand covalently linked to a second moiety, e.g., a protein domain. Also included within the definition of OX40L are variants which vary in amino acid sequence from naturally occurring OX4L but which retain the ability to specifically bind to the OX40 receptor. Further included within the definition of OX40L are variants which enhance the biological activity of OX40. An OX40 agonist is a molecule which induces or enhances the biological activity of OX40, e.g. signal transduction mediated by OX40. An OX40 agonist is preferably defined herein as a binding molecule capable of specific binding to OX40. Therefore, the OX40 agonist may be any agonist binding to OX40 and capable of stimulating OX40 signaling. In this context, the OX40 agonist may be an agonistic antibody binding to OX40.

[0212] OX40 agonists and anti-OX40 monoclonal antibodies are described in WO1995/021251, WO1995/012673 and WO1995/21915. Particularly preferred is the anti-OX40 antibody 9B12, a murine anti-OX40 monoclonal antibody directed against the extracellular domain of human OX40 (Weinberg et al., 2006. J. Immunother. 29(6):575-585).

[0213] Preferably, the antagonistic antibody is chosen from the list of anti-CTLA4, anti-PD1, anti-PD-L1, anti-Vista, anti-Tim-3, anti-LAG-3, and anti-BTLA.

[0214] Cytotoxic T lymphocyte antigen-4 (CTLA-4) is mainly expressed within the intracellular compartment of T cells. After a potent or long-lasting stimulus to a naive T cell via the T cell receptor (TCR), CTLA-4 is transported to the cell surface and concentrated at the immunological synapse. CTLA-4 then competes with CD28 for CD80/CD86 and down-modulates TCR signaling via effects on Akt signaling. Thus CTLA-4 functions physiologically as a signal dampener (Weber, J. 2010. Semin. Oncol. 37(5):430-9).

[0215] Particularly preferred are the anti-CTLA-4 antibodies ipilimumab (Yervoy®), tremelimumab, and AGEN-1884.

[0216] Members of the PD-1 pathway are all proteins which are associated with PD-1 signaling. On the one hand these might be proteins which induce PD-1 signaling upstream of PD-1 as e.g. the ligands of PD-1 PD-L1 and PD-L2 and the signal transduction receptor PD-1. On the other hand these might be signal transduction proteins downstream of PD-1 receptor. Particularly preferred as members of the PD-1 pathway in the context of the present invention are PD-1, PD-L1 and PD-L2.

[0217] In the context of the present invention, a PD-1 pathway antagonist is preferably defined herein as a compound capable to impair the PD-1 pathway signaling, preferably signaling mediated by the PD-1 receptor. Therefore, the PD-1 pathway antagonist may be any antagonist directed against any member of the PD-1 pathway capable of antagonizing PD-1 pathway signaling. In this context, the antagonist may be an antagonistic antibody as defined herein, targeting any member of the PD-1 pathway, preferably directed against PD-1 receptor, PD-L1 or PD-L2. This antagonistic antibody may also be encoded by a nucleic acid. Also, the PD-1 pathway antagonist may be a fragment of the PD-1 receptor blocking the activity of PD1 ligands. B7-1 or fragments thereof may act as PD1-antagonizing ligands as well. Additionally, a PD-1 pathway antagonist may be a protein comprising (or a nucleic acid coding for) an amino acid sequence capable of binding to PD-1 but preventing PD-1 signaling, e.g. by inhibiting PD-1 and B7-H1 or B7-DL interaction (WO2014127917).

[0218] Particularly preferred are the anti-PD1 antibodies Nivolumab (MDX-1106/BMS-936558/ONO-4538), (Brahmer et al., 2010. J Clin Oncol. 28(19):3167-75; PMID: 20516446); Pidilizumab (CT-011), (Berger et al., 2008. Clin Cancer Res. 14(10):3044-51; PMID: 18483370); Pembrolizumab (MK-3475, SCH 900475); AMP-224, and MED10680 (AMP-514)

[0219] Particularly preferred are the anti-PD-L1 antibodies MDX-1105/BMS-936559 (Brahmer et al. 2012. N Engl J Med. 366(26):2455-65; PMID: 22658128); atezolizumab (MPDL3280A/RG7446); durvalumab (MED14736); and avelumab (MSB0010718).

[0220] According to the present invention the at least one RNA of the inventive RNA containing composition encodes at least one antibody or fragments or variants thereof of Table 10. It is particularly preferred that the RNA containing composition comprises at least one RNA encoding the heavy chain of a particular antibody or fragments or variants thereof and at least one further RNA encoding the light chain of the same particular antibody or fragments or variants thereof.

TABLE 10
Antibodies directed against checkpoint molecules

| Name | Target |
|---|---|
| Urelumab | 4-1BB/CD137 |
| PF-05082566 | 4-1BB/CD137 |
| 8H9 | B7-H3 |
| Enoblituzumab | B7-H3 |
| Ipilimumab | CD152/CTLA-4 |
| Ticilimumab (=tremelimumab) | CD152/CTLA-4 |
| Tremelimumab | CD152/CTLA-4 |
| Varlilumab | CD27 |
| Teneliximab | CD40 |
| Vorsetuzumab mafodotin | CD70 |
| Lirilumab | KIR2D |
| GSK-3174998 | OX40 |
| MEDI-6469 | OX40 |
| MEDI-6383 | OX40 |
| MEDI-0562 | OX40 |
| PF-04518600 | OX40 |
| RG-7888 | OX40 |
| PF-06801591 | PD-1 |
| BGBA-317 | PD-1 |
| MEDI-0680 | PD-1 |
| MK-3475 | PD-1 |
| Nivolumab | PD-1 |
| PDR-001 | PD-1 |
| Pembrolizumab | PD-1 |
| Pidilizumab | PD-1 |
| REGN-2810 | PD-1 |
| SHR-1210 | PD-1 |
| TSR-042 | PD-1 |
| MDX-1106 | PD-1 |
| Merck 3745 | PD-1 |
| CT-011 | PD-1 |
| MEDI-0680 | PD-1 |
| PDR001 | PD-1 |
| REGN2810 | PD-1 |
| BGB-108 | PD-1 |
| BGB-A317 | PD-1 |
| AMP-224 | PD-1 |
| Atezolizumab | PD-L1 (CD274) |
| Avelumab | PD-L1 (CD274) |
| BMS-936559 | PD-L1 (CD274) |
| Durvalumab | PD-L1 (CD274) |
| MEDI-4736 | PD-L1 (CD274) |
| MPDL33280A | PD-L1 (CD274) |
| YW243.55.S70 | PD-L1 (CD274) |
| MDX-1105 | PD-L1 (CD274) |
| MSB0010718C | PD-L1 (CD274) |

[0221] In a further preferred embodiment the checkpoint modulator is a decoy receptor (e.g. a soluble receptor). Preferably, the decoy receptor is a soluble PD1 receptor. In a particularly preferred embodiment the at least one RNA of the inventive RNA containing composition comprises an RNA sequence being identical or at least 50%, 60%, 70%, 75%, 80%, 81%, 82%, 83%, 84%, 85%, 86%, 87%, 88%, 89%, 90%, 91%, 92%, 93%, 94%, 95%, 96%, 97%, 98%, 99% identical to the RNA sequence according to SEQ ID NO: 389 encoding a soluble PD-1 receptor.

[0222] In a further preferred embodiment of the inventive RNA containing composition the RNA, preferably an mRNA codes for at least one ligand which functions as a checkpoint modulator. Preferably, the ligand is CD40 Ligand (CD40L). In a further preferred embodiment of the inventive RNA containing composition the RNA, preferably an mRNA codes for at least one ligand which functions as a checkpoint modulator. Preferably, the ligand is CD40 Ligand (CD40L). Most preferably the at least one RNA of the inventive RNA containing composition comprises an RNA sequence being identical or at least 50%, 60%, 70%, 75%, 80%, 81%, 82%, 83%, 84%, 85%, 86%, 87%, 88%, 89%, 90%, 91%, 92%, 93%, 94%, 95%, 96%, 97%, 98%, 99% identical to the RNA sequence according to SEQ ID NO: 10073 encoding CD40L.

[0223] 12. Innate Immune Activators:

[0224] In this context innate immune activators may be selected from mammalian, in particular human adjuvant proteins, which typically comprise any human protein or peptide, which is capable of eliciting an innate immune response (in a mammal), e.g. as a reaction of the binding of an exogenous TLR ligand to a TLR. More preferably, human adjuvant proteins are selected from the group consisting of proteins which are components and ligands of the signalling networks of the pattern recognition receptors including TLR, NLR and RLH, including TLR1, TLR2, TLR3, TLR4, TLR5, TLR6, TLR7, TLR8, TLR9, TLR10, TLR11; NOD1, NOD2, NOD3, NOD4, NOD5, NALP1, NALP2, NALP3, NALP4, NALP5, NALP6, NALP6, NALP7, NALP7, NALP8, NALP9, NALP10, NALP11, NALP12, NALP13, NALP14, I IPAF, NAIP, CIITA, RIG-I, MDA5 and LGP2, the signal transducers of TLR signaling including adaptor proteins including e.g. Trif and Cardif; components of the Small-GTPases signalling (RhoA, Ras, Rac1, Cdc42, Rab etc.), components of the PIP signalling (PI3K, Src-Kinases, etc.), components of the MyD88-dependent signalling (MyD88, IRAK1, IRAK2, IRAK4, TIRAP, TRAF6 etc.), components of the MyD88-independent signalling (TICAM1, TICAM2, TRAF6, TBK1, IRF3, TAK1, IRAK1 etc.); the activated kinases including e.g. Akt, MEKK1, MKK1, MKK3, MKK4, MKK6, MKK7, ERK1, ERK2, GSK3, PKC kinases, PKD kinases, GSK3 kinases, JNK, p38MAPK, TAK1, IKK, and TAK1; the activated transcription factors including e.g. NF-κB, c-Fos, c-Jun, c-Myc, CREB, AP-1, Elk-1, ATF2, IRF-3, IRF-7.

[0225] Mammalian, in particular human adjuvant proteins may furthermore be selected from the group consisting of heat shock proteins, such as HSP10, HSP60, HSP65, HSP70, HSP75 and HSP90, gp96, Fibrinogen, TypIII repeat extra domain A of fibronectin; or components of the complement system including C1q, MBL, C1r, C1s, C2b, Bb, D, MASP-1, MASP-2, C4b, C3b, C5a, C3a, C4a, C5b, C6, C7, C8, C9, CR1, CR2, CR3, CR4, C1qR, C1INH, C4bp, MCP, DAF, H, I, P and CD59, or induced target genes including e.g. Beta-Defensin, cell surface proteins; or human adjuvant proteins including trif, flt-3 ligand, Gp96 or fibronectin, etc., or any species homolog of any of the above human adjuvant proteins. Furthermore HGMB1 may be used as adjuvant protein.

[0226] Mammalian, in particular human adjuvant proteins may furthermore comprise cytokines which induce or enhance an innate immune response, including IL-1 alpha, IL1 beta, IL-2, IL-6, IL-7, IL-8, IL-9, IL-12, IL-13, IL-15, IL-16, IL-17, IL-18, IL-21, IL-23, TNFalpha, IFNalpha, IFNbeta, IFNgamma, GM-CSF, G-CSF, M-CSF; chemokines including IL-8, IP-10, MCP-1, MIP-1alpha, RANTES, Eotaxin, CCL21; cytokines which are released from macrophages, including IL-1, IL-6, IL-8, IL-12 and TNF-alpha; as well as IL-1R1 and IL-1 alpha.

[0227] Therefore in this context it particularly preferred that the at least one RNA encodes at least one innate immune activator, preferably an adjuvant protein, more preferably a human adjuvant protein, or a fragment or variant thereof.

[0228] In this context it is particularly preferred that I constitutive active variant of an adjuvant protein is encoded by the at least one RNA, preferably a constitutive active variant of RIG-1 (ΔRIGI).

[0229] In another preferred embodiment the at least one RNA encodes HGMB1 as an innate immune activator, or a fragment or variant thereof.

[0230] According to preferred embodiments in the context of the present invention innate immune activators may be selected from any innate immune activator selected from the group consisting of CD55; Akt; ATF2; C1QBP; C1QC; Cardif; CCL11; CCL2; CCL21; CCL3; CCL5; CD59, Beta-Defensin; Cdc42; CFAD; CFAH; CFAI; CH60; CIITA; c-Jun; c-myc; CO8A; COBB; CO8G; complement_system_component_C1INH; complement_system_component_C1qR; complement_system_component_C1s; complement_system_component_C4bp; complement_system_component_C6; complement_system_component_C7; complement_system_component_C8; complement_system_component_C9; complement_system_component_CR2; complement_system_component_CR3; complement_system_component_MASP-1; complement_system_component_MASP-2; complement_system_component_MBL; complement_system_component_MCP; CREB3; CREB3L1; CREB3L3; CREB3L4; CREB5; CRTC2; CXCL10; CXCL8; DJB11; DJB13; DJB14; DJC10; DJC12; DJC14; DJC15; DJC16; DJC17; DJC18; DJC22; DJC24; DJC25; DJC27; DJC28; DJC30; DNAJB12; DNAJC11; DNAJC21; DNJA1; DNJA2; DNJA3; DNJA4; DNJB1; DNJB2; DNJB3; DNJB4; DNJB5; DNJB6; DNJB7; DNJB8; DNJB9; DNJC1; DNJC2; DNJC3; DNJC4; DNJC5; DNJC7; DNJC8; DNJC9; Elk-1; ERK1; ERK2; Fibrinogen; fibronectin; FLT3_Ligand; FOS; G-CSF; GM-CSF; GRP94_(gp96); GSK3A; GSK3B; HS71A; HS71B; HSC70; HSP10; HSP60; HSP70; HSP75; HSP90; HSP90B1; IFNalpha; IFNB; IFNG; IKK; IL-1; IL-1_alpha; IL-1_beta; IL-12; IL-13; IL-15; IL-16; IL-17A; IL-18; IL-1R1; IL-2; IL-21; IL-23; IL-6; IL-7; IL-9; IRAK1; IRAK2; IRAK4; IRF3; IRF-7; JNK; KPCB; KPCD; KPCD1; KPCD3; KPCE; KPCG; KPCI; KPCL; KPCT; KPCZ; I_IPAF; LGP2; M-CSF; MDA5; MK11; MK12; MK13; MK14; MKK1; MKK3; MKK4; MKK6; MKK7; MSTP104; MyD88; NALP10; NALP11; NALP12; NALP13; NALP2; NALP3; NALP4; NALP5; NALP6; NALP7; NALP8; NALP9; NF-kappaB; NLRP14; NOD1; NOD2; NOD3; PI3K; PKD2; PKN1; PKN2; PKN3; PRKCA; PRKD2; Rab; Rac1; RASH; RASK; RASN; RhoA; RIG-I; Src-Kinases; Surfactant_protein_A; Surfactant_protein_D; TAK1; TBK1; TICAM1; TICAM2; TIRAP; TLR1; TLR10; TLR2; TLR3; TLR4; TLR5; TLR6; TLR7; TLR8; TLR9; TNF; TRAF6, preferably as disclosed in Table 11. Particularly preferred in this context are the RNA sequences encoding a innate immune activator according to Table 11.

TABLE 11
Innate immune activators (human adjuvant proteins)

| | | | RNA | |
|---|---|---|---|---|
| | | Protein | Sequence | |
| | | Sequence | wild type | |
| | Protein | SEQ ID | SEQ ID | Optimized RNA Sequence |
| Gene Name | Accession No. | NO: | NO: | SEQ ID NO: |
| CD55 | UniProtKB: | 909 | 910 | 911, 912, 913, 914, 915 |
| | B1AP15 | | | |
| CD55 | UniProtKB: | 916 | 917 | 918, 919, 920, 921, 922 |
| | D3DT85 | | | |
| CD55 | UniProtKB: | 923 | 924 | 925, 926, 927, 928, 929 |
| | D3DT86 | | | |
| CD55 | UniProtKB: | 930 | 931 | 932, 933, 934, 935, 936 |
| | P08174 | | | |
| fibronectin | UniProtKB: | 1567 | 1568 | 1569, 1570, 1571, 1572, 1573 |
| | A0A024R516 | | | |
| fibronectin | UniProtKB: | 1574 | 1575 | 1576, 1577, 1578, 1579, 1580 |
| | A0A024111301 | | | |
| fibronectin | UniProtKB: | 1581 | 1582 | 1583, 1584, 1585, 1586, 1587 |
| | A0A024RDT9 | | | |
| fibronectin | UniProtKB: | 1588 | 1589 | 1590, 1591, 1592, 1593, 1594 |
| | A0A024RDV5 | | | |
| fibronectin | UniProtKB: | 1595 | 1596 | 1597, 1598, 1599, 1600, 1601 |
| | A6NH44 | | | |
| fibronectin | UniProtKB: | 1602 | 1603 | 1604, 1605, 1606, 1607, 1608 |
| | A8K6A5 | | | |
| fibronectin | UniProtKB: | 1609 | 1610 | 1611, 1612, 1613, 1614, 1615 |
| | B2R627 | | | |
| fibronectin | UniProtKB: | 1616 | 1617 | 1618, 1619, 1620, 1621, 1622 |
| | B3KXM5 | | | |
| fibronectin | UniProtKB: | 1623 | 1624 | 1625, 1626, 1627, 1628, 1629 |
| | B4DIC5 | | | |
| fibronectin | UniProtKB: | 1630 | 1631 | 1632, 1633, 1634, 1635, 1636 |
| | B4DN21 | | | |
| fibronectin | UniProtKB: | 1637 | 1638 | 1639, 1640, 1641, 1642, 1643 |
| | B4DS98 | | | |
| fibronectin | UniProtKB: | 1644 | 1645 | 1646, 1647, 1648, 1649, 1650 |
| | B4DTH2 | | | |
| fibronectin | UniProtKB: | 1651 | 1652 | 1653, 1654, 1655, 1656, 1657 |
| | B4DTK1 | | | |
| fibronectin | UniProtKB: | 1658 | 1659 | 1660, 1661, 1662, 1663, 1664 |
| | B4DU16 | | | |
| fibronectin | UniProtKB: | 1665 | 1666 | 1667, 1668, 1669, 1670, 1671 |
| | B7Z3W5 | | | |
| fibronectin | UniProtKB: | 1672 | 1673 | 1674, 1675, 1676, 1677, 1678 |
| | B7Z939 | | | |
| fibronectin | UniProtKB: | 1679 | 1680 | 1681, 1682, 1683, 1684, 1685 |
| | G5E9X3 | | | |
| fibronectin | UniProtKB: | 1686 | 1687 | 1688, 1689, 1690, 1691, 1692 |
| | Q9H382 | | | |
| FOS | UniProtKB: | 1693 | 1694 | 1695, 1696, 1697, 1698, 1699 |
| | P01100 | | | |
| HS71A | UniProtKB: | 1938 | 1939 | 1940, 1941, 1942, 1943, 1944 |
| | P0DMV8 | | | |
| HS71B | UniProtKB: | 1945 | 1946 | 1947, 1948, 1949, 1950, 1951 |
| | P0DMV9 | | | |
| RASH | UniProtKB: | 3296 | 3297 | 3298, 3299, 3300, 3301, 3302 |
| | P01112 | | | |
| RASK | UniProtKB: | 3303 | 3304 | 3305, 3306, 3307, 3308, 3309 |
| | P01116 | | | |
| RASN | UniProtKB: | 3310 | 3311 | 3312, 3313, 3314, 3315, 3316 |
| | P01111 | | | |
| FLT3 Jigand | Genbank: | 3913 | 3914 | 3915, 3916, 3917, 3918, 3919, |
| | AAA90950.1 | | | 3920 |
| FLT3 Jigand | UniProtKB: | 3921 | 3922 | 3923, 3924, 3925, 3926, 3927, |
| | P49771 | | | 3928 |
| G-CSF | UniProtKB: | 3929 | 3930 | 3931, 3932, 3933, 3934, 3935, |
| | P09919 | | | 3936 |
| GM-CSF | UniProtKB: | 3945 | 3946 | 3947, 3948, 3949, 3950, 3951, |
| | P04141 | | | 3952 |
| IFNalpha | UniProtKB: | 3953 | 3954 | 3955, 3956, 3957, 3958, 3959, |
| | G9JKF1 | | | 3960 |
| IFNalpha | UniProtKB: | 3961 | 3962 | 3963, 3964, 3965, 3966, 3967, |
| | P01562 | | | 3968 |
| IFNalpha | UniProtKB: | 3969 | 3970 | 3971, 3972, 3973, 3974, 3975, |
| | P01563 | | | 3976 |
| IFNalpha | UniProtKB: | 3977 | 3978 | 3979, 3980, 3981, 3982, 3983, |
| | P01566 | | | 3984 |
| IFNalpha | UniProtKB: | 3985 | 3986 | 3987, 3988, 3989, 3990, 3991, |
| | P01567 | | | 3992 |
| IFNalpha | UniProtKB: | 3993 | 3994 | 3995, 3996, 3997, 3998, 3999, |
| | P01568 | | | 4000 |
| IFNalpha | UniProtKB: | 4001 | 4002 | 4003, 4004, 4005, 4006, 4007, |
| | P01569 | | | 4008 |
| IFNalpha | UniProtKB: | 4009 | 4010 | 4011, 4012, 4013, 4014, 4015, |
| | P01570 | | | 4016 |
| IFNalpha | UniProtKB: | 4017 | 4018 | 4019, 4020, 4021, 4022, 4023, |
| | P01571 | | | 4024 |
| IFNalpha | UniProtKB: | 4025 | 4026 | 4027, 4028, 4029, 4030, 4031, |
| | P05013 | | | 4032 |
| IFNalpha | UniProtKB: | 4033 | 4034 | 4035, 4036, 4037, 4038, 4039, |
| | P05014 | | | 4040 |
| IFNalpha | UniProtKB: | 4041 | 4042 | 4043, 4044, 4045, 4046, 4047, |
| | P05015 | | | 4048 |
| IFNalpha | UniProtKB: | 4049 | 4050 | 4051, 4052, 4053, 4054, 4055, |
| | P32881 | | | 4056 |
| IFNalpha | UniProtKB: | 4057 | 4058 | 4059, 4060, 4061, 4062, 4063, |
| | Q14618 | | | 4064 |
| IFNalpha | UniProtKB: | 4065 | 4066 | 4067, 4068, 4069, 4070, 4071, |
| | Q86UP4 | | | 4072 |
| IFNB | UniProtKB: | 4073 | 4074 | 4075, 4076, 4077, 4078, 4079, |
| | P01574 | | | 4080 |
| IFNB | UniProtKB: | 4081 | 4082 | 4083, 4084, 4085, 4086, 4087, |
| | Q15943 | | | 4088 |
| IFNG | UniProtKB: | 4089 | 4090 | 4091, 4092, 4093, 4094, 4095, |
| | P01579 | | | 4096 |
| IFNG | UniProtKB: | 4097 | 4098 | 4099, 4100, 4101, 4102, 4103, |
| | Q14609 | | | 4104 |
| IFNG | UniProtKB: | 4105 | 4106 | 4107, 4108, 4109, 4110, 4111, |
| | Q14610 | | | 4112 |
| IFNG | UniProtKB: | 4113 | 4114 | 4115, 4116, 4117, 4118, 4119, |
| | Q14611 | | | 4120 |
| IFNG | UniProtKB: | 4121 | 4122 | 4123, 4124, 4125, 4126, 4127, |
| | Q14612 | | | 4128 |
| IFNG | UniProtKB: | 4129 | 4130 | 4131, 4132, 4133, 4134, 4135, |
| | Q14613 | | | 4136 |
| IFNG | UniProtKB: | 4137 | 4138 | 4139, 4140, 4141, 4142, 4143, |
| | Q14614 | | | 4144 |
| IFNG | UniProtKB: | 4145 | 4146 | 4147, 4148, 4149, 4150, 4151, |
| | Q14615 | | | 4152 |
| IFNG | UniProtKB: | 4153 | 4154 | 4155, 4156, 4157, 4158, 4159, |
| | Q8NHY9 | | | 4160 |
| IL-12 | UniProtKB: | 4193 | 4194 | 4195, 4196, 4197, 4198, 4199, |
| | P29460 | | | 4200 |
| IL-13 | UniProtKB: | 4201 | 4202 | 4203, 4204, 4205, 4206, 4207, |
| | P35225 | | | 4208 |
| IL-15 | UniProtKB: | 4217 | 4218 | 4219, 4220, 4221, 4222, 4223, |
| | P40933 | | | 4224 |
| IL-16 | UniProtKB: | 4225 | 4226 | 4227, 4228, 4229, 4230, 4231, |
| | Q14005 | | | 4232 |
| IL-17A | UniProtKB: | 4233 | 4234 | 4235, 4236, 4237, 4238, 4239, |
| | Q16552 | | | 4240 |
| IL-18 | UniProtKB: | 4281 | 4282 | 4283, 4284, 4285, 4286, 4287, |
| | A0A024113E0 | | | 4288 |
| IL-18 | UniProtKB: | 4289 | 4290 | 4291, 4292, 4293, 4294, 4295, |
| | B0YJ28 | | | 4296 |
| IL-18 | UniProtKB: | 4297 | 4298 | 4299, 4300, 4301, 4302, 4303, |
| | Q14116 | | | 4304 |
| IL-1_alpha | UniProtKB: | 4313 | 4314 | 4315, 4316, 4317, 4318, 4319, |
| | P01583 | | | 4320 |
| IL-1_beta | UniProtKB: | 4321 | 4322 | 4323, 4324, 4325, 4326, 4327, |
| | P01584 | | | 4328 |
| IL-21 | RefSeq: | 4361 | 4362 | 4363, 4364, 4365, 4366, 4367, |
| | NP_001193935.1 | | | 4368 |
| IL-21 | RefSeq: | 4369 | 4370 | 4371, 4372, 4373, 4374, 4375, |
| | NP_068575.1 | | | 4376 |
| IL-23 | UniProtKB: | 4385 | 4386 | 4387, 4388, 4389, 4390, 4391, |
| | Q9NPF7 | | | 4392 |
| IL-2 | UniProtKB: | 4473 | 4474 | 4475, 4476, 4477, 4478, 4479, |
| | P60568 | | | 4480 |
| IL-2 | UniProtKB: | 4481 | 4482 | 4483, 4484, 4485, 4486, 4487, |
| | Q0GK43 | | | 4488 |
| IL-2 | UniProtKB: | 4489 | 4490 | 4491, 4492, 4493, 4494, 4495, |
| | Q13169 | | | 4496 |
| IL-2 | UniProtKB: | 4497 | 4498 | 4499, 4500, 4501, 4502, 4503, |
| | Q6NZ91 | | | 4504 |
| IL-2 | UniProtKB: | 4505 | 4506 | 4507, 4508, 4509, 4510, 4511, |
| | Q6NZ93 | | | 4512 |
| IL-6 | UniProtKB: | 4593 | 4594 | 4595, 4596, 4597, 4598, 4599, |
| | P05231 | | | 4600 |
| IL-7 | UniProtKB: | 4601 | 4602 | 4603, 4604, 4605, 4606, 4607, |
| | A8K673 | | | 4608 |
| IL-7 | UniProtKB: | 4609 | 4610 | 4611, 4612, 4613, 4614, 4615, |
| | P13232 | | | 4616 |
| IL-9 | UniProtKB: | 4617 | 4618 | 4619, 4620, 4621, 4622, 4623, |
| | P15248 | | | 4624 |
| M-CSF | UniProtKB: | 4705 | 4706 | 4707, 4708, 4709, 4710, 4711, |
| | P09603 | | | 4712 |
| CCL11 | UniProtKB: | 4833 | 4834 | 4835, 4836, 4837, 4838, 4839, |
| | P51671 | | | 4840 |
| CCL11 | UniProtKB: | 4841 | 4842 | 4843, 4844, 4845, 4846, 4847, |
| | Q619T4 | | | 4848 |
| CCL21 | UniProtKB: | 4937 | 4938 | 4939, 4940, 4941, 4942, 4943, |
| | O00585 | | | 4944 |
| CCL2 | UniProtKB: | 5001 | 5002 | 5003, 5004, 5005, 5006, 5007, |
| | P13500 | | | 5008 |
| CCL3 | UniProtKB: | 5009 | 5010 | 5011, 5012, 5013, 5014, 5015, |
| | A0N0R1 | | | 5016 |
| CCL3 | UniProtKB: | 5017 | 5018 | 5019, 5020, 5021, 5022, 5023, |
| | P10147 | | | 5024 |
| CCL5 | UniProtKB: | 5041 | 5042 | 5043, 5044, 5045, 5046, 5047, |
| | D0EI67 | | | 5048 |
| CCL5 | UniProtKB: | 5049 | 5050 | 5051, 5052, 5053, 5054, 5055, |
| | P13501 | | | 5056 |
| CXCL10 | UniProtKB: | 5129 | 5130 | 5131, 5132, 5133, 5134, 5135, |
| | A0A024RDA4 | | | 5136 |
| CXCL10 | UniProtKB: | 5137 | 5138 | 5139, 5140, 5141, 5142, 5143, |
| | P02778 | | | 5144 |
| CXCL8 | UniProtKB: | 5265 | 5266 | 5267, 5268, 5269, 5270, 5271, |
| | P10145 | | | 5272 |
| TNF | UniProtKB: | 7369 | 7370 | 7371, 7372, 7373, 7374, 7375, |
| | P01375 | | | 7376 |
| TNF | UniProtKB: | 7377 | 7378 | 7379, 7380, 7381, 7382, 7383, |
| | Q5STB3 | | | 7384 |
| GRP94_(gp96) | UniProtKB: | 7617 | 7618 | 7619, 7620, 7621, 7622, 7623, |
| | P14625 | | | 7624 |
| HSC70 | UniProtKB: | 7625 | 7626 | 7627, 7628, 7629, 7630, 7631, |
| | P11142 | | | 7632 |
| HSP60 | UniProtKB: | 7657 | 7658 | 7659, 7660, 7661, 7662, 7663, |
| | A0A024R3X4 | | | 7664 |
| HSP60 | UniProtKB: | 7665 | 7666 | 7667, 7668, 7669, 7670, 7671, |
| | B3GQS7 | | | 7672 |
| HSP60 | UniProtKB: | 7673 | 7674 | 7675, 7676, 7677, 7678, 7679, |
| | P10809 | | | 7680 |
| HSP60 | UniProtKB: | 7681 | 7682 | 7683, 7684, 7685, 7686, 7687, |
| | Q0VDF9 | | | 7688 |
| HSP70 | UniProtKB: | 7689 | 7690 | 7691, 7692, 7693, 7694, 7695, |
| | P38646 | | | 7696 |
| HSP90 | UniProtKB: | 7697 | 7698 | 7699, 7700, 7701, 7702, 7703, |
| | P07900 | | | 7704 |
| HSP90 | UniProtKB: | 7705 | 7706 | 7707, 7708, 7709, 7710, 7711, |
| | P08238 | | | 7712 |
| Akt | UniProtKB: | 7737 | 7738 | 7739, 7740, 7741, 7742, 7743 |
| | B0LPE5 | | | |
| Akt | UniProtKB: | 7744 | 7745 | 7746, 7747, 7748, 7749, 7750 |
| | P31749 | | | |
| Akt | UniProtKB: | 7751 | 7752 | 7753, 7754, 7755, 7756, 7757 |
| | P31751 | | | |
| Akt | UniProtKB: | 7758 | 7759 | 7760, 7761, 7762, 7763, 7764 |
| | Q9Y243 | | | |
| ATF2 | UniProtKB: | 7765 | 7766 | 7767, 7768, 7769, 7770, 7771 |
| | P15336 | | | |
| C1QBP | UniProtKB: | 7772 | 7773 | 7774, 7775, 7776, 7777, 7778 |
| | Q07021 | | | |
| C1QC | UniProtKB: | 7779 | 7780 | 7781, 7782, 7783, 7784, 7785 |
| | P02747 | | | |
| Cardif | UniProtKB: | 7786 | 7787 | 7788, 7789, 7790, 7791, 7792 |
| | Q72434 | | | |
| CD59, Beta-Defensin | UniProtKB: | 7793 | 7794 | 7795, 7796, 7797, 7798, 7799 |
| | P13987 | | | |
| CD59, Beta-Defensin | UniProtKB: | 7800 | 7801 | 7802, 7803, 7804, 7805, 7806 |
| | Q6FHM9 | | | |
| Cdc42 | UniProtKB: | 7807 | 7808 | 7809, 7810, 7811, 7812, 7813 |
| | A0A024RAE4 | | | |
| Cdc42 | UniProtKB: | 7814 | 7815 | 7816, 7817, 7818, 7819, 7820 |
| | A0A024RAE6 | | | |
| Cdc42 | UniProtKB: | 7821 | 7822 | 7823, 7824, 7825, 7826, 7827 |
| | P60953 | | | |
| CFAD | UniProtKB: | 7828 | 7829 | 7830, 7831, 7832, 7833, 7834 |
| | P00746 | | | |
| CFAH | UniProtKB: | 7835 | 7836 | 7837, 7838, 7839, 7840, 7841 |
| | P08603 | | | |
| CFAI | UniProtKB: | 7842 | 7843 | 7844, 7845, 7846, 7847, 7848 |
| | P05156 | | | |
| CH60 | RefSeq: | 7849 | 7850 | 7851, 7852, 7853, 7854, 7855 |
| | NP_002147.2 | | | |
| CIITA | UniProtKB: | 7856 | 7857 | 7858, 7859, 7860, 7861, 7862 |
| | Q29704 | | | |
| c-Jun | UniProtKB: | 7863 | 7864 | 7865, 7866, 7867, 7868, 7869 |
| | B3KN68 | | | |
| c-Jun | UniProtKB: | 7870 | 7871 | 7872, 7873, 7874, 7875, 7876 |
| | B3KNW1 | | | |
| c-Jun | UniProtKB: | 7877 | 7878 | 7879, 7880, 7881, 7882, 7883 |
| | B3KXW5 | | | |
| c-Jun | UniProtKB: | 7884 | 7885 | 7886, 7887, 7888, 7889, 7890 |
| | B4DED9 | | | |
| c-Jun | UniProtKB: | 7891 | 7892 | 7893, 7894, 7895, 7896, 7897 |
| | B4DFU7 | | | |
| c-Jun | UniProtKB: | 7898 | 7899 | 7900, 7901, 7902, 7903, 7904 |
| | B4DGE1 | | | |
| c-Jun | UniProtKB: | 7905 | 7906 | 7907, 7908, 7909, 7910, 7911 |
| | B4DJ64 | | | |
| c-Jun | UniProtKB: | 7912 | 7913 | 7914, 7915, 7916, 7917, 7918 |
| | B4DS36 | | | |
| c-Jun | UniProtKB: | 7919 | 7920 | 7921, 7922, 7923, 7924, 7925 |
| | B7Z1L7 | | | |
| c-Jun | UniProtKB: | 7926 | 7927 | 7928, 7929, 7930, 7931, 7932 |
| | G1U124 | | | |
| c-Jun | UniProtKB: | 7933 | 7934 | 7935, 7936, 7937, 7938, 7939 |
| | G5E966 | | | |
| c-Jun | UniProtKB: | 7940 | 7941 | 7942, 7943, 7944, 7945, 7946 |
| | O75843 | | | |
| c-Jun | UniProtKB: | 7947 | 7948 | 7949, 7950, 7951, 7952, 7953 |
| | P05412 | | | |
| c-Jun | UniProtKB: | 7954 | 7955 | 7956, 7957, 7958, 7959, 7960 |
| | P53677 | | | |
| c-Jun | UniProtKB: | 7961 | 7962 | 7963, 7964, 7965, 7966, 7967 |
| | P61966 | | | |
| c-Jun | UniProtKB: | 7968 | 7969 | 7970, 7971, 7972, 7973, 7974 |
| | Q63HQ0 | | | |
| c-Jun | UniProtKB: | 7975 | 7976 | 7977, 7978, 7979, 7980, 7981 |
| | Q7Z5Q8 | | | |
| c-Jun | UniProtKB: | 7982 | 7983 | 7984, 7985, 7986, 7987, 7988 |
| | Q96PC3 | | | |
| c-Jun | UniProtKB: | 7989 | 7990 | 7991, 7992, 7993, 7994, 7995 |
| | Q9BXS5 | | | |
| c-Jun | UniProtKB: | 7996 | 7997 | 7998, 7999, 8000, 8001, 8002 |
| | Q9Y6Q5 | | | |
| CO8A | UniProtKB: | 8003 | 8004 | 8005, 8006, 8007, 8008, 8009 |
| | P07357 | | | |
| COBB | UniProtKB: | 8010 | 8011 | 8012, 8013, 8014, 8015, 8016 |
| | P07358 | | | |
| CO8G | UniProtKB: | 8017 | 8018 | 8019, 8020, 8021, 8022, 8023 |
| | P07360 | | | |
| complement_system_ | UniProtKB: | 8024 | 8025 | 8026, 8027, 8028, 8029, 8030 |
| component_C1lNH | P05155 | | | |
| complement_system_ | UniProtKB: | 8031 | 8032 | 8033, 8034, 8035, 8036, 8037 |
| component_C1q11 | Q8IXK1 | | | |
| complement_system_ | UniProtKB: | 8038 | 8039 | 8040, 8041, 8042, 8043, 8044 |
| component_C1s | P09871 | | | |
| complement_system_ | UniProtKB: | 8045 | 8046 | 8047, 8048, 8049, 8050, 8051 |
| component_C4bp | P04003 | | | |
| complement_system_ | UniProtKB: | 8052 | 8053 | 8054, 8055, 8056, 8057, 8058 |
| component_C6 | P13671 | | | |
| complement_system_ | UniProtKB: | 8059 | 8060 | 8061, 8062, 8063, 8064, 8065 |
| component_C7 | P10643 | | | |
| complement_system_ | UniProtKB: | 8066 | 8067 | 8068, 8069, 8070, 8071, 8072 |
| component_C8 | Q99618 | | | |
| complement_system_ | UniProtKB: | 8073 | 8074 | 8075, 8076, 8077, 8078, 8079 |
| component_C9 | A0A024R035 | | | |
| complement_system_ | UniProtKB: | 8080 | 8081 | 8082, 8083, 8084, 8085, 8086 |
| component_C9 | P02748 | | | |
| complement_system_ | UniProtKB: | 8087 | 8088 | 8089, 8090, 8091, 8092, 8093 |
| component_CR2 | P20023 | | | |
| complement_system_ | UniProtKB: | 8094 | 8095 | 8096, 8097, 8098, 8099, 8100 |
| component_CR3 | D3DSM0 | | | |
| complement_system_ | UniProtKB: | 8101 | 8102 | 8103, 8104, 8105, 8106, 8107 |
| component_CR3 | P05107 | | | |
| complement_system_ | UniProtKB: | 8108 | 8109 | 8110, 8111, 8112, 8113, 8114 |
| component_MASP-1 | P48740 | | | |
| complement_system_ | UniProtKB: | 8115 | 8116 | 8117, 8118, 8119, 8120, 8121 |
| component_MASP-2 | 000187 | | | |
| complement_system_ | UniProtKB: | 8122 | 8123 | 8124, 8125, 8126, 8127, 8128 |
| component_MBL | P11226 | | | |
| complement_system_ | UniProtKB: | 8129 | 8130 | 8131, 8132, 8133, 8134, 8135 |
| component_MCP | P15529 | | | |
| complement_system_ | UniProtKB: | 8136 | 8137 | 8138, 8139, 8140, 8141, 8142 |
| component_MCP | P40121 | | | |
| CREB3 | CCDS: | 8143 | 8144 | 8145, 8146, 8147, 8148, 8149 |
| | CCDS6588.1 | | | |
| CREB3L1 | UniProtKB: | 8150 | 8151 | 8152, 8153, 8154, 8155, 8156 |
| | Q96BA8 | | | |
| CREB3L3 | UniProtKB: | 8157 | 8158 | 8159, 8160, 8161, 8162, 8163 |
| | Q68CJ9 | | | |
| CREB3L4 | UniProtKB: | 8164 | 8165 | 8166, 8167, 8168, 8169, 8170 |
| | Q8TEY5 | | | |
| CREBS | UniProtKB: | 8171 | 8172 | 8173, 8174, 8175, 8176, 8177 |
| | Q02930 | | | |
| CRTC2 | UniProtKB: | 8178 | 8179 | 8180, 8181, 8182, 8183, 8184 |
| | Q53ET0 | | | |
| DJB11 | UniProtKB: | 8185 | 8186 | 8187, 8188, 8189, 8190, 8191 |
| | Q9UBS4 | | | |
| DJB13 | UniProtKB: | 8192 | 8193 | 8194, 8195, 8196, 8197, 8198 |
| | P59910 | | | |
| DJB14 | UniProtKB: | 8199 | 8200 | 8201, 8202, 8203, 8204, 8205 |
| | Q8TBM8 | | | |
| DJC10 | UniProtKB: | 8206 | 8207 | 8208, 8209, 8210, 8211, 8212 |
| | Q81X81 | | | |
| DJC12 | UniProtKB: | 8213 | 8214 | 8215, 8216, 8217, 8218, 8219 |
| | Q9UKB3 | | | |
| DJC14 | UniProtKB: | 8220 | 8221 | 8222, 8223, 8224, 8225, 8226 |
| | Q6Y2X3 | | | |
| DJC15 | UniProtKB: | 8227 | 8228 | 8229, 8230, 8231, 8232, 8233 |
| | Q9Y5T4 | | | |
| DJC16 | UniProtKB: | 8234 | 8235 | 8236, 8237, 8238, 8239, 8240 |
| | Q9Y2G8 | | | |
| DJC17 | UniProtKB: | 8241 | 8242 | 8243, 8244, 8245, 8246, 8247 |
| | Q9NVM6 | | | |
| DJC18 | UniProtKB: | 8248 | 8249 | 8250, 8251, 8252, 8253, 8254 |
| | Q9H819 | | | |
| DJC22 | UniProtKB: | 8255 | 8256 | 8257, 8258, 8259, 8260, 8261 |
| | Q8N4W6 | | | |
| DJC24 | UniProtKB: | 8262 | 8263 | 8264, 8265, 8266, 8267, 8268 |
| | Q6P3W2 | | | |
| DJC25 | UniProtKB: | 8269 | 8270 | 8271, 8272, 8273, 8274, 8275 |
| | Q9H1X3 | | | |
| DJC27 | UniProtKB: | 8276 | 8277 | 8278, 8279, 8280, 8281, 8282 |
| | Q9NZQ0 | | | |
| DJC28 | UniProtKB: | 8283 | 8284 | 8285, 8286, 8287, 8288, 8289 |
| | Q9NX36 | | | |
| DJC30 | UniProtKB: | 8290 | 8291 | 8292, 8293, 8294, 8295, 8296 |
| | Q96LL9 | | | |
| DNAJB12 | RefSeq: | 8297 | 8298 | 8299, 8300, 8301, 8302, 8303 |
| | NP_001002762.2 | | | |
| DNAJC11 | UniProtKB: | 8304 | 8305 | 8306, 8307, 8308, 8309, 8310 |
| | Q9NVH1 | | | |
| DNAJC21 | UniProtKB: | 8311 | 8312 | 8313, 8314, 8315, 8316, 8317 |
| | Q5F1R6 | | | |
| DNJA1 | UniProtKB: | 8318 | 8319 | 8320, 8321, 8322, 8323, 8324 |
| | P31689 | | | |
| DNJA2 | UniProtKB: | 8325 | 8326 | 8327, 8328, 8329, 8330, 8331 |
| | O60884 | | | |
| DNJA3 | UniProtKB: | 8332 | 8333 | 8334, 8335, 8336, 8337, 8338 |
| | Q96EY1 | | | |
| DNJA4 | UniProtKB: | 8339 | 8340 | 8341, 8342, 8343, 8344, 8345 |
| | Q8WW22 | | | |
| DNJB1 | UniProtKB: | 8346 | 8347 | 8348, 8349, 8350, 8351, 8352 |
| | P25685 | | | |
| DNJB2 | UniProtKB: | 8353 | 8354 | 8355, 8356, 8357, 8358, 8359 |
| | P25686 | | | |
| DNJB3 | UniProtKB: | 8360 | 8361 | 8362, 8363, 8364, 8365, 8366 |
| | Q8WWF6 | | | |
| DNJB4 | UniProtKB: | 8367 | 8368 | 8369, 8370, 8371, 8372, 8373 |
| | Q9UDY4 | | | |
| DNJB5 | UniProtKB: | 8374 | 8375 | 8376, 8377, 8378, 8379, 8380 |
| | O75953 | | | |
| DNJB6 | UniProtKB: | 8381 | 8382 | 8383, 8384, 8385, 8386, 8387 |
| | O75190 | | | |
| DNJB7 | UniProtKB: | 8388 | 8389 | 8390, 8391, 8392, 8393, 8394 |
| | Q7Z6W7 | | | |
| DNJB8 | UniProtKB: | 8395 | 8396 | 8397, 8398, 8399, 8400, 8401 |
| | Q8NHS0 | | | |
| DNJB9 | UniProtKB: | 8402 | 8403 | 8404, 8405, 8406, 8407, 8408 |
| | Q9UBS3 | | | |
| DNJC1 | UniProtKB: | 8409 | 8410 | 8411, 8412, 8413, 8414, 8415 |
| | Q96KC8 | | | |
| DNJC2 | UniProtKB: | 8416 | 8417 | 8418, 8419, 8420, 8421, 8422 |
| | Q99543 | | | |
| DNJC3 | UniProtKB: | 8423 | 8424 | 8425, 8426, 8427, 8428, 8429 |
| | Q13217 | | | |
| DNJC4 | UniProtKB: | 8430 | 8431 | 8432, 8433, 8434, 8435, 8436 |
| | Q9NNZ3 | | | |
| DNJCS | UniProtKB: | 8437 | 8438 | 8439, 8440, 8441, 8442, 8443 |
| | Q9H3Z4 | | | |
| DNJC7 | UniProtKB: | 8444 | 8445 | 8446, 8447, 8448, 8449, 8450 |
| | Q99615 | | | |
| DNJC8 | UniProtKB: | 8451 | 8452 | 8453, 8454, 8455, 8456, 8457 |
| | O75937 | | | |
| DNJC9 | UniProtKB: | 8458 | 8459 | 8460, 8461, 8462, 8463, 8464 |
| | Q8WXX5 | | | |
| Elk-1 | UniProtKB: | 8465 | 8466 | 8467, 8468, 8469, 8470, 8471 |
| | P19419 | | | |
| Elk-1 | UniProtKB: | 8472 | 8473 | 8474, 8475, 8476, 8477, 8478 |
| | Q8N9S0 | | | |
| ERK1 | UniProtKB: | 8479 | 8480 | 8481, 8482, 8483, 8484, 8485 |
| | P27361 | | | |
| ERK2 | UniProtKB: | 8486 | 8487 | 8488, 8489, 8490, 8491, 8492 |
| | P28482 | | | |
| Fibrinogen | UniProtKB: | 8493 | 8494 | 8495, 8496, 8497, 8498, 8499 |
| | A0A024R8B4 | | | |
| Fibrinogen | UniProtKB: | 8500 | 8501 | 8502, 8503, 8504, 8505, 8506 |
| | A4D1B8 | | | |
| Fibrinogen | UniProtKB: | 8507 | 8508 | 8509, 8510, 8511, 8512, 8513 |
| | A8K8X4 | | | |
| Fibrinogen | UniProtKB: | 8514 | 8515 | 8516, 8517, 8518, 8519, 8520 |
| | B4DTN2 | | | |
| Fibrinogen | UniProtKB: | 8521 | 8522 | 8523, 8524, 8525, 8526, 8527 |
| | B4E1D3 | | | |
| Fibrinogen | UniProtKB: | 8528 | 8529 | 8530, 8531, 8532, 8533, 8534 |
| | D3DP13 | | | |
| Fibrinogen | UniProtKB: | 8535 | 8536 | 8537, 8538, 8539, 8540, 8541 |
| | D3DP16 | | | |
| Fibrinogen | UniProtKB: | 8542 | 8543 | 8544, 8545, 8546, 8547, 8548 |
| | D3DSP9 | | | |
| Fibrinogen | UniProtKB: | 8549 | 8550 | 8551, 8552, 8553, 8554, 8555 |
| | P02671 | | | |
| Fibrinogen | UniProtKB: | 8556 | 8557 | 8558, 8559, 8560, 8561, 8562 |
| | P02675 | | | |
| Fibrinogen | UniProtKB: | 8563 | 8564 | 8565, 8566, 8567, 8568, 8569 |
| | P02679 | | | |
| Fibrinogen | UniProtKB: | 8570 | 8571 | 8572, 8573, 8574, 8575, 8576 |
| | Q08830 | | | |
| Fibrinogen | UniProtKB: | 8577 | 8578 | 8579, 8580, 8581, 8582, 8583 |
| | Q14314 | | | |
| Fibrinogen | UniProtKB: | 8584 | 8585 | 8586, 8587, 8588, 8589, 8590 |
| | Q6UXM4 | | | |
| Fibrinogen | UniProtKB: | 8591 | 8592 | 8593, 8594, 8595, 8596, 8597 |
| | Q9UE34 | | | |
| FOS | UniProtKB: | 8598 | 8599 | 8600, 8601, 8602, 8603, 8604 |
| | A0A024RD16 | | | |
| GSK3A | UniProtKB: | 8605 | 8606 | 8607, 8608, 8609, 8610, 8611 |
| | P49840 | | | |
| GSK3B | UniProtKB: | 8612 | 8613 | 8614, 8615, 8616, 8617, 8618 |
| | P49841 | | | |
| HSP10 | UniProtKB: | 8619 | 8620 | 8621, 8622, 8623, 8624, 8625 |
| | P61604 | | | |
| HSP75 | UniProtKB: | 8626 | 8627 | 8628, 8629, 8630, 8631, 8632 |
| | Q12931 | | | |
| HSP90B1 | UniProtKB: | 8633 | 8634 | 8635, 8636, 8637, 8638, 8639 |
| | Q5CAQ5 | | | |
| IKK | UniProtKB: | 8640 | 8641 | 8642, 8643, 8644, 8645, 8646 |
| | O14920 | | | |
| IKK | UniProtKB: | 8647 | 8648 | 8649, 8650, 8651, 8652, 8653 |
| | Q14164 | | | |
| IKK | UniProtKB: | 8654 | 8655 | 8656, 8657, 8658, 8659, 8660 |
| | Q9Y6K9 | | | |
| IL-1 | UniProtKB: | 8661 | 8662 | 8663, 8664, 8665, 8666, 8667 |
| | O43353 | | | |
| IL-1 | UniProtKB: | 8668 | 8669 | 8670, 8671, 8672, 8673, 8674 |
| | Q8N9C1 | | | |
| IL-1 | UniProtKB: | 8675 | 8676 | 8677, 8678, 8679, 8680, 8681 |
| | Q8WWZ1 | | | |
| IL-1 | UniProtKB: | 8682 | 8683 | 8684, 8685, 8686, 8687, 8688 |
| | Q9NZH7 | | | |
| IL-1 | UniProtKB: | 8689 | 8690 | 8691, 8692, 8693, 8694, 8695 |
| | Q9UBH0 | | | |
| IL-1 | UniProtKB: | 8696 | 8697 | 8698, 8699, 8700, 8701, 8702 |
| | Q9UHA7 | | | |
| IL-1R1 | UniProtKB: | 8703 | 8704 | 8705, 8706, 8707, 8708, 8709 |
| | P14778 | | | |
| IL-1R1 | UniProtKB: | 8710 | 8711 | 8712, 8713, 8714, 8715, 8716 |
| | Q6NWP5 | | | |
| IL-1R1 | UniProtKB: | 8717 | 8718 | 8719, 8720, 8721, 8722, 8723 |
| | Q6NWP6 | | | |
| IRAK1 | UniProtKB: | 8724 | 8725 | 8726, 8727, 8728, 8729, 8730 |
| | L8E7M9 | | | |
| IRAK1 | UniProtKB: | 8731 | 8732 | 8733, 8734, 8735, 8736, 8737 |
| | P51617 | | | |
| IRAK2 | UniProtKB: | 8738 | 8739 | 8740, 8741, 8742, 8743, 8744 |
| | O43187 | | | |
| IRAK4 | UniProtKB: | 8745 | 8746 | 8747, 8748, 8749, 8750, 8751 |
| | Q69FE3 | | | |
| IRAK4 | UniProtKB: | 8752 | 8753 | 8754, 8755, 8756, 8757, 8758 |
| | Q7Z6A7 | | | |
| IRAK4 | UniProtKB: | 8759 | 8760 | 8761, 8762, 8763, 8764, 8765 |
| | Q7Z6A8 | | | |
| IRAK4 | UniProtKB: | 8766 | 8767 | 8768, 8769, 8770, 8771, 8772 |
| | Q9NWZ3 | | | |
| IRF3 | UniProtKB: | 8773 | 8774 | 8775, 8776, 8777, 8778, 8779 |
| | A0A024QZE1 | | | |
| IRF3 | UniProtKB: | 8780 | 8781 | 8782, 8783, 8784, 8785, 8786 |
| | E2GIM5 | | | |
| IRF3 | UniProtKB: | 8787 | 8788 | 8789, 8790, 8791, 8792, 8793 |
| | E2GIM6 | | | |
| IRF3 | UniProtKB: | 8794 | 8795 | 8796, 8797, 8798, 8799, 8800 |
| | E2GIM7 | | | |
| IRF3 | UniProtKB: | 8801 | 8802 | 8803, 8804, 8805, 8806, 8807 |
| | E2GIM8 | | | |
| IRF3 | UniProtKB: | 8808 | 8809 | 8810, 8811, 8812, 8813, 8814 |
| | E2GIM9 | | | |
| IRF3 | UniProtKB: | 8815 | 8816 | 8817, 8818, 8819, 8820, 8821 |
| | Q14653 | | | |
| IRF3 | UniProtKB: | 8822 | 8823 | 8824, 8825, 8826, 8827, 8828 |
| | Q96GL3 | | | |
| IRF-7 | UniProtKB: | 8829 | 8830 | 8831, 8832, 8833, 8834, 8835 |
| | Q92985 | | | |
| JNK | UniProtKB: | 8836 | 8837 | 8838, 8839, 8840, 8841, 8842 |
| | B4DU99 | | | |
| KPCB | UniProtKB: | 8843 | 8844 | 8845, 8846, 8847, 8848, 8849 |
| | P05771-1 | | | |
| KPCB | UniProtKB: | 8850 | 8851 | 8852, 8853, 8854, 8855, 8856 |
| | P05771-2 | | | |
| KPCD1 | UniProtKB: | 8857 | 8858 | 8859, 8860, 8861, 8862, 8863 |
| | Q15139 | | | |
| KPCD3 | UniProtKB: | 8864 | 8865 | 8866, 8867, 8868, 8869, 8870 |
| | O94806 | | | |
| KPCD | UniProtKB: | 8871 | 8872 | 8873, 8874, 8875, 8876, 8877 |
| | Q05655 | | | |
| KPCE | UniProtKB: | 8878 | 8879 | 8880, 8881, 8882, 8883, 8884 |
| | Q02156 | | | |
| KPCG | UniProtKB: | 8885 | 8886 | 8887, 8888, 8889, 8890, 8891 |
| | P05129 | | | |
| KPCI | UniProtKB: | 8892 | 8893 | 8894, 8895, 8896, 8897, 8898 |
| | P41743 | | | |
| KPCL | UniProtKB: | 8899 | 8900 | 8901, 8902, 8903, 8904, 8905 |
| | P24723 | | | |
| KPCT | UniProtKB: | 8906 | 8907 | 8908, 8909, 8910, 8911, 8912 |
| | Q04759 | | | |
| KPCZ | UniProtKB: | 8913 | 8914 | 8915, 8916, 8917, 8918, 8919 |
| | Q05513 | | | |
| LGP2 | UniProtKB: | 8920 | 8921 | 8922, 8923, 8924, 8925, 8926 |
| | A0A024R1Y5 | | | |
| LGP2 | UniProtKB: | 8927 | 8928 | 8929, 8930, 8931, 8932, 8933 |
| | Q96C10 | | | |
| I_IPAF | UniProtKB: | 8934 | 8935 | 8936, 8937, 8938, 8939, 8940 |
| | Q9NPP4 | | | |
| MDA5 | UniProtKB: | 8941 | 8942 | 8943, 8944, 8945, 8946, 8947 |
| | Q9BYX4 | | | |
| MK11 | UniProtKB: | 8948 | 8949 | 8950, 8951, 8952, 8953, 8954 |
| | Q15759 | | | |
| MK12 | UniProtKB: | 8955 | 8956 | 8957, 8958, 8959, 8960, 8961 |
| | P53778 | | | |
| MK13 | UniProtKB: | 8962 | 8963 | 8964, 8965, 8966, 8967, 8968 |
| | O15264 | | | |
| MK14 | UniProtKB: | 8969 | 8970 | 8971, 8972, 8973, 8974, 8975 |
| | Q16539 | | | |
| MKK1 | UniProtKB: | 8976 | 8977 | 8978, 8979, 8980, 8981, 8982 |
| | Q02750 | | | |
| MKK3 | UniProtKB: | 8983 | 8984 | 8985, 8986, 8987, 8988, 8989 |
| | P46734 | | | |
| MKK4 | UniProtKB: | 8990 | 8991 | 8992, 8993, 8994, 8995, 8996 |
| | P45985 | | | |
| MKK6 | UniProtKB: | 8997 | 8998 | 8999, 9000, 9001, 9002, 9003 |
| | P52564 | | | |
| MKK7 | UniProtKB: | 9004 | 9005 | 9006, 9007, 9008, 9009, 9010 |
| | O14733 | | | |
| MSTP104 | UniProtKB: | 9011 | 9012 | 9013, 9014, 9015, 9016, 9017 |
| | Q7Z4D5 | | | |
| MyD88 | UniProtKB: | 9018 | 9019 | 9020, 9021, 9022, 9023, 9024 |
| | Q99836 | | | |
| NALP10 | UniProtKB: | 9025 | 9026 | 9027, 9028, 9029, 9030, 9031 |
| | Q86W26 | | | |
| NALP11 | UniProtKB: | 9032 | 9033 | 9034, 9035, 9036, 9037, 9038 |
| | P59045 | | | |
| NALP12 | UniProtKB: | 9039 | 9040 | 9041, 9042, 9043, 9044, 9045 |
| | P59046 | | | |
| NALP13 | UniProtKB: | 9046 | 9047 | 9048, 9049, 9050, 9051, 9052 |
| | Q86W25 | | | |
| NALP2 | UniProtKB: | 9053 | 9054 | 9055, 9056, 9057, 9058, 9059 |
| | Q8WY49 | | | |
| NALP2 | UniProtKB: | 9060 | 9061 | 9062, 9063, 9064, 9065, 9066 |
| | Q9NX02 | | | |
| NALP3 | UniProtKB: | 9067 | 9068 | 9069, 9070, 9071, 9072, 9073 |
| | Q96P20 | | | |
| NALP4 | UniProtKB: | 9074 | 9075 | 9076, 9077, 9078, 9079, 9080 |
| | Q96MN2 | | | |
| NALP5 | UniProtKB: | 9081 | 9082 | 9083, 9084, 9085, 9086, 9087 |
| | P59047 | | | |
| NALP6 | UniProtKB: | 9088 | 9089 | 9090, 9091, 9092, 9093, 9094 |
| | P59044 | | | |
| NALP7 | UniProtKB: | 9095 | 9096 | 9097, 9098, 9099, 9100, 9101 |
| | Q8WX94 | | | |
| NALP8 | UniProtKB: | 9102 | 9103 | 9104, 9105, 9106, 9107, 9108 |
| | Q86W28 | | | |
| NALP9 | UniProtKB: | 9109 | 9110 | 9111, 9112, 9113, 9114, 9115 |
| | Q7RTR0 | | | |
| NF-kappaB | UniProtKB: | 9116 | 9117 | 9118, 9119, 9120, 9121, 9122 |
| | A3F768 | | | |
| NF-kappaB | UniProtKB: | 9123 | 9124 | 9125, 9126, 9127, 9128, 9129 |
| | A3F769 | | | |
| NLRP14 | UniProtKB: | 9130 | 9131 | 9132, 9133, 9134, 9135, 9136 |
| | Q86UT6 | | | |
| NLRP14 | UniProtKB: | 9137 | 9138 | 9139, 9140, 9141, 9142, 9143 |
| | Q86W24 | | | |
| NOD1 | UniProtKB: | 9144 | 9145 | 9146, 9147, 9148, 9149, 9150 |
| | G3XAL1 | | | |
| NOD1 | UniProtKB: | 9151 | 9152 | 9153, 9154, 9155, 9156, 9157 |
| | Q9Y239 | | | |
| NOD2 | UniProtKB: | 9158 | 9159 | 9160, 9161, 9162, 9163, 9164 |
| | Q9HC29 | | | |
| NOD3 | UniProtKB: | 9165 | 9166 | 9167, 9168, 9169, 9170, 9171 |
| | C3VPR7 | | | |
| NOD3 | UniProtKB: | 9172 | 9173 | 9174, 9175, 9176, 9177, 9178 |
| | H3BLT9 | | | |
| NOD3 | UniProtKB: | 9179 | 9180 | 9181, 9182, 9183, 9184, 9185 |
| | Q7RTR2 | | | |
| P13K | UniProtKB: | 9186 | 9187 | 9188, 9189, 9190, 9191, 9192 |
| | O00329 | | | |
| P13K | UniProtKB: | 9193 | 9194 | 9195, 9196, 9197, 9198, 9199 |
| | O00459 | | | |
| P13K | UniProtKB: | 9200 | 9201 | 9202, 9203, 9204, 9205, 9206 |
| | P27986 | | | |
| P13K | UniProtKB: | 9207 | 9208 | 9209, 9210, 9211, 9212, 9213 |
| | P42336 | | | |
| P13K | UniProtKB: | 9214 | 9215 | 9216, 9217, 9218, 9219, 9220 |
| | P42338 | | | |
| P13K | UniProtKB: | 9221 | 9222 | 9223, 9224, 9225, 9226, 9227 |
| | P48736 | | | |
| P13K | UniProtKB: | 9228 | 9229 | 9230, 9231, 9232, 9233, 9234 |
| | Q5UE93 | | | |
| P13K | UniProtKB: | 9235 | 9236 | 9237, 9238, 9239, 9240, 9241 |
| | Q8NEB9 | | | |
| P13K | UniProtKB: | 9242 | 9243 | 9244, 9245, 9246, 9247, 9248 |
| | Q8WYR1 | | | |
| PKD2 | UniProtKB: | 9249 | 9250 | 9251, 9252, 9253, 9254, 9255 |
| | Q13563 | | | |
| PKN1 | UniProtKB: | 9256 | 9257 | 9258, 9259, 9260, 9261, 9262 |
| | Q16512 | | | |
| PKN2 | UniProtKB: | 9263 | 9264 | 9265, 9266, 9267, 9268, 9269 |
| | Q16513 | | | |
| PKN3 | UniProtKB: | 9270 | 9271 | 9272, 9273, 9274, 9275, 9276 |
| | Q6P5Z2 | | | |
| PRKCA | UniProtKB: | 9277 | 9278 | 9279, 9280, 9281, 9282, 9283 |
| | P17252 | | | |
| PRKD2 | RefSeq: | 9284 | 9285 | 9286, 9287, 9288, 9289, 9290 |
| | NP_001073349.1 | | | |
| Rab | UniProtKB: | 9291 | 9292 | 9293, 9294, 9295, 9296, 9297 |
| | P52594 | | | |
| Rac1 | UniProtKB: | 9298 | 9299 | 9300, 9301, 9302, 9303, 9304 |
| | A4D2P0 | | | |
| Rac1 | UniProtKB: | 9305 | 9306 | 9307, 9308, 9309, 9310, 9311 |
| | A4D2P1 | | | |
| Rac1 | UniProtKB: | 9312 | 9313 | 9314, 9315, 9316, 9317, 9318 |
| | A4D2P2 | | | |
| Rac1 | UniProtKB: | 9319 | 9320 | 9321, 9322, 9323, 9324, 9325 |
| | P63000 | | | |
| Rac1 | UniProtKB: | 9326 | 9327 | 9328, 9329, 9330, 9331, 9332 |
| | WOUV93 | | | |
| RhoA | UniProtKB: | 9333 | 9334 | 9335, 9336, 9337, 9338, 9339 |
| | A0A024R324 | | | |
| RhoA | UniProtKB: | 9340 | 9341 | 9342, 9343, 9344, 9345, 9346 |
| | P61586 | | | |
| RIG-I | UniProtKB: | 9347 | 9348 | 9349, 9350, 9351, 9352, 9353 |
| | O95786 | | | |
| RIG-I | UniProtKB: | 9354 | 9355 | 9356, 9357, 9358, 9359, 9360 |
| | Q8IUD6 | | | |
| Src-Kinases | UniProtKB: | 9361 | 9362 | 9363, 9364, 9365, 9366, 9367 |
| | Q9H5V8 | | | |
| Surfactant_protein_A | UniProtKB: | 9368 | 9369 | 9370, 9371, 9372, 9373, 9374 |
| | Q8IWL1 | | | |
| Surfactant_protein_A | UniProtKB: | 9375 | 9376 | 9377, 9378, 9379, 9380, 9381 |
| | Q8IWL2 | | | |
| Surfactant_protein_D | UniProtKB: | 9382 | 9383 | 9384, 9385, 9386, 9387, 9388 |
| | P35247 | | | |
| TAK1 | UniProtKB: | 9389 | 9390 | 9391, 9392, 9393, 9394, 9395 |
| | O43318 | | | |
| TAK1 | UniProtKB: | 9396 | 9397 | 9398, 9399, 9400, 9401, 9402 |
| | P49116 | | | |
| TBK1 | UniProtKB: | 9403 | 9404 | 9405, 9406, 9407, 9408, 9409 |
| | Q9UHD2 | | | |
| TICAM1 | UniProtKB: | 9410 | 9411 | 9412, 9413, 9414, 9415, 9416 |
| | Q8IUC6 | | | |
| TICAM2 | UniProtKB: | 9417 | 9418 | 9419, 9420, 9421, 9422, 9423 |
| | Q86XR7 | | | |
| TIRAP | UniProtKB: | 9424 | 9425 | 9426, 9427, 9428, 9429, 9430 |
| | A0A024R3M4 | | | |
| TIRAP | UniProtKB: | 9431 | 9432 | 9433, 9434, 9435, 9436, 9437 |
| | P58753 | | | |
| TLR10 | UniProtKB: | 9438 | 9439 | 9440, 9441, 9442, 9443, 9444 |
| | A0A024R9W4 | | | |
| TLR10 | UniProtKB: | 9445 | 9446 | 9447, 9448, 9449, 9450, 9451 |
| | D1CS19 | | | |
| TLR10 | UniProtKB: | 9452 | 9453 | 9454, 9455, 9456, 9457, 9458 |
| | D1CS20 | | | |
| TLR10 | UniProtKB: | 9459 | 9460 | 9461, 9462, 9463, 9464, 9465 |
| | D1CS24 | | | |
| TLR10 | UniProtKB: | 9466 | 9467 | 9468, 9469, 9470, 9471, 9472 |
| | D1CS26 | | | |
| TLR10 | UniProtKB: | 9473 | 9474 | 9475, 9476, 9477, 9478, 9479 |
| | D1CS27 | | | |
| TLR10 | UniProtKB: | 9480 | 9481 | 9482, 9483, 9484, 9485, 9486 |
| | D1CS28 | | | |
| TLR10 | UniProtKB: | 9487 | 9488 | 9489, 9490, 9491, 9492, 9493 |
| | D1CS29 | | | |
| TLR10 | UniProtKB: | 9494 | 9495 | 9496, 9497, 9498, 9499, 9500 |
| | D1CS30 | | | |
| TLR10 | UniProtKB: | 9501 | 9502 | 9503, 9504, 9505, 9506, 9507 |
| | Q9BXR5 | | | |
| TLR1 | UniProtKB: | 9508 | 9509 | 9510, 9511, 9512, 9513, 9514 |
| | D1CS34 | | | |
| TLR1 | UniProtKB: | 9515 | 9516 | 9517, 9518, 9519, 9520, 9521 |
| | D1CS35 | | | |
| TLR1 | UniProtKB: | 9522 | 9523 | 9524, 9525, 9526, 9527, 9528 |
| | D1CS36 | | | |
| TLR1 | UniProtKB: | 9529 | 9530 | 9531, 9532, 9533, 9534, 9535 |
| | D1CS38 | | | |
| TLR1 | UniProtKB: | 9536 | 9537 | 9538, 9539, 9540, 9541, 9542 |
| | D1CS42 | | | |
| TLR1 | UniProtKB: | 9543 | 9544 | 9545, 9546, 9547, 9548, 9549 |
| | D1CS43 | | | |
| TLR1 | UniProtKB: | 9550 | 9551 | 9552, 9553, 9554, 9555, 9556 |
| | D1CS44 | | | |
| TLR1 | UniProtKB: | 9557 | 9558 | 9559, 9560, 9561, 9562, 9563 |
| | Q15399 | | | |
| TLR1 | UniProtKB: | 9564 | 9565 | 9566, 9567, 9568, 9569, 9570 |
| | Q5FWG5 | | | |
| TLR1 | UniProtKB: | 9571 | 9572 | 9573, 9574, 9575, 9576, 9577 |
| | Q6F164 | | | |
| TLR2 | UniProtKB: | 9578 | 9579 | 9580, 9581, 9582, 9583, 9584 |
| | O60603 | | | |
| TLR3 | UniProtKB: | 9585 | 9586 | 9587, 9588, 9589, 9590, 9591 |
| | O15455 | | | |
| TLR4 | UniProtKB: | 9592 | 9593 | 9594, 9595, 9596, 9597, 9598 |
| | D1CS55 | | | |
| TLR4 | UniProtKB: | 9599 | 9600 | 9601, 9602, 9603, 9604, 9605 |
| | O00206 | | | |
| TLR5 | UniProtKB: | 9606 | 9607 | 9608, 9609, 9610, 9611, 9612 |
| | D1CS79 | | | |
| TLR5 | UniProtKB: | 9613 | 9614 | 9615, 9616, 9617, 9618, 9619 |
| | D1CS82 | | | |
| TLR5 | UniProtKB: | 9620 | 9621 | 9622, 9623, 9624, 9625, 9626 |
| | D1CS83 | | | |
| TLR5 | UniProtKB: | 9627 | 9628 | 9629, 9630, 9631, 9632, 9633 |
| | D1CS84 | | | |
| TLR5 | UniProtKB: | 9634 | 9635 | 9636, 9637, 9638, 9639, 9640 |
| | D1CS85 | | | |
| TLR5 | UniProtKB: | 9641 | 9642 | 9643, 9644, 9645, 9646, 9647 |
| | D1CS87 | | | |
| TLR5 | UniProtKB: | 9648 | 9649 | 9650, 9651, 9652, 9653, 9654 |
| | D1CS88 | | | |
| TLR5 | UniProtKB: | 9655 | 9656 | 9657, 9658, 9659, 9660, 9661 |
| | D1CS89 | | | |
| TLR5 | UniProtKB: | 9662 | 9663 | 9664, 9665, 9666, 9667, 9668 |
| | D1CS90 | | | |
| TLR6 | UniProtKB: | 9669 | 9670 | 9671, 9672, 9673, 9674, 9675 |
| | B6CH37 | | | |
| TLR6 | UniProtKB: | 9676 | 9677 | 9678, 9679, 9680, 9681, 9682 |
| | B6CH42 | | | |
| TLR6 | UniProtKB: | 9683 | 9684 | 9685, 9686, 9687, 9688, 9689 |
| | B6CH44 | | | |
| TLR6 | UniProtKB: | 9690 | 9691 | 9692, 9693, 9694, 9695, 9696 |
| | B6CH45 | | | |
| TLR6 | UniProtKB: | 9697 | 9698 | 9699, 9700, 9701, 9702, 9703 |
| | B6RFS7 | | | |
| TLR6 | UniProtKB: | 9704 | 9705 | 9706, 9707, 9708, 9709, 9710 |
| | D1CS91 | | | |
| TLR6 | UniProtKB: | 9711 | 9712 | 9713, 9714, 9715, 9716, 9717 |
| | D1CS92 | | | |
| TLR6 | UniProtKB: | 9718 | 9719 | 9720, 9721, 9722, 9723, 9724 |
| | D1CS93 | | | |
| TLR6 | UniProtKB: | 9725 | 9726 | 9727, 9728, 9729, 9730, 9731 |
| | D1CS96 | | | |
| TLR6 | UniProtKB: | 9732 | 9733 | 9734, 9735, 9736, 9737, 9738 |
| | D1CS97 | | | |
| TLR6 | UniProtKB: | 9739 | 9740 | 9741, 9742, 9743, 9744, 9745 |
| | D1CS98 | | | |
| TLR6 | UniProtKB: | 9746 | 9747 | 9748, 9749, 9750, 9751, 9752 |
| | D1CS99 | | | |
| TLR6 | UniProtKB: | 9753 | 9754 | 9755, 9756, 9757, 9758, 9759 |
| | D1CSA0 | | | |
| TLR7 | UniProtKB: | 9760 | 9761 | 9762, 9763, 9764, 9765, 9766 |
| | B2R9N9 | | | |
| TLR7 | UniProtKB: | 9767 | 9768 | 9769, 9770, 9771, 9772, 9773 |
| | D1CS68 | | | |
| TLR7 | UniProtKB: | 9774 | 9775 | 9776, 9777, 9778, 9779, 9780 |
| | Q9NYK1 | | | |
| TLR8 | UniProtKB: | 9781 | 9782 | 9783, 9784, 9785, 9786, 9787 |
| | Q495P6 | | | |
| TLR8 | UniProtKB: | 9788 | 9789 | 9790, 9791, 9792, 9793, 9794 |
| | Q495P7 | | | |
| TLR8 | UniProtKB: | 9795 | 9796 | 9797, 9798, 9799, 9800, 9801 |
| | Q9NR97 | | | |
| TLR9 | UniProtKB: | 9802 | 9803 | 9804, 9805, 9806, 9807, 9808 |
| | B6CH46 | | | |
| TLR9 | UniProtKB: | 9809 | 9810 | 9811, 9812, 9813, 9814, 9815 |
| | D1CS61 | | | |
| TLR9 | UniProtKB: | 9816 | 9817 | 9818, 9819, 9820, 9821, 9822 |
| | D1CS62 | | | |
| TLR9 | UniProtKB: | 9823 | 9824 | 9825, 9826, 9827, 9828, 9829 |
| | L0R5D6 | | | |
| TLR9 | UniProtKB: | 9830 | 9831 | 9832, 9833, 9834, 9835, 9836 |
| | L8E8B9 | | | |
| TLR9 | UniProtKB: | 9837 | 9838 | 9839, 9840, 9841, 9842, 9843 |
| | Q9NR96 | | | |
| TRAF6 | UniProtKB: | 9844 | 9845 | 9846, 9847, 9848, 9849, 9850 |
| | Q9Y4K3 | | | |
| c-myc | UniProtKB: | 9851 | 9852 | 9853, 9854, 9855, 9856, 9857, |
| | A0A0B4J1R1 | | | 9858 |
| c-myc | UniProtKB: | 9859 | 9860 | 9861, 9862, 9863, 9864, 9865, |
| | P01106 | | | 9866 |
| c-myc | UniProtKB: | 9867 | 9868 | 9869, 9870, 9871, 9872, 9873, |
| | Q14901 | | | 9874 |
| c-myc | UniProtKB: | 9875 | 9876 | 9877, 9878, 9879, 9880, 9881, |
| | Q16591 | | | 9882 |

[0231] According to the present invention, in a more preferred embodiment, the inventive composition comprises at least one RNA, preferably an mRNA comprising at least one coding region encoding at least one innate immune activator or a fragment or variant thereof, wherein the at least one coding region comprises an RNA sequence being identical or at least 50%, 60%, 70%, 75%, 80%, 81%, 82%, 83%, 84%, 85%, 86%, 87%, 88%, 89%, 90%, 91%, 92%, 93%, 94%, 95%, 96%, 97%, 98%, 99% identical to the RNA sequences according to the SEQ ID Nos as disclosed in Table 11.

[0232] 13. Antibodies, Decoy Receptors and Dominant Negative Receptors:

[0233] According to a preferred embodiment the at least one RNA of the inventive RNA containing composition encodes at least one antibody and/or at least one dominant negative receptor and/or at least one decoy receptor or a fragment or variant thereof, modulating (e.g. inhibiting) the functionality of a protein or signaling pathway which is associated with tumor or cancer development. It is particularly preferred that the RNA containing composition comprises at least one RNA encoding the heavy chain of a particular antibody or fragments or variants thereof and at least one further RNA encoding the light chain of the same particular antibody or fragments or variants thereof.

[0234] In this context particularly preferred are the antibodies according to Table 12.

TABLE 12
Antibodies directed against proteins accociated
with tumor or cancer development

| Name | Target |
|---|---|
| 3F8 | GD2 |
| Abagovomab | CA-125 imitation |
| Abciximab | Platelet glycoprotein GPIIb/IIIa |
| Adecatumumab | EpCAM (CD326) |
| Afutuzumab | CD20 |
| Alacizumab pegol | VEGFR2 |
| Alemtuzumab | CD52 |
| Altumomab pentetate | CEA |
| Amatuximab | mesothelin |
| Anatumomab mafenatox | 5T4 |
| Anetumab ravtansine | mesothelin |
| Apolizumab | HLA-DR beta |
| apomab | TRAIL-R2 (CD262) |
| Arcitumomab | CEA |
| Ascrinvacumab | ACVRL1 |
| Bavituximab | phosphatidylserine |
| Bectumomab | CD22 |
| Belimumab | BAFF |
| Besilesomab | CEA |
| Bevacizumab | VEGF-A |
| Bivatuzumab mertansine | CD44v6 |
| Blinatumomab | CD19 × CD3 |
| Brentuximab vedotin | CD30 (TNFRSF8) |
| Brontictuzumab | NOTCH1 |
| canakinumab | IL-1β |
| Cantuzumab mertansine | CanAg |
| Cantuzumab ravtansine | MUC1 (CD227) |
| Capromab pendetide | PSMA |
| Carlumab | MCP-1 |
| Catumaxomab | EpCAM × CD3 |
| cBR-doxorubicin immunoconjugate | CD174 (Lewis Y) |
| Cetuximab | EGFR (HER1/ERBB1) |
| Citatuzumab bogatox | EpCAM |
| Cixutumumab | IGF-1R |
| Clivatuzumab tetraxetan | MUC1 (CD227) |
| Codrituzumab | glypican 3 |
| Coltuximab ravtansine | CD19 |
| Conatumumab | TRAIL-R2 (CD262) |
| Dacetuzumab | CD40 |
| Dalotuzumab | IGF-1R |
| Dalotuzumab | insulin-like growth factor I receptor |
| Daratumumab | CD38 (cyclic ADP ribose hydrolase) |
| Demcizumab | DLL4 |
| Denintuzumab mafodotin | CD19 |
| Denosumab | RANKL |
| Depatuxizumab | EGFR (HER1/ERBB1) |
| Derlotuximab | histone complex |
| Detumomab | unknown (B-lymphoma cells) |
| Dinutuximab | B4GALNT1 |
| Drozitumab | TRAIL-R2 (CD262) |
| Duligotumab | HER3 (ERBB3) |
| Duligotuzumab | EGFR (HER1/ERBB1) |
| Dusigitumab | ILGF2 |
| Ecromeximab | GD3 ganglioside |
| Edrecolomab | EpCAM |
| Elgemtumab | ERBB3 |
| Elotuzumab | SLAMF7 (CD319) |
| Elsilimomab | IL-6 |
| Emactuzumab | CSF1R |
| Emibetuzumab | HGFR |
| Emibetuzumab | MET |
| Enavatuzumab | TNFRSF12A |
| Enfortumab vedotin | AGS-22M6 |
| Enoticumab | DLL4 |
| Ensituximab | MUC5AC |
| Epitumomab cituxetan | MUC1 (CD227) |
| Epratuzumab | CD22 |
| Ertumaxomab | HER2 (ERBB2/neu) × CD3 |
| Etaracizumab | integrin α5β3 |
| Faralimomab | IFNA1 |
| Farletuzumab | FOLR1 alpha |
| FBTA | CD20 × CD3 |
| Ficlatuzumab | HGFR |
| Figitumumab | IGF-1R |
| Flanvotumab | TYRP1(glycoprotein 75) |
| Fresolimumab | TGF-β |
| Futuximab | EGFR (HER1/ERBB1) |
| Galiximab | CD80 |
| Gantiumab | IGF-1R |
| Gemtuzumab ozogamicin | CD33 |
| Girentuximab | Carbonic anhydrase 9 (CA9/CAIX) |
| Glembatumumab vedotin | GPNMB |
| glycooptimized trastuzumab-GEX | HER2 (ERBB2/neu) |
| Ibritumomab tiuxetan | CD20 |
| Icrucumab | VEGFR-1 |
| Igovomab | MUC16 |
| IMAB362 | Claudin-18 (CLDN18.2) |
| Imgatuzumab | EGFR (HER1/ERBB1) |
| Indatuximab ravtansine | SDC1 |
| Indusatumab vedotin | GUCY2C |
| inebilizumab | CD19 |
| Inotuzumab ozogamicin | CD22 |
| Intetumumab | CD51 |
| Iratumumab | CD30 (TNFRSF8) |
| Isatuximab | CD38 |
| Labetuzumab | CEA |
| Lenzilumab | CSF2 |
| Lexatumumab | TRAIL-R2 (CD262) |
| Lifastuzumab vedotin | NaPi2B |
| Lilotomab satetraxetan | CD37 |
| Lintuzumab | CD33 |
| Lorvotuzumab mertansine | CD56 |
| Lucatumumab | CD40 |
| Lumiliximab | CD23 (IgE receptor) |
| Lumretuzumab | ERBB3 |
| Mapatumumab | TRAIL-R1 (CD261) |
| Margetuximab | HER2 (ERBB2/neu) |
| Matuzumab | EGFR (HER1/ERBB1) |
| Mepolizumab | IL-5 |
| Milatuzumab | CD74 |
| Minretumomab | TAG-72 |
| Mirvetuximab soravtansine | FOLR1 alpha |
| Mitumomab | GD3 (ganglioside) |
| Mogamulizumab | CCR4 |
| Moxetumomab pasudotox | CD22 |
| Nacolomab tafenatox | C242 antigen |
| Naptumomab estafenatox | 5T4 |
| Narnatumab | RON |
| Necitumumab | EGFR (HER1/ERBB1) |
| Nesvacumab | ANGPT2 (angiopoietin 2) |
| Nimotuzumab | EGFR (HER1/ERBB1) |
| Nofetumomab merpentan | EpCAM |
| binutuzumab | CD20 |
| Ocaratuzumab | CD20 |
| Ofatumumab | CD20 |
| Olaratumab | PDGFRα |
| Onartuzumab | MET |
| Ontuxizumab | CD248 (TEM1) |
| Oportuzumab monatox | EpCAM |
| Oregovomab | CA-125 |
| Otlertuzumab | CD37 |
| Panitumumab | EGFR (HER1/ERBB1) |
| Pankomab | MUC1 (tumor specific glycosylation) |
| Parsatuzumab | EGFL7 |
| Pasotuxizumab | FOLH1 |
| Patritumab | HER3 (ERBB3) |
| Pemtumomab | MUC1 (CD227) |
| Pertuzumab | HER2 (ERBB2/neu) |
| Pinatuzumab vedotin | CD22 |
| Pintumomab | adenocarcinoma antigen |
| Polatuzumab vedotin | CD79B |
| Racotumomab | NGcGM3 |
| Radretumab | EDB (fibronectin extra domain-B) |
| Ramucirumab | VEGFR2 |
| Rilotumumab | HGFR |
| Rituximab | CD20 |
| Robatumumab | IGF-1R |
| Sacituzumab govitecan | Trop-2 (tumor-associated calcium |
| | signal transducer 2/EGP-1) |
| Samalizumab | CD200 (OX-2 membrane |
| | glycoprotein) |
| Satumomab pendetide | TAG-72 |
| Seribantumab | ERBB3 |
| Seribantumab | HER3 (ERBB3) |
| SGN-CDA | CD19 |
| SGN-CDA | CD33 |
| Sibrotuzumab | FAP |
| Siltuximab | IL-6 |
| Simtuzumab | LOXL2 |
| Sofituzumab vedotin | CA 125 |
| Solitomab | EpCAM |
| Sonepcizumab | S1P (sphingosine-1-phosphate) |
| Tacatuzumab tetraxetan | AFP (alpha-fetoprotein) |
| Taplitumomab paptox | CD19 |
| Tarextumab | Notch receptor |
| Tenatumomab | TN-C (tenascin C) |
| Teprotumumab | CD221 |
| Tetulomab | CD37 |
| TGN | CD28 |
| Tigatuzumab | TRAIL-R2 (CD262) |
| Lebrikizumab | IL-13 |
| Tocilizumab | IL-6R |
| Tositumomab | CD20 |
| Tovetumab | CD140a |
| Tovetumab | PDGFRα |
| Trastuzumab | HER2 (ERBB2/neu) |
| Trastuzumab emtansine | HER2 (ERBB2/neu) |
| TRBS | GD2 |
| Tucotuzumab celmoleukin | EpCAM |
| ublituximab | CD20 |
| Ublituximab | MS4A1 |
| Ulocuplumab | CXCR4 |
| Vandortuzumab vedotin | STEAP1 |
| Vantictumab | FZD7 |
| Vanucizumab | Ang-2 (angiopoietin 2) × VEGF-A |
| Veltuzumab | CD20 |
| Vesencumab | NRP1 |
| Volociximab | integrin α5β1 |
| Votumumab | CTAA16.88 |
| Zalutumumab | EGFR (HER1/ERBB1) |
| Zanolimumab | CD4 |
| Zatuximab | HER1 (EGFR/ERBB1) |

[0235] Preferably, the neutralizing antibody is chosen from the list of anti-IL-10 and anti-TGFbeta.

[0236] Furthermore, the at least one antibody may preferably chosen from anti-CD73 antibodies or fragments or variants thereof.

[0237] In a further particularly preferred embodiment the at least one antibody is chosen from an antibody directed against CCR5/CD195 or from an antibody directed against its ligand CCL5/RANTES.

[0238] In a particularly preferred embodiment the decoy receptor is a soluble CCR5 (chemokine receptor type 5, also known as CD195).

[0239] In a further particularly preferred embodiment the dominant negative receptor is dominant negative CCR5 (chemokine receptor type 5, also known as CD195).

[0240] Furthermore, the at least one antibody may preferably chosen from anti-CD73 antibodies or fragments or variants thereof.

[0241] 14. Inhibitors of Myeloid Derived Suppressor Cells (MDSCs):

[0242] Myeloid Derived Suppressor Cells (MDSC) are a heterogeneous population of immature myeloid cells that are increased in cancer and related disorders. MDSC are induced by tumor secreted growth factors. MDSC play an important part in suppression of host immune responses through several mechanisms. In addition, MDSC may also contribute to angiogenesis and tumor invasion. Therefore, MDSC inhibition is a strategy for the treatment of cancer and related disorders.

[0243] In the context of the invention, MDSC inhibition can be achieved by direct deactivation of MDSCs (e.g., anti IL-17 antibodies), by blocking differentiation of MDSCs into mature cells (e.g., IL-12), by blocking the cell development of MDSCs or by depletion of MDSCs (e.g., cytotoxic agents).

[0244] Therefore it is particularly preferred to use anti IL-17 antibodies and IL-12 as inhibitors of MDSCs.

[0245] 15. IDO Pathway Inhibitors

[0246] In a further preferred embodiment of the inventive RNA containing composition the RNA, preferably mRNA codes for at least one IDO pathway inhibitor. Preferably the RNA encoding the at least one IDO pathway inhibitor encodes an inhibitory protein or dominant negative mutant protein of the IDO pathway.

[0247] As reviewed in Prendergast et al. (Prendergast G C, Smith C, Thomas S, Mandik-Nayak L, Laury-Kleintop L, Metz R, Muller A J. Indoleamine 2,3-dioxygenase pathways of pathogenic inflammation and immune escape in cancer. Cancer Immunol. Immunother. 2014 July; 63(7):721-35) indoleamine-pyrrole 2,3-dioxygenase (IDO or INDO EC 1.13.11.52) is an enzyme that in humans is encoded by the IDO1 gene. This enzyme catalyzes the degradation of the essential amino acid L-tryptophan to N-formylkynurenine. IDO is the first and rate-limiting enzyme of tryptophan catabolism through kynurenine pathway, thus causing depletion of tryptophan which can cause halted growth of microbes as well as T cells. IDO is an immunomodulatory enzyme produced by some alternatively activated macrophages and other immunoregulatory cells (also used as an immune subversion strategy by many tumors). The clinical development of IDO inhibitors may produce a novel class of immunomodulators with broad application in the treatment of advanced human cancer.

[0248] 16. Proteins or Peptides that Bind Inhibitors of Apoptosis

[0249] Apoptosis is a tightly regulated cellular process and faulty regulation of apoptosis is a hallmark of human cancers. Targeting key apoptosis regulators with the goal to restore apoptosis in tumor cells has been pursued as a new cancer therapeutic strategy. XIAP, cIAP1, and cIAP2, members of inhibitor of apoptosis (IAP) proteins, are critical regulators of cell death and survival and are attractive targets for new cancer therapy. The SMAC/DIABLO protein is an endogenous antagonist of XIAP, cIAP1, and cIAP2. In the last decade, intense research efforts have resulted in the design and development of several small-molecule SMAC mimetics now in clinical trials for cancer treatment

[0250] In a further preferred embodiment, the inventive composition comprises at least one RNA comprising at least one coding region that codes for at least one peptide or protein that binds inhibitors of apoptosis proteins (IAPB) and thus sensitize cancer cells to apoptotic death.

[0251] Therefore it is particularly preferred that the at least one RNA of the inventive RNA containing composition encodes at least one protein or peptide that bind inhibitors of apoptosis, such as SMAC mimetics.

[0252] Particularly preferred proteins or peptides that bind IAPB according to the present invention comprise Omi/HtrA2, Smac, Smac derived peptides, Smac/DIABLO, and XAF1 (XIAP-associated factor 1) and fragments or variants thereof.

[0253] RNA Modifications

[0254] According to one embodiment, the at least one RNA of the composition, encoding at least one of the proteins and/or peptides defined herein, may be in the form of a modified RNA, wherein any modification, as defined herein, may be introduced into the at least one RNA of the composition. Modifications as defined herein preferably lead to a stabilization of the at least one RNA of the composition of the present invention.

[0255] According to one embodiment, the at least one RNA of the composition of the present invention may thus be provided as a “stabilized RNA”, that is to say as an RNA that is essentially resistant to in vivo degradation (e.g. by an exo- or endo-nuclease). Such stabilization can be effected, for example, by a modified phosphate backbone of the at least one RNA of the composition of the present invention. A backbone modification in connection with the present invention is a modification in which phosphates of the backbone of the nucleotides contained in the RNA are chemically modified. Nucleotides that may be preferably used in this connection contain e.g. a phosphorothioate-modified phosphate backbone, preferably at least one of the phosphate oxygens contained in the phosphate backbone being replaced by a sulfur atom. Stabilized RNAs may further include, for example: non-ionic phosphate analogues, such as, for example, alkyl and aryl phosphonates, in which the charged phosphonate oxygen is replaced by an alkyl or aryl group, or phosphodiesters and alkylphosphotriesters, in which the charged oxygen residue is present in alkylated form. Such backbone modifications typically include, without implying any limitation, modifications from the group consisting of methylphosphonates, phosphoramidates and phosphorothioates (e.g. cytidine-5′-O-(1-thiophosphate)).

[0256] In the following, specific modifications are described, which are preferably capable of “stabilizing” the at least one RNA as defined herein.

[0257] Chemical Modifications:

[0258] The term “RNA modification” as used herein may refer to chemical modifications comprising backbone modifications as well as sugar modifications or base modifications.

[0259] In this context, a modified RNA as defined herein may contain nucleotide analogues/modifications, e.g. backbone modifications, sugar modifications or base modifications. A backbone modification in connection with the present invention is a modification, in which phosphates of the backbone of the nucleotides contained in an RNA as defined herein are chemically modified. A sugar modification in connection with the present invention is a chemical modification of the sugar of the nucleotides of the RNA as defined herein. Furthermore, a base modification in connection with the present invention is a chemical modification of the base moiety of the nucleotides of the RNA. In this context, nucleotide analogues or modifications are preferably selected from nucleotide analogues, which are applicable for transcription and/or translation.

[0260] Sugar Modifications:

[0261] The modified nucleosides and nucleotides, which may be incorporated into a modified RNA as described herein, can be modified in the sugar moiety. For example, the 2′ hydroxyl group (OH) can be modified or replaced with a number of different “oxy” or “deoxy” substituents. Examples of “oxy”-2′ hydroxyl group modifications include, but are not limited to, alkoxy or aryloxy (—OR, e.g., R═H, alkyl, cycloalkyl, aryl, aralkyl, heteroaryl or sugar); polyethyleneglycols (PEG), —O(CH₂CH₂O)nCH₂CH₂OR; “locked” nucleic acids (LNA) in which the 2′ hydroxyl is connected, e.g., by a methylene bridge, to the 4′ carbon of the same ribose sugar; and amino groups (—O-amino, wherein the amino group, e.g., NRR, can be alkylamino, dialkylamino, heterocyclyl, arylamino, diarylamino, heteroarylamino, or diheteroaryl amino, ethylene diamine, polyamino) or aminoalkoxy.

[0262] “Deoxy” modifications include hydrogen, amino (e.g. NH₂; alkylamino, dialkylamino, heterocyclyl, arylamino, diaryl amino, heteroaryl amino, diheteroaryl amino, or amino acid); or the amino group can be attached to the sugar through a linker, wherein the linker comprises one or more of the atoms C, N, and O.

[0263] The sugar group can also contain one or more carbons that possess the opposite stereochemical configuration than that of the corresponding carbon in ribose. Thus, a modified RNA can include nucleotides containing, for instance, arabinose as the sugar.

[0264] Backbone Modifications:

[0265] The phosphate backbone may further be modified in the modified nucleosides and nucleotides, which may be incorporated into a modified RNA as described herein. The phosphate groups of the backbone can be modified by replacing one or more of the oxygen atoms with a different substituent. Further, the modified nucleosides and nucleotides can include the full replacement of an unmodified phosphate moiety with a modified phosphate as described herein. Examples of modified phosphate groups include, but are not limited to, phosphorothioate, phosphoroselenates, borano phosphates, borano phosphate esters, hydrogen phosphonates, phosphoroamidates, alkyl or aryl phosphonates and phosphotriesters.

[0266] Phosphorodithioates have both non-linking oxygens replaced by sulfur. The phosphate linker can also be modified by the replacement of a linking oxygen with nitrogen (bridged phosphoroamidates), sulfur (bridged phosphorothioates) and carbon (bridged methylene-phosphonates).

[0267] Base Modifications:

[0268] The modified nucleosides and nucleotides, which may be incorporated into a modified RNA as described herein can further be modified in the nucleobase moiety. Examples of nucleobases found in RNA include, but are not limited to, adenine, guanine, cytosine and uracil. For example, the nucleosides and nucleotides described herein can be chemically modified on the major groove face. In some embodiments, the major groove chemical modifications can include an amino group, a thiol group, an alkyl group, or a halo group.

[0269] In particularly preferred embodiments of the present invention, the nucleotide analogues/modifications are selected from base modifications, which are preferably selected from 2-amino-6-chloropurineriboside-5′-triphosphate, 2-Aminopurine-riboside-5′-triphosphate; 2-aminoadenosine-5′-triphosphate, 2′-Amino-2′-deoxycytidine-triphosphate, 2-thiocytidine-5′-triphosphate, 2-thiouridine-5′-triphosphate, 2′-Fluorothymidine-5′-triphosphate, 2′-O-Methyl inosine-5′-triphosphate 4-thiouridine-5′-triphosphate, 5-aminoallylcytidine-5′-triphosphate, 5-aminoallyluridine-5′-triphosphate, 5-bromocytidine-5′-triphosphate, 5-bromouridine-5′-triphosphate, 5-Bromo-2′-deoxycytidine-5′-triphosphate, 5-Bromo-2′-deoxyuridine-5′-triphosphate, 5-iodocytidine-5′-triphosphate, 5-Iodo-2′-deoxycytidine-5′-triphosphate, 5-iodouridine-5′-triphosphate, 5-Iodo-2′-deoxyuridine-5′-triphosphate, 5-methylcytidine-5′-triphosphate, 5-methyluridine-5′-triphosphate, 5-Propynyl-2′-deoxycytidine-5′-triphosphate, 5-Propynyl-2′-deoxyuridine-5′-triphosphate, 6-azacytidine-5′-triphosphate, 6-azauridine-5′-triphosphate, 6-chloropurineriboside-5′-triphosphate, 7-deazaadenosine-5′-triphosphate, 7-deazaguanosine-5′-triphosphate, 8-azaadenosine-5′-triphosphate, 8-azidoadenosine-5′-triphosphate, benzimidazole-riboside-5′-triphosphate, N1-methyladenosine-5′-triphosphate, N1-methylguanosine-5′-triphosphate, N6-methyladenosine-5′-triphosphate, 06-methylguanosine-5′-triphosphate, pseudouridine-5′-triphosphate, or puromycin-5′-triphosphate, xanthosine-5′-triphosphate. Particular preference is given to nucleotides for base modifications selected from the group of base-modified nucleotides consisting of 5-methylcytidine-5′-triphosphate, 7-deazaguanosine-5′-triphosphate, 5-bromocytidine-5′-triphosphate, and pseudouridine-5′-triphosphate.

[0270] In some embodiments, modified nucleosides include pyridin-4-one ribonucleoside, 5-aza-uridine, 2-thio-5-aza-uridine, 2-thiouridine, 4-thio-pseudouridine, 2-thio-pseudouridine, 5-hydroxyuridine, 3-methyluridine, 5-carboxymethyl-uridine, 1-carboxymethyl-pseudouridine, 5-propynyl-uridine, 1-propynyl-pseudouridine, 5-taurinomethyluridine, 1-taurinomethyl-pseudouridine, 5-taurinomethyl-2-thio-uridine, I-taurinomethyl-4-thio-uridine, 5-methyl-uridine, 1-methyl-pseudouridine, 4-thio-1-methyl-pseudouridine, 2-thio-I-methyl-pseudouridine, 1-methyl-1-deaza-pseudouridine, 2-thio-1-methyl-1-deaza-pseudouridine, dihydrouridine, dihydropseudouridine, 2-thio-dihydrouridine, 2-thio-dihydropseudouridine, 2-methoxyuridine, 2-methoxy-4-thio-uridine, 4-methoxy-pseudouridine, and 4-methoxy-2-thio-pseudouridine.

[0271] In some embodiments, modified nucleosides include 5-aza-cytidine, pseudoisocytidine, 3-methyl-cytidine, N4-acetylcytidine, 5-formylcytidine, N4-methylcytidine, 5-hydroxymethylcytidine, 1-methyl-pseudoisocytidine, pyrrolo-cytidine, pyrrolo-pseudoisocytidine, 2-thio-cytidine, 2-thio-5-methyl-cytidine, 4-thio-pseudoisocytidine, 4-thio-1-methyl-pseudoisocytidine, 4-thio-1-methyl-1-deaza-pseudoisocytidine, 1-methyl-1-deaza-pseudoisocytidine, zebularine, 5-aza-zebularine, 5-methyl-zebularine, 5-aza-2-thio-zebularine, 2-thio-zebularine, 2-methoxy-cytidine, 2-methoxy-5-methyl-cytidine, 4-methoxy-pseudoisocytidine, and 4-methoxy-1-methyl-pseudoisocytidine.

[0272] In other embodiments, modified nucleosides include 2-aminopurine, 2, 6-diaminopurine, 7-deaza-adenine, 7-deaza-8-aza-adenine, 7-deaza-2-aminopurine, 7-deaza-8-aza-2-aminopurine, 7-deaza-2,6-diaminopurine, 7-deaza-8-aza-2,6-diaminopurine, 1-methyladenosine, N6-methyladenosine, N6-isopentenyladenosine, N6-(cis-hydroxyisopentenyl)adenosine, 2-methylthio-N6-(cis-hydroxyisopentenyl) adenosine, N6-glycinylcarbamoyladenosine, N6-threonylcarbamoyladenosine, 2-methylthio-N6-threonyl carbamoyladenosine, N6,N6-dimethyladenosine, 7-methyladenine, 2-methylthio-adenine, and 2-methoxy-adenine.

[0273] In other embodiments, modified nucleosides include inosine, 1-methyl-inosine, wyosine, wybutosine, 7-deaza-guanosine, 7-deaza-8-aza-guanosine, 6-thio-guanosine, 6-thio-7-deaza-guanosine, 6-thio-7-deaza-8-aza-guanosine, 7-methyl-guanosine, 6-thio-7-methyl-guanosine, 7-methylinosine, 6-methoxy-guanosine, 1-methylguanosine, N2-methylguanosine, N2,N2-dimethylguanosine, 8-oxo-guanosine, 7-methyl-8-oxo-guanosine, I-methyl-6-thio-guanosine, N2-methyl-6-thio-guanosine, and N2,N2-dimethyl-6-thio-guanosine.

[0274] In some embodiments, the nucleotide can be modified on the major groove face and can include replacing hydrogen on C-5 of uracil with a methyl group or a halo group.

[0275] In specific embodiments, a modified nucleoside is 5′-O-(1-thiophosphate)-adenosine, 5′-O-(1-thiophosphate)-cytidine, 5′-O-(1-thiophosphate)-guanosine, 5′-O-(1-thiophosphate)-uridine or 5′-O-(1-thiophosphate)-pseudouridine.

[0276] In further specific embodiments, a modified RNA may comprise nucleoside modifications selected from 6-aza-cytidine, 2-thio-cytidine, α-thio-cytidine, Pseudo-iso-cytidine, 5-aminoallyl-uridine, 5-iodo-uridine, N1-methyl-pseudouridine, 5,6-dihydrouridine, α-thio-uridine, 4-thio-uridine, 6-aza-uridine, 5-hydroxyuridine, deoxy-thymidine, 5-methyl-uridine, Pyrrolo-cytidine, inosine, α-thio-guanosine, 6-methyl-guanosine, 5-methyl-cytdine, 8-oxo-guanosine, 7-deaza-guanosine, N1-methyl-adenosine, 2-amino-6-Chloro-purine, N6-methyl-2-amino-purine, Pseudo-iso-cytidine, 6-Chloro-purine, N6-methyl-adenosine, α-thio-adenosine, 8-azido-adenosine, 7-deaza-adenosine.

[0277] Lipid Modification:

[0278] According to a further embodiment, a modified RNA as defined herein can contain a lipid modification. Such a lipid-modified RNA typically comprises an RNA as defined herein. Such a lipid-modified RNA as defined herein typically further comprises at least one linker covalently linked with that RNA, and at least one lipid covalently linked with the respective linker. Alternatively, the lipid-modified RNA comprises at least one RNA as defined herein and at least one (bifunctional) lipid covalently linked (without a linker) with that RNA. According to a third alternative, the lipid-modified RNA comprises an RNA molecule as defined herein, at least one linker covalently linked with that RNA, and at least one lipid covalently linked with the respective linker, and also at least one (bifunctional) lipid covalently linked (without a linker) with that RNA. In this context, it is particularly preferred that the lipid modification is present at the terminal ends of a linear RNA sequence.

[0279] G/C Content Optimization:

[0280] According to an especially preferred embodiment of the invention, the RNA of the inventive composition is modified. Preferably the RNA is stabilized by modifying and preferably increasing the G (guanosine)/C (cytosine) content of the RNA of the coding region thereof. Therein, the G/C content of the RNA of the coding region is increased compared to the G/C content of the coding region of its particular wild type coding sequence, i.e. the unmodified RNA. However, the encoded amino acid sequence of the RNA is preferably not modified compared to the encoded amino acid sequence of the particular wild type/unmodified RNA.

[0281] The modification of the G/C-content of the RNA of the inventive composition is based on the fact that RNA sequences having an increased G (guanosine)/C (cytosine) content are more stable than RNA sequences having an increased A (adenosine)/U (uracil) content. The codons of a coding sequence or a whole RNA might therefore be varied compared to the wild type coding sequence or RNA, such that they include an increased amount of G/C nucleotides while the translated amino acid sequence is retained. In respect to the fact that several codons code for one and the same amino acid (so-called degeneration of the genetic code), the most favourable codons for the stability can be determined (so-called alternative codon usage). Depending on the amino acid to be encoded by the at least one RNA, there are various possibilities for modification of the RNA sequence, compared to its wild-type sequence. In the case of amino acids which are encoded by codons, which contain exclusively G or C nucleotides, no modification of the codon is necessary. Thus, the codons for Pro (CCC or CCG), Arg (CGC or CGG), Ala (GCC or GCG) and Gly (GGC or GGG) require no modification, since no A or U is present. In contrast, codons which contain A and/or U nucleotides can be modified by substitution of other codons, which code for the same amino acids but contain no A and/or U. Examples of these are: the codons for Pro can be modified from CCU or CCA to CCC or CCG; the codons for Arg can be modified from CGU or CGA or AGA or AGG to CGC or CGG; the codons for Ala can be modified from GCU or GCA to GCC or GCG; the codons for Gly can be modified from GGU or GGA to GGC or GGG. In other cases, although A or U nucleotides cannot be eliminated from the codons, it is however possible to decrease the A and U content by using codons which contain a lower content of A and/or U nucleotides. Examples of these are: the codons for Phe can be modified from UUU to UUC; the codons for Leu can be modified from UUA, UUG, CUU or CUA to CUC or CUG; the codons for Ser can be modified from UCU or UCA or AGU to UCC, UCG or AGC; the codon for Tyr can be modified from UAU to UAC; the codon for Cys can be modified from UGU to UGC; the codon for His can be modified from CAU to CAC; the codon for Gln can be modified from CAA to CAG; the codons for Ile can be modified from AUU or AUA to AUC; the codons for Thr can be modified from ACU or ACA to ACC or ACG; the codon for Asn can be modified from AAU to AAC; the codon for Lys can be modified from AAA to AAG; the codons for Val can be modified from GUU or GUA to GUC or GUG; the codon for Asp can be modified from GAU to GAC; the codon for Glu can be modified from GAA to GAG; the stop codon UAA can be modified to UAG or UGA. In the case of the codons for Met (AUG) and Trp (UGG), on the other hand, there is no possibility of sequence modification. The substitutions listed above can be used either individually or in all possible combinations to increase the G/C content of the at least one mRNA of the composition of the present invention compared to its particular wild-type mRNA (i.e. the original sequence). Thus, for example, all codons for Thr occurring in the wild-type sequence can be modified to ACC (or ACG). Preferably, however, for example, combinations of the above substitution possibilities are used:

[0282] substitution of all codons coding for Thr in the original sequence (wild-type mRNA) to ACC (or ACG) and substitution of all codons originally coding for Ser to UCC (or UCG or AGC); substitution of all codons coding for Ile in the original sequence to AUC and

[0283] substitution of all codons originally coding for Lys to AAG and

[0284] substitution of all codons originally coding for Tyr to UAC; substitution of all codons coding for Val in the original sequence to GUC (or GUG) and

[0285] substitution of all codons originally coding for Glu to GAG and

[0286] substitution of all codons originally coding for Ala to GCC (or GCG) and

[0287] substitution of all codons originally coding for Arg to CGC (or CGG); substitution of all codons coding for Val in the original sequence to GUC (or GUG) and

[0288] substitution of all codons originally coding for Glu to GAG and

[0289] substitution of all codons originally coding for Ala to GCC (or GCG) and

[0290] substitution of all codons originally coding for Gly to GGC (or GGG) and

[0291] substitution of all codons originally coding for Asn to AAC; substitution of all codons coding for Val in the original sequence to GUC (or GUG) and

[0292] substitution of all codons originally coding for Phe to UUC and

[0293] substitution of all codons originally coding for Cys to UGC and

[0294] substitution of all codons originally coding for Leu to CUG (or CUC) and

[0295] substitution of all codons originally coding for Gln to CAG and

[0296] substitution of all codons originally coding for Pro to CCC (or CCG); etc.

[0297] Preferably, the G/C content of the coding region of the at least one RNA according to the invention is increased by at least 7%, more preferably by at least 15%, particularly preferably by at least 20%, compared to the G/C content of the coding region of the wild type RNA. According to a specific embodiment at least 5%, 10%, 20%, 30%, 40%, 50%, 60%, more preferably at least 70%, even more preferably at least 80% and most preferably at least 90%, 95% or even 100% of the substitutable codons in the region coding for a protein or peptide as defined herein or its fragment or variant thereof or the whole sequence of the wild type RNA sequence or coding sequence are substituted, thereby increasing the G/C content of said sequence. In this context, it is particularly preferable to increase the G/C content of the at least one RNA of the inventive composition to the maximum (i.e. 100% of the substitutable codons), in particular in the coding region, compared to the wild type sequence.

[0298] According to the invention, a further preferred modification of the coding sequence of the at least one RNA of the composition is based on the finding that the translation efficiency is also determined by a different frequency in the occurrence of tRNAs in cells. Thus, if so-called “rare codons” are present in the at least one coding region of the at least one RNA of the composition of the present invention to an increased extent, the corresponding modified at least one RNA sequence is translated to a significantly poorer degree than in the case where codons coding for relatively “frequent” tRNAs are present. According to the invention, in the modified at least one RNA of the composition of the present invention, the region which codes for one of the above defined peptides or proteins is modified compared to the corresponding region of the wild-type RNA such that at least one codon of the wild-type sequence, which codes for a tRNA which is relatively rare in the cell, is exchanged for a codon, which codes for a tRNA which is relatively frequent in the cell and carries the same amino acid as the relatively rare tRNA. By this modification, the sequence of the at least one coding region of the at least one RNA of the composition of the present invention is modified such that codons for which frequently occurring tRNAs are available are inserted. In other words, according to the invention, by this modification all codons of the wild-type sequence which code for a tRNA which is relatively rare in the cell can in each case be exchanged for a codon which codes for a tRNA which is relatively frequent in the cell and which, in each case, carries the same amino acid as the relatively rare tRNA. Which tRNAs occur relatively frequently in the cell and which, in contrast, occur relatively rarely is known to a person skilled in the art; cf. e.g. Akashi, Curr. Opin. Genet. Dev. 2001, 11(6): 660-666. The codons which use for the particular amino acid the tRNA which occurs the most frequently, e.g. the Gly codon, which uses the tRNA, which occurs the most frequently in the (human) cell, are particularly preferred. According to the invention, it is particularly preferable to link the sequential G/C content which is increased, in particular maximized, in the modified at least one RNA of the composition of the present invention, with the “frequent” codons without modifying the amino acid sequence of the protein encoded by the coding region of the RNA. This preferred embodiment allows provision of a particularly efficiently translated and stabilized (modified) at least one RNA of the composition of the present invention. The determination of a modified at least one RNA of the composition of the present invention as described above (increased G/C content; exchange of tRNAs) can be carried out using the computer program explained in WO 02/098443—the disclosure content of which is included in its full scope in the present invention. Using this computer program, the nucleotide sequence of any desired coding RNA can be modified with the aid of the genetic code or the degenerative nature thereof such that a maximum G/C content results, in combination with the use of codons which code for tRNAs occurring as frequently as possible in the cell, the amino acid sequence coded by the modified at least one RNA preferably not being modified compared to the non-modified sequence. Alternatively, it is also possible to modify only the G/C content or only the codon usage compared to the original sequence. The source code in Visual Basic 6.0 (development environment used: Microsoft Visual Studio Enterprise 6.0 with Servicepack 3) is also described in WO 02/098443. In a further preferred embodiment of the present invention, the A/U content in the environment of the ribosome binding site of the at least one RNA of the composition of the present invention is increased compared to the A/U content in the environment of the ribosome binding site of its particular wild-type RNA. This modification (an increased A/U content around the ribosome binding site) increases the efficiency of ribosome binding to the at least one RNA. An effective binding of the ribosomes to the ribosome binding site (Kozak sequence: GCCGCCACCAUGG (SEQ ID NO: 10.071), the AUG forms the start codon) in turn has the effect of an efficient translation of the at least one RNA. According to a further embodiment of the present invention the at least one RNA of the composition of the present invention may be modified with respect to potentially destabilizing sequence elements. Particularly, the coding region and/or the 5′ and/or 3′ untranslated region of this RNA may be modified compared to the particular wild-type RNA such that it contains no destabilizing sequence elements, the coded amino acid sequence of the modified at least one RNA preferably not being modified compared to its particular wild-type RNA. It is known that, for example, in sequences of eukaryotic RNAs destabilizing sequence elements (DSE) occur, to which signal proteins bind and regulate enzymatic degradation of RNA in vivo. For further stabilization of the modified at least one RNA, optionally in the region which encodes for a protein or peptide as defined herein, one or more such modifications compared to the corresponding region of the wild-type RNA can therefore be carried out, so that no or substantially no destabilizing sequence elements are contained there. According to the invention, DSE present in the untranslated regions (3′- and/or 5′-UTR) can also be eliminated from the at least one RNA of the composition of the present invention by such modifications. Such destabilizing sequences are e.g. AU-rich sequences (AURES), which occur in 3′-UTR sections of numerous unstable RNAs (Caput et al., Proc. Natl. Acad. Sci. USA 1986, 83: 1670 to 1674). The at least one RNA of the composition of the present invention is therefore preferably modified compared to the wild-type RNA such that the at least one RNA contains no such destabilizing sequences. This also applies to those sequence motifs which are recognized by possible endonucleases, e.g. the sequence GAACAAG, which is contained in the 3′-UTR segment of the gene which codes for the transferrin receptor (Binder et al., EMBO J. 1994, 13: 1969 to 1980). These sequence motifs are also preferably removed in the at least one RNA of the composition of the present invention.

[0299] Adaptation to Human Codon Usage:

[0300] According to the invention, a further preferred modification of the at least one RNA of the composition of the present invention is based on the finding that codons coding for the same amino acid occur in different frequencies. According to the invention, in the modified at least one RNA of the composition of the present invention, the region which codes for one of the above defined peptides or proteins (coding sequence) is preferably modified compared to the corresponding region of the wild-type RNA such that the frequency of the codons coding for the same amino acid corresponds to the naturally occurring frequency of that codon present in the human coding usage as e.g. shown in Table 13.

[0301] This means, for example, that for the amino acid Alanine (Ala) present in the amino acid sequence of the encoded protein according to the invention, the wild type coding sequence is adapted in a way that the codon “GCC” is used with a frequency of 0.40, the codon “GCT” is used with a frequency of 0.28, the codon “GCA” is used with a frequency of 0.22 and the codon “GCG” is used with a frequency of 0.10 etc. (see Table 13).

TABLE 13
Human codon usage table (most frequent codon
marked with an asterisk)

| Amino acid | codon | fraction | /1000 |
|---|---|---|---|
| Ala | GCG | 0.10 | 7.4 |
| Ala | GCA | 0.22 | 15.8 |
| Ala | GCT | 0.28 | 18.5 |
| Ala | GCC* | 0.40 | 27.7 |
| Cys | TGT | 0.42 | 10.6 |
| Cys | TGC* | 0.58 | 12.6 |
| Asp | GAT | 0.44 | 21.8 |
| Asp | GAC* | 0.56 | 25.1 |
| Glu | GAG* | 0.59 | 39.6 |
| Glu | GAA | 0.41 | 29.0 |
| Phe | TTT | 0.43 | 17.6 |
| Phe | TTC* | 0.57 | 20.3 |
| Gly | GGG | 0.23 | 16.5 |
| Gly | GGA | 0.26 | 16.5 |
| Gly | GGT | 0.18 | 10.8 |
| Gly | GGC* | 0.33 | 22.2 |
| His | CAT | 0.41 | 10.9 |
| His | CAC* | 0.59 | 15.1 |
| Ile | ATA | 0.14 | 7.5 |
| Ile | ATT | 0.35 | 16.0 |
| Ile | ATC* | 0.52 | 20.8 |
| Lys | AAG* | 0.60 | 31.9 |
| Lys | AAA | 0.40 | 24.4 |
| Leu | TTG | 0.12 | 12.9 |
| Leu | TTA | 0.06 | 7.7 |
| Leu | CTG* | 0.43 | 39.6 |
| Leu | CTA | 0.07 | 7.2 |
| Leu | CTT | 0.12 | 13.2 |
| Leu | CTC | 0.20 | 19.6 |
| Met | ATG* | 1 | 22.0 |
| Asn | AAT | 0.44 | 17.0 |
| Asn | AAC* | 0.56 | 19.1 |
| Pro | CCG | 0.11 | 6.9 |
| Pro | CCA | 0.27 | 16.9 |
| Pro | CCT | 0.29 | 17.5 |
| Pro | CCC* | 0.33 | 19.8 |
| Gln | CAG* | 0.73 | 34.2 |
| Gln | CAA | 0.27 | 12.3 |
| Arg | AGG | 0.22 | 12.0 |
| Arg | AGA* | 0.21 | 12.1 |
| Arg | CGG | 0.19 | 11.4 |
| Arg | CGA | 0.10 | 6.2 |
| Arg | CGT | 0.09 | 4.5 |
| Arg | CGC | 0.19 | 10.4 |
| Ser | AGT | 0.14 | 12.1 |
| Ser | AGC* | 0.25 | 19.5 |
| Ser | TCG | 0.06 | 4.4 |
| Ser | TCA | 0.15 | 12.2 |
| Ser | TCT | 0.18 | 15.2 |
| Ser | TCC | 0.23 | 17.7 |
| Thr | ACG | 0.12 | 6.1 |
| Thr | ACA | 0.27 | 15.1 |
| Thr | ACT | 0.23 | 13.1 |
| Thr | ACC* | 0.38 | 18.9 |
| Val | GTG* | 0.48 | 28.1 |
| Val | GTA | 0.10 | 7.1 |
| Val | GTT | 0.17 | 11.0 |
| Val | GTC | 0.25 | 14.5 |
| Trp | TGG* | 1 | 13.2 |
| Tyr | TAT | 0.42 | 12.2 |
| Tyr | TAC* | 0.58 | 15.3 |
| Stop | TGA* | 0.61 | 1.6 |
| Stop | TAG | 0.17 | 0.8 |
| Stop | TAA | 0.22 | 1.0 |

[0302] Codon-Optimization:

[0303] According to a particularly preferred embodiment it is preferred, that all codons of the wild-type sequence of the coding region of the at least one RNA of the inventive composition which code for a tRNA which is relatively rare in the cell is in each case exchanged for a codon which codes for a tRNA which is relatively frequent in the cell and which, in each case, carries the same amino acid as the relatively rare tRNA. Therefore it is particularly preferred that the most frequent codons are used for each encoded amino acid (see Table 13, most frequent codons are marked with asterisks).

[0304] This means, for example, that for the amino acid Alanine (Ala) present in the amino acid sequence of the encoded peptide or protein according to the invention, the wild type coding sequence is adapted in a way that the most frequent human codon “GCC” is always used for said amino acid, or for the amino acid Cysteine (Cys), the wild type sequence is adapted in a way that the most frequent human codon “TGC” is always used for said amino acid etc.

[0305] C-Enrichment:

[0306] According to another embodiment, the at least one RNA of the composition of the present invention may be modified by increasing the C content of the RNA, preferably of the coding region of the at least one RNA.

[0307] In a particularly preferred embodiment of the present invention, the C content of the coding region of the at least one RNA of the composition of the present invention is modified, particularly increased, compared to the C content of the coding region of its particular wild-type RNA, i.e. the unmodified mRNA. The amino acid sequence encoded by the at least one RNA is preferably not modified as compared to the amino acid sequence encoded by the particular wild-type RNA

[0308] In a preferred embodiment of the present invention, the modified RNA is modified such that at least 10%, 20%, 30%, 40%, 50%, 60%, 70% or 80%, or at least 90% of the theoretically maximal cytosine-content or even a maximal cytosine-content is achieved.

[0309] In further preferred embodiments, at least 10%, 20%, 30%, 40%, 50%, 60%, 70%, 80%, 90% or even 100% of the codons of the target RNA wild type sequence, which are “cytosine content optimizable” are replaced by codons with a higher cytosine-content as present in the wild type sequence.

[0310] In a further preferred embodiment, some of the codons of the wild type coding sequence may additionally be modified such that a codon for a relatively rare tRNA in the cell is exchanged by a codon for a relatively frequent tRNA in the cell, provided that the substituted codon for a relatively frequent tRNA carries the same amino acid as the relatively rare tRNA of the original wild type codon. Preferably, all of the codons for a relatively rare tRNA are replaced by a codon for a relatively frequent tRNA in the cell, except codons encoding amino acids, which are exclusively encoded by codons not containing any cytosine, or except for glutamine (Gln), which is encoded by two codons each containing the same number of cytosines.

[0311] In a further preferred embodiment of the present invention, the modified target RNA is modified such that at least 80%, or at least 90% of the theoretically maximal cytosine-content or even a maximal cytosine-content is achieved by means of codons, which code for relatively frequent tRNAs in the cell, wherein the amino acid sequence remains unchanged.

[0312] Due to the naturally occurring degeneracy of the genetic code, more than one codon may encode a particular amino acid. Accordingly, 18 out of 20 naturally occurring amino acids are encoded by more than 1 codon (with Tryp and Met being an exception), e.g. by 2 codons (e.g. Cys, Asp, Glu), by three codons (e.g. Ile), by 4 codons (e.g. Al, Gly, Pro) or by 6 codons (e.g. Leu, Arg, Ser). However, not all codons encoding the same amino acid are utilized equally frequent under in vivo conditions. Depending on each single organism, a typical codon usage profile is established.

[0313] The term “cytosine content-optimizable codon” as used within the context of the present invention refers to codons, which exhibit a lower amount of cytosines than other codons coding for the same amino acid. Accordingly, any wild type codon, which may be replaced by another codon coding for the same amino acid and exhibiting a higher number of cytosines within that codon, is considered to be cytosine-optimizable (C-optimizable). Any such substitution of a C-optimizable wild type codon by the specific C-optimized codon within a wild type coding region increases its overall C-content and reflects a C-enriched modified RNA sequence. A C-maximized RNA sequence contains C-optimized codons for all potentially C-optimizable codons. Accordingly, 100% or all of the theoretically replaceable C-optimizable codons are under such conditions actually replaced by C-optimized codons over the entire length of the coding region.

[0314] In this context, cytosine-content optimizable codons are codons, which contain a lower number of cytosines than other codons coding for the same amino acid.

[0315] Any of the codons GCG, GCA, GCU codes for the amino acid Ala, which may be exchanged by the codon GCC encoding the same amino acid, and/or

[0316] the codon UGU that codes for Cys may be exchanged by the codon UGC encoding the same amino acid, and/or

[0317] the codon GAU which codes for Asp may be exchanged by the codon GAC encoding the same amino acid, and/or

[0318] the codon that UUU that codes for Phe may be exchanged for the codon UUC encoding the same amino acid, and/or

[0319] any of the codons GGG, GGA, GGU that code Gly may be exchanged by the codon GGC encoding the same amino acid, and/or

[0320] the codon CAU that codes for His may be exchanged by the codon CAC encoding the same amino acid, and/or

[0321] any of the codons AUA, AUU that code for Ile may be exchanged by the codon AUC, and/or

[0322] any of the codons UUG, UUA, CUG, CUA, CUU coding for Leu may be exchanged by the codon CUC encoding the same amino acid, and/or

[0323] the codon AAU that codes for Asn may be exchanged by the codon AAC encoding the same amino acid, and/or

[0324] any of the codons CCG, CCA, CCU coding for Pro may be exchanged by the codon CCC encoding the same amino acid, and/or

[0325] any of the codons AGG, AGA, CGG, CGA, CGU coding for Arg may be exchanged by the codon CGC encoding the same amino acid, and/or

[0326] any of the codons AGU, AGC, UCG, UCA, UCU coding for Ser may be exchanged by the codon UCC encoding the same amino acid, and/or

[0327] any of the codons ACG, ACA, ACU coding for Thr may be exchanged by the codon ACC encoding the same amino acid, and/or

[0328] any of the codons GUG, GUA, GUU coding for Val may be exchanged by the codon GUC encoding the same amino acid, and/or

[0329] the codon UAU coding for Tyr may be exchanged by the codon UAC encoding the same amino acid.

[0330] In any of the above instances, the number of cytosines is increased by 1 per exchanged codon. Exchange of all non C-optimized codons (corresponding to C-optimizable codons) of the coding region results in a C-maximized coding sequence. In the context of the invention at least 70% of the non C-optimized codons are replaced by C-optimized codons of the wild type sequence are replaced by C-optimized codons, preferably at least 80%, more preferably at least 90% within the coding region. It may be preferred that for some amino acids the percentage of C-optimizable codons replaced by C-optimized codons is less than 70%, while for other amino acids the percentage of replaced codons is higher than 70% to meet the overall percentage of C-optimization of at least 70% of all C-optimizable wild type codons of the coding region.

[0331] Preferably, in the C-optimized RNAs of the invention, at least 50% of the C-optimizable wild type codons for any given amino acid are replaced by C-optimized codons, e.g. any modified C-enriched RNA preferably contains at least 50% C-optimized codons at C-optimizable wild type codon positions coding for any single of the above mentioned amino acids Ala, Cys, Asp, Phe, Gly, His, Ile, Leu, Asn, Pro, Arg, Ser, Thr, Val and Tyr, preferably at least 60%.

[0332] In this context codons coding for amino acids, which are not cytosine content-optimizable and which are, however, encoded by at least two codons, may be used without any further selection process. However, the codon of the wild type sequence that codes for a relatively rare tRNA in the cell, e.g. a human cell, may be exchanged for a codon that codes for a relatively frequent tRNA in the cell, whereby both code for the same amino acid. Accordingly, the relatively rare codon GAA coding for Glu may be exchanged by the relative frequent codon GAG coding for the same amino acid, and/or

[0333] the relatively rare codon AAA coding for Lys may be exchanged by the relative frequent codon AAG coding for the same amino acid, and/or

[0334] the relatively rare codon CAA coding for Gln is exchanged for the relative frequent codon CAG encoding the same amino acid.

[0335] In this context, the amino acids Met (AUG) and Trp (UGG), which are encoded by only one codon each, remain unchanged. Stop codons are not cytosine-content optimized, however, the relatively rare stop codons amber, ochre (UAA, UAG) may be exchanged by the relatively frequent stop codon opal (UGA).

[0336] The substitutions listed above may obviously be used individually but also in all possible combinations in order to optimize the cytosine-content of the modified RNA compared to the wild type RNA sequence.

[0337] Accordingly, the region of the modified RNA coding for the peptide or protein may be changed compared to the coding region of the wild type RNA in such a way that an amino acid encoded by at least two or more codons, of which one comprises one additional cytosine, such a codon may be exchanged by the C-optimized codon comprising one additional cytosine, whereby the amino acid is unaltered compared to the wild type sequence.

[0338] Substitutions, additions or eliminations of bases are preferably carried out using a DNA matrix for preparation of the nucleic acid molecule by techniques of the well known site directed mutagenesis or with an oligonucleotide ligation. In such a process, for preparation of the at least one RNA as defined herein a corresponding DNA molecule may be transcribed in vitro. This DNA matrix preferably comprises a suitable promoter, e.g. a T7 or SP6 promoter, for in vitro transcription, which is followed by the desired nucleotide sequence for the at least one RNA to be prepared and a termination signal for in vitro transcription. The DNA molecule, which forms the matrix of the at least one RNA of interest, may be prepared by fermentative proliferation and subsequent isolation as part of a plasmid which can be replicated in bacteria. Plasmids which may be mentioned as suitable for the present invention are e.g. the plasmids pT7Ts (GenBank accession number U26404; Lai et al., Development 1995, 121: 2349 to 2360), pGEM® series, e.g. pGEM®-1 (GenBank accession number X65300; from Promega) and pSP64 (GenBank accession number X65327); cf. also Mezei and Storts, Purification of PCR Products, in: Griffin and Griffin (ed.), PCR Technology: Current Innovation, CRC Press, Boca Raton, Fla., 2001.

[0339] Fragments and Variants

[0340] In the context of the invention additionally to the here disclosed peptides and proteins, which show a certain degree of identity of sequence, are incorporated. Therefore fragments and variants of the proteins and peptides as defined herein are disclosed herewith in the context of the present invention.

[0341] Furthermore fragments and variants of nucleic acids as defined herein are therefore disclosed herewith in the context of the present invention.

[0342] Mono-Bi-Multicistronic, Self Cleaving Peptides Etc:

[0343] The coding region of the at least one RNA of the inventive composition may occur as a mono-, di-, or even multicistronic RNA, i.e. an RNA sequence which carries the coding sequences of one, two or more proteins or peptides. Such coding sequences of the di-, or even multicistronic RNAs may be separated by at least one internal ribosome entry site (IRES) sequence. Thus, the at least one RNA according to the invention may further comprise one or more internal ribosome entry site (IRES) sequences or IRES-motifs, which may separate several open reading frames, especially if the RNA encodes for two or more peptides or proteins (bi- or multicistronic RNA). For example, the internal ribosome entry site sequence may be derived from EMCV (encephalomyocarditis virus) or from FMDV (Foot and mouth disease virus). Furthermore self-cleaving signal peptides may be used which induce the cleavage of the resulting polypeptide which comprises several proteins or peptides, e.g. a self-cleaving signal peptide sequence derived from F2A peptide from FMDV.

[0344] Combinations of Different Coding Sequences

[0345] In a preferred embodiment, the inventive composition comprises at least one, two, three, four, five, six, seven, eight, nine, ten or more RNAs, each comprising at least one, two, three, four, five, six, seven, eight, nine, ten or more coding regions encoding at least one or more cytokine as defined above and/or at least one or more chemokine as defined above, and/or at least one or more suicide gene product as defined above, and/or at least one or more immunogenic peptide or protein as defined above, and/or at least one or more apoptosis inducer as defined above, and/or at least one or more angiogenesis inhibitor as defined above, and/or at least one or more heat shock protein as defined above, and/or at least one or more tumor antigen as defined above, and/or at least one or more β-catenin inhibitor as defined above, and/or at least one or more STING pathway activator as defined above, and/or at least one or more checkpoint modulator as defined above, and/or at least one or more innate immune activator, and/or at least one or more antibody as defined above, and/or at least one dominant negative receptor and/or at least one or more decoy receptor, and/or at least one or more inhibitor of myeloid derived suppressor cells (MDSCs), and/or at least one or more IDO pathway inhibitor, and/or at least one or more protein or peptide that bind apoptosis inhibitors as defined above, or variants or fragments thereof.

[0346] Untranslated Regions (UTRs)

[0347] By a further embodiment the at least one RNA of the inventive composition preferably comprises at least one of the following structural elements: a 5′- and/or 3′-untranslated region element (UTR element), particularly a 5′-UTR element which comprises or consists of a nucleic acid sequence which is derived from the 5′-UTR of a TOP gene or from a fragment, homolog or a variant thereof, or a 5′- and/or 3′-UTR element which may be derivable from a gene that provides a stable mRNA or from a homolog, fragment or variant thereof; a histone stem-loop structure, preferably a histone stem-loop in its 3′ untranslated region; a 5′-CAP structure; a poly-A tail (poly(A) sequence); or a poly(C) sequence.

[0348] In a preferred embodiment the at least one RNA comprises at least one 5′- or 3′-UTR element. In this context an UTR element comprises or consists of a nucleic acid sequence which is derived from the 5′- or 3′-UTR of any naturally occurring gene or which is derived from a fragment, a homolog or a variant of the 5′- or 3′-UTR of a gene. Preferably the 5′- or 3′-UTR element used according to the present invention is heterologous to the coding region of the RNA of the inventive composition. Even if 5′- or 3′-UTR elements derived from naturally occurring genes are preferred, also synthetically engineered UTR elements may be used in the context of the present invention.

[0349] In a particularly preferred embodiment the at least one RNA comprises at least one 5′-untranslated region element (5′-UTR element) which comprises or consists of a nucleic acid sequence which is derived from the 5′-UTR of a TOP gene or which is derived from a fragment, homolog or variant of the 5′-UTR of a TOP gene.

[0350] It is particularly preferred that the 5′-UTR element does not comprise a TOP-motif or a 5′-TOP, as defined above.

[0351] In some embodiments, the nucleic acid sequence of the 5′-UTR element which is derived from a 5′-UTR of a TOP gene terminates at its 3′-end with a nucleotide located at position 1, 2, 3, 4, 5, 6, 7, 8, 9 or 10 upstream of the start codon (e.g. A(U/T)G) of the gene or mRNA it is derived from. Thus, the 5′-UTR element does not comprise any part of the protein coding region. Thus, preferably, the only protein coding part of mRNA of the inventive composition is provided by the coding region.

[0352] The nucleic acid sequence which is derived from the 5′-UTR of a TOP gene is preferably derived from a eukaryotic TOP gene, preferably a plant or animal TOP gene, more preferably a chordate TOP gene, even more preferably a vertebrate TOP gene, most preferably a mammalian TOP gene, such as a human TOP gene.

[0353] For example, the 5′-UTR element is preferably selected from 5′-UTR elements comprising or consisting of a nucleic acid sequence which is derived from a nucleic acid sequence selected from the group consisting of SEQ ID Nos. 1-1363, SEQ ID NO. 1395, SEQ ID NO. 1421 and SEQ ID NO. 1422 of the patent application WO2013/143700, whose disclosure is incorporated herein by reference, from the homologs of SEQ ID Nos. 1-1363, SEQ ID NO. 1395, SEQ ID NO. 1421 and SEQ ID NO. 1422 of the patent application WO2013/143700, from a variant thereof, or preferably from a corresponding RNA sequence. The term “homologs of SEQ ID Nos. 1-1363, SEQ ID NO. 1395, SEQ ID NO. 1421 and SEQ ID NO. 1422 of the patent application WO2013/143700” refers to sequences of other species than homo sapiens, which are homologous to the sequences according to SEQ ID Nos. 1-1363, SEQ ID NO. 1395, SEQ ID NO. 1421 and SEQ ID NO. 1422 of the patent application WO2013/143700.

[0354] In a preferred embodiment, the 5′-UTR element comprises or consists of a nucleic acid sequence which is derived from a nucleic acid sequence extending from nucleotide position 5 (i.e. the nucleotide that is located at position 5 in the sequence) to the nucleotide position immediately 5′ to the start codon (located at the 3′ end of the sequences), e.g. the nucleotide position immediately 5′ to the ATG sequence, of a nucleic acid sequence selected from SEQ ID Nos. 1-1363, SEQ ID NO. 1395, SEQ ID NO. 1421 and SEQ ID NO. 1422 of the patent application WO2013/143700, from the homologs of SEQ ID Nos. 1-1363, SEQ ID NO. 1395, SEQ ID NO. 1421 and SEQ ID NO. 1422 of the patent application WO2013/143700 from a variant thereof, or a corresponding RNA sequence. It is particularly preferred that the 5′-UTR element is derived from a nucleic acid sequence extending from the nucleotide position immediately 3′ to the 5′-TOP to the nucleotide position immediately 5′ to the start codon (located at the 3′ end of the sequences), e.g. the nucleotide position immediately 5′ to the ATG sequence, of a nucleic acid sequence selected from SEQ ID Nos. 1-1363, SEQ ID NO. 1395, SEQ ID NO. 1421 and SEQ ID NO. 1422 of the patent application WO2013/143700, from the homologs of SEQ ID Nos. 1-1363, SEQ ID NO. 1395, SEQ ID NO. 1421 and SEQ ID NO. 1422 of the patent application WO2013/143700, from a variant thereof, or a corresponding RNA sequence.

[0355] In a particularly preferred embodiment, the 5′-UTR element comprises or consists of a nucleic acid sequence which is derived from a 5′-UTR of a TOP gene encoding a ribosomal protein or from a variant of a 5′-UTR of a TOP gene encoding a ribosomal protein. For example, the 5′-UTR element comprises or consists of a nucleic acid sequence which is derived from a 5′-UTR of a nucleic acid sequence according to any of SEQ ID NOs: 67, 170, 193, 244, 259, 554, 650, 675, 700, 721, 913, 1016, 1063, 1120, 1138, and 1284-1360 of the patent application WO2013/143700, a corresponding RNA sequence, a homolog thereof, or a variant thereof as described herein, preferably lacking the 5′-TOP motif. As described above, the sequence extending from position 5 to the nucleotide immediately 5′ to the ATG (which is located at the 3′end of the sequences) corresponds to the 5′-UTR of said sequences.

[0356] Preferably, the 5′-UTR element comprises or consists of a nucleic acid sequence which is derived from a 5′-UTR of a TOP gene encoding a ribosomal large protein (RPL) or from a homolog or variant of a 5′-UTR of a TOP gene encoding a ribosomal large protein (RPL). For example, the 5′-UTR element comprises or consists of a nucleic acid sequence which is derived from a 5′-UTR of a nucleic acid sequence according to any of SEQ ID NOs: 67, 259, 1284-1318, 1344, 1346, 1348-1354, 1357, 1358, 1421 and 1422 of the patent application WO2013/143700, a corresponding RNA sequence, a homolog thereof, or a variant thereof as described herein, preferably lacking the 5′-TOP motif.

[0357] In a particularly preferred embodiment, the 5′-UTR element comprises or consists of a nucleic acid sequence which is derived from the 5′-UTR of a ribosomal protein Large 32 gene, preferably from a vertebrate ribosomal protein Large 32 (L32) gene, more preferably from a mammalian ribosomal protein Large 32 (L32) gene, most preferably from a human ribosomal protein Large 32 (L32) gene, or from a variant of the 5′-UTR of a ribosomal protein Large 32 gene, preferably from a vertebrate ribosomal protein Large 32 (L32) gene, more preferably from a mammalian ribosomal protein Large 32 (L32) gene, most preferably from a human ribosomal protein Large 32 (L32) gene, wherein preferably the 5′-UTR element does not comprise the 5′-TOP of said gene.

[0358] A preferred sequence for a 5′-UTR element corresponds to SEQ ID No. 1368 of the patent application WO2013/143700.

[0359] Accordingly, in a particularly preferred embodiment, the 5′-UTR element comprises or consists of a nucleic acid sequence which has an identity of at least about 20%, preferably of at least about 40%, preferably of at least about 50%, preferably of at least about 60%, preferably of at least about 70%, more preferably of at least about 80%, more preferably of at least about 90%, even more preferably of at least about 95%, even more preferably of at least about 99% to the nucleic acid sequence as mentioned above (according to SEQ ID NO. 10.051 (5′-UTR of human ribosomal protein Large 32 lacking the 5′ terminal oligopyrimidine tract: GGCGCTGCCTACGGAGGTGGCAGCCATCTCCTTCTCGGCATC; corresponding to SEQ ID No. 1368 of the patent application WO2013/143700)) or preferably to a corresponding RNA sequence, or wherein the at least one 5′UTR element comprises or consists of a fragment of a nucleic acid sequence which has an identity of at least about 40%, preferably of at least about 50%, preferably of at least about 60%, preferably of at least about 70%, more preferably of at least about 80%, more preferably of at least about 90%, even more preferably of at least about 95%, even more preferably of at least about 99% to the nucleic acid sequence according to SEQ ID NO. 10.052 or more preferably to a corresponding RNA sequence, wherein, preferably, the fragment is as described above, i.e. being a continuous stretch of nucleotides representing at least 20% etc. of the full-length 5′-UTR.

[0360] Preferably, the fragment exhibits a length of at least about 20 nucleotides or more, preferably of at least about 30 nucleotides or more, more preferably of at least about 40 nucleotides or more. Preferably, the fragment is a functional fragment as described herein.

[0361] In some embodiments, the mRNA of the inventive composition comprises a 5′-UTR element which comprises or consists of a nucleic acid sequence which is derived from the 5′-UTR of a vertebrate TOP gene, such as a mammalian, e.g. a human TOP gene, selected from RPSA, RPS2, RPS3, RPS3A, RPS4, RPS5, RPS6, RPS7, RPS8, RPS9, RPS10, RPS11, RPS12, RPS13, RPS14, RPS15, RPS15A, RPS16, RPS17, RPS18, RPS19, RPS20, RPS21, RPS23, RPS24, RPS25, RPS26, RPS27, RPS27A, RPS28, RPS29, RPS30, RPL3, RPL4, RPL5, RPL6, RPL7, RPL7A, RPL8, RPL9, RPL10, RPL10A, RPL11, RPL12, RPL13, RPL13A, RPL14, RPL15, RPL17, RPL18, RPL18A, RPL19, RPL21, RPL22, RPL23, RPL23A, RPL24, RPL26, RPL27, RPL27A, RPL28, RPL29, RPL30, RPL31, RPL32, RPL34, RPL35, RPL35A, RPL36, RPL36A, RPL37, RPL37A, RPL38, RPL39, RPL40, RPL41, RPLP0, RPLP1, RPLP2, RPLP3, RPLP0, RPLP1, RPLP2, EEF1A1, EEF1B2, EEF1D, EEF1G, EEF2, EIF3E, EIF3F, EIF3H, EIF2S3, EIF3C, EIF3K, EIF3EIP, EIF4A2, PABPC1, HNRNPA1, TPT1, TUBB1, UBA52, NPM1, ATP5G2, GNB2L1, NME2, UQCRB, or from a homolog or variant thereof, wherein preferably the 5′-UTR element does not comprise a TOP-motif or the 5′-TOP of said genes, and wherein optionally the 5′-UTR element starts at its 5′-end with a nucleotide located at position 1, 2, 3, 4, 5, 6, 7, 8, 9 or 10 downstream of the 5′ terminal oligopyrimidine tract (TOP) and wherein further optionally the 5′-UTR element which is derived from a 5′-UTR of a TOP gene terminates at its 3′-end with a nucleotide located at position 1, 2, 3, 4, 5, 6, 7, 8, 9 or 10 upstream of the start codon (A(U/T)G) of the gene it is derived from.

[0362] In further particularly preferred embodiments, the 5′-UTR element comprises or consists of a nucleic acid sequence which is derived from the 5′-UTR of a ribosomal protein Large 32 gene (RPL32), a ribosomal protein Large 35 gene (RPL35), a ribosomal protein Large 21 gene (RPL21), an ATP synthase, H+ transporting, mitochondrial F1 complex, alpha subunit 1, cardiac muscle (ATP5A1) gene, an hydroxysteroid (17-beta) dehydrogenase 4 gene (HSD17B4), an androgen-induced 1 gene (AIG1), cytochrome c oxidase subunit Vlc gene (COX6C), or a N-acylsphingosine amidohydrolase (acid ceramidase) 1 gene (ASAH1) or from a variant thereof, preferably from a vertebrate ribosomal protein Large 32 gene (RPL32), a vertebrate ribosomal protein Large 35 gene (RPL35), a vertebrate ribosomal protein Large 21 gene (RPL21), a vertebrate ATP synthase, H+ transporting, mitochondrial F1 complex, alpha subunit 1, cardiac muscle (ATP5A1) gene, a vertebrate hydroxysteroid (17-beta) dehydrogenase 4 gene (HSD17B4), a vertebrate androgen-induced 1 gene (AIG1), a vertebrate cytochrome c oxidase subunit Vlc gene (COX6C), or a vertebrate N-acylsphingosine amidohydrolase (acid ceramidase) 1 gene (ASAH1) or from a variant thereof, more preferably from a mammalian ribosomal protein Large 32 gene (RPL32), a ribosomal protein Large 35 gene (RPL35), a ribosomal protein Large 21 gene (RPL21), a mammalian ATP synthase, H+ transporting, mitochondrial F1 complex, alpha subunit 1, cardiac muscle (ATP5A1) gene, a mammalian hydroxysteroid (17-beta) dehydrogenase 4 gene (HSD17B4), a mammalian androgen-induced 1 gene (AIG1), a mammalian cyto-chrome c oxidase subunit Vlc gene (COX6C), or a mammalian N-acylsphingosine ami-dohydrolase (acid ceramidase) 1 gene (ASAH1) or from a variant thereof, most preferably from a human ribosomal protein Large 32 gene (RPL32), a human ribosomal protein Large 35 gene (RPL35), a human ribosomal protein Large 21 gene (RPL21), a human ATP synthase, H+ transporting, mitochondrial F1 complex, alpha subunit 1, cardiac muscle (ATP5A1) gene, a human hydroxysteroid (17-beta) dehydrogenase 4 gene (HSD17B4), a human androgen-induced 1 gene (AIG1), a human cytochrome c oxidase subunit Vlc gene (COX6C), or a human N-acylsphingosine amidohydrolase (acid ceramidase) 1 gene (ASAH1) or from a variant thereof, wherein preferably the 5′-UTR element does not comprise the 5′-TOP of said gene.

[0363] In this context particularly preferred are 5′-UTR elements comprising a nucleic acid sequence according to SEQ ID Nos. 10.051-10.054.

[0364] Accordingly, in a particularly preferred embodiment, the 5′-UTR element comprises or consists of a nucleic acid sequence which has an identity of at least about 40%, preferably of at least about 50%, preferably of at least about 60%, preferably of at least about 70%, more preferably of at least about 80%, more preferably of at least about 90%, even more preferably of at least about 95%, even more preferably of at least about 99% to the nucleic acid sequence according to SEQ ID No. 1368, or SEQ ID NOs 1412-1420 of the patent application WO2013/143700, or a corresponding RNA sequence, or wherein the at least one 5′-UTR element comprises or consists of a fragment of a nucleic acid sequence which has an identity of at least about 20%, preferably of at least about 40%, preferably of at least about 50%, preferably of at least about 60%, preferably of at least about 70%, more preferably of at least about 80%, more preferably of at least about 90%, even more preferably of at least about 95%, even more preferably of at least about 99% to the nucleic acid sequence according to SEQ ID No. 1368, or SEQ ID NOs 1412-1420 of the patent application WO2013/143700, wherein, preferably, the fragment is as described above, i.e. being a continuous stretch of nucleotides representing at least 20% etc. of the full-length 5′-UTR. Preferably, the fragment exhibits a length of at least about 20 nucleotides or more, preferably of at least about 30 nucleotides or more, more preferably of at least about 40 nucleotides or more. Preferably, the fragment is a functional fragment as described herein.

[0365] Accordingly, in a particularly preferred embodiment, the 5′-UTR element comprises or consists of a nucleic acid sequence which has an identity of at least about 20%, preferably of at least about 40%, preferably of at least about 50%, preferably of at least about 60%, preferably of at least about 70%, more preferably of at least about 80%, more preferably of at least about 90%, even more preferably of at least about 95%, even more preferably of at least about 99% to the nucleic acid sequence according to SEQ ID No. 10.053 (5′-UTR of ATP5A1 lacking the 5′ terminal oligopyrimidine tract: GCGGCTCGGCCATTTTGTCCCAGTCAGTCCGGAGGCTGCGGCTGCAGAAGTACCGCCTGCG-GAGTAACTGCAAAG; corresponding to SEQ ID No. 1414 of the patent application WO2013/143700 (5′-UTR of ATP5A1 lacking the 5′ terminal oligopyrimidine tract) or preferably to a corresponding RNA sequence, or wherein the at least one 5′UTR element comprises or consists of a fragment of a nucleic acid sequence which has an identity of at least about 40%, preferably of at least about 50%, preferably of at least about 60%, preferably of at least about 70%, more preferably of at least about 80%, more preferably of at least about 90%, even more preferably of at least about 95%, even more preferably of at least about 99% to the nucleic acid sequence according to SEQ ID NO. 26 (of the patent application WO2013/143700) or more preferably to a corresponding RNA sequence, wherein, preferably, the fragment is as described above, i.e. being a continuous stretch of nucleotides representing at least 20% etc. of the full-length 5′-UTR. Preferably, the fragment exhibits a length of at least about 20 nucleotides or more, preferably of at least about 30 nucleotides or more, more preferably of at least about 40 nucleotides or more. Preferably, the fragment is a functional fragment as described herein.

[0366] In a further preferred embodiment, the at least one RNA of the inventive composition further comprises at least one 3′-UTR element which comprises or consists of a nucleic acid sequence derived from the 3′-UTR of a chordate gene, preferably a vertebrate gene, more preferably a mammalian gene, most preferably a human gene, or from a variant of the 3′-UTR of a chordate gene, preferably a vertebrate gene, more preferably a mammalian gene, most preferably a human gene.

[0367] The term ‘3’-UTR element′ refers to a nucleic acid sequence which comprises or consists of a nucleic acid sequence that is derived from a 3′-UTR or from a variant of a 3′-UTR. A 3′-UTR element in the sense of the present invention may represent the 3′-UTR of an mRNA. Thus, in the sense of the present invention, preferably, a 3′-UTR element may be the 3′-UTR of an mRNA, preferably of an artificial mRNA, or it may be the transcription template for a 3′-UTR of an mRNA. Thus, a 3′-UTR element preferably is a nucleic acid sequence which corresponds to the 3′-UTR of an mRNA, preferably to the 3′-UTR of an artificial mRNA, such as an mRNA obtained by transcription of a genetically engineered vector construct. Preferably, the 3′-UTR element fulfils the function of a 3′-UTR or encodes a sequence which fulfils the function of a 3′-UTR.

[0368] Preferably, the inventive mRNA comprises a 3′-UTR element which may be derivable from a gene that relates to an mRNA with an enhanced half-life (that provides a stable mRNA), for example a 3′-UTR element as defined and described below. Preferably, the 3′-UTR element, is a nucleic acid sequence derived from a 3′-UTR of a gene, which preferably encodes a stable mRNA, or from a homolog, a fragment or a variant of said gene

[0369] In a particularly preferred embodiment, the 3′-UTR element comprises or consists of a nucleic acid sequence which is derived from a 3′-UTR of a gene selected from the group consisting of an albumin gene, an α-globin gene, a β-globin gene, a tyrosine hydroxylase gene, a lipoxygenase gene, and a collagen alpha gene, such as a collagen alpha 1(I) gene, or from a variant of a 3′-UTR of a gene selected from the group consisting of an albumin gene, an α-globin gene, a β-globin gene, a tyrosine hydroxylase gene, a lipoxygenase gene, and a collagen alpha gene, such as a collagen alpha 1(I) gene according to SEQ ID No. 1369-1390 of the patent application WO2013/143700 whose disclosure is incorporated herein by reference. In a particularly preferred embodiment, the 3′-UTR element comprises or consists of a nucleic acid sequence which is derived from a 3′-UTR of an albumin gene, preferably a vertebrate albumin gene, more preferably a mammalian albumin gene, most preferably a human albumin gene, most preferably a human albumin gene according to SEQ ID NO. 10063 (according SEQ ID No: 1369 of the patent application WO2013/143700). The mRNA sequence may comprise or consist of a nucleic acid sequence which is derived from the 3′-UTR of the human albumin gene according to GenBank Accession number NM_000477.5, or from a fragment or variant thereof.

[0370] In this context it is particularly preferred that the mRNA of the inventive composition comprises a 3′-UTR element comprising a corresponding RNA sequence derived from the nucleic acids according to SEQ ID No. 1369-1390 of the patent application WO2013/143700 or a fragment, homolog or variant thereof.

[0371] Most preferably the 3′-UTR element comprises the nucleic acid sequence derived from a fragment of the human albumin gene (albumin7 3′UTR) according to SEQ ID NO. 10065 (according to SEQ ID No: 1376 of the patent application WO2013/143700).

[0372] In this context it is particularly preferred that the 3′-UTR element of the at least one RNA of the inventive composition comprises or consists of a corresponding RNA sequence of the nucleic acid sequence according to SEQ ID NO. 10066.

[0373] In another particularly preferred embodiment, the 3′-UTR element comprises or consists of a nucleic acid sequence which is derived from a 3′-UTR of an α-globin gene, preferably a vertebrate α- or β-globin gene, more preferably a mammalian α- or β-globin gene, most preferably a human α- or β-globin gene according to SEQ ID NO. 10055 (corresponding to SEQ ID No. 1370 of the patent application WO2013/143700 (3′-UTR of Homo sapiens hemoglobin, alpha 1 (HBA1))), or according to SEQ ID NO. 10057 (corresponding to SEQ ID No. 1371 of the patent application WO2013/143700 (3′-UTR of Homo sapiens hemoglobin, alpha 2 (HBA2))), and/or according to SEQ ID NO. 10059 (corresponding to SEQ ID No. 1372 of the patent application WO2013/143700 (3′-UTR of Homo sapiens hemoglobin, beta (HBB)).

[0374] For example, the 3′-UTR element may comprise or consist of the center, α-complex-binding portion of the 3′-UTR of an α-globin gene, according to SEQ ID NO. 10061 (corresponding to SEQ ID No. 1393 of the patent application WO2013/143700).

[0375] In this context it is particularly preferred that the 3′-UTR element of the RNA of the inventive composition comprises or consists of a corresponding RNA sequence of the nucleic acid sequence according to SEQ ID NO. 10062, according to the above or a homolog, a fragment or variant thereof.

[0376] The term ‘a nucleic acid sequence which is derived from the 3′-UTR of a [ . . . ] gene’ preferably refers to a nucleic acid sequence which is based on the 3′-UTR sequence of a [ . . . ] gene or on a part thereof, such as on the 3′-UTR of an albumin gene, an α-globin gene, a β-globin gene, a tyrosine hydroxylase gene, a lipoxygenase gene, or a collagen alpha gene, such as a collagen alpha 1(I) gene, preferably of an albumin gene or on a part thereof. This term includes sequences corresponding to the entire 3′-UTR sequence, i.e. the full length 3′-UTR sequence of a gene, and sequences corresponding to a fragment of the 3′-UTR sequence of a gene, such as an albumin gene, α-globin gene, β-globin gene, tyrosine hydroxylase gene, lipoxygenase gene, or collagen alpha gene, such as a collagen alpha 1(I) gene, preferably of an albumin gene.

[0377] The term ‘a nucleic acid sequence which is derived from a variant of the 3′-UTR of a [ . . . ] gene’ preferably refers to a nucleic acid sequence which is based on a variant of the 3′-UTR sequence of a gene, such as on a variant of the 3′-UTR of an albumin gene, an α-globin gene, a β-globin gene, a tyrosine hydroxylase gene, a lipoxygenase gene, or a collagen alpha gene, such as a collagen alpha 1(I) gene, or on a part thereof as described above. This term includes sequences corresponding to the entire sequence of the variant of the 3′-UTR of a gene, i.e. the full length variant 3′-UTR sequence of a gene, and sequences corresponding to a fragment of the variant 3′-UTR sequence of a gene. A fragment in this context preferably consists of a continuous stretch of nucleotides corresponding to a continuous stretch of nucleotides in the full-length variant 3′-UTR, which represents at least 20%, preferably at least 30%, more preferably at least 40%, more preferably at least 50%, even more preferably at least 60%, even more preferably at least 70%, even more preferably at least 80%, and most preferably at least 90% of the full-length variant 3′-UTR. Such a fragment of a variant, in the sense of the present invention, is preferably a functional fragment of a variant as described herein.

[0378] Preferably, the at least one 5′-UTR element and the at least one 3′-UTR element act synergistically to increase protein production from the RNA of the inventive composition as described above.

[0379] Histone Stem Loop:

[0380] In a particularly preferred embodiment, the at least one RNA of the inventive composition comprises a histone stem-loop sequence/structure. Such histone stem-loop sequences are preferably selected from histone stem-loop sequences as disclosed in WO 2012/019780, whose disclosure is incorporated herewith by reference.

[0381] A histone stem-loop sequence, suitable to be used within the present invention, is preferably selected from at least one of the following formulae (I) or (II):

[0382] formula (I) (stem-loop sequence without stem bordering elements):

[chemical structure]

[0383] formula (II) (stem-loop sequence with stem bordering elements):

[chemical structure]

[0384] wherein:
[0385] stem1 or stem2 bordering elements N₁₋₆ is a consecutive sequence of 1 to 6, preferably of 2 to 6, more preferably of 2 to 5, even more preferably of 3 to 5, most preferably of 4 to 5 or 5 N, wherein each N is independently from another selected from a nucleotide selected from A, U, T, G and C, or a nucleotide analogue thereof;
[0386] stem1 [N₀₋₂GN₃₋₅] is reverse complementary or partially reverse complementary with element stem2, and is a consecutive sequence between of 5 to 7 nucleotides;

[0387] wherein N₀₋₂ is a consecutive sequence of 0 to 2, preferably of 0 to 1, more preferably of 1 N, wherein each N is independently from another selected from a nucleotide selected from A, U, T, G and C or a nucleotide analogue thereof;

[0388] wherein N₃₋₅ is a consecutive sequence of 3 to 5, preferably of 4 to 5, more preferably of 4 N, wherein each N is independently from another selected from a nucleotide selected from A, U, T, G and C or a nucleotide analogue thereof, and

[0389] wherein G is guanosine or an analogue thereof, and may be optionally replaced by a cytidine or an analogue thereof, provided that its complementary nucleotide cytidine in stem2 is replaced by guanosine;
[0390] loop sequence [N₀₋₄(U/T)N₀₋₄] is located between elements stem1 and stem2, and is a consecutive sequence of 3 to 5 nucleotides, more preferably of 4 nucleotides;

[0391] wherein each N₀₋₄ is independent from another a consecutive sequence of 0 to 4, preferably of 1 to 3, more preferably of 1 to 2 N, wherein each N is independently from another selected from a nucleotide selected from A, U, T, G and C or a nucleotide analogue thereof; and wherein U/T represents uridine, or optionally thymidine;
[0392] stem2 [N₃₋₅ CN₀₋₂] is reverse complementary or partially reverse complementary with element stem1, and is a consecutive sequence between of 5 to 7 nucleotides;

[0393] wherein N₃₋₅ is a consecutive sequence of 3 to 5, preferably of 4 to 5, more preferably of 4 N, wherein each N is independently from another selected from a nucleotide selected from A, U, T, G and C or a nucleotide analogue thereof;

[0394] wherein N₀₋₂ is a consecutive sequence of 0 to 2, preferably of 0 to 1, more preferably of 1 N, wherein each N is independently from another selected from a nucleotide selected from A, U, T, G or C or a nucleotide analogue thereof; and

[0395] wherein C is cytidine or an analogue thereof, and may be optionally replaced by a guanosine or an analogue thereof provided that its complementary nucleoside guanosine in stem1 is replaced by cytidine;

[0396] wherein stem1 and stem2 are capable of base pairing with each other forming a reverse complementary sequence, wherein base pairing may occur between stem1 and stem2, e.g. by Watson-Crick base pairing of nucleotides A and U/T or G and C or by non-Watson-Crick base pairing e.g. wobble base pairing, reverse Watson-Crick base pairing, Hoogsteen base pairing, reverse Hoogsteen base pairing or are capable of base pairing with each other forming a partially reverse complementary sequence, wherein an incomplete base pairing may occur between stem1 and stem2, on the basis that one or more bases in one stem do not have a complementary base in the reverse complementary sequence of the other stem.

[0397] According to a further preferred embodiment of the first inventive aspect, the inventive mRNA sequence may comprise at least one histone stem-loop sequence according to at least one of the following specific formulae (Ia) or (IIa):

[0398] formula (Ia) (stem-loop sequence without stem bordering elements):

[chemical structure]

[0399] formula (IIa) (stem-loop sequence with stem bordering elements):

[chemical structure]

[0400] wherein N, C, G, T and U are as defined above.

[0401] According to a further more particularly preferred embodiment of the first aspect, the at least one RNA may comprise at least one histone stem-loop sequence according to at least one of the following specific formulae (Ib) or (IIb):

[0402] formula (Ib) (stem-loop sequence without stem bordering elements):

[chemical structure]

[0403] formula (IIb) (stem-loop sequence with stem bordering elements):

[chemical structure]

[0404] wherein N, C, G, T and U are as defined above.

[0405] A particular preferred histone stem-loop sequence is the sequence according to SEQ ID No: 8.

[0406] More preferably the stem-loop sequence is the corresponding RNA sequence of the nucleic acid sequence according to SEQ ID NO: 9

[0407] Poly(A)

[0408] In a particularly preferred embodiment, the at least one RNA of the inventive composition comprises additionally to the coding region encoding at least one peptide or protein as described above or a fragment or variant thereof, a poly(A) sequence, also called poly-A tail, preferably at the 3′ terminus of the RNA. When present, such a poly(A) sequence comprises a sequence of about 25 to about 400 adenosine nucleotides, preferably a sequence of about 50 to about 400 adenosine nucleotides, more preferably a sequence of about 50 to about 300 adenosine nucleotides, even more preferably a sequence of about 50 to about 250 adenosine nucleotides, most preferably a sequence of about 60 to about 250 adenosine nucleotides. In this context the term “about” refers to a deviation of ±10% of the value(s) it is attached to. This poly(A) sequence is preferably located 3′ of the coding region comprised in the RNA according to the invention.

[0409] Preferably, the poly(A) sequence in at least one RNA of the composition is derived from a DNA template by RNA in vitro transcription. Alternatively, the poly(A) sequence may also be obtained in vitro by common methods of chemical-synthesis without being necessarily transcribed from a DNA-progenitor. Moreover, poly(A) sequences, or poly(A) tails may be generated by enzymatic polyadenylation of the at least one RNA using commercially available polyadenylation kits and corresponding protocols known in the art.

[0410] Alternatively, the at least one RNA of the inventive composition optionally comprises a polyadenylation signal, which is defined herein as a signal, which conveys polyadenylation to a (transcribed) RNA by specific protein factors (e.g. cleavage and polyadenylation specificity factor (CPSF), cleavage stimulation factor (CstF), cleavage factors I and II (CF I and CF II), poly(A) polymerase (PAP)). In this context, a consensus polyadenylation signal is preferred comprising the NN(U/T)ANA consensus sequence. In a particularly preferred aspect, the polyadenylation signal comprises one of the following sequences: AA(U/T)AAA or A(U/T)(U/T)AAA (wherein uridine is usually present in RNA and thymidine is usually present in DNA).

[0411] Poly(C)

[0412] According to a further preferred embodiment, the RNA of the inventive composition can be modified by a sequence of at least 10 cytosines, preferably at least 20 cytosines, more preferably at least 30 cytosines (so-called “poly(C) sequence”). Particularly, the RNA may contain a poly(C) sequence of typically about 10 to 200 cytosine nucleotides, preferably about 10 to 100 cytosine nucleotides, more preferably about 10 to 70 cytosine nucleotides or even more preferably about 20 to 50 or even 20 to 30 cytosine nucleotides. This poly(C) sequence is preferably located 3′ of the coding region, more preferably 3′ of an optional poly(A) sequence comprised in the RNA according to the present invention.

[0413] 5′-Cap

[0414] According to another preferred embodiment of the invention, a modified RNA molecule as defined herein, can be modified by the addition of a so-called “5′ cap” structure, which preferably stabilizes the RNA as described herein. A 5′-cap is an entity, typically a modified nucleotide entity, which generally “caps” the 5′-end of a mature mRNA. A 5′-cap may typically be formed by a modified nucleotide, particularly by a derivative of a guanine nucleotide. Preferably, the 5′-cap is linked to the 5′-terminus via a 5′-5′-triphosphate linkage. A 5′-cap may be methylated, e.g. m7GpppN, wherein N is the terminal 5′ nucleotide of the nucleic acid carrying the 5′-cap, typically the 5′-end of an mRNA. m7GpppN is the 5′-cap structure, which naturally occurs in mRNA transcribed by polymerase II and is therefore preferably not considered as modification comprised in a modified RNA in this context. Accordingly, a modified RNA of the present invention may comprise a m7GpppN as 5′-cap, but additionally the modified RNA typically comprises at least one further modification as defined herein.

[0415] Further examples of 5′cap structures include glyceryl, inverted deoxy abasic residue (moiety), 4′,5′ methylene nucleotide, 1-(beta-D-erythrofuranosyl) nucleotide, 4′-thio nucleotide, carbocyclic nucleotide, 1,5-anhydrohexitol nucleotide, L-nucleotides, alpha-nucleotide, modified base nucleotide, threo-pentofuranosyl nucleotide, acyclic 3′,4′-seco nucleotide, acyclic 3,4-dihydroxybutyl nucleotide, acyclic 3,5 dihydroxypentyl nucleotide, 3′-3′-inverted nucleotide moiety, 3′-3′-inverted abasic moiety, 3′-2′-inverted nucleotide moiety, 3′-2′-inverted abasic moiety, 1,4-butanediol phosphate, 3′-phosphoramidate, hexylphosphate, aminohexyl phosphate, 3′-phosphate, 3′phosphorothioate, phosphorodithioate, or bridging or non-bridging methylphosphonate moiety. These modified 5′-cap structures are regarded as at least one modification in this context.

[0416] Particularly preferred modified 5′-cap structures are cap1 (methylation of the ribose of the adjacent nucleotide of m7G), cap2 (additional methylation of the ribose of the 2nd nucleotide downstream of the m7G), cap3 (additional methylation of the ribose of the 3rd nucleotide downstream of the m7G), cap4 (methylation of the ribose of the 4th nucleotide downstream of the m7G), ARCA (anti-reverse cap analogue, modified ARCA (e.g. phosphothioate modified ARCA), inosine, N1-methyl-guanosine, 2′-fluoro-guanosine, 7-deaza-guanosine, 8-oxo-guanosine, 2-amino-guanosine, LNA-guanosine, and 2-azido-guanosine.

[0417] Secretory Signal Sequence:

[0418] According to another particularly preferred embodiment, the at least one RNA of the composition may additionally or alternatively encode a secretory signal peptide. Such secretory signal sequences are peptide stretches, which typically exhibit a length of about 15 to 30 amino acids and are preferably located at the N-terminus of the encoded peptide, without being limited thereto. Secretory signal sequences as defined herein preferably allow the transport of the encoded peptide or protein as encoded by the at least one coding sequence of the at least one RNA of the composition into a defined cellular compartiment, preferably the cell surface, the endoplasmic reticulum (ER) or the endosomal-lysosomal compartiment. Examples of secretory signal sequences as defined herein include, without being limited thereto, secretory signal sequences of classical or non-classical MHC-molecules (e.g. signal sequences of MHC I and II molecules, e.g. of the MHC class I molecule HLA-A*0201), secretory signal sequences of cytokines or immunoglobulines as defined herein, secretory signal sequences of the invariant chain of immunoglobulines or antibodies as defined herein, signal sequences of Lamp1, Tapasin, Erp57, Calretikulin, Calnexin, and further membrane associated proteins or of proteins associated with the endoplasmic reticulum (ER) or the endosomal-lysosomal compartiment.

[0419] Any of the above modifications regarding the coding sequence and/or regarding the RNA as defined above may be applied to the coding sequence and/or the RNA of the composition of the present invention, and further to any RNA as used in the context of the present invention and may be, if suitable or necessary, be combined with each other in any combination, provided, these combinations of modifications do not interfere with each other in the respective at least one RNA. A person skilled in the art will be able to take his choice accordingly.

[0420] Production of mRNA and RNA

[0421] The RNA may be prepared using any method known in the art, including synthetic methods (chemical synthesis of RNA) such as e.g. solid phase synthesis, as well as in vitro methods, such as RNA in vitro transcription reactions.

[0422] Combinations:

[0423] According to the present invention it is particularly preferred to combine RNA encoded peptides or proteins. In this context particularly preferred are the following combinations:
[0424] RNA, preferably mRNA coding for at least one cytokine+RNA, preferably mRNA coding for at least one chemokine
[0425] RNA, preferably mRNA coding for at least one cytokine+RNA, preferably mRNA coding for at at least one suicide gene product
[0426] RNA, preferably mRNA coding for at least one cytokine+RNA, preferably mRNA coding for at least one immunogenic protein or peptide
[0427] RNA, preferably mRNA coding for at least one cytokine+RNA, preferably mRNA coding for at least one apoptosis inducer
[0428] RNA, preferably mRNA coding for at least one cytokine+RNA, preferably mRNA coding for at least one angiogenesis inhibitor
[0429] RNA, preferably mRNA coding for at least one cytokine+RNA, preferably mRNA coding for at least one heat shock protein
[0430] RNA, preferably mRNA coding for at least one cytokine+RNA, preferably mRNA coding for at least one tumor antigen
[0431] RNA, preferably mRNA coding for at least one cytokine+RNA, preferably mRNA coding for at least one β-catenin inhibitor
[0432] RNA, preferably mRNA coding for at least one cytokine+RNA, preferably mRNA coding for at least one activator of the STING pathway
[0433] RNA, preferably mRNA coding for at least one cytokine+RNA, preferably mRNA coding for at least one checkpoint modulator
[0434] RNA, preferably mRNA coding for at least one cytokine+RNA, preferably mRNA coding for at least one innate immune activator
[0435] RNA, preferably mRNA coding for at least one cytokine+RNA, preferably mRNA coding for at least one antibody
[0436] RNA, preferably mRNA coding for at least one cytokine+RNA, preferably mRNA coding for at least one decoy receptor
[0437] RNA, preferably mRNA coding for at least one cytokine+RNA, preferably mRNA coding for at least one inhibitor of myeloid derived suppressor cells (MDSCs)
[0438] RNA, preferably mRNA coding for at least one cytokine+RNA, preferably mRNA coding for at least one IDO pathway inhibitor
[0439] RNA, preferably mRNA coding for at least one cytokine+RNA, preferably mRNA coding for at least one protein or peptide that bind inhibitors of apoptosis.

[0440] Furthermore, particularly preferred are the following embodiments:
[0441] RNA, preferably mRNA coding for IL-2 and/or RNA, preferably mRNA coding for IL-12+mRNA coding for thymidine kinase (approach: cytokines+suicide gene product)
[0442] RNA, preferably mRNA coding for IL-2 and/or RNA, preferably mRNA coding for IL-12
[0443] RNA, preferably mRNA coding for IL-12 and/or RNA, preferably mRNA coding for CD40L
[0444] RNA, preferably mRNA coding for IL-15 and/or RNA, preferably mRNA coding for IL-12
[0445] RNA, preferably mRNA coding for IL-2+RNA, preferably mRNA coding for Influenza NP protein
[0446] RNA, preferably mRNA coding for IL-2 and/or RNA, preferably mRNA coding for IL-12+RNA, preferably mRNA coding for cytochrome c/caspase 3 (cytokines+apoptosis induction)
[0447] RNA, preferably mRNA coding for CD40L+RNA, preferably mRNA coding for IL-12+RNA, preferably mRNA coding for ΔRIGI

[0448] It has to be understood that the RNA molecules of the inventive composition may code for one or more different peptides or proteins (e.g. cytokines, chemokines, suicide gene products, immunogenic proteins or peptides, apoptosis inducers, angiogenesis inhibitors, heat shock proteins, tumor antigens, β-catenin inhibitors, activators of the STING pathway, checkpoint modulators, innate immune activators, antibodies, dominant negative receptors and decoy receptors, inhibitors of myeloid derived suppressor cells (MDSCs), IDO pathway inhibitors, and proteins or peptides that bind inhibitors of apoptosis. as described above. Several RNA sequences may be combined in one inventive RNA containing composition. Moreover it is possible that the RNA sequence or sequences of the inventive composition code for variants or fragments of the wild type protein sequence or for one or more parts or fragments of the wild type protein sequence or variants thereof.

[0449] Non Coding RNA

[0450] According to the invention the at least one RNA of the inventive RNA containing composition may comprise at least one non-coding RNA, which is preferably selected from the group consisting of small interfering RNA (siRNA), antisense RNA (asRNA), circular RNA (circRNA), ribozymes, aptamers, riboswitches, immunostimulating/immunostimulatory RNA RNA, transfer RNA (tRNA), ribosomal RNA (rRNA), small nuclear RNA (snRNA), small nucleolar RNA (snoRNA), microRNA (miRNA), and Piwi-interacting RNA (piRNA).

[0451] Immunostimulatory/Immunostimulating RNA (isRNA):

[0452] Likewise, according to a further alternative, the at least one RNA of the inventive RNA containing composition is an immunostimulatory/immunostimulating RNA, which preferably elicits an innate immune response. Such an immunostimulatory RNA may be any (double-stranded or single-stranded) RNA, e.g. a coding RNA, as defined herein. In a preferred embodiment, the immunostimulatory RNA is a non-coding RNA. Preferably, the immunostimulatory RNA may be a single-stranded, a double-stranded or a partially double-stranded RNA, more preferably a single-stranded RNA, and/or a circular or linear RNA, more preferably a linear RNA. More preferably, the immunostimulatory RNA may be a (linear) single-stranded RNA. Even more preferably, the immunostimulatory RNA may be a (long) (linear) single-stranded) non-coding RNA. In this context it is particular preferred that the isRNA carries a triphosphate at its 5′-end which is the case for in vitro transcribed RNA. An immunostimulatory RNA may also occur as a short RNA oligonucleotide as defined herein.

[0453] An immunostimulatory RNA as used herein may furthermore be selected from any class of RNA molecules, found in nature or being prepared synthetically, and which can induce an innate immune response and may support an adaptive immune response induced by an antigen. In this context, an immune response may occur in various ways. A substantial factor for a suitable (adaptive) immune response is the stimulation of different T cell sub-populations. T-lymphocytes are typically divided into two sub-populations, the T-helper 1 (Th1) cells and the T-helper 2 (Th2) cells, with which the immune system is capable of destroying intracellular (Th1) and extracellular (Th2) pathogens (e.g. antigens). The two Th cell populations differ in the pattern of the effector proteins (cytokines) produced by them. Thus, Th1 cells assist the cellular immune response by activation of macrophages and cytotoxic T cells. Th2 cells, on the other hand, promote the humoral immune response by stimulation of B-cells for conversion into plasma cells and by formation of antibodies (e.g. against antigens). The Th1/Th2 ratio is therefore of great importance in the induction and maintenance of an adaptive immune response. In connection with the present invention, the Th1/Th2 ratio of the (adaptive) immune response is preferably shifted in the direction towards the cellular response (Th1 response) and a cellular immune response is thereby induced. According to one example, the innate immune system which may support an adaptive immune response may be activated by ligands of Toll-like receptors (TLRs). TLRs are a family of highly conserved pattern recognition receptor (PRR) polypeptides that recognize pathogen-associated molecular patterns (PAMPs) and play a critical role in innate immunity in mammals. Currently at least thirteen family members, designated TLR1-TLR13 (Toll-like receptors: TLR1, TLR2, TLR3, TLR4, TLR5, TLR6, TLR7, TLR8, TLR9, TLR10, TLR11, TLR12 or TLR13), have been identified. Furthermore, a number of specific TLR ligands have been identified. Furthermore, it has been reported that ligands for certain TLRs include certain nucleic acid molecules and that certain types of RNA are immunostimulatory in a sequence-independent or sequence-dependent manner, wherein these various immunostimulatory RNAs may e.g. stimulate TLR3, TLR7, or TLR8, or intracellular receptors such as RIG-I, MDA-5, etc.

[0454] Preferably, an immunostimulatory nucleic acid, preferably an immunostimulatory RNA (isRNA), as used herein, may comprise any RNA sequence known to be immunostimulatory, including, without being limited thereto, RNA sequences representing and/or encoding ligands of TLRs, preferably selected from human family members TLR1-TLR10 or murine family members TLR1-TLR13, more preferably selected from (human) family members TLR1-TLR10, even more preferably from TLR7 and TLR8, ligands for intracellular receptors for RNA (such as RIG-I or MDA-5, etc.) (see e.g. Meylan, E., Tschopp, J. (2006). Toll-like receptors and RNA helicases: two parallel ways to trigger antiviral responses. Mol. Cell 22, 561-569), or any other immunostimulatory RNA sequence. Furthermore, (classes of) immunostimulatory RNA molecules, used as a further compound of the inventive vaccine, may include any other RNA capable of eliciting an immune response. Without being limited thereto, such an immunostimulatory RNA may include ribosomal RNA (rRNA), transfer RNA (tRNA), messenger RNA (mRNA), and viral RNA (vRNA). Such an immunostimulatory RNA may comprise a length of 1000 to 5000, of 500 to 5000, of 5 to 5000, or of 5 to 1000, 5 to 500, 5 to 250, of 5 to 100, of 5 to 50 or of 5 to 30 nucleotides.

[0455] An immunostimulatory RNA as used herein may furthermore be selected from any class of RNA molecules, found in nature or being prepared synthetically, and which can induce an innate immune response and may support an adaptive immune response induced by an antigen. In this context, an immune response may occur in various ways. A substantial factor for a suitable (adaptive) immune response is the stimulation of different T-cell sub-populations. T-lymphocytes are typically divided into two sub-populations, the T-helper 1 (Th1) cells and the T-helper 2 (Th2) cells, with which the immune system is capable of destroying intracellular (Th1) and extracellular (Th2) pathogens (e.g. antigens). The two Th cell populations differ in the pattern of the effector proteins (cytokines) produced by them. Thus, Th1 cells assist the cellular immune response by activation of macrophages and cytotoxic T-cells. Th2 cells, on the other hand, promote the humoral immune response by stimulation of B-cells for conversion into plasma cells and by formation of antibodies (e.g. against antigens). The Th1/Th2 ratio is therefore of great importance in the induction and maintenance of an adaptive immune response. In connection with the present invention, the Th1/Th2 ratio of the (adaptive) immune response is preferably shifted in the direction towards the cellular response (Th1 response) and a cellular immune response is thereby induced. According to one example, the innate immune system which may support an adaptive immune response, may be activated by ligands of Toll-like receptors (TLRs). TLRs are a family of highly conserved pattern recognition receptor (PRR) polypeptides that recognize pathogen-associated molecular patterns (PAMPs) and play a critical role in innate immunity in mammals. Currently at least thirteen family members, designated TLR1-TLR13 (Toll-like receptors: TLR1, TLR2, TLR3, TLR4, TLR5, TLR6, TLR7, TLR8, TLR9, TLR10, TLR11, TLR12 or TLR13), have been identified. Furthermore, a number of specific TLR ligands have been identified. It was e.g. found that unmethylated bacterial DNA and synthetic analogs thereof (CpG DNA) are ligands for TLR9 (Hemmi H et al. (2000) Nature 408:740-5; Bauer S et al. (2001) Proc Natl Acad Sci USA 98, 9237-42). Furthermore, it has been reported that ligands for certain TLRs include certain nucleic acid molecules and that certain types of RNA are immunostimulatory in a sequence-independent or sequence-dependent manner, wherein these various immunostimulatory RNAs may e.g. stimulate TLR3, TLR7, or TLR8, or intracellular receptors such as RIG-I, MDA-5, etc. E.g. Lipford et al. determined certain G,U-containing oligoribonucleotides as immunostimulatory by acting via TLR7 and TLR8 (see WO 03/086280). The immunostimulatory G,U-containing oligoribonucleotides described by Lipford et al. were believed to be derivable from RNA sources including ribosomal RNA, transfer RNA, messenger RNA, and viral RNA.

[0456] According to a particularly preferred embodiment, such immunostimulatory nucleic acid sequences is preferably RNA preferably consisting of or comprising a nucleic acid of the following formula (III) or (IV):

GIXmGn, (formula (III))

[0457] wherein:

[0458] G is guanosine, uracil or an analogue of guanosine or uracil;

[0459] X is guanosine, uracil, adenosine, thymidine, cytosine or an analogue of the above-mentioned nucleotides;

[0460] I is an integer from 1 to 40,

[0461] wherein

[0462] when I=1 G is guanosine or an analogue thereof,

[0463] when I>1 at least 50% of the nucleotides are guanosine or an analogue thereof;

[0464] m is an integer and is at least 3;

[0465] wherein

[0466] when m=3 X is uracil or an analogue thereof,
[0467] when m>3 at least 3 successive uracils or analogues of uracil occur;

[0468] n is an integer from 1 to 40,

[0469] wherein

[0470] when n=1 G is guanosine or an analogue thereof,

[0471] when n>1 at least 50% of the nucleotides are guanosine or an analogue thereof.

CIXmCn, (formula (IV))

[0472] wherein:

[0473] C is cytosine, uracil or an analogue of cytosine or uracil;

[0474] X is guanosine, uracil, adenosine, thymidine, cytosine or an analogue of the above-mentioned nucleotides;

[0475] I is an integer from 1 to 40,

[0476] wherein

[0477] when I=1 C is cytosine or an analogue thereof,

[0478] when I>1 at least 50% of the nucleotides are cytosine or an analogue thereof;

[0479] m is an integer and is at least 3;

[0480] wherein

[0481] when m=3 X is uracil or an analogue thereof,

[0482] when m>3 at least 3 successive uracils or analogues of uracil occur;

[0483] n is an integer from 1 to 40,

[0484] wherein

[0485] when n=1 C is cytosine or an analogue thereof,

[0486] when n>1 at least 50% of the nucleotides are cytosine or an analogue thereof.

[0487] The nucleic acids of formula (II) or (III), which may be used as immunostimulatory RNA may be relatively short nucleic acid molecules with a typical length of approximately from 5 to 100 (but may also be longer than 100 nucleotides for specific embodiments, e.g. up to 200 nucleotides), from 5 to 90 or from 5 to 80 nucleotides, preferably a length of approximately from 5 to 70, more preferably a length of approximately from 8 to 60 and, more preferably a length of approximately from 15 to 60 nucleotides, more preferably from 20 to 60, most preferably from 30 to 60 nucleotides. If the nucleic acid of the inventive nucleic acid cargo complex has a maximum length of e.g. 100 nucleotides, m will typically be <=98. The number of nucleotides G in the nucleic acid of formula (III) is determined by I or n. I and n, independently of one another, are each an integer from 1 to 40, wherein when I or n=1 G is guanosine or an analogue thereof, and when I or n>1 at least 50% of the nucleotides are guanosine or an analogue thereof. For example, without implying any limitation, when I or n=4 GI or Gn can be, for example, a GUGU, GGUU, UGUG, UUGG, GUUG, GGGU, GGUG, GUGG, UGGG or GGGG, etc.; when I or n=5 GI or Gn can be, for example, a GGGUU, GGUGU, GUGGU, UGGGU, UGGUG, UGUGG, UUGGG, GUGUG, GGGGU, GGGUG, GGUGG, GUGGG, UGGGG, or GGGGG, etc.; etc. A nucleotide adjacent to Xm in the nucleic acid of formula (III) according to the invention is preferably not a uracil. Similarly, the number of nucleotides C in the nucleic acid of formula (IV) according to the invention is determined by I or n. I and n, independently of one another, are each an integer from 1 to 40, wherein when I or n=1 C is cytosine or an analogue thereof, and when I or n>1 at least 50% of the nucleotides are cytosine or an analogue thereof. For example, without implying any limitation, when I or n=4, CI or Cn can be, for example, a CUCU, CCUU, UCUC, UUCC, CUUC, CCCU, CCUC, CUCC, UCCC or CCCC, etc.; when I or n=5 CI or Cn can be, for example, a CCCUU, CCUCU, CUCCU, UCCCU, UCCUC, UCUCC, UUCCC, CUCUC, CCCCU, CCCUC, CCUCC, CUCCC, UCCCC, or CCCCC, etc.; etc. A nucleotide adjacent to Xm in the nucleic acid of formula (III) according to the invention is preferably not a uracil. Preferably, for formula (II), when I or n>1, at least 60%, 70%, 80%, 90% or even 100% of the nucleotides are guanosine or an analogue thereof, as defined above. The remaining nucleotides to 100% (when guanosine constitutes less than 100% of the nucleotides) in the flanking sequences G1 and/or Gn are uracil or an analogue thereof, as defined hereinbefore. Also preferably, I and n, independently of one another, are each an integer from 2 to 30, more preferably an integer from 2 to 20 and yet more preferably an integer from 2 to 15. The lower limit of I or n can be varied if necessary and is at least 1, preferably at least 2, more preferably at least 3, 4, 5, 6, 7, 8, 9 or 10. This definition applies correspondingly to formula (III).

[0488] According to a particularly preferred embodiment, a nucleic acid according to any of formulas (III) or (IV) above, which may be used as immunostimulatory RNA, may be selected from a sequence consisting or comprising any of the following sequences SEQ ID NOs 298-381.

[0489] or from a sequence having at least 60%, 70%, 80%, 90%, or even 95% sequence identity with any of these sequences

[0490] According to a further particularly preferred embodiment, such immunostimulatory nucleic acid sequences particularly isRNA consist of or comprise a nucleic acid of formula (V) or (VI):

(NuGIXmGnNv)a, (formula (V))

[0491] wherein:

[0492] G is guanosine (guanine), uridine (uracil) or an analogue of guanosine (guanine) or uridine (uracil), preferably guanosine (guanine) or an analogue thereof;

[0493] X is guanosine (guanine), uridine (uracil), adenosine (adenine), thymidine (thymine), cytidine (cytosine), or an analogue of these nucleotides (nucleosides), preferably uridine (uracil) or an analogue thereof;

[0494] N is a nucleic acid sequence having a length of about 4 to 50, preferably of about 4 to 40, more preferably of about 4 to 30 or 4 to 20 nucleic acids, each N independently being selected from guanosine (guanine), uridine (uracil), adenosine (adenine), thymidine (thymine), cytidine (cytosine) or an analogue of these nucleotides (nucleosides);

[0495] a is an integer from 1 to 20, preferably from 1 to 15, most preferably from 1 to 10;

[0496] I is an integer from 1 to 40,

[0497] wherein when I=1, G is guanosine (guanine) or an analogue thereof,
[0498] when I>1, at least 50% of these nucleotides (nucleosides) are guanosine (guanine) or an analogue thereof;

[0499] m is an integer and is at least 3;

[0500] wherein when m=3, X is uridine (uracil) or an analogue thereof, and
[0501] when m>3, at least 3 successive uridines (uracils) or analogues of uridine (uracil) occur;

[0502] n is an integer from 1 to 40,

[0503] wherein when n=1, G is guanosine (guanine) or an analogue thereof,
[0504] when n>1, at least 50% of these nucleotides (nucleosides) are guanosine (guanine) or an analogue thereof;

[0505] u,v may be independently from each other an integer from 0 to 50,

[0506] preferably wherein when u=0, v≧1, or
[0507] when v=0, u 1;

[0508] wherein the nucleic acid molecule of formula (IV) has a length of at least 50 nucleotides, preferably of at least 100 nucleotides, more preferably of at least 150 nucleotides, even more preferably of at least 200 nucleotides and most preferably of at least 250 nucleotides.

(NuCIXmCnNv)a, (formula (VI))

[0509] wherein:

[0510] C is cytidine (cytosine), uridine (uracil) or an analogue of cytidine (cytosine) or uridine (uracil), preferably cytidine (cytosine) or an analogue thereof;

[0511] X is guanosine (guanine), uridine (uracil), adenosine (adenine), thymidine (thymine), cytidine (cytosine) or an analogue of the above-mentioned nucleotides (nucleosides), preferably uridine (uracil) or an analogue thereof;

[0512] N is each a nucleic acid sequence having independent from each other a length of about 4 to 50, preferably of about 4 to 40, more preferably of about 4 to 30 or 4 to 20 nucleic acids, each N independently being selected from guanosine (guanine), uridine (uracil), adenosine (adenine), thymidine (thymine), cytidine (cytosine) or an analogue of these nucleotides (nucleosides);

[0513] a is an integer from 1 to 20, preferably from 1 to 15, most preferably from 1 to 10;

[0514] I is an integer from 1 to 40,

[0515] wherein when I=1, C is cytidine (cytosine) or an analogue thereof,
[0516] when I>1, at least 50% of these nucleotides (nucleosides) are cytidine (cytosine) or an analogue thereof;

[0517] m is an integer and is at least 3;

[0518] wherein when m=3, X is uridine (uracil) or an analogue thereof,
[0519] when m>3, at least 3 successive uridines (uracils) or analogues of uridine (uracil) occur;

[0520] n is an integer from 1 to 40,

[0521] wherein when n=1, C is cytidine (cytosine) or an analogue thereof,
[0522] when n>1, at least 50% of these nucleotides (nucleosides) are cytidine (cytosine) or an analogue thereof.

[0523] u, v may be independently from each other an integer from 0 to 50,

[0524] preferably wherein when u=0, v≧1, or
[0525] when v=0, u≧1;

[0526] wherein the nucleic acid molecule of formula (V) according to the invention has a length of at least 50 nucleotides, preferably of at least 100 nucleotides, more preferably of at least 150 nucleotides, even more preferably of at least 200 nucleotides and most preferably of at least 250 nucleotides.

[0527] For formula (VI), any of the definitions given above for elements N (i.e. Nu and Nv) and X (Xm), particularly the core structure as defined above, as well as for integers a, I, m, n, u and v, similarly apply to elements of formula (VI) correspondingly, wherein in formula (VI) the core structure is defined by CIXmCn. The definition of bordering elements Nu and Nv is identical to the definitions given above for Nu and Nv.

[0528] According to a very particularly preferred embodiment, the nucleic acid molecule, preferably immunostimulating RNA according to formula (V) may be selected from e.g. any of the sequences according to SEQ ID NOs 382-395 or from a sequence having at least 60%, 70%, 80%, 90%, or even 95% sequence identity with any of these sequences.

[0529] In this context particularly preferred are immunostimulating RNAs according to SEQ ID NOs 5, 394 and 10072.

[0530] R2025:

(SEQ ID NO: 5 and 394)
GGGAGAAAGCUCAAGCUUAUCCAAGUAGGCUGGUCACCUGUACAACGUAG
CCGGUAUUUUUUUUUUUUUUUUUUUUUUGACCGUCUCAAGGUCCAAGUUA
GUCUGCCUAUAAAGGUGCGGAUCCACAGCUGAUGAAAGACUUGUGCGGUA
CGGUUAAUCUCCCCUUUUUUUUUUUUUUUUUUUUUAGUAAAUGCGUCUAC
UGAAUCCAGCGAUGAUGCUGGCCCAGAUCUUCGACCACAAGUGCAUAUAG
UAGUCAUCGAGGGUCGCCUUUUUUUUUUUUUUUUUUUUUUUGGCCCAGUU
CUGAGACUUCGCUAGAGACUACAGUUACAGCUGCAGUAGUAACCACUGCG
GCUAUUGCAGGAAAUCCCGUUCAGGUUUUUUUUUUUUUUUUUUUUUCCGC
UCACUAUGAUUAAGAACCAGGUGGAGUGUCACUGCUCUCGAGGUCUCACG
AGAGCGCUCGAUACAGUCCUUGGAAGAAUCUUUUUUUUUUUUUUUUUUUU
UUGUGCGACGAUCACAGAGAACUUCUAUUCAUGCAGGUCUGCUCUAG

[0531] R3630:

(SEQ ID NO. 10072)
GGGAGAAAGCUCAAGCUUAUCCAAGUAGGCUGGUCACCUGUACAACGUAG
CCGGUAUUUUUUUUUUUUUUUUUUUUUUGACCGUCUCAAGGUCCAAGUUA
GUCUGCCUAUAAAGGUGCGGAUCCACAGCUGAUGAAAGACUUGUGCGGUA
CGGUUAAUCUCCCCUUUUUUUUUUUUUUUUUUUUUAGUAAAUGCGUCUAC
UGAAUCCAGCGAUGAUGCUGGCCCAGAUCUUCGACCACAAGUGCAUAUAG
UAGUCAUCGAGGGUCGCCUUUUUUUUUUUUUUUUUUUUUUUGGCCCAGUU
CUGAGACUUCGCUAGAGACUACAGUUACAGCUGCAGUAGUAACCACUGCG
GCUAUUGCAGGAAAUCCCGUUCAGGUUUUUUUUUUUUUUUUUUUUUCCGC
UCACUAUGAUUAAGAACCAGGUGGAGUGUCACUGCUCUCGAGGUCUCACG
AGAGCGCUCGAUACAGUGCUUGGAAGAAUCUUUUUUUUUUUUUUUUUUUU
UUGUGCGACGAUCACAGAGAACUUCUAUUCAUGCAGGUCUGCUCUAG.

[0532] According to another very particularly preferred embodiment, the nucleic acid molecule according to formula (VI) may be selected from e.g. any of the sequences according to SEQ ID NO 396 or 397, or from a sequence having at least 60%, 70%, 80%, 90%, or even 95% sequence identity with any of these sequences.

[0533] All modifications disclosed in the context of coding RNA may also be applied in the context of non-coding RNA if applicable.

[0534] Combination of Coding and Non-Coding RNA

[0535] In particularly preferred embodiments the inventive RNA containing composition comprises at least one RNA encoding at least one peptide or protein and at least one non-coding RNA as defined above, preferably at least one immunostimulating RNA.

[0536] Particularly preferred are the following embodiments:
[0537] Immostimulating RNA preferably according to SEQ ID Nos 5, 394, or 10072+RNA, preferably mRNA coding for at least one cytokine, preferably IL-2, IL-12, IL-15 or CD40L
[0538] Immostimulating RNA preferably according to SEQ ID Nos 5, 394, or 10072+RNA, preferably mRNA coding for at least one chemokine
[0539] Immostimulating RNA preferably according to SEQ ID Nos 5, 394, or 10072+RNA, preferably mRNA coding for at least one suicide gene product, preferably Herpes simplex virus thymidine kinase
[0540] Immostimulating RNA preferably according to SEQ ID Nos 5, 394, or 10072+RNA, preferably mRNA coding for at least one immunogenic protein or peptide, preferably Influenza NP protein
[0541] Immostimulating RNA preferably according to SEQ ID Nos 5, 394, or 10072+RNA, preferably mRNA coding for at least one apoptosis inducer, preferably cytochrome c or caspase 3
[0542] Immostimulating RNA preferably according to SEQ ID Nos 5, 394, or 10072+RNA, preferably mRNA coding for at least one angiogenesis inducer
[0543] Immostimulating RNA preferably according to SEQ ID Nos 5, 394, or 10072+RNA, preferably mRNA coding for at least one heat shock protein
[0544] Immostimulating RNA preferably according to SEQ ID Nos 5, 394, or 10072+RNA, preferably mRNA coding for at least one tumor antigen
[0545] Immostimulating RNA preferably according to SEQ ID Nos 5, 394, or 10072+RNA, preferably mRNA coding for at least one β-catenin inhibitor
[0546] Immostimulating RNA preferably according to SEQ ID Nos 5, 394, or 10072+RNA, preferably mRNA coding for at least one activator of the STING pathway
[0547] Immostimulating RNA preferably according to SEQ ID Nos 5, 394, or 10072+RNA, preferably mRNA coding for at least one checkpoint modulator, preferably an antibody directed against PD-1, PD-L1 or CTLA4
[0548] Immostimulating RNA preferably according to SEQ ID Nos 5, 394, or 10072+RNA, preferably mRNA coding for at least one innate immune activator, preferably a constitutive active variant of RIG-1
[0549] Immostimulating RNA preferably according to SEQ ID Nos 5, 394, or 10072+RNA, preferably mRNA coding for at least one antibody
[0550] Immostimulating RNA preferably according to SEQ ID Nos 5, 394, or 10072+RNA, preferably mRNA coding for at least one decoy receptor, preferably a soluble PD-1 receptor
[0551] Immostimulating RNA preferably according to SEQ ID Nos 5, 394, or 10072+RNA, preferably mRNA coding for at least one inhibitor of myeloid derived suppressor cells (MDSCs)
[0552] Immostimulating RNA preferably according to SEQ ID Nos 5, 394, or 10072+RNA, preferably mRNA coding for at least one IDO pathway inhibitor
[0553] Immostimulating RNA preferably according to SEQ ID Nos XY or YY+RNA, preferably mRNA coding for at least one protein or peptide that bind inhibitors of apoptosis.

[0554] More particularly preferred are the following embodiments:
[0555] Immostimulating RNA preferably according SEQ ID Nos 5, 394, or 10072+RNA, preferably mRNA coding for at least one cytokine, preferably IL-2, IL-12, IL-15 or CD40L+RNA, preferably mRNA coding for at least one immunogenic protein or peptide, preferably Influenza NP protein
[0556] Immostimulating RNA preferably according to SEQ ID Nos 5, 394, or 10072+RNA, preferably mRNA coding for at least one cytokine, preferably IL-2, IL-12, IL-15 or CD40L+RNA, preferably mRNA coding for at least one innate immune activator, preferably a constitutive active variant of RIG-1
[0557] Immostimulating RNA preferably according to SEQ ID Nos 5, 394, or 10072+RNA, preferably mRNA coding for at least one cytokine, preferably IL-2, IL-12, or IL-15, +RNA, preferably mRNA coding for at least one further cytokine, preferably CD40L.

[0558] Formulation and Complexation

[0559] The at least one RNA of the inventive composition may be administered naked without being associated with any further vehicle, carrier, transfection or complexation agent.

[0560] In a preferred embodiment, the RNA of the inventive composition is formulated together with further compounds for increasing the transfection efficiency and/or the immunostimulatory properties of the RNA. Such compounds are termed herein carriers, vehicles, transfection or complexation agents. Preferably, the RNA is formulated together with one or more cationic or polycationic compounds, preferably with cationic or polycationic polymers, cationic or polycationic peptides or proteins, cationic or polycationic polysaccharides, cationic or polycationic lipids and/or with a polymeric carrier. Such cationic or polycationic polymers, cationic or polycationic peptides or proteins, cationic or polycationic polysaccharides, cationic or polycationic lipids or polymeric carriers are useful as carriers, vehicles, transfection or complexation agents of nucleic acids in the context of the present invention. Accordingly, in a further embodiment of the invention it is preferred that the at least one RNA or any other nucleic acid comprised in the inventive composition is associated with or complexed with a cationic or polycationic compound or a polymeric carrier, optionally in a weight ratio selected from a range of about 6:1 (w/w) to about 0.25:1 (w/w), more preferably from about 5:1 (w/w) to about 0.5:1 (w/w), even more preferably of about 4:1 (w/w) to about 1:1 (w/w) or of about 3:1 (w/w) to about 1:1 (w/w), and most preferably a ratio of about 3:1 (w/w) to about 2:1 (w/w) of RNA or nucleic acid to cationic or polycationic compound and/or with a polymeric carrier; or optionally in a nitrogen/phosphate ratio of RNA or nucleic acid to cationic or polycationic compound and/or polymeric carrier in the range of about 0.1-10, preferably in a range of about 0.3-4 or 0.3-1, and most preferably in a range of about 0.5-1 or 0.7-1, and even most preferably in a range of about 0.3-0.9 or 0.5-0.9.

[0561] The ratio of the at least one RNA as described above, and the cationic or polycationic compound, may be calculated on the basis of the nitrogen/phosphate ratio (N/P-ratio) of all these components. In the context of the present invention, an N/P-ratio is preferably in the range of about 0.01-4, 0.01-2, 0.1-2 or 0.1-1.5 regarding the ratio of nucleic acids:cationic or polycationic peptide contained in the inventive vaccine, and most preferably in the range of about 0.1-1. Such an N/P ratio is preferably designed to provide good transfection properties in vivo and transport into and through cell membranes. Preferably, for this purpose, cationic or polycationic compound and/or polymeric carriers as used herein, are based on peptide sequences.

[0562] Cationic or polycationic compounds, being particularly preferred agents in this context include protamine, nucleoline, spermine or spermidine, or other cationic peptides or proteins, such as poly-L-lysine (PLL), poly-arginine, basic polypeptides, cell penetrating peptides (CPPs), including HIV-binding peptides, HIV-1 Tat (HIV), Tat-derived peptides, Penetratin, VP22 derived or analog peptides, HSV VP22 (Herpes simplex), MAP, KALA or protein transduction domains (PTDs), PpT620, proline-rich peptides, arginine-rich peptides, lysine-rich peptides, MPG-peptide(s), Pep-1, L-oligomers, Calcitonin peptide(s), Antennapedia-derived peptides (particularly from Drosophila antennapedia), pAntp, pIsI, FGF, Lactoferrin, Transportan, Buforin-2, Bac715-24, SynB, SynB(1), pVEC, hCT-derived peptides, SAP, or histones.

[0563] In this context protamine is particularly preferred.

[0564] Additionally, preferred cationic or polycationic proteins or peptides may be selected from the following proteins or peptides having the following total formula (VII):

(Arg)_{I};(Lys)ₘ;(His)ₙ;(Orn)ₒ;(Xaa)ₓ, (formula (VII)

[0565] wherein I+m+n+o+x=8-15, and I, m, n or o independently of each other may be any number selected from 0, 1, 2, 3, 4, 5, 6, 7, 8, 9, 10, 11, 12, 13, 14 or 15, provided that the overall content of Arg, Lys, His and Orn represents at least 50% of all amino acids of the oligopeptide; and Xaa may be any amino acid selected from native (=naturally occurring) or non-native amino acids except of Arg, Lys, His or Orn; and x may be any number selected from 0, 1, 2, 3 or 4, provided, that the overall content of Xaa does not exceed 50% of all amino acids of the oligopeptide. Particularly preferred cationic peptides in this context are e.g. Arg₇, Arg₈, Arg₉, H₃R₉, R₉H₃, H₃R₉H₃, YSSR₉SSY, (RKH)₄, Y(RKH)₂R, etc. In this context the disclosure of WO 2009/030481 is incorporated herewith by reference.

[0566] A polymeric carrier used according to the invention might be a polymeric carrier formed by disulfide-crosslinked cationic components.

[0567] According to a further particularly preferred embodiment, cationic or polycationic peptides or proteins of the polymeric carrier, having the empirical sum formula (VII) as shown above and which comprise or are additionally modified to comprise at least one —SH moeity, may be, without being restricted thereto, selected from the subgroup consisting of generic formulas Arg7 (also termed as R7), Arg9 (also termed R9), Arg12 (also termed as R12).

[0568] According to a one further particularly preferred embodiment, the cationic or polycationic peptide or protein of the polymeric carrier, when defined according to formula {(Arg)I;(Lys)m;(His)n;(Orn)o;(Xaa)x} (formula (VII)) as shown above and which comprise or are additionally modified to comprise at least one —SH moeity, may be, without being restricted thereto, selected from subformula (VIIa):

{(Arg)I;(Lys)m;(His)n;(Orn)o;(Xaa′)x(Cys)y} formula (VIIa)

[0569] wherein (Arg)I;(Lys)m;(His)n;(Orn)o; and x are as defined herein, Xaa′ is any amino acid selected from native (=naturally occurring) or non-native amino acids except of Arg, Lys, His, Orn or Cys and y is any number selected from 0, 1, 2, 3, 4, 5, 6, 7, 8, 9, 10, 11, 12, 13, 14, 15, 16, 17, 18, 19, 20, 21-30, 31-40, 41-50, 51-60, 61-70, 71-80 and 81-90, provided that the overall content of Arg (Arginine), Lys (Lysine), His (Histidine) and Orn (Ornithine) represents at least 10% of all amino acids of the oligopeptide.

[0570] This embodiment may apply to situations, wherein the cationic or polycationic peptide or protein of the polymeric carrier, e.g. when defined according to empirical formula (Arg)I;(Lys)m;(His)n;(Orn)o;(Xaa)x (formula (VII)) as shown above, comprises or has been modified with at least one cysteine as —SH moiety in the above meaning such that the cationic or polycationic peptide as cationic component carries at least one cysteine, which is capable to form a disulfide bond with other components of the polymeric carrier.

[0571] Exemplary examples may comprise any of the following sequences:

[0572] Cys(Arg7), Cys(Arg8), Cys(Arg9), Cys(Arg10), Cys(Arg11), Cys(Arg12), Cys(Arg13), Cys(Arg14), Cys(Arg15), Cys(Arg16), Cys(Arg17), Cys(Arg18), Cys(Arg19), Cys(Arg20).

[0573] According to another particularly preferred embodiment, the cationic or polycationic peptide or protein of the polymeric carrier, when defined according to formula {(Arg)I;(Lys)m;(His)n;(Orn)o;(Xaa)x} (formula (VII)) as shown above, may be, without being restricted thereto, selected from subformula (VIIb):

Cys1{(Arg)I;(Lys)m;(His)n;(Orn)o;(Xaa)x}Cys2 (formula (VIIb))

[0574] wherein empirical formula {(Arg)I;(Lys)m;(His)n;(Orn)o;(Xaa)x} (formula (VII)) is as defined herein and forms a core of an amino acid sequence according to (semiempirical) formula (I) and wherein Cys1 and Cys2 are Cysteines proximal to, or terminal to (Arg)I;(Lys)m;(His)n;(Orn)o;(Xaa)x. Exemplary examples may comprise any of the above sequences flanked by two Cys and following sequences:

[0575] Cys(Arg7)Cys, Cys(Arg8)Cys, Cys(Arg9)Cys, Cys(Arg10)Cys, Cys(Arg11)Cys, Cys(Arg12)Cys, Cys(Arg13)Cys, Cys(Arg14)Cys, Cys(Arg15)Cys, Cys(Arg16)Cys, Cys(Arg17)Cys, Cys(Arg18)Cys, Cys(Arg19)Cys, Cys(Arg20)Cys (SEQ ID NOs: 10-23):

[0576] This embodiment may apply to situations, wherein the cationic or polycationic peptide or protein of the polymeric carrier, e.g. when defined according to empirical formula (Arg)I;(Lys)m;(His)n;(Orn)o;(Xaa)x (formula (VII)) as shown above, has been modified with at least two cysteines as —SH moieties in the above meaning such that the cationic or polycationic peptide of the inventive polymeric carrier cargo complex as cationic component carries at least two (terminal) cysteines, which are capable to form a disulfide bond with other components of the polymeric carrier.

[0577] In a preferred embodiment, the polymeric carrier is formed by, comprises or consists of the peptide CysArg12Cys (SEQ ID NO: 15) or CysArg12 (CRRRRRRRRRRRR).

[0578] According to a second alternative, at least one cationic (or polycationic) component of the polymeric carrier may be selected from e.g. any (non-peptidic) cationic or polycationic polymer suitable in this context, provided that this (non-peptidic) cationic or polycationic polymer exhibits or is modified to exhibit at least one —SH-moiety, which provide for a disulfide bond linking the cationic or polycationic polymer with another component of the polymeric carrier as defined herein. Thus, likewise as defined herein, the polymeric carrier may comprise the same or different cationic or polycationic polymers.

[0579] In the specific case that the cationic component of the polymeric carrier comprises a (non-peptidic) cationic or polycationic polymer the cationic properties of the (non-peptidic) cationic or polycationic polymer may be determined upon its content of cationic charges when compared to the overall charges of the components of the cationic polymer. Preferably, the content of cationic charges in the cationic polymer at a (physiological) pH as defined herein is at least 10%, 20%, or 30%, preferably at least 40%, more preferably at least 50%, 60% or 70%, but also preferably at least 80%, 90%, or even 95%, 96%, 97%, 98%, 99% or 100%, most preferably at least 30%, 40%, 50%, 60%, 70%, 80%, 90%, 95%, 96%, 97%, 98%, 99% or 100%, or may be in the range of about 10% to 90%, more preferably in the range of about 30% to 100%, even preferably in the range of about 50% to 100%, e.g. 50, 60, 70, 80%, 90% or 100%, or in a range formed by any two of the afore mentioned values, provided, that the content of all charges, e.g. positive and negative charges at a (physiological) pH as defined herein, in the entire cationic polymer is 100%.

[0580] Preferably, the (non-peptidic) cationic component of the polymeric carrier represents a cationic or polycationic polymer, typically exhibiting a molecular weight of about 0.1 or 0.5 kDa to about 100 kDa, preferably of about 1 kDa to about 75 kDa, more preferably of about 5 kDa to about 50 kDa, even more preferably of about 5 kDa to about 30 kDa, or a molecular weight of about 10 kDa to about 50 kDa, even more preferably of about 10 kDa to about 30 kDa. Additionally, the (non-peptidic) cationic or polycationic polymer typically exhibits at least one —SH-moiety, which is capable to form a disulfide linkage upon condensation with either other cationic components or other components of the polymeric carrier as defined herein.

[0581] In the above context, the (non-peptidic) cationic component of the polymeric carrier may be selected from acrylates, modified acrylates, such as pDMAEMA (poly(dimethylaminoethyl methylacrylate)), chitosanes, aziridines or 2-ethyl-2-oxazoline (forming oligo ethylenimines or modified oligoethylenimines), polymers obtained by reaction of bisacrylates with amines forming oligo beta aminoesters or poly amido amines, or other polymers like polyesters, polycarbonates, etc. Each molecule of these (non-peptidic) cationic or polycationic polymers typically exhibits at least one —SH-moiety, wherein these at least one —SH-moiety may be introduced into the (non-peptidic) cationic or polycationic polymer by chemical modifications, e.g. using imonothiolan, 3-thio propionic acid or introduction of —SH-moieties containing amino acids, such as cysteine or any further (modified) amino acid. Such —SH-moieties are preferably as already defined above.

[0582] The disulfide-crosslinked cationic components may be the same or different from each other. The polymeric carrier can also contain further components. It is also particularly preferred that the polymeric carrier used according to the present invention comprises mixtures of cationic peptides, proteins or polymers and optionally further components as defined herein, which are crosslinked by disulfide bonds as described herein. In this context the disclosure of WO 2012/013326 is incorporated herewith by reference.

[0583] In this context the cationic components, which form basis for the polymeric carrier by disulfide-crosslinkage, are typically selected from any suitable cationic or polycationic peptide, protein or polymer suitable for this purpose, particular any cationic or polycationic peptide, protein or polymer capable to complex an RNA or a nucleic acid as defined according to the present invention, and thereby preferably condensing the RNA or the nucleic acid. The cationic or polycationic peptide, protein or polymer, is preferably a linear molecule, however, branched cationic or polycationic peptides, proteins or polymers may also be used.

[0584] Every disulfide-crosslinking cationic or polycationic protein, peptide or polymer of the polymeric carrier, which may be used to complex the RNA of the inventive composition or any further nucleic acid comprised in the inventive composition contains at least one —SH moiety, most preferably at least one cysteine residue or any further chemical group exhibiting an —SH moiety, capable to form a disulfide linkage upon condensation with at least one further cationic or polycationic protein, peptide or polymer as cationic component of the polymeric carrier as mentioned herein.

[0585] As defined above, the polymeric carrier, which may be used to complex the RNA of the inventive composition or any further nucleic acid comprised in the inventive composition may be formed by disulfide-crosslinked cationic (or polycationic) components.

[0586] Nucleic acids complexed with such polymeric carriers are also termed herein as “polymeric carrier cargo complexes”.

[0587] In this context it is particularly preferred that if immunostimulating RNA is used in the context of the present invention that this immunostimulating RNA is complexed with a polymeric carrier as defined above. Preferably, the immunostimulating RNA, (e.g. comprising an RNA sequence according to any of formulae III-VI), most preferably comprising an RNA sequence according to SEQ ID NOs. 5, 394, or 10072, is complexed with a polymeric carrier comprising or formed by disulfide-crosslinked peptides according to formula VII, VIIa or VIIb, preferably a polymeric carrier formed by Cys(Arg12)Cys or Cys(Arg12). Such a particularly preferred embodiment is termed herein also as “RNAdjuvant”.

[0588] In a further particular embodiment, the polymeric carrier which may be used to complex the RNA or any further nucleic acid comprised in the inventive composition may be selected from a polymeric carrier molecule according to generic formula (VIII):

L-P¹—S—[S—P²—S]ₙ—S—P³-L formula (VIII)

[0589] wherein,
[0590] P¹ and P³ are different or identical to each other and represent a linear or branched hydrophilic polymer chain, each P¹ and P³ exhibiting at least one —SH-moiety, capable to form a disulfide linkage upon condensation with component P², or alternatively with (AA), (AA)ₓ, or [(AA)ₓ]_{z} if such components are used as a linker between P¹ and P² or P³ and P² and/or with further components (e.g. (AA), (AA)ₓ, [(AA)ₓ]_{z}, or L), the linear or branched hydrophilic polymer chain selected independent from each other from polyethylene glycol (PEG), poly-N-(2-hydroxypropyl)methacrylamide, poly-2-(methacryloyloxy)ethyl phosphorylcholines, poly(hydroxyalkyl L-asparagine), poly(2-(methacryloyloxy)ethyl phosphorylcholine), hydroxyethylstarch or poly(hydroxyalkyl L-glutamine), wherein the hydrophilic polymer chain exhibits a molecular weight of about 1 kDa to about 100 kDa, preferably of about 2 kDa to about 25 kDa; or more preferably of about 2 kDa to about 10 kDa, e.g. about 5 kDa to about 25 kDa or 5 kDa to about 10 kDa;
[0591] P² is a cationic or polycationic peptide or protein, e.g. as defined above for the polymeric carrier formed by disulfide-crosslinked cationic components, and preferably having a length of about 3 to about 100 amino acids, more preferably having a length of about 3 to about 50 amino acids, even more preferably having a length of about 3 to about 25 amino acids, e.g. a length of about 3 to 10, 5 to 15, 10 to 20 or 15 to 25 amino acids, more preferably a length of about 5 to about 20 and even more preferably a length of about 10 to about 20; or
   [0592] is a cationic or polycationic polymer, e.g. as defined above for the polymeric carrier formed by disulfide-crosslinked cationic components, typically having a molecular weight of about 0.5 kDa to about 30 kDa, including a molecular weight of about 1 kDa to about 20 kDa, even more preferably of about 1.5 kDa to about 10 kDa, or having a molecular weight of about 0.5 kDa to about 100 kDa, including a molecular weight of about 10 kDa to about 50 kDa, even more preferably of about 10 kDa to about 30 kDa;
   [0593] each P² exhibiting at least two —SH-moieties, capable to form a disulfide linkage upon condensation with further components P² or component(s) P¹ and/or P³ or alternatively with further components (e.g. (AA), (AA)ₓ, or [(AA)ₓ]_{z});
[0594] —S—S— is a (reversible) disulfide bond (the brackets are omitted for better readability), wherein S preferably represents sulphur or a —SH carrying moiety, which has formed a (reversible) disulfide bond. The (reversible) disulfide bond is preferably formed by condensation of —SH-moieties of either components P¹ and P², P² and P², or P² and P³, or optionally of further components as defined herein (e.g. L, (AA), (AA)ₓ, [(AA)ₓ]_{z}, etc); The —SH-moiety may be part of the structure of these components or added by a modification as defined below;
[0595] L is an optional ligand, which may be present or not, and may be selected independent from the other from RGD, Transferrin, Folate, a signal peptide or signal sequence, a localization signal or sequence, a nuclear localization signal or sequence (NLS), an antibody, a cell penetrating peptide, (e.g. TAT or KALA), a ligand of a receptor (e.g. cytokines, hormones, growth factors etc), small molecules (e.g. carbohydrates like mannose or galactose or synthetic ligands), small molecule agonists, inhibitors or antagonists of receptors (e.g. RGD peptidomimetic analogues), or any further protein as defined herein, etc.;
[0596] n is an integer, typically selected from a range of about 1 to 50, preferably from a range of about 1, 2 or 3 to 30, more preferably from a range of about 1, 2, 3, 4, or 5 to 25, or a range of about 1, 2, 3, 4, or 5 to 20, or a range of about 1, 2, 3, 4, or 5 to 15, or a range of about 1, 2, 3, 4, or 5 to 10, including e.g. a range of about 4 to 9, 4 to 10, 3 to 20, 4 to 20, 5 to 20, or 10 to 20, or a range of about 3 to 15, 4 to 15, 5 to 15, or 10 to 15, or a range of about 6 to 11 or 7 to 10. Most preferably, n is in a range of about 1, 2, 3, 4, or 5 to 10, more preferably in a range of about 1, 2, 3, or 4 to 9, in a range of about 1, 2, 3, or 4 to 8, or in a range of about 1, 2, or 3 to 7.

[0597] In this context the disclosure of WO 2011/026641 and WO 2012/116811 is incorporated herewith by reference. Each of hydrophilic polymers P¹ and P³ typically exhibits at least one —SH-moiety, wherein the at least one —SH-moiety is capable to form a disulfide linkage upon reaction with component P² or with component (AA) or (AA)ₓ, if used as linker between P¹ and P² or P³ and P² as defined below and optionally with a further component, e.g. L and/or (AA) or (AA)ₓ, e.g. if two or more —SH-moieties are contained. The following subformulae “P¹—S—S—P²” and “P²—S—S—P³” within the generic formula above, wherein any of S, P¹ and P³ are as defined herein, typically represent a situation, wherein one —SH-moiety of hydrophilic polymers P¹ and P³ was condensed with one —SH-moiety of component P² of the generic formula above, wherein both sulphurs of these —SH-moieties form a disulfide bond —S—S—. These —SH-moieties are typically provided by each of the hydrophilic polymers P¹ and P³, e.g. via an internal cysteine or any further (modified) amino acid or compound which carries a —SH moiety. Accordingly, the subformulae “P¹—S—S—P²” and “P²—S—S—P³” may also be written as “P¹-Cys-Cys-P²” and “P²-Cys-Cys-P³”, if the —SH-moiety is provided by a cysteine, wherein the term Cys-Cys represents two cysteines coupled via a disulfide bond, not via a peptide bond. In this case, the term “—S—S—” in these formulae may also be written as “—S-Cys”, as “-Cys-S” or as “-Cys-Cys-”. In this context, the term “-Cys-Cys-” does not represent a peptide bond but a linkage of two cysteines via their —SH-moieties to form a disulfide bond. Accordingly, the term “-Cys-Cys-” also may be understood generally as “-(Cys-S)—(S-Cys)-”, wherein in this specific case S indicates the sulphur of the —SH-moiety of cysteine. Likewise, the terms “—S-Cys” and “-Cys-S” indicate a disulfide bond between a —SH containing moiety and a cysteine, which may also be written as “—S—(S-Cys)” and “-(Cys-S)—S”. Alternatively, the hydrophilic polymers P¹ and P³ may be modified with a —SH moiety, preferably via a chemical reaction with a compound carrying a —SH moiety, such that each of the hydrophilic polymers P¹ and P³ carries at least one such —SH moiety. Such a compound carrying a —SH moiety may be e.g. an (additional) cysteine or any further (modified) amino acid, which carries a —SH moiety. Such a compound may also be any non-amino compound or moiety, which contains or allows to introduce a —SH moiety into hydrophilic polymers P¹ and P³ as defined herein. Such non-amino compounds may be attached to the hydrophilic polymers P¹ and P³ of the polymeric carrier via chemical reactions or binding of compounds, e.g. by binding of a 3-thio propionic acid or thioimolane, by amide formation (e.g. carboxylic acids, sulphonic acids, amines, etc), by Michael addition (e.g maleinimide moieties, unsatured carbonyls, etc), by click chemistry (e.g. azides or alkines), by alkene/alkine methatesis (e.g. alkenes or alkines), imine or hydrozone formation (aldehydes or ketons, hydrazins, hydroxylamins, amines), complexation reactions (avidin, biotin, protein G) or components which allow Sₙ-type substitution reactions (e.g halogenalkans, thiols, alcohols, amines, hydrazines, hydrazides, sulphonic acid esters, oxyphosphonium salts) or other chemical moieties which can be utilized in the attachment of further components. A particularly preferred PEG derivate in this context is alpha-Methoxy-omega-mercapto poly(ethylene glycol). In each case, the SH-moiety, e.g. of a cysteine or of any further (modified) amino acid or compound, may be present at the terminal ends or internally at any position of hydrophilic polymers P¹ and P³. As defined herein, each of hydrophilic polymers P¹ and P³ typically exhibits at least one —SH-moiety preferably at one terminal end, but may also contain two or even more —SH-moieties, which may be used to additionally attach further components as defined herein, preferably further functional peptides or proteins e.g. a ligand, an amino acid component (AA) or (AA)ₓ, antibodies, cell penetrating peptides or enhancer peptides (e.g. TAT, KALA), etc.

[0598] As defined above, ligands (L), may be optionally used in the polymeric carrier molecule according to generic formula (VIII), e.g. for direction of the inventive carrier polymer and its entire “cargo” (the adjuvant component and/or the antigen of the inventive composition or vaccine composition) into specific cells. They may be selected independent from the other from RGD, Transferrin, Folate, a signal peptide or signal sequence, a localization signal or sequence, a nuclear localization signal or sequence (NLS), an antibody, a cell penetrating peptide (CPP), (e.g. TAT, KALA), a ligand of a receptor (e.g. cytokines, hormones, growth factors etc), small molecules (e.g. carbohydrates like mannose or galactose or synthetic ligands), small molecule agonists, inhibitors or antagonists of receptors (e.g. RGD peptidomimetic analogues) or any such molecule as further defined below, etc. Particularly preferred are cell penetrating peptides (CPPs), which induce a pH-mediated conformational change in the endosome and lead to an improved release of the inventive polymeric carrier (in complex with a nucleic acid) from the endosome by insertion into the lipid layer of the liposome. Such called CPPs or cationic peptides for transportation, may include, without being limited thereto protamine, nucleoline, spermine or spermidine, poly-L-lysine (PLL), basic polypeptides, poly-arginine, chimeric CPPs, such as Transportan, or MPG peptides, HIV-binding peptides, Tat, HIV-1 Tat (HIV), Tat-derived peptides, oligoarginines, members of the penetratin family, e.g. Penetratin, Antennapedia-derived peptides (particularly from Drosophila antennapedia), pAntp, pIsI, etc., antimicrobial-derived CPPs e.g. Buforin-2, Bac715-24, Syn B, SynB(1), pVEC, hCT-derived peptides, SAP, MAP, PpTG20, Proline-rich peptides, Loligomers, Arginine-rich peptides, Calcitonin-peptides, FGF, Lactoferrin, poly-L-Lysine, poly-Arginine, histones, VP22 derived or analog peptides, Pestivirus Erns, HSV, VP22 (Herpes simplex), MAP, KALA or protein transduction domains (PTDs, PpT620, prolin-rich peptides, arginine-rich peptides, lysine-rich peptides, Pep-1, L-oligomers, Calcitonin peptide(s), etc. Particularly preferred in this context is mannose as ligand to target antigen presenting cells which carries on their cell membrane mannose receptors. In a further preferred aspect of the first embodiment of the present invention galactose as optional ligand can be used to target hepatocytes. Such ligands may be attached to component P¹ and/or P³ by reversible disulfide bonds as defined below or by any other possible chemical attachment, e.g. by amide formation (e.g. carboxylic acids, sulphonic acids, amines, etc), by Michael addition (e.g. maleinimide moieties, α,β unsatured carbonyls, etc), by click chemistry (e.g. azides or alkines), by alkene/alkine methatesis (e.g. alkenes or alkines), imine or hydrozone formation (aldehydes or ketons, hydrazins, hydroxylamins, amines), complexation reactions (avidin, biotin, protein G) or components which allow Sₙ-type substitution reactions (e.g halogenalkans, thiols, alcohols, amines, hydrazines, hydrazides, sulphonic acid esters, oxyphosphonium salts) or other chemical moieties which can be utilized in the attachment of further components.

[0599] In the context of formula (VIII) of the present invention components P¹ and P³ represent a linear or branched hydrophilic polymer chain, containing at least one —SH-moiety, each P¹ and P³ independently selected from each other, e.g. from polyethylene glycol (PEG), poly-N-(2-hydroxypropyl)methacrylamide, poly-2-(methacryloyloxy)ethyl phosphorylcholines, poly(hydroxyalkyl L-asparagine) or poly(hydroxyalkyl L-glutamine). P¹ and P³ may be identical or different to each other. Preferably, each of hydrophilic polymers P¹ and P³ exhibits a molecular weight of about 1 kDa to about 100 kDa, preferably of about 1 kDa to about 75 kDa, more preferably of about 5 kDa to about 50 kDa, even more preferably of about 5 kDa to about 25 kDa. Additionally, each of hydrophilic polymers P¹ and P³ typically exhibits at least one —SH-moiety, wherein the at least one —SH-moiety is capable to form a disulfide linkage upon reaction with component P² or with component (AA) or (AA)ₓ, if used as linker between P¹ and P² or P³ and P² as defined below and optionally with a further component, e.g. L and/or (AA) or (AA)ₓ, e.g. if two or more —SH-moieties are contained. The following subformulae “P¹—S—S—P²” and “P²—S—S—P³” within generic formula (VII) above (the brackets are omitted for better readability), wherein any of S, P¹ and P³ are as defined herein, typically represent a situation, wherein one —SH-moiety of hydrophilic polymers P¹ and P³ was condensed with one —SH-moiety of component P² of generic formula (VII) above, wherein both sulphurs of these —SH-moieties form a disulfide bond —S—S— as defined herein in formula (VII). These —SH-moieties are typically provided by each of the hydrophilic polymers P¹ and P³, e.g. via an internal cysteine or any further (modified) amino acid or compound which carries a —SH moiety. Accordingly, the subformulae “P¹—S—S—P²” and “P²—S—S—P³” may also be written as “P¹-Cys-Cys-P²” and “P²-Cys-Cys-P³”, if the —SH-moiety is provided by a cysteine, wherein the term Cys-Cys represents two cysteines coupled via a disulfide bond, not via a peptide bond. In this case, the term “—S—S—” in these formulae may also be written as “—S-Cys”, as “-Cys-S” or as “-Cys-Cys-”. In this context, the term “-Cys-Cys-” does not represent a peptide bond but a linkage of two cysteines via their —SH-moieties to form a disulfide bond. Accordingly, the term “-Cys-Cys-” also may be understood generally as “-(Cys-S)—(S-Cys)-”, wherein in this specific case S indicates the sulphur of the —SH-moiety of cysteine. Likewise, the terms “—S-Cys” and “-Cys-S” indicate a disulfide bond between a —SH containing moiety and a cysteine, which may also be written as “—S—(S-Cys)” and “-(Cys-S)—S”. Alternatively, the hydrophilic polymers P¹ and P³ may be modified with a —SH moiety, preferably via a chemical reaction with a compound carrying a —SH moiety, such that each of the hydrophilic polymers P¹ and P³ carries at least one such —SH moiety. Such a compound carrying a —SH moiety may be e.g. an (additional) cysteine or any further (modified) amino acid, which carries a —SH moiety. Such a compound may also be any non-amino compound or moiety, which contains or allows to introduce a —SH moiety into hydrophilic polymers P¹ and P³ as defined herein. Such non-amino compounds may be attached to the hydrophilic polymers P¹ and P³ of formula (VII) of the polymeric carrier according to the present invention via chemical reactions or binding of compounds, e.g. by binding of a 3-thio propionic acid or thioimolane, by amide formation (e.g. carboxylic acids, sulphonic acids, amines, etc), by Michael addition (e.g maleinimide moieties, α,β unsatured carbonyls, etc), by click chemistry (e.g. azides or alkines), by alkene/alkine methatesis (e.g. alkenes or alkines), imine or hydrozone formation (aldehydes or ketons, hydrazins, hydroxylamins, amines), complexation reactions (avidin, biotin, protein G) or components which allow Sₙ-type substitution reactions (e.g halogenalkans, thiols, alcohols, amines, hydrazines, hydrazides, sulphonic acid esters, oxyphosphonium salts) or other chemical moieties which can be utilized in the attachment of further components. A particularly preferred PEG derivate in this context is alpha-Methoxy-omega-mercapto poly(ethylene glycol). In each case, the SH-moiety, e.g. of a cysteine or of any further (modified) amino acid or compound, may be present at the terminal ends or internally at any position of hydrophilic polymers P¹ and P³. As defined herein, each of hydrophilic polymers P¹ and P³ typically exhibits at least one —SH-moiety preferably at one terminal end, but may also contain two or even more —SH-moieties, which may be used to additionally attach further components as defined herein, preferably further functional peptides or proteins e.g. a ligand, an amino acid component (AA) or (AA)ₓ, antibodies, cell penetrating peptides or enhancer peptides (e.g. TAT, KALA), etc.

[0600] According to one preferred alternative, such further functional peptides or proteins may comprise so called cell penetrating peptides (CPPs) or cationic peptides for transportation. Particularly preferred are CPPs, which induce a pH-mediated conformational change in the endosome and lead to an improved release of the inventive polymeric carrier (in complex with a nucleic acid) from the endosome by insertion into the lipid layer of the liposome. Such called cell penetrating peptides (CPPs) or cationic peptides for transportation, may include, without being limited thereto protamine, nucleoline, spermine or spermidine, poly-L-lysine (PLL), basic polypeptides, poly-arginine, chimeric CPPs, such as Transportan, or MPG peptides, HIV-binding peptides, Tat, HIV-1 Tat (HIV), Tat-derived peptides, oligoarginines, members of the penetratin family, e.g. Penetratin, Antennapedia-derived peptides (particularly from Drosophila antennapedia), pAntp, pIsI, etc., antimicrobial-derived CPPs e.g. Buforin-2, Bac715-24, Syn B, SynB(1), pVEC, hCT-derived peptides, SAP, MAP, PpTG20, Proline-rich peptides, Loligomers, Arginine-rich peptides, Calcitonin-peptides, FGF, Lactoferrin, poly-L-Lysine, poly-Arginine, histones, VP22 derived or analog peptides, Pestivirus Erns, HSV, VP22 (Herpes simplex), MAP, KALA or protein transduction domains (PTDs, PpT620, prolin-rich peptides, arginine-rich peptides, lysine-rich peptides, Pep-1, L-oligomers, Calcitonin peptide(s), etc.

[0601] According to a further preferred embodiment of the present invention, each of hydrophilic polymers P¹ and P³ of formula (VIII) of the polymeric carrier used according to the present invention may also contain at least one further functional moiety, which allows attaching further components as defined herein, e.g. a ligand as defined above, or functionalities which allow the attachment of further components, e.g. by amide formation (e.g. carboxylic acids, sulphonic acids, amines, etc), by Michael addition (e.g maleinimide moieties, unsatured carbonyls, etc), by click chemistry (e.g. azides or alkines), by alkene/alkine methatesis (e.g. alkenes or alkines), imine or hydrozone formation (aldehydes or ketons, hydrazins, hydroxylamins, amines), complexation reactions (avidin, biotin, protein G) or components which allow Sₙ-type substitution reactions (e.g halogenalkans, thiols, alcohols, amines, hydrazines, hydrazides, sulphonic acid esters, oxyphosphonium salts) or other chemical moieties which can be utilized in the attachment of further components. Further functional moieties may comprise an amino acid component (AA) as defined herein or (AA)ₓ, wherein (AA) is preferably an amino component as defined above. In the above context, x is preferably an integer and may be selected from a range of about 1 to 100, preferably from a range of about 1 to 50, more preferably 1 to 30, and even more preferably selected from a number comprising 1, 2, 3, 4, 5, 6, 7, 8, 9, 10, 11, 12, 13, 14 or 15-30, e.g. from a range of about 1 to 30, from a range of about 1 to 15, or from a number comprising 1, 2, 3, 4, 5, 6, 7, 8, 9, 10, 11, 12, 13, 14 or 15, or may be selected from a range formed by any two of the afore mentioned values. Most preferably, x is 1. Such an amino acid component (AA) or (AA)ₓ may be contained in every part of the inventive polymeric carrier according to formula (VIII) above and therefore may be attached to all components of the inventive polymeric carrier according to formula (VII). It is particularly preferred that amino acid component (AA) or (AA)ₓ is present as a ligand or part of the repetitive component [S—P²—S]ₙ within formula (VIII) of the inventive polymeric carrier.

[0602] In the context of the entire formula (VIII) of the polymeric carrier may be preferably defined as follows:

L-P¹—S-[Cys-P²-Cys]ₙ-S—P³-L

wherein L, P¹, P², P³ and n are as defined herein, S is sulphur and each Cys provides for one —SH-moiety for the disulfide bond.

[0603] According to a particular embodiment, the polymeric carrier according to formula (VII) as defined above, may comprise at least one amino acid component (AA) or (AA)ₓ, as defined above. Such an amino acid component (AA) or (AA)ₓ may be contained in every part of the inventive polymeric carrier according to formula (VIII) above and therefore may be attached to all components of the polymeric carrier according to formula (VIII). It is particularly preferred that amino acid component (AA) or (AA)ₓ is present as a ligand or part of the repetitive component [S—P²—S]ₙ within formula (VIII) of the polymeric carrier. The amino acid component (AA) or (AA)ₓ preferably contains or is flanked (e.g. terminally) by at least one —SH containing moiety, which allows introducing this component (AA) or (AA)ₓ via a disulfide bond into the polymeric carrier according to formula (VIII) as defined herein. Such a —SH-containing moiety may be any —SH containing moiety (or, of course, one sulphur of a disulfide bond), e.g. a cysteine residue. In the specific case that the —SH containing moiety represents a cysteine, the amino acid component (AA)ₓ may also be read as -Cys-(AA)ₓ- or -Cys-(AA)ₓ-Cys- wherein Cys represents Cysteine and provides for the necessary —SH-moiety for a disulfide bond. The —SH containing moiety may be also introduced into the amino acid component (AA)ₓ using any of modifications or reactions as shown above for components P¹, P² or P³. In the specific case that the amino acid component (AA)ₓ is linked to two components of the polymeric carrier according to formula (VIII) it is preferred that (AA) or (AA)ₓ contains at least two —SH-moieties, e.g. at least two Cysteines, preferably at its terminal ends. This is particularly preferred if (AA) or (AA)ₓ is part of the repetitive component [S—P²—S]ₙ. Alternatively, the amino acid component (AA) or (AA)ₓ is introduced into the polymeric carrier according to formula (VIII) as defined herein via any chemical possible addition reaction. Therefore the amino acid component (AA) or (AA)ₓ contains at least one further functional moiety, which allows attaching same to a further component as defined herein, e.g. component P¹ or P³, P², L, or a further amino acid component (AA) or (AA)ₓ, etc. Such functional moieties may be selected from functionalities which allow the attachment of further components, e.g. functionalities as defined herein, e.g. by amide formation (e.g. carboxylic acids, sulphonic acids, amines, etc), by Michael addition (e.g maleinimide moieties, α,β unsatured carbonyls, etc), by click chemistry (e.g. azides or alkines), by alkene/alkine methatesis (e.g. alkenes or alkines), imine or hydrozone formation (aldehydes or ketons, hydrazins, hydroxylamins, amines), complexation reactions (avidin, biotin, protein G) or components which allow Sₙ-type substitution reactions (e.g halogenalkans, thiols, alcohols, amines, hydrazines, hydrazides, sulphonic acid esters, oxyphosphonium salts) or other chemical moieties which can be utilized in the attachment of further components.

[0604] The amino acid component (AA) or (AA)ₓ in the polymeric carrier of formula (VIII) may also occur as a mixed repetitive amino acid component [(AA)ₓ]_{z}, wherein the number of amino acid components (AA) or (AA)ₓ is further defined by integer z. In this context, z may be selected from a range of about 1 to 30, preferably from a range of about 1 to 15, more preferably 1 to 10 or 1 to 5 and even more preferably selected from a number selected from 1, 2, 3, 4, 5, 6, 7, 8, 9, 10, 11, 12, 13, 14 or 15, or may be selected from a range formed by any two of the afore mentioned values.

[0605] According to a specific and particularly preferred alternative, the amino acid component (AA) or (AA)ₓ, preferably written as S-(AA)ₓ-S or [S-(AA)ₓ-S] may be used to modify component P², particularly the content of component S—P²—S in repetitive component [S—P²—S]ₙ of the polymeric carrier of formula (VIII) above. This may be represented in the context of the entire polymeric carrier according to formula (VIII) e.g. by following formula (Villa):

L-P¹—S—{[S—P²—S]ₐ[S-(AA)ₓ-S]_{b}}—S—P³-L,

[0606] wherein x, S, L, AA, P¹, P² and P³ are preferably as defined herein. In formula (Villa) above, any of the single components [S—P²—S] and [S-(AA)ₓ-S] may occur in any order in the subformula {[S—P²—S]ₐ[S-(AA)ₓ-S]_{b}}. The numbers of single components [S—P²—S] and [S-(AA)ₓ-S] in the subformula {[S—P²—S]ₐ[S-(AA)ₓ-S]_{b}} are determined by integers a and b, wherein a+b=n. n is an integer and is defined as above for formula (VIII).

[0607] a is an integer, typically selected independent from integer b from a range of about 1 to 50, preferably from a range of about 1, 2 or 3 to 30, more preferably from a range of about 1, 2, 3, 4, or 5 to 25, or a range of about 1, 2, 3, 4, or 5 to 20, or a range of about 1, 2, 3, 4, or 5 to 15, or a range of about 1, 2, 3, 4, or 5 to 10, including e.g. a range of about 3 to 20, 4 to 20, 5 to 20, or 10 to 20, or a range of about 3 to 15, 4 to 15, 5 to 15, or 10 to 15, or a range of about 6 to 11 or 7 to 10. Most preferably, a is in a range of about 1, 2, 3, 4, or 5 to 10, more preferably in a range of about 1, 2, 3, or 4 to 9, in a range of about 1, 2, 3, or 4 to 8, or in a range of about 1, 2, or 3 to 7.

[0608] b is an integer, typically selected independent from integer a from a range of about 0 to 50 or 1 to 50, preferably from a range of about 0, 1, 2 or 3 to 30, more preferably from a range of about 0, 1, 2, 3, 4, or 5 to 25, or a range of about 0, 1, 2, 3, 4, or 5 to 20, or a range of about 0, 1, 2, 3, 4, or 5 to 15, or a range of about 0, 1, 2, 3, 4, or 5 to 10, including e.g. a range of about 3 to 20, 4 to 20, 5 to 20, or 10 to 20, or a range of about 3 to 15, 4 to 15, 5 to 15, or 10 to 15, or a range of about 6 to 11 or 7 to 10. Most preferably, b is in a range of about 1, 2, 3, 4, or 5 to 10, more preferably in a range of about 1, 2, 3, or 4 to 9, in a range of about 1, 2, 3, or 4 to 8, or in a range of about 1, 2, or 3 to 7.

[0609] In this context it is particularly preferred that the RNA, preferably mRNA of the inventive composition is complexed at least partially with a cationic or polycationic compound and/or a polymeric carrier, preferably cationic proteins or peptides. In this context the disclosure of WO 2010/037539 and WO 2012/113513 is incorporated herewith by reference. Partially means that only a part of the RNA is complexed with a cationic compound and that the rest of the RNA is (comprised in the inventive composition) in uncomplexed form (“free”). Preferably the ratio of complexed RNA to:free RNA (in the inventive composition) is selected from a range of about 5:1 (w/w) to about 1:10 (w/w), more preferably from a range of about 4:1 (w/w) to about 1:8 (w/w), even more preferably from a range of about 3:1 (w/w) to about 1:5 (w/w) or 1:3 (w/w), and most preferably the ratio of complexed RNA to free RNA in the inventive composition is selected from a ratio of about 1:1 (w/w).

[0610] The so called “(adjuvant) component”, which may be used to together with the RNA, preferably mRNA in the inventive composition, is preferably prepared according to a first step by complexing the at least one (m)RNA of the (adjuvant) component with a cationic or polycationic compound and/or with a polymeric carrier, preferably as defined herein, in a specific ratio to form a stable complex. In this context, it is highly preferable, that no free cationic or polycationic compound or polymeric carrier or only a neglectably small amount thereof remains in the (adjuvant) component after complexing the (m)RNA. Accordingly, the ratio of the (m)RNA and the cationic or polycationic compound and/or the polymeric carrier in the (adjuvant) component is typically selected in a range that the (m)RNA is entirely complexed and no free cationic or polycationic compound or polymeric carrier or only a neglectably small amount thereof remains in the composition. Preferably the ratio of the (adjuvant) component, i.e. the ratio of the (m)RNA to the cationic or polycationic compound and/or the polymeric carrier, preferably as defined herein, is selected from a range of about 6:1 (w/w) to about 0.25:1 (w/w), more preferably from about 5:1 (w/w) to about 0.5:1 (w/w), even more preferably of about 4:1 (w/w) to about 1:1 (w/w) or of about 3:1 (w/w) to about 1:1 (w/w), and most preferably a ratio of about 3:1 (w/w) to about 2:1 (w/w). Alternatively, the ratio of the (m)RNA to the cationic or polycationic compound and/or the polymeric carrier, preferably as defined herein, in the (adjuvant) component, may also be calculated on the basis of the nitrogen/phosphate ratio (N/P-ratio) of the entire complex. In the context of the present invention, an N/P-ratio is preferably in the range of about 0.1-10, preferably in a range of about 0.3-4 and most preferably in a range of about 0.5-2 or 0.7-2 regarding the ratio of RNA:cationic or polycationic compound and/or polymeric carrier, preferably as defined herein, in the complex, and most preferably in the range of about 0.7-1.5, preferably provided the cationic or polycationic compound in the complex is a cationic or polycationic cationic or polycationic protein or peptide and/or the polymeric carrier is as defined herein. Such ratios, particularly weight and/or N/P ratios may also be applied to ratios of the at least one RNA as defined herein to a cationic or polycationic polymer or a polymeric carrier as defined herein used to complex the at least one RNA.

[0611] In this context, the N/P ratio is a measure of the ionic charge of the cationic (side chain) component of the cationic or polycationic compound or. In particular, if the cationic properties of the cationic compound are generated by nitrogens (e.g. of the amino acid side chains), the N/P ratio expresses the ratio of basic nitrogen atoms to phosphate residues in the nucleotide backbone, considering that (side chain) nitrogen atoms in the cationic compound contribute to positive charges and phosphate of the phosphate backbone of the nucleic acid contribute to the negative charge. The N/P-ratio is defined as the nitrogen/phosphate ratio (N/P-ratio) of the entire complex of nucleic acid and cationic or polycationic compound. This is typically illustrative for the content/amount of cationic compounds and characteristic for the content/amount of nucleic acids bound or complexed. It may be calculated on the basis that, for example, 1 μg RNA typically contains about 3 nmol phosphate residues, provided that RNA exhibits a statistical distribution of bases. Additionally, 1 nmol peptide typically contains about x nmol nitrogen residues, dependent on the molecular weight and the number of its (cationic) amino acids.

[0612] According to a particularly preferred embodiment the inventive composition comprises a polymeric carrier cargo complex comprising or consisting of
[0613] a) as a carrier a polymeric carrier formed by disulfide-crosslinked cationic components preferably as defined above, more preferably according to formula VII, VIIa, VIIb or VIII, and
[0614] b) as a cargo at least one nucleic acid molecule, preferably an immunostimulating RNA, most preferably an RNA comprising an RNA sequence according to SEQ ID NOs. 5, 394, or 10072, preferably for use as a medicament, more preferably for use as an immunostimulating agent or adjuvant, preferably for the treatment of cancer or tumor diseases, wherein the polymeric carrier cargo complex is preferably administered intratumorally.

[0615] In a preferred embodiment, the inventive RNA containing composition comprises a polymeric carrier cargo complex, comprising:
[0616] a) as a carrier a polymeric carrier formed by disulfide-crosslinked cationic components, preferably as defined above, more preferably according to formula VII, VIIa, VIIb or VIII, and
[0617] a) b) as a cargo at least one first nucleic acid molecule, preferably an immunostimulating RNA, most preferably an RNA comprising an RNA sequence according to SEQ ID NOs. 5, 394, or 10072,

[0618] for use as an immunostimulating agent or as an adjuvant,

[0619] and at least one second nucleic acid molecule, preferably an RNA and more preferably an mRNA encoding at least one protein or a peptide most preferably as disclosed above for coding RNA, and wherein the inventive composition is preferably administered intratumorally.

[0620] In a preferred embodiment, the invention relates to a polymeric carrier cargo complex, comprising:
[0621] a) as a carrier a polymeric carrier formed by disulfide-crosslinked cationic components, preferably as defined above, more preferably according to formula VII, VIIa, VIIb or VIII, and
[0622] a) b) as a cargo at least one first nucleic acid molecule, preferably an immunostimulating RNA, most preferably an RNA comprising an RNA sequence according to SEQ ID NOs. 5, 394, or 10072,

[0623] for use as an immunostimulating agent or as an adjuvant,

[0624] wherein the polymeric carrier cargo complex is administered in combination with at least one second nucleic acid molecule, preferably an RNA and more preferably an mRNA encoding at least one protein or a peptide most preferably as disclosed above for coding RNA, and

[0625] wherein the polymeric carrier cargo complex and the second nucleic acid molecule are preferably administered intratumorally.

[0626] Such preferred combinations of at least one first nucleic acid, preferably an immunostimulating RNA and at least one second nucleic acid, preferably an RNA, and more preferably an mRNA encoding at least one protein or peptide are disclosed above in the context of “combinations of coding and non-coding RNA”.

[0627] As used herein, the term “first nucleic acid molecule” refers to a nucleic molecule, which is used as a cargo in the polymeric carrier cargo complex and is thus associated with the polymeric carrier. The term “second nucleic acid molecule”, as used herein, typically refers to a nucleic acid, which is not part of the polymeric carrier cargo complex and which encodes at least one peptide or protein.

[0628] In the context of the present invention immunostimulating agents or adjuvants are understood as compounds, which are preferably efficient in inducing an innate immune response, particularly in inducing the anti-viral cytokine IFN-alpha.

[0629] Adjuvants or immunostimulating agents usually act via their capability to induce an innate immune response. The innate immune system forms the dominant system of host defense in most organisms and comprises barriers such as humoral and chemical barriers including, e.g., inflammation, the complement system and cellular barriers. The innate immune system is typically based on a small number of receptors, called pattern recognition receptors. They recognize conserved molecular patterns that distinguish foreign organisms, like viruses, bacteria, fungi and parasites, from cells of the host. Such pathogen-associated molecular patterns (PAMP) include viral nucleic acids, components of bacterial and fungal walls, flagellar proteins, and more. The first family of pattern recognition receptors (PAMP receptors) studied in detail was the Toll-like receptor (TLR) family. TLRs are transmembrane proteins which recognize ligands of the extracellular milieu or of the lumen of endosomes. Following ligand-binding they transduce the signal via cytoplasmic adaptor proteins which leads to triggering of a host-defence response and entailing production of antimicrobial peptides, proinflammatory chemokines and cytokines, antiviral cytokines, etc. (see e.g. Meylan, E., J. Tschopp, et al. (2006), Nature 442(7098): 39-44). Further relevant components of the immune system include e.g. the endosomal TLRs, cytoplasmic receptors, Type I interferons and cytoplasmic receptors. Therefore, the immunostimulating agents or adjuvants are defined herein preferably as inducers of an innate immune response, which activate pattern recognition receptors (PAMP receptors). Hereby, a cascade of signals is elicited, which e.g. may result in the release of cytokines (e.g. IFN-alpha) supporting the innate immune response. Accordingly, it is preferably a feature of an immunostimulating agent or adjuvant to bind to such receptors and activate such PAMP receptors. Ideally, such as an agent or adjuvant additionally supports the adaptive immune response by e.g. shifting the immune response such that the preferred class of Th cells is activated. Depending on the disease or disorder to be treated a shift to a Th1-based immune response may be preferred or, in other cases, a shift to a Th2 immune response may be preferred. Furthermore, adjuvants are usually defined as compounds that can increase and/or modulate the intrinsic immunogenicity of an antigen.

[0630] The term “immunostimulating agent” is typically understood not to include agents as e.g. antigens (of whatever chemical structure), which elicit an adaptive/cytotoxic immune response, e.g. a “humoral” or “cellular” immune response, in other words elicit immune responses (and confer immunity by themselves) which are characterized by a specific response to structural properties of an antigen recognized to be foreign by immune competent cells. Rather “immunostimulating agent” is typically understood to mean agents/compounds/complexes which do not trigger any adaptive immune response by themselves, but which may exclusively enhance such an adaptive immune response in an unspecific way, by e.g. activating “PAMP” receptors and thereby triggering the release of cytokines which support the actual adaptive immune response. Accordingly, any immunostimulation by agents (e.g. antigens) which evoke an adaptive immune response by themselves (conferring immunity by themselves directly or indirectly) is typically disclaimed by the phrase “immunostimulating agent”.

[0631] The term “adjuvant” is also understood not to comprise agents which confer immunity by themselves.

[0632] Accordingly, adjuvants do not by themselves confer immunity, but assist the immune system in various ways to enhance the antigen-specific immune response by e.g. promoting presentation of an antigen to the immune system. Hereby, an adjuvant may preferably e.g. modulate the antigen-specific immune response by e.g. shifting the dominating Th2-based antigen specific response to a more Th1-based antigen specific response or vice versa. Accordingly, the terms “immunostimulating agent” and “adjuvant” in the context of the present invention are typically understood to mean agents, compounds or complexes which do not confer immunity by themselves, but exclusively support the immune response in an unspecific way (in contrast to an antigen-specific immune response) by effects, which modulate the antigen-specific (adaptive cellular and/or humoral immune response) by unspecific measures, e.g. cytokine expression/secretion, improved antigen presentation, shifting the nature of the arms of the immune response etc. Accordingly, any agents evoking by themselves immunity are typically disclaimed by the terms “adjuvant” or “immunostimulating agent”.

[0633] The use of the polymeric carrier cargo complex optionally in combination with a second nucleic acid molecule, preferably an RNA, allows provision of a more efficient and/or safer medicament. Advantageously, the polymeric carrier cargo complex is suited for in vivo delivery of nucleic acids, in particular for compacting and stabilizing a nucleic acid for the purposes of nucleic acid transfection, such as exhibiting one or more reduced negative side effects of high-molecular weight polymers as discussed above, such as poor biodegradability or high toxicity, agglomeration, low transfection activity in vivo, etc. The polymeric carrier cargo complex also provides for improved nucleic acid transfer in vivo, particularly via intratumoral routes, including serum stability, salt stability, efficiency of uptake, reduced complement activation, nucleic acid release, etc. Such a polymeric carrier cargo complex furthermore may support induction and maintenance of an adaptive immune response by initiating or boosting a parallel innate immune response. It has been found that an improved adaptive immune response can further be obtained, in particular when the polymeric carrier cargo complex is administered in combination with a second nucleic acid molecule, preferably an RNA, encoding a protein or peptide, or when the polymeric carrier cargo complex is co-formulated in a pharmaceutical composition with a second nucleic acid molecule, preferably an RNA, encoding a protein or peptide, preferably an antigenic peptide or protein. It has proven as particularly beneficial in this respect to administer the inventive composition comprising the polymeric carrier cargo complex optionally in combination with the second nucleic acid molecule as defined herein via an intratumoral route. Additionally, the polymeric carrier cargo complex may exhibit improved storage stability, particularly during lyophilisation.

[0634] In particular embodiments, the polymeric carrier cargo complex as defined above enhances the immune response against a protein or peptide, which is encoded by a second nucleic acid molecule, preferably an RNA, more preferably an mRNA, that is administered in combination with the polymeric carrier cargo complex, preferably via an intratumoral route of administration.

[0635] The polymeric carrier cargo complex and/or the second nucleic acid molecule encoding a peptide or protein are preferably provided together with a pharmaceutically acceptable carrier and/or vehicle. In the context of the present invention, a pharmaceutically acceptable carrier typically includes the liquid or non-liquid material, which is mixed with the polymeric carrier cargo complex and/or the second nucleic acid molecule. If the polymeric carrier cargo complex and/or the second nucleic acid molecule are provided in liquid form, the carrier will typically be pyrogen-free water; isotonic saline or buffered aqueous solutions, e.g phosphate, citrate etc. buffered solutions. Ringer or Ringer-Lactate solution is particularly preferred as a liquid basis.

[0636] The phrase “administered in combination” as used herein refers to a situation, where the polymeric carrier cargo complex is administered to a subject before, concomittantly or after the administration of the second nucleic acid molecule encoding a protein or peptide to the same subject. Preferably, the time interval between the administration of the polymeric carrier cargo complex and the at least one second nucleic acid molecule, preferably an RNA, encoding a protein or peptide is less than about 48 hours, more preferably less than about 24 hours, 12 hours, 6 hours, 4 hours, 2 hours, 1 hour, most preferably less than about 30 minutes, 15 minutes or 5 minutes. In a particularly preferred embodiment, the phrase “administered in combination” refers to concomitant administration of the polymeric carrier cargo complex and the at least one second nucleic acid molecule, i.e. the simultaneous administration of both components or the administration of both components within a time frame that typically comprises less than 5 minutes. The phrase “administered in combination” does not only refer to a situation, where the pharmaceutical carrier cargo complex is in physical contact with the at least one second nucleic acid molecule or formulated together with said second nucleic acid molecule. The phrase “administered in combination” as used herein comprises also the separate administration of the polymeric carrier cargo complex and the second nucleic acid molecule (e.g. by two separate injections), as long as the time interval between the two administrations does not exceed the interval as defined above. Alternatively, the polymeric carrier cargo complex and the second nucleic acid molecule may be administered in combination by mixing the polymeric carrier cargo complex and the second nucleic acid molecule prior to administration and administering the mixture to a subject. When the polymeric carrier cargo complex is formulated together with the second nucleic acid molecule or when a composition as defined herein is used, the polymeric carrier cargo complex and the second nucleic acid molecule may further, independently from each other, administered in combination via any of the administration routes as described herein.

[0637] The polymeric carrier cargo complex comprises as a cargo at least one nucleic acid molecule. In the context of the present invention, such a nucleic acid molecule may be any suitable nucleic acid, selected e.g. from any (single-stranded or double-stranded) DNA, preferably, without being limited thereto, e.g. genomic DNA, single-stranded DNA molecules, double-stranded DNA molecules, coding DNA, DNA primers, DNA probes, immunostimulatory/immunostimulating DNA, a (short) DNA oligonucleotide ((short) oligodesoxyribonucleotides), viral DNA, or may be selected e.g. from any PNA (peptide nucleic acid) or may be selected e.g. from any (single-stranded or double-stranded) RNA, preferably, without being limited thereto, a (short) RNA oligonucleotide ((short) oligoribonucleotide), a coding RNA, a messenger RNA (mRNA), a viral RNA, replicons, an immunostimulatory/immunostimulating RNA, a small interfering RNA (siRNA), an antisense RNA, a micro RNA, a small nuclear RNA (snRNA), a small-hairpin (sh) RNA or riboswitches, ribozymes or aptamers; etc. The nucleic acid molecule of the polymeric carrier cargo complex may also be a ribosomal RNA (rRNA), a transfer RNA (tRNA), a messenger RNA (mRNA), or a viral RNA (vRNA). Preferably, the nucleic acid molecule of the polymeric carrier cargo complex is an RNA. More preferably, the nucleic acid molecule of the polymeric carrier cargo complex is a (linear) single-stranded RNA, even more preferably an mRNA or an immunostimulatory/immunostimulating RNA.

[0638] Furthermore, the nucleic acid of the polymeric carrier cargo complex may be a single- or a double-stranded nucleic acid molecule or a partially double-stranded or partially single stranded nucleic acid, which are at least partially self complementary (both of these partially double-stranded or partially single stranded nucleic acid molecules are typically formed by a longer and a shorter single-stranded nucleic acid molecule or by two single stranded nucleic acid molecules, which are about equal in length, wherein one single-stranded nucleic acid molecule is in part complementary to the other single-stranded nucleic acid molecule and both thus form a double-stranded nucleic acid molecule in this region, i.e. a partially double-stranded or partially single stranded nucleic acid molecule. Preferably, the nucleic acid molecule may be a single-stranded nucleic acid molecule. Furthermore, the nucleic acid molecule may be a circular or linear nucleic acid molecule, preferably a linear nucleic acid molecule.

[0639] According to one alternative, the nucleic acid molecule of the inventive polymeric carrier cargo complex may be a coding nucleic acid, e.g. a DNA or RNA. Moreover, the polymeric carrier cargo complex may be administered in combination with at least one second nucleic acid molecule, which encodes a protein or a peptide.

[0640] According to one embodiment, the at least one first nucleic acid molecule and the at least one second nucleic acid molecule are both coding nucleic acid molecules. Preferably, the at least one first and the at least one second nucleic acid molecule each encode a different peptide or protein. In one embodiment, the first nucleic acid molecule has a sequence, which is distinct from the sequence of the second nucleic acid molecule, which is administered in combination with the polymeric carrier cargo complex. Alternatively, the first nucleic acid molecule and the second nucleic acid molecule may comprise the same sequence or be identical.

[0641] In the case of the at least one first nucleic acid molecule and/or of the second nucleic acid molecule, such a coding DNA or RNA may be any DNA or RNA as defined herein. Preferably, such a coding DNA or RNA may be a single- or a double-stranded DNA or RNA, more preferably a single-stranded DNA or RNA, and/or a circular or linear DNA or RNA, more preferably a linear DNA or RNA. Furthermore such a coding DNA or RNA may be a genomic DNA, a viral RNA or DNA, a replicon, a plasmid DNA or an mRNA. Even more preferably, the coding DNA or RNA may be a (linear) single-stranded DNA or RNA. Most preferably, the nucleic acid molecule according to the present invention may be a linear single-stranded messenger RNA (mRNA). Such an mRNA may occur as a mono-, di-, or even multicistronic RNA, i.e. an RNA which carries the coding sequences of one, two or more proteins or peptides. Such coding sequences in di-, or even multicistronic mRNA may be separated by at least one IRES sequence, e.g. as defined herein.

[0642] In a preferred embodiment, the at least one second nucleic acid molecule encodes a therapeutically active protein or an antigen as defined herein, preferably as disclosed in the context of “coding RNA”. In a particularly preferred embodiment, the at least one second nucleic acid molecule, which is administered in combination with the polymeric carrier cargo complex, encodes a peptide or a protein, which is capable of eliciting an immune response, preferably an adaptive immune response, after administration, especially intratumoral administration, to a host. Alternatively, the at least one second nucleic acid molecule encodes at least one therapeutically active peptide or protein, preferably selected from the group consisting of cytokines, chemokines, suicide gene products, immunogenic proteins or peptides, apoptosis inducers, angiogenesis inhibitors, heat shock proteins, tumor antigens, β-catenin inhibitors, activators of the STING pathway, checkpoint modulators, innate immune activators, antibodies, dominant negative receptors and decoy receptors, inhibitors of myeloid derived suppressor cells (MDSCs), IDO pathway inhibitors, and proteins or peptides that bind inhibitors of apoptosis.

[0643] In a particular embodiment, the first nucleic acid molecule of the herein defined polymeric carrier cargo complex and/or the second nucleic acid molecule administered in combination with the polymeric carrier cargo complex may contain backbone modifications, sugar modifications or base modifications. A backbone modification in connection with the present invention is a modification in which phosphates of the backbone of the nucleotides contained in the nucleic acid molecule of the inventive polymeric carrier cargo complex are chemically modified. A sugar modification in connection with the present invention is a chemical modification of the sugar of the nucleotides of the first nucleic acid molecule of the inventive polymeric carrier cargo complex and/or of the second nucleic acid molecule administered in combination with the polymeric carrier cargo complex. Furthermore, a base modification in connection with the present invention is a chemical modification of the base moiety of the nucleotides of the nucleic acid molecule of the inventive polymeric carrier cargo complex and/or of the second nucleic acid molecule administered in combination with the polymeric carrier cargo complex. Such modifications are disclosed above in the context of “RNA modifications”.

[0644] According to a further embodiment, the first nucleic acid molecule of the herein defined polymeric carrier cargo complex and/or the second nucleic acid molecule administered in combination with the polymeric carrier cargo complex can contain a lipid modification. Such a lipid-modified nucleic acid typically comprises a nucleic acid as defined herein. Such a lipid-modified first nucleic acid molecule of the polymeric carrier cargo complex or a lipid-modified second nucleic acid molecule administered in combination with the polymeric carrier cargo complex typically further comprises at least one linker covalently linked with that nucleic acid molecule, and at least one lipid covalently linked with the respective linker. Alternatively, the lipid-modified nucleic acid molecule comprises at least one nucleic acid molecule as defined herein and at least one (bifunctional) lipid covalently linked (without a linker) with that nucleic acid molecule. According to a third alternative, the lipid-modified nucleic acid molecule comprises a nucleic acid molecule as defined herein, at least one linker covalently linked with that nucleic acid molecule, and at least one lipid covalently linked with the respective linker, and also at least one (bifunctional) lipid covalently linked (without a linker) with that nucleic acid molecule.

[0645] According to a further preferred embodiment, the at least one RNA of the inventive composition is complexed with lipids to form one or more liposomes, lipoplexes, or lipid nanoparticles. Therefore, in one embodiment, the inventive composition comprises liposomes, lipoplexes, and/or lipid nanoparticles comprising the at least one RNA.

[0646] Lipid-based formulations have been increasingly recognized as one of the most promising delivery systems for RNA due to their biocompatibility and their ease of large-scale production. Cationic lipids have been widely studied as synthetic materials for delivery of RNA. After mixing together, nucleic acids are condensed by cationic lipids to form lipid/nucleic acid complexes known as lipoplexes. These lipid complexes are able to protect genetic material from the action of nucleases and deliver it into cells by interacting with the negatively charged cell membrane. Lipoplexes can be prepared by directly mixing positively charged lipids at physiological pH with negatively charged nucleic acids.

[0647] Conventional liposomes consist of a lipid bilayer that can be composed of cationic, anionic, or neutral (phospho)lipids and cholesterol, which encloses an aqueous core. Both the lipid bilayer and the aqueous space can incorporate hydrophobic or hydrophilic compounds, respectively. Liposome characteristics and behaviour in vivo can be modified by addition of a hydrophilic polymer coating, e.g. polyethylene glycol (PEG), to the liposome surface to confer steric stabilization. Furthermore, liposomes can be used for specific targeting by attaching ligands (e.g., antibodies, peptides, and carbohydrates) to its surface or to the terminal end of the attached PEG chains (Front Pharmacol. 2015 Dec. 1; 6:286).

[0648] Liposomes are colloidal lipid-based and surfactant-based delivery systems composed of a phospholipid bilayer surrounding an aqueous compartment. They may present as spherical vesicles and can range in size from 20 nm to a few microns. Cationic lipid-based liposomes are able to complex with negatively charged nucleic acids via electrostatic interactions, resulting in complexes that offer biocompatibility, low toxicity, and the possibility of the large-scale production required for in vivo clinical applications. Liposomes can fuse with the plasma membrane for uptake; once inside the cell, the liposomes are processed via the endocytic pathway and the genetic material is then released from the endosome/carrier into the cytoplasm. Liposomes have long been perceived as drug delivery vehicles because of their superior biocompatibility, given that liposomes are basically analogs of biological membranes, and can be prepared from both natural and synthetic phospholipids (Int J Nanomedicine. 2014; 9: 1833-1843).

[0649] Cationic liposomes have been traditionally the most commonly used non-viral delivery systems for oligonucleotides, including plasmid DNA, antisense oligos, and siRNA/small hairpin RNA-shRNA). Cationic lipids, such as DOTAP, (1,2-dioleoyl-3-trimethylammonium-propane) and DOTMA (N-[1-(2,3-dioleoyloxy)propyl]-N,N,N-trimethyl-ammonium methyl sulfate) can form complexes or lipoplexes with negatively charged nucleic acids to form nanoparticles by electrostatic interaction, providing high in vitro transfection efficiency. Furthermore, neutral lipid-based nanoliposomes for RNA delivery as e.g. neutral 1,2-dioleoyl-sn-glycero-3-phosphatidylcholine (DOPC)-based nanoliposomes were developed. (Adv Drug Deliv Rev. 2014 February; 66: 110-116.).

[0650] Therefore, in one embodiment the at least one RNA of the inventive composition is complexed with cationic lipids and/or neutral lipids and thereby forms liposomes, lipid nanoparticles, lipoplexes or neutral lipid-based nanoliposomes.

[0651] Preferred cationic or polycationic compounds, which can be used as transfection or complexation agent may include cationic polysaccharides, for example chitosan, polybrene, cationic polymers, e.g. polyethyleneimine (PEI), cationic lipids, e.g. DOTMA: [1-(2,3-sioleyloxy)propyl)]-N,N,N-trimethylammonium chloride, DMRIE, di-C14-amidine, DOTIM, SAINT, DC-Chol, BGTC, CTAP, DOPC, DODAP, DOPE: Dioleyl phosphatidylethanol-amine, DOSPA, DODAB, DOIC, DMEPC, DOGS: Dioctadecylamidoglicylspermin, DIMRI: Dimyristo-oxypropyl dimethyl hydroxyethyl ammonium bromide, DOTAP: dioleoyloxy-3-(trimethylammonio)propane, DC-6-14: O,O-ditetradecanoyl-N-(α-trimethylammonioacetyl)diethanolamine chloride, CLIP1: rac-[(2,3-dioctadecyloxypropyl)(2-hydroxyethyl)]-dimethylammonium chloride, CLIP6: rac-[2(2,3-dihexadecyloxypropyl-oxymethyloxy)ethyl]trimethylammonium, CLIP9: rac-[2(2,3-dihexadecyloxypropyl-oxysuccinyloxy)ethyl]-trimethylammonium, oligofectamine, or cationic or polycationic polymers, e.g. modified polyaminoacids, such as β-aminoacid-polymers or reversed polyamides, etc., modified polyethylenes, such as PVP (poly(N-ethyl-4-vinylpyridinium bromide)), etc., modified acrylates, such as pDMAEMA (poly(dimethylaminoethyl methylacrylate)), etc., modified amidoamines such as pAMAM (poly(amidoamine)), etc., modified polybetaaminoester (PBAE), such as diamine end modified 1,4 butanediol diacrylate-co-5-amino-1-pentanol polymers, etc., dendrimers, such as polypropylamine dendrimers or pAMAM based dendrimers, etc., polyimine(s), such as PEI: poly(ethyleneimine), poly(propyleneimine), etc., polyallylamine, sugar backbone based polymers, such as cyclodextrin based polymers, dextran based polymers, chitosan, etc., silan backbone based polymers, such as PMOXA-PDMS copolymers, etc., blockpolymers consisting of a combination of one or more cationic blocks (e.g. selected from a cationic polymer as mentioned above) and of one or more hydrophilic or hydrophobic blocks (e.g. polyethyleneglycole); etc.

[0652] Additional Pharmaceutically Active Compounds:

[0653] Furthermore the inventive composition may comprise at least one additional pharmaceutically active component/compound. Alternatively or in addition to that, the at least one additional pharmaceutically active component/compound may be co-administered concomitant to the composition according to the invention. Therefore, the at least one additional pharmaceutically active component/compound may be administered in combination with the at least one RNA of the inventive composition or with the RNA containing composition according to the invention.

[0654] The phrases “administered in combination”, co-administration or “concomitant administration” as used herein refers to a situation, where the inventive composition or an ingredient thereof is administered to a subject before, concomittantly or after the administration of a further pharmaceutically active component to the same subject. The time interval between the administration of the inventive composition or an ingredient thereof and the at least one second pharmaceutically active component depends on the nature and biological effect of the particular pharmaceutically active component and can be determined by a physician. Preferably the time interval is less than about 48 hours, more preferably less than about 24 hours, 12 hours, 6 hours, 4 hours, 2 hours, 1 hour, most preferably less than about 30 minutes, 15 minutes or 5 minutes. In a particularly preferred embodiment, the phrase “administered in combination” refers to concomitant administration of the inventive composition or an ingredient thereof and the at least one second pharmaceutically active component, i.e. the simultaneous administration of both compounds or the administration of both compounds within a time frame that typically comprises less than 5 minutes. The phrase “administered in combination” does not only refer to a situation, where the inventive composition or an ingredient thereof is in physical contact with the at least one second pharmaceutically active component or formulated together with said second pharmaceutically active component. The phrase “administered in combination” as used herein comprises also the separate administration of the inventive composition or an ingredient thereof and the second pharmaceutically active component (e.g. by two separate injections). Alternatively, the inventive composition or an ingredient thereof and the second pharmaceutically active component may be administered in combination by mixing the inventive composition or an ingredient thereof and the second pharmaceutically active component prior to administration and administering the mixture to a subject. When the inventive composition or an ingredient thereof is formulated together with the second pharmaceutically active component or when a composition as defined herein is used, the inventive composition or an ingredient thereof and the second pharmaceutically active component may further, independently from each other, administered in combination via any of the administration routes as described herein.

[0655] A pharmaceutically active component/compound in this connection is a compound that has a therapeutic effect to heal, ameliorate or prevent a particular indication or disease, namely a tumor or cancer disease. Such compounds include, without implying any limitation, peptides or proteins, preferably as defined herein, nucleic acids, preferably as defined herein, (therapeutically active) low molecular weight organic or inorganic compounds (molecular weight less than 5000, preferably less than 1000), sugars, antigens or antibodies, preferably as defined herein, therapeutic agents already known in the prior art, antigenic cells, antigenic cellular fragments, cellular fractions, cell wall components (e.g. polysaccharides), modified, attenuated or de-activated (e.g. chemically or by irradiation) pathogens (virus, bacteria etc.), adjuvants, etc.

[0656] In a preferred embodiment, the inventive composition additionally comprises at least one further pharmaceutically active component/compound, wherein the at least one additional pharmaceutically active component is selected from cytokines, chemokines, suicide gene products, immunogenic proteins or peptides, apoptosis inducers, angiogenesis inhibitors, heat shock proteins, tumor antigens, β-catenin inhibitors, activators of the STING pathway, checkpoint modulators, innate immune activators, antibodies, dominant negative receptors and decoy receptors, inhibitors of myeloid derived suppressor cells (MDSCs), IDO pathway inhibitors, proteins or peptides that bind inhibitors of apoptosis, anti-bacterial agents, anti-viral agents, adjuvants, chemotherapeutic agents and kinase inhibitors.

[0657] Alternatively, or in addition to that, the at least one additional pharmaceutically active component may be co-administered concomitant to the at least one RNA of the RNA containing composition or the inventive composition or may be used in combination with the at least one RNA of the RNA containing composition or the inventive composition.

[0658] In this context protein-based cytokines, chemokines, suicide gene products, immunogenic proteins or peptides, apoptosis inducers, angiogenesis inhibitors, heat shock proteins, tumor antigens, β-catenin inhibitors, activators of the STING pathway, checkpoint modulators, innate immune activators, antibodies, dominant negative receptors and decoy receptors, inhibitors of myeloid derived suppressor cells (MDSCs), IDO pathway inhibitors, and proteins or peptides that bind inhibitors of apoptosis or fragments and variants thereof as disclosed above in the context of “coding RNA” may be used as additional pharmaceutically active component. Alternatively, nucleic acids encoding these proteins or fragments or variants thereof may be used as additional pharmaceutically active component.

[0659] 1. Cytokines:

[0660] In this context protein-based cytokines, or fragments and variants thereof as disclosed above in the context of “coding RNA” may be used as additional pharmaceutically active component. Alternatively, nucleic acids encoding these proteins or fragments or variants thereof may be used as additional pharmaceutically active component.

[0661] Preferably the cytokine is an interleukin (IL). One or more interleukins may be chosen e.g. from the following list: IL-1α, IL-1β, IL-1ra (antagonist), IL-2, IL-3, IL-4, IL-5, IL-6, IL-7, IL-8, IL-9, IL-10; IL-11, IL-12, IL-13, IL14, IL-15, IL-16, IL-17A, IL-17B, EL-17C, IL-17D, IL-17E, IL-17F, IL-18, IL-19, IL-20, IL-21, IL-22, IL-23, IL-24, IL-25, IL-26, IL-27, IL-28A/B, IL-29, IL-30, IL-31, IL-32, IL-33, IL-35. Moreover the cytokine may be one or more cytokines chosen from the TNF family, e.g. chosen from the following list: TNF, especially TNFα, LTα, LTβ, LIGHT, TWEAK, APRIL, BAFF, TL1A, GITRL, OX40L, CD40L (CD154), FASL, CD27L, CD30L, 4-1BBL, TRAIL, RANK ligand. Further examples of preferred cytokines may be chosen from the following list: FLT3 ligand, G-CSF, GM-CSF, IFNα/β/ω, IFNγ, LIF, M-CSF, MIF, OSM, Stem Cell Factor, TGFβ1, TGFβ2, TGFβ3, TSLP ligand.

[0662] Particularly preferred are cytokines chosen from the following list: IL-12, IL-15, IL-2, IFNγ, TNFα, IL-18, IFNα, IL-1β, IL-32, IL-7, IL-21, IL-8, GM-CSF.

[0663] In this context particularly preferred are cytokines as disclosed in Table 1 above.

[0664] In a particularly preferred embodiment, the at least one RNA of the RNA containing composition is an immunostimulating RNA, preferably according to SEQ ID NOs. 5, 394, or 10072, and is combined with at least one cytokine as defined above, preferably IL-2, IL-12, CD40L or IL-15 or a fragment or variant thereof.

[0665] 1. Chemokines

[0666] In this context protein-based chemokines, or fragments and variants thereof as disclosed above in the context of “coding RNA” may be used as additional pharmaceutically active component. Alternatively, nucleic acids encoding these proteins or fragments or variants thereof may be used as additional pharmaceutically active component.

[0667] Preferred chemokines may be chosen from the following list: CXCL1, CXCL2, CXCL3, CXCL4, CXCL5, CXCL6, CXCL7, CXCL8, CXCL9, CXCL10, CXCL11, CXCL12, CXCL13, CXCL14, CXCL15, CXCL16, CCL1, CCL2, CCL3, CCL4, CCL5, CCL6, CCL7, CCL8, CCL9/10, CCL11, CCL12, CCL13, CCL14, CCL15, CCL16, CCL17, CCL18, CCL19, CCL20, CCL21, CCL22, CCL23, CCL24, CCL25, CCL26, CCL27, CCL28, XCL1, XCL2, CX3CL1.

[0668] In this context particularly preferred are chemokines as disclosed in Table 2 above.

[0669] In a particularly preferred embodiment, the at least one RNA of the RNA containing composition is an immunostimulating RNA, preferably according to SEQ ID NOs. 5, 394, or 10072 and is combined with at least one chemokine as defined above or a fragment or variant thereof.

[0670] 2. Suicide Enzymes

[0671] In this context protein-based suicide enzymes, or fragments and variants thereof as disclosed above in the context of “coding RNA” may be used as additional pharmaceutically active component. Alternatively, nucleic acids encoding these proteins or fragments or variants thereof may be used as additional pharmaceutically active component.

[0672] The suicide enzyme is preferably a nucleotide metabolizing enzyme. Preferably the suicide enzyme is used in combination with a prodrug which is a substrate of the suicide enzyme, and which is converted to a cytotoxic compound by the suicide enzyme. One or more preferred suicide enzymes may be chosen from the following list: thymidine kinase, preferably a viral thymidine kinase, more preferrably Herpes simplex virus thymidine kinase, Varicella zoster thymidine kinase; a plant thymidine kinase, preferably a tomato thymidine kinase; cytosine deaminase, preferably bacterial cytosine deaminase or Yeast cytosine deaminase; deoxynucleoside kinase, preferably Drosophila melanogaster deoxynucleoside kinase; deoxycytidine kinase, preferably a mammalian deoxycytidine kinase, purine nucleoside phosphorylase, preferably a bacterial purine nucleoside phosphorylase.

[0673] In this context particularly preferred are suicide enzymes (suicide gene products) as disclosed in Table 3 and 4 above.

[0674] In a particularly preferred embodiment, the at least one RNA of the RNA containing composition is an immunostimulating RNA, preferably according to SEQ ID NOs. 5, 394, or 10072 and is combined with at least one suicide enzyme as defined above or a fragment or variant thereof.

[0675] 3. Immunogenic Proteins or Peptides

[0676] In this context protein-based immunogenic proteins or peptides, or fragments and variants thereof as disclosed above in the context of “coding RNA” may be used as additional pharmaceutically active component. Alternatively, nucleic acids encoding these proteins or peptides or fragments or variants thereof may be used as additional pharmaceutically active component.

[0677] The immunogenic protein or peptide is preferably a pathogenic antigen to utilize preexisting immunity against such antigens for treatment of tumor and/or cancer diseases. The memory immune response is triggered and the immune system is strengthened for attacking tumor cells.

[0678] Preferred examples of immunogenic proteins or peptides for this embodiment of the invention are proteins or peptides of widespread pathogens, i.e. pathogens with which every organism, in particular mammals, preferably humans, has a high probability of being infected at least once in his/her lifetime. These include, for example, any structural or non-structural protein or peptide of:
[0679] influenza virus type A or B or any other orthomyxovirus (influenza type C),
[0680] picornaviruses, such as rhinovirus or hepatitis A virus,
[0681] togaviruses, such as alphavirus or rubivirus, e.g. Sindbis, Semliki-Forest or rubeolavirus (measles virus),
[0682] rubella virus (German measles virus),
[0683] coronaviruses, in particular subtypes HCV-229E or HCV-0C43,
[0684] rhabdoviruses, such as rabies virus,
[0685] paramyxoviruses, such as mumps virus,
[0686] reoviruses, such as group A, B or C rotavirus,
[0687] hepadnaviruses, such as hepatitis B virus,
[0688] papoviruses, such as human papillomaviruses (HPV) of any serotype, especially from 1 to 75,
[0689] adenoviruses, in particular type 1 to 47,
[0690] herpesviruses, such as Herpes simplex virus 1, 2 or 3,
[0691] cytomegalovirus (CMV), preferably CMVpp65,
[0692] Epstein Barr virus (EBV),
[0693] vaccinia viruses and
[0694] the bacterium Chiamydophila pneumoniae (Chlamydia pneumoniae).

[0695] Further examples of preferred immunogenic proteins or peptides are proteins or peptides of pathogens which only seldom infect an organism. These proteins or peptide include, for example, any structural or non-structural protein or peptide of:
[0696] Flaviviruses, such as dengue virus type 1 to 4, yellow fever virus, West Nile virus, Japanese encephalitis virus
[0697] hepatitis C virus,
[0698] caliciviruses,
[0699] filoviruses, such as Ebola virus,
[0700] bornaviruses,
[0701] bunyaviruses, such as Rift Valley fever virus,
[0702] arenaviruses, such as LCMV (lymphocytic choriomeningitis virus) or hemorrhagic fever viruses,
[0703] retroviruses, such as HIV and
[0704] parvoviruses.

[0705] In a particularly preferred embodiment, the at least one RNA of the RNA containing composition is an immunostimulating RNA, preferably according to SEQ ID NOs. 5, 394, or 10072 and is combined with at least one immunogenic protein or peptide as defined above, preferably influenza nucleoprotein (NP) or a fragment or variant thereof.

[0706] 4. Apoptosis Inducers:

[0707] In this context protein-based apoptosis inducers, or fragments and variants thereof as disclosed above in the context of “coding RNA” may be used as additional pharmaceutically active component. Alternatively, nucleic acids encoding these proteins or peptides or fragments or variants thereof may be used as additional pharmaceutically active component.

[0708] Preferably, an apoptosis inducer is chosen from the group consisting of the Bcl-2 family and tumor suppressor protein p53 and ligands of transmembrane death receptors, especially the TNF (tumor necrosis factor) receptor gene superfamily, pro-apoptic receptor agonists and Beclin-1.

[0709] A particularly preferred apoptosis inducer in the context of the present invention is Beclin-1 (derived from the BECN1 gene).

[0710] Further preferred examples of apoptosis inducers may be chosen from the following list: Bcl-10, Bax, Bak, Bid, Bad, Bim, Bik, Blk, Cytochrome c, Caspases, especially Caspase 3, Caspase 6, Caspase 7, Caspase 8, Caspase 9, Death domain, especially of Fas, preferably FasL, TNFα, Apo2L/TRAIL, agonist of DR4 and/or DR5, Apo3L, DR4 agonistic antibody, DR5 agonistic antibody, protein kinase R (PKR) (preferably constitutive active PKR), Granzyme B.

[0711] In this context particularly preferred are apoptosis inducers as disclosed in Table 5 and 6 above.

[0712] In a particularly preferred embodiment, the at least one RNA of the RNA containing composition is an immunostimulating RNA, preferably according to SEQ ID NOs. 5, 394, or 10072 and is combined with at least one apoptosis inducer as defined above, or a fragment or variant thereof.

[0713] 5. Angiogenesis Inhibitors

[0714] In this context protein-based angiogenesis inducers, or fragments and variants thereof as disclosed above in the context of “coding RNA” may be used as additional pharmaceutically active component. Alternatively, nucleic acids encoding these proteins or peptides or fragments or variants thereof may be used as additional pharmaceutically active component.

[0715] Preferred examples of angiogenesis inhibitors according to the invention may be chosen from the following list: interferon alpha (IFN-α), (interferon beta) IFN-β, interferon gamma (IFN-γ), CXCL9, CXCL10, interleukin 12 (IL-12), platelet factor 4 (PF-4), tumor necrosis factor alpha (TNF-α), soluble fms-like tyrosine kinase 1 (sFLT-1), Fetal Liver Kinase 1 (FLK-1), Angiostatin, Endostatin, Vasostatin, Canstatin, Tumstatin, 16 kD prolacin fragment, tissue inhibitor of metalloproteinases 1 (TIMP-1), tissue inhibitor of metalloproteinases 2 (TIMP-2), tissue inhibitor of metalloproteinases 3 (TIMP-3), thrombospondin 1 (TSP-1), thrombospondin 2 (TSP-2), Maspin, PEX, soluble Tyrosine-protein kinase receptor 1 (sTie1), soluble Angiopoietin-1 receptor 2 (sTie2), Angiopoietin-1, Angiopoietin-2, Antivascular endothelial growth factor receptor 2 (VEGFR2) antibody (e.g. Alacizumab, Ramucirumab), Anti-vascular endothelial growth factor (VEGF) antibody (e.g. Brolucizumab, Ranibizumab, Bevacizumab), and Anti-vascular endothelial growth factor receptor 1 (VEGFR1) antibody (e.g. Icrucumab).

[0716] In this context particularly preferred are angiogenesis inhibitors as disclosed in Table 7 above.

[0717] In a particularly preferred embodiment, the at least one RNA of the RNA containing composition is an immunostimulating RNA, preferably according to SEQ ID NOs. 5, 394, or 10072 and is combined with at least one angiogenesis inhibitor as defined above, or a fragment or variant thereof.

[0718] 6. Heat Shock Proteins:

[0719] In this context protein-based heat-shock proteins, or fragments and variants thereof as disclosed above in the context of “coding RNA” may be used as additional pharmaceutically active component. Alternatively, nucleic acids encoding these proteins or peptides or fragments or variants thereof may be used as additional pharmaceutically active component.

[0720] Preferably, the heat shock protein may be chosen from the following list: HSP27, HSP47 (serpin H1), HSP60, HSP70, HSC70, GRP78 (BiP), HSP90, HSP110, GRP94 (gp96), GRP170 (ORP150), PDI/PDIA, CRT/CALR.

[0721] In this context particularly preferred are heat shock proteins as disclosed in Table 8 above.

[0722] In a particularly preferred embodiment, the at least one RNA of the RNA containing composition is an immunostimulating RNA, preferably according to SEQ ID NOs. 5, 394, or 10072 and is combined with at least one heat shock protein as defined above, or a fragment or variant thereof.

[0723] 7. Tumour Antigens:

[0724] In this context protein-based tumor antigens, or fragments and variants thereof as disclosed above in the context of “coding RNA” may be used as additional pharmaceutically active component. Alternatively, nucleic acids encoding these proteins or peptides or fragments or variants thereof may be used as additional pharmaceutically active component.

[0725] In this context particularly preferred are tumor antigens as disclosed in Table 9 above.

[0726] In a particularly preferred embodiment, the at least one RNA of the RNA containing composition is an immunostimulating RNA, preferably according to SEQ ID NOs. 5, 394, or 10072 and is combined with at least one tumor antigen as defined above, or a fragment or variant thereof.

[0727] 8. β-Catenin Inhibitors:

[0728] In this context protein-based β-catenin inhibitors, or fragments and variants thereof as disclosed above in the context of “coding RNA” may be used as additional pharmaceutically active component. Alternatively, nucleic acids encoding these proteins or peptides or fragments or variants thereof may be used as additional pharmaceutically active component.

[0729] Particular preferred β-catenin inhibitors according to the present invention comprise TAT-NLS-BLBD-6, axin-1, TCF-4, GSK-3b, DKK-1, Dvl-1 derivatives or fragments thereof.

[0730] Chemical β-Catenin Inhibitors:

[0731] According to the present invention, the at least one additional active pharmaceutical ingredient which may be contained in the inventive composition, and/or which may be co-administered, or which may be combined with the inventive composition may be a chemical β-catenin inhibitors. Chemical β-catenin inhibitors are known in the art that may be administered according to the present invention. Preferably the chemical β-catenin inhibitor is chosen from the following list: PKF118-310, CGP049090, PKF115-584, PKF222-815, PKF118-744, ICG001, CCT036477, XAV939, acyl hydrazones (HQBA), molecules with 2,3,6-trisubstituted pyrido[2,3,-b]pyrazine core skeletons, carnosic acid, CCT031374, iCRT-3,5,14, NC043, Ibuprofin, aspirin.

[0732] The following table 13 summarizes examples of small molecular inhibitors of β-catenin signaling which are particularly preferred in this context.

TABLE 13
β-catenin inhibitors

| Inhibitor | Target | Reference |
|---|---|---|
| PKF118-310, CGP049090, PKF115- | beta-catenin—TCF | Lepourcelet et al., 2004. |
| 584, PKF222-815 and PKF118-744 | interaction | Cancer Cell 5:91-102 |
| ICG001 | beta-catenin—CBP | Emami et al., 2004. Proc Natl |
| | interaction | Acad Sci USA 101:12682-7 |
| CCT036477 | beta-catenin—TCF | Ewan et al., 2010. Cancer |
| | interaction | Res. 70:5963-73 |
| XAV939 | Tankyrase | Huang et al., 2009. Nature |
| | | 461:614-20 |
| acyl hydrazones (HQBA) | Iron chelators | Song et al., 2011. Cancer Res. |
| | | 71:7628-39; Coombs et al., |
| | | 2012. Oncogene 31:213-25 |
| molecules with 2,3,6-trisubstituted | beta-catenin | Gong et al., 2011. Bioorg |
| pyrido[2,3,-b] pyrazine core | | Med Chem. 19:5639-47 |
| skeletons | | |
| carnosic acid | beta-catenin/BCL9 | de la Roche et al., Nat |
| | | Commun. 3:680 |
| CCT031374 | beta-catenin | Thorne et al., 2010. Nat |
| | | Chem Biol. 6:829-36 |
| iCRT-3,5,14, NC043 | beta-catenin—TCF | Wang et al., 2011. Cell Res. |
| | interaction | 21:730-40; Gonsalves et al., |
| | | 2011. Proc Natl Acad Sci USA |
| | | 108:5954-63 |
| Ibuprofin, aspirin | Cox2 Inhibitors | Greenspan et al., 2011. |
| | | Cancer Prev Res. 4:161-71 |

[0733] In a particularly preferred embodiment, the at least one RNA of the RNA containing composition is an immunostimulating RNA, preferably according to SEQ ID NOs. 5, 394, or 10072 and is combined with at least one β-catenin inhibitor as defined above, or a fragment or variant thereof.

[0734] 9. Activators of the STING Pathway

[0735] In this context protein-based activators of the STING pathway, or fragments and variants thereof as disclosed above in the context of “coding RNA” may be used as additional pharmaceutically active component. Alternatively, nucleic acids encoding these proteins or peptides or fragments or variants thereof may be used as additional pharmaceutically active component. Preferably, the at least one activator (stimulator) of the STING pathway is chosen from an activating protein or a constitutively active protein of the STING pathway, preferably DDX41, STING, cGAS, IRF3, TBK1 or STAT6 or a fragment or variant thereof.

[0736] Chemical STING-Pathway Activators:

[0737] In a further preferred embodiment the optional additional pharmaceutically active component may be selected from chemical activators of the STING pathway which are preferably selected from cyclic dinucleotides and xanthenone analogs.

[0738] Table 14 shows examples of chemical STING agonists. Further examples of STING agonists are disclosed in WO2014189805.

TABLE 14
Activators of STING pathway

| Class of STING activator | examples |
|---|---|
| cyclic dinucleotides | 3′3′-cGAMP, 2′3′-cGAMP, 2′2′-cGAMP, |
| | c-di-APM, c-di-GMP, c-di-IMP, c-di-UMP |
| xanthenone analogs | DMXAA, 5,6-dimethylxanthenone-4-acetic acid |

[0739] In a particularly preferred embodiment, the at least one RNA of the RNA containing composition is an immunostimulating RNA, preferably according to SEQ ID NOs. 5, 394, or 10072 and is combined with at least one STING pathway activator as defined above, or a fragment or variant thereof.

[0740] 10. Checkpoint Modulators

[0741] In this context protein-based checkpoint modulators, or fragments and variants thereof as disclosed above in the context of “coding RNA” may be used as additional pharmaceutically active component. Alternatively, nucleic acids encoding these proteins or peptides or fragments or variants thereof may be used as additional pharmaceutically active component.

[0742] In preferred embodiments of the present invention the checkpoint modulator is a modulator of B7-1/CD80, B7-2/CD86, B7-H1/PD-L1, B7-H2, B7-H3, B7-H4, B7-H6, B7-H7/HHLA2, BTLA, CD28, CD28H/IGPR-1, CTLA-4, ICOS, PD-1, PD-L2/B7-DC, PDCD6, VISTA/B7-H5/PD-1H, BTN1A1/Butyrophilin, BTN2A1, BTN2A2/Butyrophilin 2A2, BTN3A1/2, BTN3A2, BTN3A3, BTNL2/Butyrophilin-like 2, BTNL3, BTNL4, BTNL6, BTNL8, BTNL9, BTNL10, CD277/BTN3A1, LAIR1, LAIR2, CD96, CD155/PVR, CRTAM, DNAM-1/CD226, Nectin-2/CD112, Nectin-3, TIGIT, LILRA3/CD85e, LILRA4/CD85g/ILT7, LILRB1/CD85j/ILT2, LILRB2/CD85d/ILT4, LILRB3/CD85a/ILT5, LILRB4/CD85k/ILT3, 4-1BB/TNFRSF9/CD137, 4-1BB Ligand/TNFSF9, BAFF/BLyS/TNFSF13B, BAFF R/TNFRSF13C, CD27/TNFRSF7, CD27 Ligand/TNFSF7, CD30/TNFRSF8, CD30 Ligand/TNFSF8, CD40/TNFRSF5, CD40 Ligand/TNFSF5, DR3/TNFRSF25, GITR/TNFRSF18, GITR Ligand/TNFSF18, HVEM/TNFRSF14, LIGHT/TNFSF14, Lymphotoxin-alpha/TNF-beta, OX40/TNFRSF4, OX40 Ligand/TNFSF4, RELT/TNFRSF19L, TACI/TNFRSF13B, TL1A/TNFSF15, TNF-alpha, TNF RII/TNFRSF1B, 2B4/CD244/SLAMF4, BLAME/SLAMF8, CD2, CD2F-10/SLAMF9, CD48/SLAMF2, CD58/LFA-3, CD84/SLAMF5, CD229/SLAMF3, CRACC/SLAMF7, NTB-A/SLAMF6, SLAM/CD150, TIM-1/KIM-1/HAVCR, TIM-3, TIM-4, CD7, CD96, CD160, CD200, CD300a/LMIR1, CRTAM, DAP12, Dectin-1/CLEC7A, DPPIV/CD26, EphB6, Integrin alpha 4 beta 1, Integrin alpha 4 beta 7/LPAM-1, LAG-3, TIM-1/KIM-1/HAVCR, TIM-4, TSLP R, or any combinations thereof.

[0743] Preferably, the checkpoint modulator is selected from agonistic antibodies, antagonistic antibodies, ligands, dominant negative receptors and decoy receptors or combinations thereof.

[0744] Preferably, the agonistic antibody is chosen from the following list: anti-4-1BB, anti-OX40, anti-GITR, anti-CD28, anti-CD27, anti-CD-40anti-ICOS, anti-TNFRSF25, and anti-LIGHT.

[0745] Preferably, the antagonistic antibody is chosen from the list of anti-CTLA4, anti-PD1, anti-PD-L1, anti-Vista, anti-Tim-3, anti-LAG-3, and anti-BTLA.

[0746] Particularly preferred are the anti-CTLA-4 antibodies ipilimumab (Yervoy®), tremelimumab, and AGEN-1884.

[0747] Particularly preferred are the anti-PD1 antibodies Nivolumab (MDX-1106/BMS-936558/ONO-4538), (Brahmer et al., 2010. J Clin Oncol. 28(19):3167-75; PMID: 20516446); Pidilizumab (CT-011), (Berger et al., 2008. Clin Cancer Res. 14(10):3044-51; PMID: 18483370); Pembrolizumab (MK-3475, SCH 900475); AMP-224, and MED10680 (AMP-514).

[0748] Particularly preferred are the anti-PD-L1 antibodies MDX-1105/BMS-936559 (Brahmer et al. 2012. N Engl J Med. 366(26):2455-65; PMID: 22658128); atezolizumab (MPDL3280A/RG7446); durvalumab (MED14736); and avelumab (MSB0010718).

[0749] According to the present invention checkpoint modulators according to Table 15 are particularly preferred:

TABLE 15
Antibodies directed against immune checkpoint proteins

| Name | Target |
|---|---|
| Urelumab | 4-1BB/CD137 |
| PF-05082566 | 4-1BB/CD137 |
| 8H9 | B7-H3 |
| Enoblituzumab | B7-H3 |
| Ipilimumab | CD152/CTLA-4 |
| Ticilimumab (=tremelimumab) | CD152/CTLA-4 |
| Tremelimumab | CD152/CTLA-4 |
| Varlilumab | CD27 |
| Teneliximab | CD40 |
| Vorsetuzumab mafodotin | CD70 |
| Lirilumab | KIR2D |
| GSK-3174998 | OX40 |
| MEDI-6469 | OX40 |
| MEDI-6383 | OX40 |
| MEDI-0562 | OX40 |
| PF-04518600 | OX40 |
| RG-7888 | OX40 |
| PF-06801591 | PD-1 |
| BGBA-317 | PD-1 |
| MEDI-0680 | PD-1 |
| MK-3475 | PD-1 |
| Nivolumab | PD-1 |
| PDR-001 | PD-1 |
| Pembrolizumab | PD-1 |
| Pidilizumab | PD-1 |
| REGN-2810 | PD-1 |
| SHR-1210 | PD-1 |
| TSR-042 | PD-1 |
| MDX-1106 | PD-1 |
| Merck 3745 | PD-1 |
| CT-011 | PD-1 |
| MEDI-0680 | PD-1 |
| PDR001 | PD-1 |
| REGN2810 | PD-1 |
| BGB-108 | PD-1 |
| BGB-A317 | PD-1 |
| AMP-224 | PD-1 |
| Atezolizumab | PD-L1 (CD274) |
| Avelumab | PD-L1 (CD274) |
| BMS-936559 | PD-L1 (CD274) |
| Durvalumab | PD-L1 (CD274) |
| MEDI-4736 | PD-L1 (CD274) |
| MPDL33280A | PD-L1 (CD274) |
| YW243.55.570 | PD-L1 (CD274) |
| MDX-1105 | PD-L1 (CD274) |
| MSB0010718C | PD-L1 (CD274) |

[0750] In a further preferred embodiment the checkpoint modulator is a decoy receptor (e.g. a soluble receptor). Preferably, the decoy receptor is a soluble PD1 receptor. In a particularly preferred embodiment the RNA sequence encoding a soluble PD1 receptor comprises an RNA sequence according to SEQ ID NO: 389

[0751] In a further preferred embodiment the checkpoint modulator is a ligand of an immune checkpoint protein. Preferably, the ligand is CD40 Ligand (CD40L).

[0752] In a particularly preferred embodiment, the at least one RNA of the RNA containing composition is an immunostimulating RNA, preferably according to SEQ ID NOs. 5, 394, or 10072 and is combined with at least one checkpoint modulator as defined above, preferably selected from an anti-CTLA4 antibody, an anti-PD1 antibody, an anti PD-L1 antibody, a CD40 ligand, or a soluble PD1 receptor, or a fragment or variant thereof.

[0753] 11. Innate Immune Activators

[0754] In this context protein-based innate immune activators or fragments and variants thereof as disclosed above in the context of “coding RNA” may be used as additional pharmaceutically active component. Alternatively, nucleic acids encoding these proteins or peptides or fragments or variants thereof may be used as additional pharmaceutically active component.

[0755] In this context innate immune activators may be selected from mammalian, in particular human adjuvant proteins, which typically comprise any human protein or peptide, which is capable of eliciting an innate immune response (in a mammal), e.g. as a reaction of the binding of an exogenous TLR ligand to a TLR. More preferably, human adjuvant proteins are selected from the group consisting of proteins which are components and ligands of the signalling networks of the pattern recognition receptors including TLR, NLR and RLH, including TLR1, TLR2, TLR3, TLR4, TLR5, TLR6, TLR7, TLR8, TLR9, TLR10, TLR11; NOD1, NOD2, NOD3, NOD4, NOD5, NALP1, NALP2, NALP3, NALP4, NALP5, NALP6, NALP6, NALP7, NALP7, NALP8, NALP9, NALP10, NALP11, NALP12, NALP13, NALP14, I IPAF, NAIP, CIITA, RIG-I, MDA5 and LGP2, the signal transducers of TLR signaling including adaptor proteins including e.g. Trif and Cardif; components of the Small-GTPases signalling (RhoA, Ras, Rac1, Cdc42, Rab etc.), components of the PIP signalling (PI3K, Src-Kinases, etc.), components of the MyD88-dependent signalling (MyD88, IRAK1, IRAK2, IRAK4, TIRAP, TRAF6 etc.), components of the MyD88-independent signalling (TICAM1, TICAM2, TRAF6, TBK1, IRF3, TAK1, IRAK1 etc.); the activated kinases including e.g. Akt, MEKK1, MKK1, MKK3, MKK4, MKK6, MKK7, ERK1, ERK2, GSK3, PKC kinases, PKD kinases, GSK3 kinases, JNK, p38MAPK, TAK1, IKK, and TAK1; the activated transcription factors including e.g. NF-κB, c-Fos, c-Jun, c-Myc, CREB, AP-1, Elk-1, ATF2, IRF-3, IRF-7.

[0756] Mammalian, in particular human adjuvant proteins may furthermore be selected from the group consisting of heat shock proteins, such as HSP10, HSP60, HSP65, HSP70, HSP75 and HSP90, gp96, Fibrinogen, TypIII repeat extra domain A of fibronectin; or components of the complement system including C1q, MBL, C1r, C1s, C2b, Bb, D, MASP-1, MASP-2, C4b, C3b, C5a, C3a, C4a, C5b, C6, C7, C8, C9, CR1, CR2, CR3, CR4, C1qR, C1INH, C4bp, MCP, DAF, H, I, P and CD59, or induced target genes including e.g. Beta-Defensin, cell surface proteins; or human adjuvant proteins including trif, flt-3 ligand, Gp96 or fibronectin, etc., or any species homolog of any of the above human adjuvant proteins. Furthermore HGMB1 may be used as adjuvant protein.

[0757] Mammalian, in particular human adjuvant proteins may furthermore comprise cytokines which induce or enhance an innate immune response, including IL-1 alpha, IL1 beta, IL-2, IL-6, IL-7, IL-8, IL-9, IL-12, IL-13, IL-15, IL-16, IL-17, IL-18, IL-21, IL-23, TNFalpha, IFNalpha, IFNbeta, IFNgamma, GM-CSF, G-CSF, M-CSF; chemokines including IL-8, IP-10, MCP-1, MIP-1alpha, RANTES, Eotaxin, CCL21; cytokines which are released from macrophages, including IL-1, IL-6, IL-8, IL-12 and TNF-alpha; as well as IL-1R1 and IL-1 alpha.

[0758] Therefore in this context it particularly preferred that the at least innate immune activator, is preferably an adjuvant protein, more preferably a human adjuvant protein, or a fragment or variant thereof.

[0759] In this context it is particularly preferred that I constitutive active variant of an adjuvant protein is used as innate immune activator, preferably a constitutive active variant of RIG-1 (ΔRIGI).

[0760] In another preferred embodiment the at least one innate immune activator is HGMB1, or a fragment or variant thereof.

[0761] In this context particularly preferred are innate immune activators as disclosed in Table 11 above.

[0762] In a particularly preferred embodiment, the at least one RNA of the RNA containing composition is an immunostimulating RNA, preferably according to SEQ ID NOs. 5, 394, or 10072 and is combined with at least one innate immune activator as defined above, or a fragment or variant thereof.

[0763] 12. Antibodies, Decoy Receptors and Dominant Negative Receptors

[0764] In this context protein-based antibodies, decoy receptors, or dominant negative receptors or fragments and variants thereof as disclosed above in the context of “coding RNA” may be used as additional pharmaceutically active component. Alternatively, nucleic acids encoding these proteins or peptides or fragments or variants thereof may be used as additional pharmaceutically active component.

[0765] According to the present invention antibodies according to Table 16 are particularly preferred:

TABLE 16
Antibodies directed against proteins accociated with tumor or
cancer development

| Name | Target |
|---|---|
| 3F8 | GD2 |
| Abagovomab | CA-125 imitation |
| Abciximab | Platelet glycoprotein GPIIb/IIIa |
| Adecatumumab | EpCAM (CD326) |
| Afutuzumab | CD20 |
| Alacizumab pegol | VEGFR2 |
| Alemtuzumab | CD52 |
| Altumomab pentetate | CEA |
| Amatuximab | mesothelin |
| Anatumomab mafenatox | 5T4 |
| Anetumab ravtansine | mesothelin |
| Apolizumab | HLA-DR beta |
| apomab | TRAIL-R2 (CD262) |
| Arcitumomab | CEA |
| Ascrinvacumab | ACVRL1 |
| Bavituximab | phosphatidylserine |
| Bectumomab | CD22 |
| Belimumab | BAFF |
| Besilesomab | CEA |
| Bevacizumab | VEGF-A |
| Bivatuzumab mertansine | CD44v6 |
| Blinatumomab | CD19 × CD3 |
| Brentuximab vedotin | CD30 (TNFRSF8) |
| Brontictuzumab | NOTCH1 |
| canakinumab | IL-1β |
| Cantuzumab mertansine | CanAg |
| Cantuzumab ravtansine | MUC1 (CD227) |
| Capromab pendetide | PSMA |
| Carlumab | MCP-1 |
| Catumaxomab | EpCAM × CD3 |
| cBR-doxorubicin immunoconjugate | CD174 (Lewis Y) |
| Cetuximab | EGFR (HER1/ERBB1) |
| Citatuzumab bogatox | EpCAM |
| Cixutumumab | IGF-1R |
| Clivatuzumab tetraxetan | MUC1 (CD227) |
| Codrituzumab | glypican 3 |
| Coltuximab ravtansine | CD19 |
| Conatumumab | TRAIL-R2 (CD262) |
| Dacetuzumab | CD40 |
| Dalotuzumab | IGF-1R |
| Dalotuzumab | insulin-like growth factor I receptor |
| Daratumumab | CD38 (cyclic ADP ribose hydrolase) |
| Demcizumab | DLL4 |
| Denintuzumab mafodotin | CD19 |
| Denosumab | RANKL |
| Depatuxizumab | EGFR (HER1/ERBB1) |
| Derlotuximab | histone complex |
| Detumomab | unknown (B-lymphoma cells) |
| Dinutuximab | B4GALNT1 |
| Drozitumab | TRAIL-R2 (CD262) |
| Duligotumab | HER3 (ERBB3) |
| Duligotuzumab | EGFR (HER1/ERBB1) |
| Dusigitumab | ILGF2 |
| Ecromeximab | GD3 ganglioside |
| Edrecolomab | EpCAM |
| Elgemtumab | ERBB3 |
| Elotuzumab | SLAMF7 (CD319) |
| Elsilimomab | IL-6 |
| Emactuzumab | CSF1R |
| Emibetuzumab | HGFR |
| Emibetuzumab | MET |
| Enavatuzumab | TNFRSF12A |
| Enfortumab vedotin | AGS-22M6 |
| Enoticumab | DLL4 |
| Ensituximab | MUC5AC |
| Epitumomab cituxetan | MUC1 (CD227) |
| Epratuzumab | CD22 |
| Ertumaxomab | HER2 (ERBB2/neu) × CD3 |
| Etaracizumab | integrin α5β3 |
| Faralimomab | IFNA1 |
| Farletuzumab | FOLR1 alpha |
| FBTA | CD20 × CD3 |
| Ficlatuzumab | HGFR |
| Figitumumab | IGF-1R |
| Flanvotumab | TYRP1(glycoprotein 75) |
| Fresolimumab | TGF-β |
| Futuximab | EGFR (HER1/ERBB1) |
| Galiximab | CD80 |
| Gantiumab | IGF-1R |
| Gemtuzumab ozogamicin | CD33 |
| Girentuximab | Carbonic anhydrase 9 (CA9/CAIX) |
| Glembatumumab vedotin | GPNMB |
| glycooptimized trastuzumab-GEX | HER2 (ERBB2/neu) |
| Ibritumomab tiuxetan | CD20 |
| Icrucumab | VEGFR-1 |
| Igovomab | MUC16 |
| IMAB362 | Claudin-18 (CLDN18.2) |
| Imgatuzumab | EGFR (HER1/ERBB1) |
| Indatuximab ravtansine | SDC1 |
| Indusatumab vedotin | GUCY2C |
| inebilizumab | CD19 |
| Inotuzumab ozogamicin | CD22 |
| Intetumumab | CD51 |
| Iratumumab | CD30 (TNFRSF8) |
| Isatuximab | CD38 |
| Labetuzumab | CEA |
| Lenzilumab | CSF2 |
| Lexatumumab | TRAIL-R2 (CD262) |
| Lifastuzumab vedotin | NaPi2B |
| Lilotomab satetraxetan | CD37 |
| Lintuzumab | CD33 |
| Lorvotuzumab mertansine | CD56 |
| Lucatumumab | CD40 |
| Lumiliximab | CD23 (IgE receptor) |
| Lumretuzumab | ERBB3 |
| Mapatumumab | TRAIL-R1 (CD261) |
| Margetuximab | HER2 (ERBB2/neu) |
| Matuzumab | EGFR (HER1/ERBB1) |
| Mepolizumab | IL-5 |
| Milatuzumab | CD74 |
| Minretumomab | TAG-72 |
| Mirvetuximab soravtansine | FOLR1 alpha |
| Mitumomab | GD3 (ganglioside) |
| Mogamulizumab | CCR4 |
| Moxetumomab pasudotox | CD22 |
| Nacolomab tafenatox | C242 antigen |
| Naptumomab estafenatox | 5T4 |
| Narnatumab | RON |
| Necitumumab | EGFR (HER1/ERBB1) |
| Nesvacumab | ANGPT2 (angiopoietin 2) |
| Nimotuzumab | EGFR (HER1/ERBB1) |
| Nofetumomab merpentan | EpCAM |
| binutuzumab | CD20 |
| Ocaratuzumab | CD20 |
| Ofatumumab | CD20 |
| Olaratumab | PDGFRα |
| Onartuzumab | MET |
| Ontuxizumab | CD248 (TEM1) |
| Oportuzumab monatox | EpCAM |
| Oregovomab | CA-125 |
| Otlertuzumab | CD37 |
| Panitumumab | EGFR (HER1/ERBB1) |
| Pankomab | MUC1 (tumor specific glycosylation) |
| Parsatuzumab | EGFL7 |
| Pasotuxizumab | FOLH1 |
| Patritumab | HER3 (ERBB3) |
| Pemtumomab | MUC1 (CD227) |
| Pertuzumab | HER2 (ERBB2/neu) |
| Pinatuzumab vedotin | CD22 |
| Pintumomab | adenocarcinoma antigen |
| Polatuzumab vedotin | CD79B |
| Racotumomab | NGcGM3 |
| Radretumab | EDB (fibronectin extra domain-B) |
| Ramucirumab | VEGFR2 |
| Rilotumumab | HGFR |
| Rituximab | CD20 |
| Robatumumab | IGF-1R |
| Sacituzumab govitecan | Trop-2 (tumor-associated calcium |
| | signal transducer 2/EGP-1) |
| Samalizumab | CD200 (OX-2 membrane |
| | glycoprotein) |
| Satumomab pendetide | TAG-72 |
| Seribantumab | ERBB3 |
| Seribantumab | HER3 (ERBB3) |
| SGN-CDA | CD19 |
| SGN-CDA | CD33 |
| Sibrotuzumab | FAP |
| Siltuximab | IL-6 |
| Simtuzumab | LOXL2 |
| Sofituzumab vedotin | CA 125 |
| Solitomab | EpCAM |
| Sonepcizumab | S1P (sphingosine-1-phosphate) |
| Tacatuzumab tetraxetan | AFP (alpha-fetoprotein) |
| Taplitumomab paptox | CD19 |
| Tarextumab | Notch receptor |
| Tenatumomab | TN-C (tenascin C) |
| Teprotumumab | CD221 |
| Tetulomab | CD37 |
| TGN | CD28 |
| Tigatuzumab | TRAIL-R2 (CD262) |
| Lebrikizumab | IL-13 |
| Tocilizumab | IL-6R |
| Tositumomab | CD20 |
| Tovetumab | CD140a |
| Tovetumab | PDGFRα |
| Trastuzumab | HER2 (ERBB2/neu) |
| Trastuzumab emtansine | HER2 (ERBB2/neu) |
| TRBS | GD2 |
| Tucotuzumab celmoleukin | EpCAM |
| ublituximab | CD20 |
| Ublituximab | MS4A1 |
| Ulocuplumab | CXCR4 |
| Vandortuzumab vedotin | STEAP1 |
| Vantictumab | FZD7 |
| Vanucizumab | Ang-2 (angiopoietin 2) × VEGF-A |
| Veltuzumab | CD20 |
| Vesencumab | NRP1 |
| Volociximab | integrin α5β1 |
| Votumumab | CTAA16.88 |
| Zalutumumab | EGFR (HER1/ERBB1) |
| Zanolimumab | CD4 |
| Zatuximab | HER1 (EGFR/ERBB1) |

[0766] Preferably, the neutralizing antibody is chosen from the list of anti-IL-10 and anti-TGFbeta.

[0767] In a particularly preferred embodiment, the at least one RNA of the RNA containing composition is an immunostimulating RNA, preferably according to SEQ ID NOs. 5, 394, or 10072 and is combined with at least one antibody, preferably anti-CD73 antibody or at least one decoy receptor as defined above, or a fragment or variant thereof.

[0768] Furthermore, the at least one antibody may preferably chosen from anti-CD73 antibodies or fragments or variants thereof.

[0769] In a further particularly preferred embodiment the at least one antibody is chosen from an antibody directed against CCR5/CD195 or from an antibody directed against its ligand CCL5/RANTES or fragments or variants thereof.

[0770] In a particularly preferred embodiment the decoy receptor is a soluble CCR5 (chemokine receptor type 5, also known as CD195).

[0771] In a particularly preferred embodiment the dominant negative receptor is dominant negative CCR5 (chemokine receptor type 5, also known as CD195).

[0772] 13. Inhibitors of Myeloid Derived Suppressor Cells (MDSCs)

[0773] In this context protein-based inhibitors of myeloid derived suppressor cells (MDSCs), or fragments and variants thereof as disclosed above in the context of “coding RNA” may be used as additional pharmaceutically active component. Alternatively, nucleic acids encoding these proteins or peptides or fragments or variants thereof may be used as additional pharmaceutically active component.

[0774] It is particularly preferred to use anti IL-17 antibodies and IL-12 as inhibitors of MDSCs.

[0775] In the context of the invention, MDSC inhibition can be achieved by direct deactivation of MDSCs (e.g., chemical NO inhibitors (PDE-5 inhibitors, NO-aspirins, L-NAME), Arginase inhibitors (PDE-5 inhibitors, COX2 inhibitors, NOHA, L-NAME), ROS inhibitors (synthetic Triterpenoids)), by blocking differentiation of MDSCs into mature cells (e.g., ATRA, Vitamin A, Vitamin D3, CpG), by blocking the cell development of MDSCs (e.g. bisphosphorates (zolodronic acid), modulators of cell signaling (JAK2/STAT3 inhibitors, Multi-Kinase inhibitors, VEGF inhibitors)), or by depletion of MDSCs (e.g., cytotoxic agents (gemcitabine, cisplatin, paclitaxel, 5-fluorouracil) or HSP 90 inhibitors (17-DMAG)). Therefore these compounds may also be used as additional pharmaceutically active compound.

[0776] In a particularly preferred embodiment, the at least one RNA of the RNA containing composition is an immunostimulating RNA, preferably according to SEQ ID NOs. 5, 394, or 10072 and is combined with at least one inhibitor of MDSCs as defined above, or a fragment or variant thereof.

[0777] 14. IDO Pathway Inhibitors

[0778] In this context protein-based IDO pathway inhibitors, or fragments and variants thereof as disclosed above in the context of “coding RNA” may be used as additional pharmaceutically active component. Alternatively, nucleic acids encoding these proteins or peptides or fragments or variants thereof may be used as additional pharmaceutically active component.

[0779] Chemical IDO Pathway Inhibitor:

[0780] In a further preferred embodiment the additional pharmaceutically active component may be selected from an IDO pathway inhibitor, which is preferably selected from small molecule inhibitor. Preferably the IDO pathway inhibitor is chosen from the following list: Indoximod (the D isomer of 1-methyl-tryptophan) and NLG919).

[0781] In a particularly preferred embodiment, the at least one RNA of the RNA containing composition is an immunostimulating RNA, preferably according to SEQ ID NOs. 5, 394, or 10072 and is combined with at least one IDO pathway inhibitor as defined above, or a fragment or variant thereof.

[0782] 15. Proteins or Peptides that Bind Inhibitors of Apoptosis

[0783] Apoptosis is a tightly regulated cellular process and faulty regulation of apoptosis is a hallmark of human cancers. Targeting key apoptosis regulators with the goal to restore apoptosis in tumor cells has been pursued as a new cancer therapeutic strategy. XIAP, cIAP1, and cIAP2, members of inhibitor of apoptosis (IAP) proteins, are critical regulators of cell death and survival and are attractive targets for new cancer therapy. The SMAC/DIABLO protein is an endogenous antagonist of XIAP, cIAP1, and cIAP2. In the last decade, intense research efforts have resulted in the design and development of several small-molecule SMAC mimetics now in clinical trials for cancer treatment

[0784] In a further preferred embodiment, the inventive composition comprises at least one molecule that binds inhibitors of apoptosis proteins (IAPB) and thus sensitize cancer cells to apoptotic death.

[0785] Therefore it is particularly preferred that the inventive RNA containing composition comprises at least one molecule that binds inhibitors of apoptosis, such as SMAC mimetics.

[0786] Particularly preferred proteins or peptides that bind IAPB according to the present invention comprise Omi/HtrA2, Smac, Smac derived peptides, Smac/DIABLO, and XAF1 (XIAP-associated factor 1) and fragments or variants thereof.

[0787] In this context proteins or peptides that bind inhibitors of apoptosis, or fragments and variants thereof as disclosed above in the context of “coding RNA” may be used as additional pharmaceutically active component. Alternatively, nucleic acids encoding these proteins or peptides or fragments or variants thereof may be used as additional pharmaceutically active component.

[0788] Therefore it is particularly preferred that the additional pharmaceutically active component is selected from proteins or peptides that bind inhibitors of apoptosis, such as SMAC mimetics. Furthermore it is particularly preferred that such SMAC mimetics used as additional pharmaceutically active component are small molecules inhibiting inhibitors of apoptosis.

[0789] In a particularly preferred embodiment, the at least one RNA of the RNA containing composition is an immunostimulating RNA, preferably according to SEQ ID NOs. 5, 394, or 10072 and is combined with at least one proteins or peptides that bind inhibitors of apoptosis as defined above, or a fragment or variant thereof.

[0790] 16. Anti-Bacterial Agent:

[0791] According to the present invention, the at least one additional pharmaceutically active component which may be contained in the inventive composition, and/or which may be co-administered, may be an anti-bacterial agent. In this context, any anti-bacterial agents known to one of skill in the art may be used in combination with the components of the inventive composition as defined herein. Non-limiting examples of anti-bacterial agents include Amikacin, Amoxicillin, Amoxicillin-clavulanic acid, Amphothericin-B, Ampicillin, Ampicllin-sulbactam, Apramycin, Azithromycin, Aztreonam, Bacitracin, Benzylpenicillin, Caspofungin, Cefaclor, Cefadroxil, Cefalexin, Cefalothin, Cefazolin, Cefdinir, Cefepime, Cefixime, Cefmenoxime, Cefoperazone, Cefoperazone-sulbactam, Cefotaxime, Cefoxitin, Cefbirome, Cefpodoxime, Cefpodoxime-clavulanic acid, Cefpodoxime-sulbactam, Cefbrozil, Cefquinome, Ceftazidime, Ceftibutin, Ceftiofur, Ceftobiprole, Ceftriaxon, Cefuroxime, Chloramphenicole, Florfenicole, Ciprofloxacin, Clarithromycin, Clinafloxacin, Clindamycin, Cloxacillin, Colistin, Cotrimoxazol (Trimthoprim/sulphamethoxazole), Dalbavancin, Dalfopristin/Quinopristin, Daptomycin, Dibekacin, Dicloxacillin, Doripenem, Doxycycline, Enrofloxacin, Ertapenem, Erythromycin, Flucloxacillin, Fluconazol, Flucytosin, Fosfomycin, Fusidic acid, Garenoxacin, Gatifloxacin, Gemifloxacin, Gentamicin, Imipenem, Itraconazole, Kanamycin, Ketoconazole, Levofloxacin, Lincomycin, Linezolid, Loracarbef, Mecillnam (amdinocillin), Meropenem, Metronidazole, Meziocillin, Mezlocillin-sulbactam, Minocycline, Moxifloxacin, Mupirocin, Nalidixic acid, Neomycin, Netilmicin, Nitrofurantoin, Norfloxacin, Ofloxacin, Oxacillin, Pefloxacin, Penicillin V, Piperacillin, Piperacillin-sulbactam, Piperacillin-tazobactam, Rifampicin, Roxythromycin, Sparfloxacin, Spectinomycin, Spiramycin, Streptomycin, Sulbactam, Sulfamethoxazole, Teicoplanin, Telavancin, Telithromycin, Temocillin, Tetracyklin, Ticarcillin, Ticarcillin-clavulanic acid, Tigecycline, Tobramycin, Trimethoprim, Trovafloxacin, Tylosin, Vancomycin, Virginiamycin, and Voriconazole.

[0792] 17. Anti-Viral Agents:

[0793] According to the present invention, the at least one additional pharmaceutically active component/compound, which may be contained in the inventive composition, and/or which may be co-administered, may be an anti-viral agents, preferably, but are not limited to, nucleoside analogs (e.g., zidovudine, acyclovir, gangcyclovir, vidarabine, idoxuridine, trifluridine, and ribavirin), foscarnet, amantadine, peramivir, rimantadine, saquinavir, indinavir, ritonavir, alpha-interferons and other interferons, AZT, t-705, zanamivir (Relenza®), and oseltamivir)(Tamiflu®). Other anti-viral agents include influenza virus vaccines, e.g., Fluarix® (Glaxo SmithKline), FluMist® (MedImmune Vaccines), Fluvirin® (Chiron Corporation), Flulaval® (GlaxoSmithKline), Afluria® (CSL Biotherapies Inc.), Agriflu® (Novartis) or Fluzone® (Aventis Pasteur).

[0794] 18. Drugs:

[0795] In some embodiments, the additional pharmaceutically active component/compound may include at least one drug. The term “drug” is intended to include any substance that, when introduced or absorbed into the body of a living organism, alters normal bodily or cellular function. Some non-limiting examples of suitable drugs, including combinations and alternative forms of the drugs such as alternative salt forms, free acid form, free base forms, pro-drugs and hydrates, include: analgesics/antipyretics (e.g., aspirin, acetaminophen, ibuprofen, naproxen sodium, buprenorphine, propoxyphene hydrochloride, propoxyphene napsylate, meperidine hydrochloride, hydromorphone hydrochloride, morphine, oxycodone, codeine, dihydrocodeine bitartrate, pentazocine, hydrocodone bitartrate, levorphanol, diflunisal, trolamine salicylate, nalbuphine hydrochloride, mefenamic acid, butorphanol, choline salicylate, butalbital, phenyltoloxamine citrate, diphenhydramine citrate, methotrimeprazine, cinnamedrine hydrochloride, and meprobamate); antiasthmatics (e.g., ketotifen and traxanox); antibiotics (e.g., neomycin, streptomycin, chloramphenicol, cephalosporin, ampicillin, penicillin, tetracycline, and ciprofloxacin); antidepressants (e.g., nefopam, oxypertine, doxepin, amoxapine, trazodone, amitriptyline, maprotiline, phenelzine, desipramine, nortriptyline, tranylcypromine, fluoxetine, imipramine, imipramine pamoate, isocarboxazid, trimipramine, and protriptyline); antidiabetics (e.g., biguanides and sulfonylurea derivatives); antifungal agents (e.g., griseofulvin, ketoconazole, itraconazole, amphotericin B, nystatin, and candicidin); antihypertensive agents (e.g., propanolol, propafenone, oxyprenolol, nifedipine, reserpine, trimethaphan, phenoxybenzamine, pargyline hydrochloride, deserpidine, diazoxide, guanethidine monosulfate, minoxidil, rescinnamine, sodium nitroprusside, rauwolfia serpentine, alseroxylon, and phentolamine); anti-inflammatories (e.g., (non-steroidal) indomethacin, ketoprofen, flurbiprofen, naproxen, ibuprofen, ramifenazone, piroxicam, (steroidal) cortisone, dexamethasone, fluazacort, deflazacort, celecoxib, rofecoxib, hydrocortisone, prednisolone, and prednisone); antineoplastics (e.g., cyclophosphamide, actinomycin, bleomycin, dactinomycin, daunorubicin, doxorubicin, epirubicin, mitomycin, methotrexate, fluorouracil, gemcitabine, carboplatin, carmustine (BCNU), methyl-CCNU, cisplatin, etoposide, camptothecin and derivatives thereof, phenesterine, paclitaxel and derivatives thereof, docetaxel and derivatives thereof, vinblastine, vincristine, goserelin, leuprolide, tamoxifen, interferon alfa, retinoic acid (ATRA), nitrogen mustard alkylating agents, and piposulfan); antianxiety agents (e.g., lorazepam, buspirone, prazepam, chlordiazepoxide, oxazepam, clorazepate dipotassium, diazepam, hydroxyzine pamoate, hydroxyzine hydrochloride, alprazolam, droperidol, halazepam, chlormezanone, and dantrolene); immunosuppressive agents (e.g., cyclosporine, azathioprine, mizoribine, and FK506 (tacrolimus)); antimigraine agents (e.g., ergotamine, propanolol, isometheptene mucate, and dichloralphenazone); sedatives/hypnotics (e.g., barbiturates such as pentobarbital, pentobarbital, and secobarbital; and benzodiazapines such as flurazepam hydrochloride, triazolam, and midazolam); antianginal agents (e.g., beta-adrenergic blockers; calcium channel blockers such as nifedipine, and diltiazem; and nitrates such as nitroglycerin, isosorbide dinitrate, pentearythritol tetranitrate, and erythrityl tetranitrate); antipsychotic agents (e.g., haloperidol, loxapine succinate, loxapine hydrochloride, thioridazine, thioridazine hydrochloride, thiothixene, fluphenazine, fluphenazine decanoate, fluphenazine enanthate, trifluoperazine, chlorpromazine, perphenazine, lithium citrate, and prochlorperazine); antimanic agents (e.g., lithium carbonate); antiarrhythmics (e.g., bretylium tosylate, esmolol, verapamil, amiodarone, encamide, digoxin, digitoxin, mexiletine, disopyramide phosphate, procainamide, quinidine sulfate, quinidine gluconate, quinidine polygalacturonate, flecamide acetate, tocamide, and lidocaine); antiarthritic agents (e.g., phenylbutazone, sulindac, penicillanine, salsalate, piroxicam, azathioprine, indomethacin, meclofenamate, gold sodium thiomalate, ketoprofen, auranofin, aurothioglucose, and tolmetin sodium); antigout agents (e.g., colchicine, and allopurinol); anticoagulants (e.g., heparin, heparin sodium, and warfarin sodium); thrombolytic agents (e.g., urokinase, streptokinase, and alteplase); antifibrinolytic agents (e.g., aminocaproic acid); hemorheologic agents (e.g., pentoxifylline); antiplatelet agents (e.g., aspirin); anticonvulsants (e.g., valproic acid, divalproex sodium, phenyloin, phenyloin sodium, clonazepam, primidone, phenobarbital, carbamazepine, amobarbital sodium, methsuximide, metharbital, mephobarbital, mephenyloin, phensuximide, paramethadione, ethotoin, phenacemide, secobarbital sodium, clorazepate dipotassium, and trimethadione); antiparkinson agents (e.g., ethosuximide); antihistamines/antipruritics (e.g., hydroxyzine, diphenhydramine, chlorpheniramine, brompheniramine maleate, cyproheptadine hydrochloride, terfenadine, clemastine fumarate, triprolidine, carbinoxamine, diphenylpyraline, phenindamine, azatadine, tripelennamine, dexchlorpheniramine maleate, methdilazine, and); agents useful for calcium regulation (e.g., calcitonin, and parathyroid hormone); antibacterial agents (e.g., amikacin sulfate, aztreonam, chloramphenicol, chloramphenicol palmitate, ciprofloxacin, clindamycin, clindamycin palmitate, clindamycin phosphate, metronidazole, metronidazole hydrochloride, gentamicin sulfate, lincomycin hydrochloride, tobramycin sulfate, vancomycin hydrochloride, polymyxin B sulfate, colistimethate sodium, and colistin sulfate); antiviral agents (e.g., interferon alpha, beta or gamma, zidovudine, amantadine hydrochloride, ribavirin, and acyclovir); antimicrobials (e.g., cephalosporins such as cefazolin sodium, cephradine, cefaclor, cephapirin sodium, ceftizoxime sodium, cefoperazone sodium, cefotetan disodium, cefuroxime axetil, cefotaxime sodium, cefadroxil monohydrate, cephalexin, cephalothin sodium, cephalexin hydrochloride monohydrate, cefamandole nafate, cefoxitin sodium, cefonicid sodium, ceforanide, ceftriaxone sodium, ceftazidime, cefadroxil, cephradine, and cefuroxime sodium; penicillins such as ampicillin, amoxicillin, penicillin G benzathine, cyclacillin, ampicillin sodium, penicillin G potassium, penicillin V potassium, piperacillin sodium, oxacillin sodium, bacampicillin hydrochloride, cloxacillin sodium, ticarcillin disodium, azlocillin sodium, carbenicillin indanyl sodium, penicillin G procaine, methicillin sodium, and nafcillin sodium; macrolides such as, azithromycin, clarithromycin, and erythromycins such as erythromycin ethylsuccinate, erythromycin, erythromycin estolate, erythromycin lactobionate, erythromycin stearate, and erythromycin ethylsuccinate; and tetracyclines such as tetracycline hydrochloride, doxycycline hyclate, and minocycline hydrochloride); anti-infectives (e.g., GM-CSF); bronchodilators (e.g., sympathomimetics such as epinephrine hydrochloride, metaproterenol sulfate, terbutaline sulfate, isoetharine, isoetharine mesylate, isoetharine hydrochloride, albuterol sulfate, albuterol, bitolterolmesylate, isoproterenol hydrochloride, terbutaline sulfate, epinephrine bitartrate, metaproterenol sulfate, epinephrine, and epinephrine bitartrate; anticholinergic agents such as ipratropium bromide; xanthines such as aminophylline, dyphylline, metaproterenol sulfate, and theophylline; mast cell stabilizers such as cromolyn sodium; inhalant corticosteroids such as beclomethasone dipropionate (BDP), and beclomethasone dipropionate monohydrate; salbutamol; ipratropium bromide; budesonide; salmeterol; xinafoate; triamcinolone; nedocromil sodium; flunisolide; fluticasone propionate; steroidal compounds and hormones (e.g., androgens such as danazol, testosterone cypionate, fluoxymesterone, ethyltestosterone, testosterone enathate, methyltestosterone; estrogens such as estradiol, estropipate, and conjugated estrogens; progestins such as methoxyprogesterone acetate, and norethindrone acetate; corticosteroids such as triamcinolone, betamethasone, betamethasone sodium phosphate, dexamethasone, dexamethasone sodium phosphate, dexamethasone acetate, prednisone, methylprednisolone acetate suspension, triamcinolone acetonide, methylprednisolone, prednisolone sodium phosphate, methylprednisolone sodium succinate, hydrocortisone sodium succinate, triamcinolone hexacetonide, hydrocortisone, hydrocortisone cypionate, prednisolone, fludrocortisone acetate, paramethasone acetate, prednisolone tebutate, prednisolone acetate, prednisolone sodium phosphate, and thyroid hormones such as levothyroxine sodium); hypoglycemic agents (e.g., human insulin, purified beef insulin, purified pork insulin, glyburide, metformin, chlorpropamide, glipizide, tolbutamide, and tolazamide); hypolipidemic agents (e.g., clofibrate, dextrothyroxine sodium, probucol, pravastitin, atorvastatin, lovastatin, and niacin); proteins (e.g., DNase, alginase, superoxide dismutase, and lipase); nucleic acids (e.g., anti-sense nucleic acids); agents useful for erythropoiesis stimulation (e.g., erythropoietin); antiulcer/antireflux agents (e.g., famotidine, cimetidine, and ranitidine hydrochloride); antinauseants/antiemetics (e.g., meclizine hydrochloride, nabilone, prochlorperazine, dimenhydrinate, promethazine hydrochloride, thiethylperazine, and scopolamine); as well as other drugs useful in the compositions and methods described herein include mitotane, halonitrosoureas, anthrocyclines, ellipticine, ceftriaxone, ketoconazole, ceftazidime, oxaprozin, valacyclovir, urofollitropin, famciclovir, flutamide, enalapril, itraconazole, buspirone, gabapentin, fosinopril, tramadol, acarbose, lorazepam, follitropin, omeprazole, fluoxetine, lisinopril, tramadol, levofloxacin, zafirlukast, interferon, growth hormone, interleukin, erythropoietin, granulocyte stimulating factor, nizatidine, bupropion, perindopril, erbumine, adenosine, alendronate, alprostadil, benazepril, betaxolol, bleomycin sulfate, dexfenfluramine, diltiazem, fentanyl, flecamide, gemcitabine, glatiramer acetate, granisetron, lamivudine, mangafodipir trisodium, mesalamine, metoprolol fumarate, metronidazole, miglitol, moexipril, monteleukast, octreotide acetate, olopatadine, paricalcitol, somatropin, sumatriptan succinate, tacrine, verapamil, nabumetone, trovafloxacin, dolasetron, zidovudine, finasteride, tobramycin, isradipine, tolcapone, enoxaparin, fluconazole, lansoprazole, terbinafine, pamidronate, didanosine, diclofenac, cisapride, venlafaxine, troglitazone, fluvastatin, losartan, imiglucerase, donepezil, olanzapine, valsartan, fexofenadine, calcitonin, and ipratropium bromide. In some embodiments, the drug may be water soluble. In some embodiments, the drug may not be water soluble

[0796] 19. Combination with Standard Therapy

[0797] According to the present invention, the at least one additional pharmaceutically active component/compound which may be contained in the inventive composition, and/or which may be co-administered, may be selected from any standard therapy used for the treatment of the particular tumor or cancer disease, e.g any chemotherapy, checkpoint modulator, kinase inhibitor etc.

[0798] Adjuvants and Further Components:

[0799] According to the present invention, the at least one additional pharmaceutically active component/compound which may be contained in the inventive composition, and/or which may be co-administered may be an adjuvant. According to a specific embodiment, the inventive composition may comprise an adjuvant. In this context, an adjuvant may be understood as any compound, which is suitable to initiate or increase an immune response of the innate immune system, i.e. a non-specific immune response. With other words, when administered, the inventive composition preferably elicits an innate immune response due to the adjuvant, optionally contained therein. Preferably, such an adjuvant may be selected from an adjuvant known to a skilled person and suitable for the present case, i.e. supporting the induction of an innate immune response in a mammal.

[0800] Particularly preferred as adjuvants suitable for depot and delivery are cationic or polycationic compounds as defined above for the RNA of the inventive composition as vehicle, transfection or complexation agent.

[0801] Furthermore, the inventive composition may comprise one or more additional adjuvants which are suitable to initiate or increase an immune response of the innate immune system, i.e. a non-specific immune response, particularly by binding to pathogen-associated molecular patterns (PAMPs). With other words, when administered, the pharmaceutical composition preferably elicits an innate immune response due to the adjuvant, optionally contained therein. Preferably, such an adjuvant may be selected from an adjuvant known to a skilled person and suitable for the present case, i.e. supporting the induction of an innate immune response in a mammal.

[0802] Also such an adjuvant may be selected from any adjuvant known to a skilled person and suitable for the present case, i.e. supporting the induction of an innate immune response in a mammal and/or suitable for depot and delivery of the components of the inventive composition. Preferred as adjuvants suitable for depot and delivery are cationic or polycationic compounds as defined above. Likewise, the adjuvant may be selected from the group consisting of, e.g., cationic or polycationic compounds as defined above, from chitosan, TDM, MDP, muramyl dipeptide, pluronics, alum solution, aluminium hydroxide, ADJUMERTM (polyphosphazene); aluminium phosphate gel; glucans from algae; algammulin; aluminium hydroxide gel (alum); highly protein-adsorbing aluminium hydroxide gel; low viscosity aluminium hydroxide gel; AF or SPT (emulsion of squalane (5%), Tween 80 (0.2%), Pluronic L121 (1.25%), phosphate-buffered saline, pH 7.4); AVRIDINETM (propanediamine); BAY R1005TM ((N-(2-deoxy-2-L-leucylaminob-D-glucopyranosyl)-N-octadecyl-dodecanoyl-amide hydroacetate); CALCITRIOLTM (1-alpha,25-dihydroxy-vitamin D3); calcium phosphate gel; CAPTM (calcium phosphate nanoparticles); cholera holotoxin, cholera-toxin-A1-protein-A-D-fragment fusion protein, sub-unit B of the cholera toxin; CRL 1005 (block copolymer P1205); cytokine-containing liposomes; DDA (dimethyldioctadecylammonium bromide); DHEA (dehydroepiandrosterone); DMPC (dimyristoylphosphatidylcholine); DMPG (dimyristoylphosphatidylglycerol); DOC/alum complex (deoxycholic acid sodium salt); Freund's complete adjuvant; Freund's incomplete adjuvant; gamma inulin; Gerbu adjuvant (mixture of: i)N-acetylglucosaminyl-(P1-4)-N-acetylmuramyl-L-alanyl-D35 glutamine (GMDP), ii) dimethyldioctadecylammonium chloride (DDA), iii) zinc-L-proline salt complex (ZnPro-8); GM-CSF); GMDP (N-acetylglucosaminyl-(b1-4)-N-acetylmuramyl-L47 alanyl-D-isoglutamine); imiquimod (1-(2-methypropyl)-1H-imidazo[4,5-c]quinoline-4-amine); ImmTherTM (N-acetylglucosaminyl-N-acetylmuramyl-L-Ala-D-isoGlu-L-Ala-glycerol dipalmitate); DRVs (immunoliposomes prepared from dehydration-rehydration vesicles); interferongamma; interleukin-1beta; interleukin-2; interleukin-7; interleukin-12; ISCOMSTM; ISCOPREP 7.0.3. TM; liposomes; LOXORIBINETM (7-allyl-8-oxoguanosine); LT 5 oral adjuvant (E. coli labile enterotoxin-protoxin); microspheres and microparticles of any composition; MF59TM; (squalenewater emulsion); MONTANIDE ISA 51TM (purified incomplete Freund's adjuvant); MONTANIDE ISA 720TM (metabolisable oil adjuvant); MPLTM (3-Q-desacyl-4′-monophosphoryl lipid A); MTP-PE and MTP-PE liposomes ((N-acetyl-L-alanyl-D-isoglutaminyl-L-alanine-2-(1,2-dipalmitoyl-sn-glycero-3-(hydroxyphosphoryloxy))-ethylamide, monosodium salt); MURAMETIDETM (Nac-Mur-L-Ala-D-Gln-OCH3); MURAPALMITINETM and DMURAPALMITINETM (Nac-Mur-L-Thr-D-isoGln-sn-glyceroldipalmitoyl); NAGO (neuraminidase-galactose oxidase); nanospheres or nanoparticles of any composition; NISVs (non-ionic surfactant vesicles); PLEURANTM (β-glucan); PLGA, PGA and PLA (homo- and co-polymers of lactic acid and glycolic acid; microspheres/nanospheres); PLURONIC L121TM; PMMA (polymethylmethacrylate); PODDSTM (proteinoid microspheres); polyethylene carbamate derivatives; poly-rA: poly-rU (polyadenylic acid-polyuridylic acid complex); polysorbate 80 (Tween 80); protein cochleates (Avanti Polar Lipids, Inc., Alabaster, Ala.); STIMULONTM (QS-21); Quil-A (Quil-A saponin); S-28463 (4-amino-otec-dimethyl-2-ethoxymethyl-1H-imidazo[4,5-c]quinoline-1-ethanol); SAF-1TM (“Syntex adjuvant formulation”); Sendai proteoliposomes and Sendai containing lipid matrices; Span-85 (sorbitan trioleate); Specol (emulsion of Marcol 52, Span 85 and Tween 85); squalene or Robane® (2,6,10,15,19,23-hexamethyltetracosan and 2,6,10,15,19,23-hexamethyl-2,6,10,14,18,22-tetracosahexane); stearyltyrosine (octadecyltyrosine hydrochloride); Theramid® (N-acetylglucosaminyl-N-acetylmuramyl-L-Ala-D-isoGlu-L-Aladipalmitoxypropylamide); Theronyl-MDP (TermurtideTM or [thr 1]-MDP; N-acetylmuramyl-Lthreonyl-D-isoglutamine); Ty particles (Ty-VLPs or virus-like particles); Walter-Reed liposomes (liposomes containing lipid A adsorbed on aluminium hydroxide), and lipopeptides, including Pam3Cys, in particular aluminium salts, such as Adju-phos, Alhydrogel, Rehydragel; emulsions, including CFA, SAF, IFA, MF59, Provax, TiterMax, Montanide, Vaxfectin; copolymers, including Optivax (CRL1005), L121, Poloaxmer4010), etc.; liposomes, including Stealth, cochleates, including BIORAL; plant derived adjuvants, including QS21, Quil A, Iscomatrix, ISCOM; adjuvants suitable for costimulation including Tomatine, biopolymers, including PLG, PMM, Inulin, microbe derived adjuvants, including Romurtide, DETOX, MPL, CWS, Mannose, CpG nucleic acid sequences, CpG7909, ligands of human TLR 1-10, ligands of murine TLR 1-13, ISS-1018, 35 IC31, Imidazoquinolines, Ampligen, Ribi529, IMOxine, IRIVs, VLPs, cholera toxin, heat-labile toxin, Pam3Cys, Flagellin, GPI anchor, LNFPIII/Lewis X, antimicrobial peptides, UC-1V150, RSV fusion protein, cdiGMP; and adjuvants suitable as antagonists including CGRP neuropeptide.

[0803] Particularly preferred, an adjuvant may be selected from adjuvants, which support induction of a Th1-immune response or maturation of naïve T-cells, such as GM-CSF, IL-12, IFNg, any RNA as defined herein, preferably an immunostimulatory RNA, CpG DNA, etc.

[0804] It is possible that the inventive composition contains besides the at least one RNA as described above further components which are selected from the group comprising: further antigens or further antigen-providing nucleic acids; a further immunotherapeutic agent; one or more auxiliary substances; or any further compound, which is known to be immunostimulating due to its binding affinity (as ligands) to human Toll-like receptors; and/or an adjuvant nucleic acid, preferably an immunostimulatory RNA (is RNA).

[0805] The inventive composition can additionally contain one or more auxiliary substances in order to increase its immunogenicity or immunostimulatory capacity, if desired. A synergistic action of the at least one RNA as defined herein and of an auxiliary substance, which may be optionally contained in the inventive composition, is preferably achieved thereby. Depending on the various types of auxiliary substances, various mechanisms can come into consideration in this respect. For example, compounds that permit the maturation of dendritic cells (DCs), for example lipopolysaccharides, TNF-alpha or CD40 ligand, form a first class of suitable auxiliary substances. In general, it is possible to use as auxiliary substance any agent that influences the immune system in the manner of a “danger signal” (LPS, GP96, etc.) or cytokines, such as GM-CFS, which allow an immune response to be enhanced and/or influenced in a targeted manner. Particularly preferred auxiliary substances are cytokines, such as monokines, lymphokines, interleukins or chemokines, that further promote the innate immune response, such as IL-1, IL-2, IL-3, IL-4, IL-5, IL-6, IL-7, IL-8, IL-9, IL-10, IL-12, IL-13, IL-14, IL-15, IL-16, IL-17, IL-18, IL-19, IL-20, IL-21, IL-22, IL-23, IL-24, IL-25, IL-26, IL-27, IL-28, IL-29, IL-30, IL-31, IL-32, IL-33, IFN-alpha, IFN-beta, IFN-gamma, GM-CSF, G-CSF, M-CSF, LT-beta or TNF-alpha, growth factors, such as hGH.

[0806] The inventive composition may contain any further compound, which is known to be immunostimulating due to its binding affinity (as ligands) to human Toll-like receptors TLR1, TLR2, TLR3, TLR4, TLR5, TLR6, TLR7, TLR8, TLR9, TLR10, or due to its binding affinity (as ligands) to murine Toll-like receptors TLR1, TLR2, TLR3, TLR4, TLR5, TLR6, TLR7, TLR8, TLR9, TLR10, TLR11, TLR12 or TLR13.

[0807] Further additives which may be included in the inventive composition are emulsifiers, such as, for example, Tween; wetting agents, such as, for example, sodium lauryl sulfate; colouring agents; taste-imparting agents, pharmaceutical carriers; tablet-forming agents; stabilizers; antioxidants; preservatives.

[0808] Pharmaceutical Composition:

[0809] In a further aspect, the present invention also provides a pharmaceutical composition, comprising the RNA containing composition as defined herein and a pharmaceutically acceptable carrier and/or vehicle. Preferably the pharmaceutical composition is prepared for intratumoral application, preferably by injection into tumor tissue. Sterile injectable forms of the inventive pharmaceutical composition may be aqueous or oleaginous suspension. These suspensions may be formulated according to techniques known in the art using suitable dispersing or wetting agents and suspending agents.

[0810] A pharmaceutically acceptable carrier typically includes the liquid or non-liquid basis of a composition comprising the components of the inventive composition. If the composition is provided in liquid form, the carrier will typically be pyrogen-free water; isotonic saline or buffered (aqueous) solutions, e.g. phosphate, citrate etc. buffered solutions. The injection buffer may be hypertonic, isotonic or hypotonic with reference to the specific reference medium, i.e. the buffer may have a higher, identical or lower salt content with reference to the specific reference medium, wherein preferably such concentrations of the afore mentioned salts may be used, which do not lead to damage of cells due to osmosis or other concentration effects. Reference media are e.g. liquids occurring in “in vivo” methods, such as blood, lymph, cytosolic liquids, or other body liquids, or e.g. liquids, which may be used as reference media in “in vitro” methods, such as common buffers or liquids. Such common buffers or liquids are known to a skilled person. Ringer-Lactate solution is particularly preferred as a liquid basis.

[0811] However, one or more compatible solid or liquid fillers or diluents or encapsulating compounds, which are suitable for administration to a patient to be treated, may be used as well for the pharmaceutical composition according to the invention. The term “compatible” as used here means that these constituents of the inventive pharmaceutical composition are capable of being mixed with the components of the inventive pharmaceutical composition in such a manner that no interaction occurs which would substantially reduce the pharmaceutical effectiveness of the pharmaceutical composition under typical use conditions.

[0812] Administration:

[0813] The inventive composition or the inventive pharmaceutical composition may be administered by conventional needle injection or needle-free jet injection into the tumor tissue. In a preferred embodiment the inventive composition or the inventive pharmaceutical composition is administered by jet injection. Jet injection refers to a needle-free injection method, wherein a fluid comprising the inventive composition and, optionally, further suitable excipients is forced through an orifice, thus generating an ultra-fine liquid stream of high pressure that is capable of penetrating mammalian skin. In principle, the liquid stream forms a hole in the skin, through which the liquid stream is pushed into the target tissue, namely the tumor tissue. According to the invention, jet injection may be used for intratumoral application of the inventive composition.

[0814] The inventive composition may be administered by conventional needle injection or needle-free jet injection adjacent to and/or in close proximity to the tumor tissue. In a preferred embodiment the inventive pharmaceutical composition is administered by jet injection adjacent to and/or in close proximity to the tumor tissue. Jet injection refers to a needle-free injection method, wherein a fluid comprising the inventive composition and, optionally, further suitable excipients is forced through an orifice, thus generating an ultra-fine liquid stream of high pressure that is capable of penetrating mammalian skin. In principle, the liquid stream forms a hole in the skin, through which the liquid stream is pushed into the target tissue, namely the tumor tissue. According to the invention, jet injection may be used for intratumoral application (adjacent to and/or in close proximity to the tumor tissue), particularly for injection of the inventive composition.

[0815] In other embodiments, the inventive composition or the inventive pharmaceutical composition may be administered orally, parenterally, by inhalation spray, topically, rectally, nasally, buccally, vaginally or via an implanted reservoir. The term parenteral as used herein includes subcutaneous, intravenous, intramuscular, intraarticular, intranodal, intrasynovial, intrasternal, intrathecal, intrahepatic, intralesional, intracranial, transdermal, intradermal, intrapulmonal, intraperitoneal, intracardial, intraarterial, and sublingual injection or infusion techniques.

[0816] Further particularly preferred administration routes are intradermal and intramuscular injection.

[0817] Despite, the inventive pharmaceutical composition may comprise further components for facilitating administration and uptake of components of the pharmaceutical composition. Such further components may be an appropriate carrier or vehicle, additional adjuvants for supporting any immune response, antibacterial and/or antiviral agents.

[0818] A further component of the inventive pharmaceutical composition may be an immunotherapeutic agent that can be selected from immunoglobulins, preferably IgGs, monoclonal or polyclonal antibodies, polyclonal serum or sera, etc. Preferably, such a further immunotherapeutic agent may be provided as a peptide/protein or may be encoded by a nucleic acid, preferably by a DNA or an RNA, more preferably an mRNA.

[0819] The inventive pharmaceutical composition typically comprises a “safe and effective amount” of the components of the inventive pharmaceutical composition, particularly of the RNA molecule(s) as defined herein. As used herein, a “safe and effective amount” means an amount of the RNA molecule(s) as defined herein as such that is sufficient to significantly induce a positive modification of the tumor or cancer disease. At the same time, however, a “safe and effective amount” is small enough to avoid serious side-effects and to permit a sensible relationship between advantage and risk. The determination of these limits typically lies within the scope of sensible medical judgment.

[0820] The inventive pharmaceutical composition may be used for human and also for veterinary medical purposes, preferably for human medical purposes, as a pharmaceutical composition in general.

[0821] Vaccine:

[0822] According to another particularly preferred aspect, the inventive composition or the inventive pharmaceutical composition may be provided or used as a vaccine. Typically, such a vaccine is as defined above for pharmaceutical compositions. Additionally, such a vaccine typically contains the at least one RNA as defined herein or the inventive composition comprising a plurality of RNAs. Preferably, the at least one RNA encodes at least one tumor antigen or at least one immune activator as defined above. The inventive vaccine may also comprise a pharmaceutically acceptable carrier, adjuvant, and/or vehicle as defined herein for the inventive pharmaceutical composition. In the specific context of the inventive vaccine, the choice of a pharmaceutically acceptable carrier is determined in principle by the manner in which the inventive vaccine is administered. The inventive vaccine may be administered locally into tumor tissue.

[0823] The inventive vaccine can additionally contain one or more auxiliary substances in order to increase its immunogenicity or immunostimulatory capacity, if desired. Particularly preferred are adjuvants as auxiliary substances or additives as defined for the pharmaceutical composition.

[0824] Kit or Kit of Parts:

[0825] In a further aspect, the invention relates to a kit or kit of parts comprising the RNA containing composition as described above, or comprising the pharmaceutical composition as described above, or the components thereof and optionally technical instructions with information on the administration and dosage of the components.

[0826] Beside the components of the inventive RNA containing composition, the kit may additionally contain a pharmaceutically acceptable vehicle, an adjuvant and at least one further component e.g. an additional pharmaceutically active component/compound as defined herein, as well as means for administration and technical instructions. The components of the composition and possibly further components may be provided in lyophilized form. In a preferred embodiment, prior to use of the kit, the provided vehicle is than added to the lyophilized components in a predetermined amount as written e.g. in the provided technical instructions.

[0827] Medical Indication:

[0828] The present invention furthermore provides several applications and uses of the inventive RNA containing composition, or the pharmaceutical composition, or the vaccine, or the kit or kit of parts as defined herein. As a main aspect of the invention the composition or the pharmaceutical composition or the kit or kit of parts may be used as a medicament, namely for treatment of tumor or cancer diseases. In this context the treatment is preferably done by intratumoral application, especially by injection into tumor tissue. According to another aspect, the present invention is directed to the second medical use of the RNA containing composition or the pharmaceutical composition, or the vaccine, or the kit or kit of parts as described above, wherein these subject matters are used for preparation of a medicament particularly for intratumoral application (administration) for treatment of tumor or cancer diseases.

[0829] Preferably, diseases as mentioned herein are selected from tumor or cancer diseases which preferably include e.g. Acute lymphoblastic leukemia, Acute myeloid leukemia, Adrenocortical carcinoma, AIDS-related cancers, AIDS-related lymphoma, Anal cancer, Appendix cancer, Astrocytoma, Basal cell carcinoma, Bile duct cancer, Bladder cancer, Bone cancer, Osteosarcoma/Malignant fibrous histiocytoma, Brainstem glioma, Brain tumor, cerebellar astrocytoma, cerebral astrocytoma/malignant glioma, ependymoma, medulloblastoma, supratentorial primitive neuroectodermal tumors, visual pathway and hypothalamic glioma, Breast cancer, Bronchial adenomas/carcinoids, Burkitt lymphoma, childhood Carcinoid tumor, gastrointestinal Carcinoid tumor, Carcinoma of unknown primary, primary Central nervous system lymphoma, childhood Cerebellar astrocytoma, childhood Cerebral astrocytoma/Malignant glioma, Cervical cancer, Childhood cancers, Chronic lymphocytic leukemia, Chronic myelogenous leukemia, Chronic myeloproliferative disorders, Colon Cancer, Cutaneous T-cell lymphoma, Desmoplastic small round cell tumor, Endometrial cancer, Ependymoma, Esophageal cancer, Ewing's sarcoma in the Ewing family of tumors, Childhood Extracranial germ cell tumor, Extragonadal Germ cell tumor, Extrahepatic bile duct cancer, Intraocular melanoma, Retinoblastoma, Gallbladder cancer, Gastric (Stomach) cancer, Gastrointestinal Carcinoid Tumor, Gastrointestinal stromal tumor (GIST), extracranial, extragonadal, or ovarian Germ cell tumor, Gestational trophoblastic tumor, Glioma of the brain stem, Childhood Cerebral Astrocytoma, Childhood Visual Pathway and Hypothalamic Glioma, Gastric carcinoid, Hairy cell leukemia, Head and neck cancer, Heart cancer, Hepatocellular (liver) cancer, Hodgkin lymphoma, Hypopharyngeal cancer, childhood Hypothalamic and visual pathway glioma, Intraocular Melanoma, Islet Cell Carcinoma (Endocrine Pancreas), Kaposi sarcoma, Kidney cancer (renal cell cancer), Laryngeal Cancer, Leukemias, acute lymphoblastic Leukemia, acute myeloid Leukemia, chronic lymphocytic Leukemia, chronic myelogenous Leukemia, hairy cell Leukemia, Lip and Oral Cavity Cancer, Liposarcoma, Liver Cancer, Non-Small Cell Lung Cancer, Small Cell Lung Cancer, Lymphomas, AIDS-related Lymphoma, Burkitt Lymphoma, cutaneous T-Cell Lymphoma, Hodgkin Lymphoma, Non-Hodgkin Lymphomas, Primary Central Nervous System Lymphoma, Waldenström Macroglobulinemia, Malignant Fibrous Histiocytoma of Bone/Osteosarcoma, Childhood Medulloblastoma, Melanoma, Intraocular (Eye) Melanoma, Merkel Cell Carcinoma, Adult Malignant Mesothelioma, Childhood Mesothelioma, Metastatic Squamous Neck Cancer with Occult Primary, Mouth Cancer, Childhood Multiple Endocrine Neoplasia Syndrome, Multiple Myeloma/Plasma Cell Neoplasm, Mycosis Fungoides, Myelodysplastic Syndromes, Myelodysplastic/Myeloproliferative Diseases, Chronic Myelogenous Leukemia, Adult Acute Myeloid Leukemia, Childhood Acute Myeloid Leukemia, Multiple Myeloma (Cancer of the Bone-Marrow), Chronic Myeloproliferative Disorders, Nasal cavity and paranasal sinus cancer, Nasopharyngeal carcinoma, Neuroblastoma, Oral Cancer, Oropharyngeal cancer, Osteosarcoma/malignant fibrous histiocytoma of bone, Ovarian cancer, Ovarian epithelial cancer (Surface epithelial-stromal tumor), Ovarian germ cell tumor, Ovarian low malignant potential tumor, Pancreatic cancer, islet cell Pancreatic cancer, Paranasal sinus and nasal cavity cancer, Parathyroid cancer, Penile cancer, Pharyngeal cancer, Pheochromocytoma, Pineal astrocytoma, Pineal germinoma, childhood Pineoblastoma and supratentorial primitive neuroectodermal tumors, Pituitary adenoma, Plasma cell neoplasia/Multiple myeloma, Pleuropulmonary blastoma, Primary central nervous system lymphoma, Prostate cancer, Rectal cancer, Renal cell carcinoma (kidney cancer), Cancer of the Renal pelvis and ureter, Retinoblastoma, childhood Rhabdomyosarcoma, Salivary gland cancer, Sarcoma of the Ewing family of tumors, Kaposi Sarcoma, soft tissue Sarcoma, uterine Sarcoma, Sézary syndrome, Skin cancer (nonmelanoma), Skin cancer (melanoma), Merkel cell Skin carcinoma, Small intestine cancer, Squamous cell carcinoma, metastatic Squamous neck cancer with occult primary, childhood Supratentorial primitive neuroectodermal tumor, Testicular cancer, Throat cancer, childhood Thymoma, Thymoma and Thymic carcinoma, Thyroid cancer, childhood Thyroid cancer, Transitional cell cancer of the renal pelvis and ureter, gestational Trophoblastic tumor, Urethral cancer, endometrial Uterine cancer, Uterine sarcoma, Vaginal cancer, childhood Visual pathway and hypothalamic glioma, Vulvar cancer, Waldenström macroglobulinemia, and childhood Wilms tumor (kidney cancer).

[0830] Especially preferred examples of tumors or cancers that are suitable for intratumoral administration are prostate cancer, lung cancer, breast cancer, brain cancer, head and neck cancer, thyroid cancer, colon cancer, stomach cancer, liver cancer, pancreas cancer, ovary cancer, skin cancer, urinary bladder, uterus and cervix.

[0831] According to a specific embodiment, the medicament may be administered to the patient as a single dose or as several doses. In certain embodiments, the medicament may be administered to a patient as a single dose followed by a second dose later and optionally even a third, fourth (or more) dose subsequent thereto etc.

[0832] Preferably, the inventive composition is provided in an amount of at least 40 μg RNA per dose. More specifically, the amount of the mRNA comprised in a single dose is typically at least 200 μg, preferably from 200 μg to 1.000 μg, more preferably from 300 μg to 850 μg, even more preferably from 300 μg to 700 μg.

[0833] Treatment with Additional (Pharmaceutical) Compounds:

[0834] In a particularly preferred embodiment the subject receiving the inventive composition, or the pharmaceutical composition or vaccine may be a patient with cancer or tumor who receives or received standard treatments of cancer. Preferably, the patient has achieved partial response or stable disease after having received standard treatments.

[0835] The standard treatments of cancer include chemotherapy, radiation, chemoradiation and surgery dependent on the particular cancer or tumor type to be treated, wherein these treatments are applied individually or in combination.

[0836] In some embodiments the subject receiving the inventive composition, pharmaceutical composition or vaccine may be a patient with cancer or tumor, who received or receives chemotherapy (e.g. first-line or second-line chemotherapy), radiotherapy, chemoradiation (combination of chemotherapy and radiotherapy), kinase inhibitors, antibody therapy and/or checkpoint modulators (e.g. CTLA4 inhibitors, PD1 pathway inhibitors), or a patient, who has achieved partial response or stable disease after having received one or more of the treatments specified above.

[0837] In other embodiments the subject receiving the inventive composition, pharmaceutical composition or vaccine may be a patient with cancer or tumor, who received or receives an additional pharmaceutically active component/compound as defined above. Preferably, the subject is a patient, who has achieved partial response or stable disease after having received one or more of the treatments specified above.

[0838] According to a further aspect the invention refers to a method of treatment of tumor or cancer diseases, wherein the RNA containing composition as described above, or the pharmaceutical composition as described above, or the vaccine as described above, or the kit or kit of parts as described above is preferably applied intratumorally, especially by injection into tumor tissue. With respect to further features of the method for treatment it is referred to the description above.

[0839] Preferred Intratumoral Applications:

[0840] In this context it is particularly preferred that the intratumoral application of the RNA containing composition or the pharmaceutical composition or the vaccine as defined above is combined with the application of different agents/pharmaceutically active components/compounds. Particularly preferred are antibodies (e.g. check point modulators as e.g. anti-CTLA4, anti-OX40, anti-PD1 or anti-PD-L1) or ligands (e.g. CD40L).

[0841] In preferred embodiments the following combinations are particularly preferred:
[0842] RNAdjuvant (i.t.)+anti-CTLA4 as protein (i.p./i.v.)
[0843] RNAdjuvant (i.t.)+anti-CTLA4 as protein (i.t.)
[0844] RNAdjuvant (i.t.)+anti-PD1 as protein (i.p./i.v.)
[0845] RNAdjuvant (i.t.)+anti-PD1 as protein (i.t.)
[0846] RNAdjuvant (i.t.)+anti-PD-L1 as protein (i.p./i.v.)
[0847] RNAdjuvant (i.t.)+anti-PD-L1 as protein (i.t.)
[0848] RNAdjuvant (i.t.)+CD40L (i.t.) as protein or encoded by a nucleic acid preferably an RNA, more preferably an mRNA
[0849] RNAdjuvant (i.t.)+mRNA encoding IL-12+mRNA encoding soluble PD-1 receptor+anti-CD73 (i.p./i.v.)
[0850] RNAdjuvant (i.t.)+mRNA encoding IL-12+mRNA encoding soluble PD-1 receptor+anti-CD137 (i.p./i.v.)
[0851] RNadjuvant (i.t.)

[0852] (i.t.=intratumoral, i.p.=intraperitoneal, i.v.=intravenous)

[0853] In the present invention, if not otherwise indicated, different features of alternatives and embodiments may be combined with each other, where suitable. Furthermore, the term “comprising” shall not be narrowly construed as being limited to “consisting of” only, if not specifically mentioned. Rather, in the context of the present invention, “consisting of” is an embodiment specifically contemplated by the inventors to fall under the scope of “comprising”, wherever “comprising” is used herein.

[0854] All publications, patents and patent applications cited in this specification are herein incorporated by reference as if each individual publication or patent application were specifically and individually indicated to be incorporated by reference. Although the foregoing invention has been described in some detail by way of illustration and example for purposes of clarity of understanding, it will be readily apparent to those of ordinary skill in the art in light of the teachings of this invention that certain changes and modifications may be made thereto without departing from the spirit or scope of the appended claims.

[0855] The examples and figures shown in the following are merely illustrative and shall describe the present invention in a further way. These figures and examples shall not be construed to limit the present invention thereto.

### SHORT DESCRIPTION OF THE FIGURES

[0856] FIG. 1: shows survival proportions of mice bearing E.G7-OVA tumors after intratumoral treatment with mRNA encoding IL-12 (IL-12 mRNA) or with recombinant IL-12 protein (rIL-12 protein). The experiment was performed as described in Example 1. Kaplan-Meier survival curves are presented.

[0857] FIG. 2: shows that intratumoral treatment of mice with a combination of IL-12 mRNA (R2763, SEQ ID NO: 1) and the polymeric carrier cargo complex (R2391, RNAdjuvant®, prepared as described in methods) led to a significantly decreased tumor volume compared to control groups. The experiment was performed as described in Example 2. FIG. 2 shows the mean tumor volume at day 21 after tumor challenge (the last day when all animals were alive). Statistical analysis was performed in GraphPad Prism version 5.04 using Mann Whitney test.

[0858] FIG. 3: shows survival proportions of mice bearing CT26 tumors after intratumoral treatment with a combination of IL-12 mRNA and the polymeric carrier cargo complex (“RNAdjuvant”) as described in Example 2 and in legend of FIG. 2. Kaplan-Meier survival curves are presented. Statistical analysis was performed in GraphPad Prism version 5.04 using Log-rank test.

[0859] FIG. 4: shows survival proportions of mice bearing CT26 tumors after intratumoral treatment with mRNA encoding the influenza nucleoprotein. The experiment was performed as described in Example 3. Kaplan-Meier survival curves are presented.

[0860] FIGS. 5A-B: Panel (A) shows an analysis of the median tumor growth of mice bearing CT26 tumors after intratumoral treatment with mRNA encoding IL-12, RNAdjuvant, and mRNA encoding soluble PD-1. Respective combinations of these compounds, including control groups, were tested as indicated in the figure. The experiment was performed as described in Example 4.
[0861] Panel (B) shows survival proportions of mice bearing CT26 tumors after intratumoral treatment with mRNA encoding IL-12, RNAdjuvant, and mRNA encoding soluble PD-1. Respective combinations of these compounds, including control groups, were tested as indicated in the figure. The experiment was performed as described in Example 4. Kaplan-Meier survival curves are presented.

[0862] FIG. 6: shows survival proportions of mice bearing CT26 tumors after intratumoral treatment with mRNA encoding IL-12, RNAdjuvant, mRNA encoding soluble PD-1 and intraperitoneal treatment of an anti-CD73 antibody. Respective combinations of these compounds, including control groups, were tested as indicated in the figure. The experiment was performed as described in Example 5. Kaplan-Meier survival curves are presented.

[0863] FIG. 7: shows survival proportions of mice bearing CT26 tumors after intratumoral treatment with mRNA encoding IL-12, RNAdjuvant, mRNA encoding soluble PD-1 and intraperitoneal treatment of an anti-CD173 antibody. Respective combinations of these compounds, including control groups, were tested as indicated in the figure. The experiment was performed as described in Example 6. Kaplan-Meier survival curves are presented.

[0864] FIG. 8: shows survival proportions of mice bearing CT26 tumors after intratumoral treatment with RNAdjuvant and intraperitoneal treatment of an anti-PD-1 antibody. Respective combinations of these compounds, including control groups, were tested as indicated in the figure. The experiment was performed as described in Example 7. Kaplan-Meier survival curves are presented.

[0865] FIG. 9: shows survival proportions of mice bearing CT26 tumors after intratumoral treatment with mRNA encoding IL-12, RNAdjuvant, mRNA encoding CD40L compared to intratumoral treatment with mRNA encoding IL-12 alone. Respective combinations of these compounds, including control groups, were tested as indicated in the figure. The experiment was performed as described in Example 8. Kaplan-Meier survival curves are presented.

[0866] FIG. 10: shows the mRNA sequence R3571 encoding murine CD40L (MmCD40L) according to SEQ ID NO. 10.073

### EXAMPLES

### Methods: Preparation of the RNA

[0867] 1. Preparation of DNA and RNA Constructs

[0868] For the present examples DNA sequences encoding the indicated RNAs (see Table 17) were prepared and used for subsequent RNA in vitro transcription reactions.

TABLE 17
RNA constructs

| RNA | Description | 5′-UTR | 3′-UTR | SEQ ID NO. |
|---|---|---|---|---|
| R1328 | Murine IL-12 encoding mRNA | — | Muag (3′-UTR of | SEQ ID NO: |
| | (MmIL-12(GC))-sc-Flag) | | alpha globin)-A64- | 1 |
| | | | C30 | |
| R491 | mRNA encoding Photinus | — | Muag (3′-UTR of | SEQ ID NO: |
| | pyralis luciferase (pPLuc (GC)) | | alpha globin)-A64- | 2 |
| | (irrelevant mRNA) | | C30 | |
| R2763 | Murine IL-12 encoding mRNA | 5′-TOP-UTR | albumin-3′-UTR- | SEQ ID NO: |
| | (MmIL-12 (GC)) | derived from | A64-C30-histone | 3 |
| | | the ribosomal | stem-loop | |
| | | protein 32 L | | |
| R2244 | Luciferase encoding mRNA | 5′-TOP-UTR | albumin-3′-UTR- | SEQ ID NO: |
| | (PpLuc(GC)) | derived from | A64-C30-histone | 4 |
| | | the ribosomal | stem-loop | |
| | | protein 32 L | | |
| R2025 | Non-coding | | | SEQ ID NO: |
| R2391 | immunostimulatory RNA | | | 5 |
| | (RNAdjuvant) | | | |
| | (SEQ ID NO. 118 of | | | |
| | WO2009095226) | | | |
| R2650 | mRNA coding for the | 5′-TOP-UTR | albumin-3′-UTR- | SEQ ID NO: |
| R2651 | influenza nucleoprotein | derived from | A64-C30-histone | 6 |
| | (H1N1(PR8)-NP(GC)) | the ribosomal | stem-loop | |
| | | protein 32 L | | |
| R3971 | mRNA encoding solPD-1 | 5′-TOP-UTR | albumin-3′-UTR- | SEQ ID NO: |
| | | derived from | A64-C30-histone | 389 |
| | | the ribosomal | stem-loop | |
| | | protein 32 L | | |
| R3571 | mRNA encoding murine | 5′-TOP-UTR | albumin-3′-UTR- | SEQ ID NO: |
| | CD40L (MmCD40L) | derived from | A64-C30-histone | 10.073 |
| | | the ribosomal | stem-loop | |
| | | protein 32 L | | |

[0869] The constructs of MmIL-12(GC), Influenza NP (GC), soIPD-1 and PpLuc(GC)) were prepared by introducing a 5′-TOP-UTR derived from the ribosomal protein 32L, modifying the wild type coding sequence by introducing a GC-optimized sequence for stabilization, followed by a stabilizing sequence derived from the albumin-3′-UTR, a stretch of 64 adenosines (poly(A)-sequence), a stretch of 30 cytosines (poly(C)-sequence), and a histone stem loop. Most DNA sequences were prepared by modifying the wild type encoding DNA sequences by introducing a GC-optimized sequence for stabilization, using an in silico algorithm that increase the GC content of the respective coding sequence compared to the wild type coding sequence (in Table 12 indicated as “GC”).

[0870] For the present example a DNA sequence encoding the non-coding immunostimulatory RNA (isRNA) R2025 was prepared and used for subsequent RNA in vitro transcription reactions.

[0871] 2. RNA In Vitro Transcription

[0872] The respective DNA plasmids prepared according to section 1 above were transcribed in vitro using T7 polymerase. The RNA in vitro transcription reactions of the IL-12, the NP, PpLuc, CD40L and soluble PD-1 encoding constructs were performed in the presence of a CAP analog (m⁷GpppG). The isRNA R2025 was prepared without CAP analog. Subsequently, the RNA was purified using PureMessenger® (CureVac, Tübingen, Germany; WO2008/077592A1).

[0873] 3. Preparation of the Polymeric Cargo Complex (“RNAdjuvant”)

[0874] The following cationic peptide as cationic component of the polymeric carrier was used (Cys-Arg₁₂-Cys or CR₁₂C) according to SEQ ID NO: 7.

[0875] For synthesis of the polymeric carrier cargo complexes an RNA molecule having the RNA sequence R2025 as defined in section 1 above was mixed with the cationic CR12C peptide component as defined above. The specified amount of the RNA was mixed with the respective cationic component in mass ratios as indicated below, thereby forming a complex. If polymerizing cationic components were used according to the present invention, polymerization of the cationic components took place simultaneously to complexation of the nucleic acid cargo. Afterwards, the resulting solution was adjusted with water to a final volume of 50 μl and incubated for 30 minutes at room temperature. Further details are described in WO2012013326.

[0876] The mass ratio of peptide:RNA was 1:3.7. The polymeric carrier cargo complex is formed by the disulfide-crosslinked cationic peptide CR12C as carrier and the immunostimulatory R2025 as nucleic acid cargo. This polymeric carrier cargo complex R2025/CR12C (designated R2391) was used as adjuvant in the following examples (referred to as “RNAdjuvant”)

[0877] 4. Preparation of the Vaccine Formulation Coding for the Influenza Nucleoprotein (H1N1(PR8)-NP(GC)) (R2651)

[0878] The mRNA (R2650) was complexed with protamine by addition of protamine to the mRNA in the ratio (1:2) (w/w) (adjuvant component). After incubation for 10 min, the same amount of free mRNA used as antigen-providing mRNA was added. This vaccine formulation is termed herein R2651 (according to WO2010037539). The vaccine was administered in Ringer's Lactate solution.

[0879] 5. Preparation of the RNA for Administration

[0880] The naked (that is, non-formulated) PpLuc mRNA (R2244, R491)), IL-12 mRNA (R2763, R1328), soluble PD-1 mRNA (R3971), CD40L mRNA (R3571) were administered in Ringer's Lactate (RiLa) solution. The co-formulation of naked mRNAs and the polymeric carrier cargo complex “RNAdjuvant” (R2391) were also administered in Ringer's Lactate (RiLa) after mixing of both components directly before injection.

### Example 1

### Intratumoral Application of mRNA Coding for IL-12

[0881] 5 female C57BL/6 mice per treatment group were inoculated with 10⁶ cells E.G7-OVA cells 5 days before the first treatment. For each treatment group 5 established (about 100 mm³) subcutaneously implanted EG.7-OVA tumors were treated. Tumors were treated with 16 μg mRNA coding for MmIL-12 (MmIL-12(GC))-sc-Flag) (R1328) or 0.5 μg MmIL-12 protein on d 0, 2, 4, 21, 23 and 25 with 50 μg (1 μg/μl). As control mice were treated with an irrelevant mRNA (pPLuc) (R491).

[0882] Study day 0 is defined as the first day of treatment. Tumor growth was monitored frequently (every 2-3 days). Mice with a volume of >3 cm³ were killed.

[0883] Results of Example 1

[0884] FIG. 1 shows that the intratumoral treatment with the mRNA-encoded IL-12 (IL-12 mRNA) resulted in a significant increase in survival compared to the control group. Furthermore an increased survival could be observed compared to the intratumoral application of recombinant IL-12 protein (rIL-12 protein).

### Example 2

### Intratumoral Treatment with mRNA Encoding IL-12 in Combination with an Immunostimulating RNA (RNAdjuvant®)

[0885] The following table 18 summarizes the RNA constructs used for the example 2.

TABLE 18
RNA constructs for example 2

| RNA | Description | FIG. | SEQ ID NO. |
|---|---|---|---|
| R2763 | Murine IL-12 encoding mRNA | 1 | SEQ ID NO. 1 |
| R2244 | Luciferase encoding mRNA (PpLuc) | 2 | SEQ ID NO. 2 |
| R2025 | Non-coding immunostimulatory RNA | 3 | SEQ ID NO. 3 |

[0886] Balb/c mice (n=6 or 7, see table 14) were injected subcutaneously (s.c.) with 1×10⁶ CT26 cells (colon carcinoma cell line) per mouse (in a volume of 100 μl PBS) on the right flank on day 0 of the experiment. At day 9 after tumor challenge, mice were sorted according to the tumor size to obtain groups with a mean tumor volume of approximately 60 mm³. Intratumoral (i.t.) therapy started at day 9 and continued for additional 4 injections every 3-4 days. Mice were injected with a combination of mRNA-encoded IL-12 (25 μg of R2763)+RNAdjuvant® (25 μg of R2391) (group A). To control for local inflammation due to RNA application or the injection procedure, mice were injected with control mRNA coding for luciferase (PpLuc, R2244, group B) or buffer (RiLa, group C), respectively. Untreated mice served as additional control (group D).

[0887] Tumor growth was monitored by measuring the tumor size in three dimensions using a calliper. Tumor volume was calculated according to the following formula:

$$volume ( {mm}^{3} ) = \frac{length ( mm ) \times π \times {width}^{2} ( {mm}^{2} )}{6}$$

[0888] On day 9, 11, 14, 17 and 21 of the experiment mice were injected intratumorally (i.t.) with RNA according to the table 19 below. The volume for intratumoral injection was 50 μl.

TABLE 19
Animal groups

| | Strain | Number | | Dose per | Route, |
|---|---|---|---|---|---|
| Group | sex | of mice | RNA | mouse | volume |
| A | BALB/c | 7 | R2763, | 25 μg | i.t., |
| | Female | | R2391 | of each | 50 μl |
| | | | | RNA | |
| B | BALB/c | 7 | R2244 | 50 μg | i.t., |
| | Female | | | | 50 μl |
| C | BALB/c | 6 | RiLa | — | i.t., |
| | Female | | | | 50 μl |
| D | BALB/c | 6 | — | — | — |
| | Female | | | | |

[0889] Results of Example 2

[0890] FIG. 2 shows that the intratumoral treatment with the combination of mRNA-encoded IL-12 (R2763) and RNAdjuvant® (R2391) resulted in a statistically significant decrease in tumor volume at day 21 after tumor challenge compared to all control groups.

[0891] FIG. 3 shows that the intratumoral treatment with the combination of mRNA-encoded IL-12 (R2763) and RNAdjuvant® (R2391) resulted in a statistically significant increase in survival compared to all three control groups (group A vs. group B*p=0.0104, group A vs. group C**p=0.0035, group A vs. Group D*p==0.0263).

### Example 3

### Vaccination of Mice with mRNA Encoding the Influenza Nucleoprotein (NP) and Subsequent Intratumoral Treatment with NP-Encoding mRNA

[0892] The objective of this experiment was to test whether a pre-existing immune response can be harnessed against an established tumor. To this end, mice were first vaccinated with RNActive (vaccine formulation complexed with protamine) encoding the influenza nucleoprotein (NP) (R2651) which induces a high level of anti-NP CD8+ T cell responses, then challenged with CT26 tumor cells followed by intratumoral treatment with naked RNA encoding NP (R2650).

[0893] 27 Balb/c mice were vaccinated intradermally (i.d.) with 40 μg of H1N1(PR8)-NP(GC) RNActive (R2651) (2×50 up or Ringer-Lactate buffer (RiLa) as control on day 0, day 7 and day 16 of the experiment. On day 14 all mice were challenged subcutaneously (s.c.) with 1×10⁶ CT26 cells per mouse (in a volume of 100 μl PBS) on the right flank. On day 22, mice were assigned to the different groups as shown in Table 20.

[0894] On day 23, seven days after the second boost, intratumoral (i.t.) application of 50 μg naked H1N1(PR8)-NP(GC) mRNA (R2650) started (only group C) and continued for additional four injections (at day 25, day 28, day 31 and day 35). The volume for intratumoral injection was 50 μl. A detailed treatment schedule is shown in Table 21.

[0895] Tumor growth was monitored by measuring the tumor size in three dimensions using a calliper. Tumor volume was calculated according to the following formula:

$$volume ( {mm}^{3} ) = \frac{length ( mm ) \times π \times {width}^{2} ( {mm}^{2} )}{6}$$

TABLE 20
Animal groups

| | Strain | Number | mRNA | |
|---|---|---|---|---|
| Group | sex | of mice | i.d. | mRNA i.t. |
| A | BALB/c | 9 | RiLa | — |
| | Female | | | |
| B | BALB/c | 9 | R2651 | — |
| | Female | | (40 μg) | |
| C | BALB/c | 9 | R2651 | R2650 |
| | Female | | (40 μg) | (50 μg) |

TABLE 21
Vaccination schedule

| Day | Treatment |
|---|---|
| 0 | i.d. vaccination all groups |
| 7 | i.d. vaccination all groups |
| 14 | Tumor challenge of all groups |
| | (1 × 10⁶ CT26 cells/mouse) |
| 16 | i.d. vaccination all groups |
| 23 | i.t. vaccination group C |
| 25,28, 31,35 | i.t. vaccination group C |

[0896] Results of Example 3

[0897] FIG. 4 shows that pre-existent immunity (induced in this model by the NP vaccination) increased the median survival time (MST) of mice which received intratumoral application of NP-encoded mRNA compared to mice which were treated with buffer only (MST=28 vs. MST=21, respectively).

### Example 4

### Intratumoral Treatment with an Immunostimulating RNA (“RNAdiuvant”) and an mRNA Encoding Soluble PD-1 and an mRNA Encoding IL-12

[0898] Table 22 summarizes the treatment as used in the present example. RNAdjuvant and the mRNA constructs encoding IL-12 and soluble PD-1 were administered intratumorally (i.t.). In CT26 tumor challenged mice, survival rates and median tumor growth were analyzed.

TABLE 22
Groups, treatment and RNA dilution

| | Nr. of | i.t treatment | Vaccination |
|---|---|---|---|
| Group | mice | (25 μg for each component | schedule |
| A | 10 | IL-12 + RNAdjuvant + soluble | 2× week |
| | | PD-1 | |
| B | 10 | IL-12 | 2× week |
| C | 10 | RNAdjuvant | 2× week |
| D | 10 | RiLa | 2× week |

[0899] Tumor Challenge and Administration of the Inventive Composition:

[0900] 60 Balb/c mice were challenged subcutaneously with 1×10⁶ CT26 cells per mouse (volume in 100 μl PBS) on the right flank on day 0 of the experiment. On day 8 mice were sorted according to tumor size. According to tumor size, the first vaccination took place on day 8 or 9 (tumors should have a size of about 40-50 mm³). Mice were vaccinated with different combinations of mRNAs and RNAdjuvant according to the table above. Six vaccinations took place. Volume for intratumoral injection was 50 μl.

[0901] Mice were injected according to the indicated scheme shown in Table 22. Median tumor growth was determined according to example 3. The results of the experiment are shown in FIG. 5, wherein FIG. 5A shows the effect of the inventive composition on tumor growth, and FIG. 5B shows the effect of the inventive composition on survival.

[0902] Results:

[0903] The results in FIG. 5A show that the inventive composition comprising an mRNA encoding IL-12 and mRNA encoding soluble PD-1 in combination with RNAdjuvant (group “A” according to Table 22) to strongly decreased the median tumor volume compared to the other treatments (groups B-D according to Table 22). In addition, the results in FIG. 5B show that the inventive composition comprising an mRNA encoding IL-12 and mRNA encoding soluble PD-1 in combination with RNAdjuvant (group “A” according to Table 22) strongly increased the survival of tumor challenged mice compared to the other treatments (groups B-D according to Table 22).

### Example 5

### Intratumoral Treatment with mRNA Encoding IL-12 in Combination with an Immunostimulating RNA (“RNAdjuvant”) and mRNA Encoding Sol PD-1 and Anti-CD73 Antibody

[0904] Table 23 summarizes the treatment as used in the present example. In addition to RNAdjuvant and mRNA constructs encoding IL-12 and soluble PD-1 (administered intratumorally (i.t.)), an anti CD73 antibody (BioXCell) was co-administered intraperitoreally (i.p.). In CT26 tumor challenged mice, survival rates were analyzed.

TABLE 23
Groups, treatment and RNA dilution

| | Nr. of | i.t. treatment | i.p. | Vaccination |
|---|---|---|---|---|
| Group | mice | (25 μg for each component) | treatment | schedule |
| A | 10 | IL-12 + RNAdjuvant + soluble | a-CD73 | 2× week |
| | | PD-1 | | |
| B | 10 | IL-12 + RNAdjuvant + soluble | Rat IgG2a | 2× week |
| | | PD-1 | | |
| C | 10 | RiLa | a-CD73 | 2× week |
| D | 10 | RiLa | Rat IgG2a | 2× week |

[0905] Tumor Challenge and Administration of the Inventive Composition:

[0906] The tumor challenge was performed according to the previous experiments (see Example 4).

[0907] Mice were injected according to the indicated scheme shown in Table 23.

[0908] The results of the experiment are shown in FIG. 6.

[0909] Results:

[0910] FIG. 6 shows that the intratumoral treatment with mRNA-encoded IL-12 (R2763), mRNA encoded sol-PD-1 (R3971) and RNAdjuvant® (R2391) in combination with an i.p. administration of anti CD73 antibody (Group “A” according to Table 23) resulted in a statistically significant increase in survival compared to the relevant control group that only received an anti CD73 antibody (Group “C” according to Table 23) and in an increase in survival rates compared to the treatment with IL-12+RNAdjuvant+soluble PD-1 and a control antibody (Rat IgG2a, BioXCell) (Group “B” according to Table 23).

### Example 6

### Intratumoral Treatment with mRNA Encoding IL-12 in Combination with an Immunostimulating RNA (“RNAdjuvant”) and an Anti-CD137 Antibody

[0911] Table 24 summarizes the treatment as used in the present example. In addition to RNAdjuvant and the mRNA constructs encoding IL-12 and soluble PD-1 (administered intratumorally (i.t.)), an anti CD137 antibody (BioXCell) was co-administered intraperitoreally (i.p.). In CT26 tumor challenged mice, survival rates were analyzed.

TABLE 24
Groups, treatment and RNA dilution

| | Nr. of | | i.p. | Vaccination |
|---|---|---|---|---|
| Group | mice | i.t. treatment (25 μg) | treatment | schedule |
| A | 10 | IL-12 + RNAdjuvant + soluble | a-CD137 | 2× week |
| | | PD-1 | | |
| B | 10 | IL-12 + RNAdjuvant + soluble | Rat IgG2a | 2× week |
| | | PD-1 | | |
| C | 10 | RiLa | a-CD137 | 2× week |
| D | 10 | RiLa | Rat IgG2a | 2× week |

[0912] Tumor Challenge and Administration of the Inventive Composition:

[0913] The tumor challenge was performed according to the previous experiments (see Example 4).

[0914] Mice were injected according to the indicated scheme shown in Table 24.

[0915] The results of the experiment are shown in FIG. 7.

[0916] Results:

[0917] FIG. 7 shows that the intratumoral treatment with mRNA-encoded IL-12 (R2763) sol-PD-1 (R3971) and RNAdjuvant® (R2391) in combination with an i.p. administration of anti CD-137 antibody (Group “A” according to Table 24) resulted in a significant increase in survival compared to the relevant control group that only received the antibody anti CD-137 (Group “C” according to Table 24) and in an increase in survival rates compared to the treatment with IL-12+RNAdjuvant+soluble PD-1 and a control antibody (Rat IgG2a, BioXCell) (Group “B” according to Table 24).

### Example 7

### Treatment with an Immunostimulating RNA (“RNAdjuvant”) in Combination with a Checkpoint Inhibitor Anti PD-1 Antibody

[0918] Table 25 summarizes the treatment as used in the present example. In addition to RNAdjuvant (administered i.t.), a checkpoint inhibitor anti PD-1 (BioXCell) was administered i.p. In CT26 tumor challenged mice, survival rates were analyzed.

TABLE 25
Groups, treatment and RNA dilution /antibody dilution

| | | | Amount of | Vaccination |
|---|---|---|---|---|
| Group | Construct | Antibody | RNA (μg) | schedule |
| A | RiLa (i.t.) | — | | 2× week |
| B | RNAdjuvant | Control Ab (i.p.)(100 μg) | 25 | 2× week |
| | (i.t.) | | | |
| C | RNAdjuvant | Anti-PD-1 (i.p.) (200 μg) | 25 | 2× week |
| | (i.t.) | | | |
| D | RiLa (i.t.) | Anti-PD-1 (i.p.) (200 μg) | — | 2× week |

[0919] Tumor Challenge and Administration of the Inventive Composition:

[0920] The tumor challenge was performed according to the previous experiments (see Example 4).

[0921] Mice were injected according to the indicated scheme shown in Table 25.

[0922] The results of the experiment are shown in FIG. 8.

[0923] Results:

[0924] FIG. 8 shows that the intratumoral (i.t.) treatment with RNAdjuvant® (R2391) in combination with an i.p. administration of anti PD-1 antibody (Group “C” according to Table 25) resulted in an increase in survival compared to the relevant control group that only received the checkpoint inhibitor anti PD-1 antibody (Group “D” according to Table 25) and in an increase in survival rates compared to the treatment with RNAdjuvant and a control antibody (anti hamster IgG, BioXCell) (Group “B” according to Table 25).

### Example 8

### Intratumoral Treatment with an Immunostimulating RNA (“RNAdjuvant”) and an mRNA Encoding CD40 Ligand (CD40L) and an mRNA Encoding IL-12

[0925] Table 26 summarizes the treatment as used in the present example. RNAdjuvant and the mRNA constructs encoding IL-12 and murine CD40L were administered intratumorally (i.t.). In CT26 tumor challenged mice, survival rates were analyzed.

TABLE 26
Groups, treatment and RNA dilution

| | Nr. of | | Vaccination |
|---|---|---|---|
| Group | mice | i.t. treatment (25 μg per RNA) | schedule |
| A | 8 | IL-12 + RNAdjuvant + CD40L | 2× week |
| B | 8 | IL-12 | 2× week |
| C | 8 | RiLa | 2× week |

[0926] Tumor Challenge and Administration of the Inventive Composition:

[0927] The tumor challenge was performed according to the previous experiments (see Example 4).

[0928] Mice were injected according to the indicated scheme shown in Table 26.

[0929] The results of the experiment are shown in FIG. 9.

[0930] Results:

[0931] The results in FIG. 9 show that the inventive composition comprising an mRNA encoding IL-12 and an mRNA encoding CD40L in combination with RNAdjuvant (group “A” according to table 26) strongly increased the median survival of tumor challenged mice compared to the other treatments (groups B-C according to table 26).

1. RNA containing composition comprising at least one RNA for use in the treatment or prophylaxis of tumor and/or cancer diseases.

2. The RNA containing composition of claim 1, wherein the RNA containing composition is to be applied intratumorally, especially by injection into tumor tissue.

3. The RNA containing composition of claim 1, wherein the at least one RNA is selected from the group consisting of coding RNA and non-coding RNA.

4. The RNA containing composition of claim 3, wherein the coding RNA comprises at least one coding region encoding at least one peptide or protein and is preferably selected from the group consisting of mRNA, viral RNA, retroviral RNA, and replicon RNA.

5. The RNA containing composition of claim 4, wherein the coding RNA is mRNA.

6. The RNA containing composition of claim 4, wherein the at least one peptide or protein is selected or derived from the group consisting of cytokines, chemokines, suicide gene products, immunogenic proteins or peptides, apoptosis inducers, angiogenesis inhibitors, heat shock proteins, tumor antigens, β-catenin inhibitors, activators of the STING pathway, checkpoint modulators, innate immune activators, antibodies, dominant negative receptors and decoy receptors, inhibitors of myeloid derived suppressor cells (MDSCs), IDO pathway inhibitors, and proteins or peptides that bind inhibitors of apoptosis.

7. The RNA containing composition of claim 6, wherein the cytokine is an interleukin, preferably chosen from the following list: IL-1α, IL-1β, IL-1ra, IL-2, IL-3, IL-4, IL-5, IL-6, IL-7, IL-8, IL-9, IL-10, IL-11, IL-12, IL-13, IL14, IL-15, IL-16, IL-17A, IL-17B, IL-17C, IL-17D, IL-17E, IL-17F, IL-18, IL-19, IL-20, IL-21, IL-22, IL-23, IL-24, IL-25, IL-26, IL-27, IL-28A/B, IL-29, IL-30, IL-31, IL-32, IL-33, IL-35.

8. The RNA containing composition of claim 6, wherein the interleukin is interleukin-12 (IL-12).

9. The RNA containing composition of claim 6, wherein the cytokine is a member of the TNF family, preferably chosen from the following list: TNF, especially TNFα, LTα, LTβ, LIGHT, TWEAK, APRIL, BAFF, TL1A, GITRL, OX40L, CD40L, FASL, CD27L, CD30L, 4-1BBL, TRAIL, RANK ligand.

10. The RNA containing composition of claim 6, wherein the cytokine is chosen from the following list: FLT3 ligand, G-CSF, GM-CSF, IFNα/β/ω, IFNγ, LIF, M-CSF, MIF, OSM, Stem Cell Factor, TGFβ1, TGFβ2, TGFβ3, TSLP ligand.

11. The RNA containing composition of claim 6, wherein the chemokine is chosen from the following list: CXCL1, CXCL2, CXCL3, CXCL4, CXCL5, CXCL6, CXCL7, CXCL8, CXCL9, CXCL10, CXCL11, CXCL12, CXCL13, CXCL14, CXCL15, CXCL16, CCL1, CCL2, CCL3, CCL4, CCL5, CCL6, CCL7, CCL8, CCL9/10, CCL11, CCL12, CCL13, CCL14, CCL15, CCL16, CCL17, CCL18, CCL19, CCL20, CCL21, CCL22, CCL23, CCL24, CCL25, CCL26, CCL27, CCL28, XCL1, XCL2, CX3CL1.

12. The RNA containing composition of claim 6, wherein the suicide gene product is a suicide enzyme, preferably a nucleotide metabolizing enzyme.

13. The RNA containing composition of claim 12, wherein the nucleotide metabolizing enzyme is chosen from the following list: thymidine kinase, preferably Herpes simplex virus thymidine kinase, cytosine deaminase, preferably bacterial cytosine deaminase or Yeast cytosine deaminase, deoxynucleoside kinase, preferably Drosophila melanogaster deoxynucleoside kinase, deoxycytidine kinase, preferably a mammalian deoxycytidine kinase, purine nucleoside phosphorylase, preferably a bacterial purine nucleoside phosphorylase.

14. The RNA containing composition of claim 6, wherein the at least one RNA encoding at least one suicide gene product is used in combination with a prodrug which is a substrate of the suicide gene product.

15. The RNA containing composition of claim 6, wherein the at least one RNA codes for at least one connexin and at least one suicide gene product.

16. The RNA containing composition of claim 6, wherein the RNA composition comprises at least one RNA encoding at least one suicide gene product and wherein the RNA composition is used in combination with a further RNA coding for at least one connexin and/or with a protein of the connexin family or parts or fragments thereof.

17. The RNA containing composition of claim 6, wherein the immunogenic protein or peptide is a protein or peptide of a pathogen, more preferably of a viral or bacterial pathogen.

18. The RNA containing composition of claim 17, wherein the immunogenic protein or peptide is at least one protein or peptide of one virus or bacterium of the following list: influenza virus type A or B or any other orthomyxovirus (influenza type C), picornaviruses, such as rhinovirus or hepatitis A virus, togaviruses, such as alphavirus or rubivirus, e.g. Sindbis, Semliki-Forest or rubeolavirus, rubella virus, coronaviruses, in particular subtypes HCV-229E or HCV-OC43, rhabdoviruses, such as rabies virus, paramyxoviruses, such as mumps virus, reoviruses, such as group A, B or C rotavirus, hepadnaviruses, such as hepatitis B virus, papoviruses, such as human papillomaviruses of any serotype, adenoviruses, in particular type 1 to 47, herpesviruses, such as Herpes simplex virus 1, 2 or 3, cytomegalovirus, preferably CMVpp65, Epstein Barr virus, vacciniaviruses, the bacterium Chlamydophila pneumoniae, Flaviviruses, such as dengue virus type 1 to 4, yellow fever virus, West Nile virus, Japanese encephalitis virus, hepatitis C virus, caliciviruses, filoviruses, such as Ebola virus, bornaviruses, bunyaviruses, such as Rift Valley fever virus, arenaviruses, such as lymphocytic choriomeningitis virus or hemorrhagic fever viruses, retroviruses, such as HIV, parvoviruses.

19-61. (canceled)

62. Method of treatment of tumor and/or cancer diseases with the RNA containing composition as defined according to claim 1, preferably by intratumoral application, especially by injection into tumor tissue.

The application's sequence listing, which the Patent Office published only in electronic form, follows.

SEQUENCE LISTING (10071 sequences)

SEQ ID NO: 1 - RNA, 1815 nt, Artificial Sequence
  R1328 coding for the mouse IL-12 protein
gggagaaagcuuaccaugugcccccagaagcugaccaucagcugguucgccaucgugcuccuggucuccccgcugauggccaugugggagcucgagaaggacguguacguggucgagguggacuggacccccgacgcgcccggcgagacggugaaccugaccugcgacacccccgaggaggacgacaucaccuggacgagcgaccagcggcacggggucaucggcuccgggaagacccugaccaucaccgugaaggaguuccucgacgccggccaguacacgugccacaagggcggcgagacccugagccacucccaccugcuccugcacaagaaggagaacgggaucuggagcaccgagauccugaagaacuucaagaacaagaccuuccucaagugcgaggccccgaacuacuccgggcgcuucacgugcagcuggcuggugcagcggaacauggaccugaaguucaacaucaaguccagcuccagcucccccgacagccgcgccgucaccugcggcauggccucccucagcgcggagaaggugacccuggaccagcgggacuacgagaaguacuccgugagcugccaggaggacgucaccugccccacggccgaggagacccugcccaucgagcucgcccuggaggcccgccagcagaacaaguacgagaacuacuccaccagcuucuucauccgggacaucaucaagccggacccccccaagaaccugcagaugaagccccucaagaacagccagguggagguguccugggaguacccggacagcugguccaccccgcacagcuacuucucccugaaguucuucguccgcauccagcggaagaaggagaagaugaaggagacggaggaggggugcaaccagaagggcgcguuccugguggagaagaccagcaccgaggugcagugcaagggcgggaacgucugcgugcaggcccaggaccgguacuacaacuccagcugcuccaagugggccugcgugcccugccggguccgcagccgcgugauccccgucagcggcccggcccggugccugucccagagccgcaaccugcucaagaccacggacgacauggugaagaccgcccgggagaagcugaagcacuacuccugcaccgccgaggacaucgaccacgaggacaucacccgcgaccagacgagcacccugaagaccugccucccccuggagcugcacaagaacgaguccugccucgccacccgggagacgagcuccaccacccgcgggagcugccugccgccccagaagaccucccugaugaugacgcucugccugggcagcaucuacgaggaccugaagauguaccagaccgaguuccaggcgaucaacgccgcccuccagaaccacaaccaccagcagaucauccuggacaaggggaugcugguggccaucgacgagcucaugcagucccugaaccacaacggcgagacccugcggcagaagccgcccgucggggaggcggaccccuaccgcgugaagaugaagcucugcauccugcugcacgccuucagcacccggguggucacgaucaaccgcgugaugggcuaccucuccagcgccgacuacaaggacgacgacgacaagugaggacuaguuauaagacugacuagcccgaugggccucccaacgggcccuccuccccuccuugcaccgagauuaauaaaaaaaaaaaaaaaaaaaaaaaaaaaaaaaaaaaaaaaaaaaaaaaaaaaaaaaaaaaaaaaauauuccccccccccccccccccccccccccccccucuagacaauuggaauu

SEQ ID NO: 2 - RNA, 1857 nt, Artificial Sequence
  R491 coding for the Photinus pyralis luciferase protein
gggagaaagcuugaggauggaggacgccaagaacaucaagaagggcccggcgcccuucuacccgcuggaggacgggaccgccggcgagcagcuccacaaggccaugaagcgguacgcccuggugccgggcacgaucgccuucaccgacgcccacaucgaggucgacaucaccuacgcggaguacuucgagaugagcgugcgccuggccgaggccaugaagcgguacggccugaacaccaaccaccggaucguggugugcucggagaacagccugcaguucuucaugccggugcugggcgcccucuucaucggcguggccgucgccccggcgaacgacaucuacaacgagcgggagcugcugaacagcauggggaucagccagccgaccgugguguucgugagcaagaagggccugcagaagauccugaacgugcagaagaagcugcccaucauccagaagaucaucaucauggacagcaagaccgacuaccagggcuuccagucgauguacacguucgugaccagccaccucccgccgggcuucaacgaguacgacuucgucccggagagcuucgaccgggacaagaccaucgcccugaucaugaacagcagcggcagcaccggccugccgaaggggguggcccugccgcaccggaccgccugcgugcgcuucucgcacgcccgggaccccaucuucggcaaccagaucaucccggacaccgccauccugagcguggugccguuccaccacggcuucggcauguucacgacccugggcuaccucaucugcggcuuccgggugguccugauguaccgguucgaggaggagcuguuccugcggagccugcaggacuacaagauccagagcgcgcugcucgugccgacccuguucagcuucuucgccaagagcacccugaucgacaaguacgaccugucgaaccugcacgagaucgccagcgggggcgccccgcugagcaaggaggugggcgaggccguggccaagcgguuccaccucccgggcauccgccagggcuacggccugaccgagaccacgagcgcgauccugaucacccccgagggggacgacaagccgggcgccgugggcaagguggucccguucuucgaggccaaggugguggaccuggacaccggcaagacccugggcgugaaccagcggggcgagcugugcgugcgggggccgaugaucaugagcggcuacgugaacaacccggaggccaccaacgcccucaucgacaaggacggcuggcugcacagcggcgacaucgccuacugggacgaggacgagcacuucuucaucgucgaccggcugaagucgcugaucaaguacaagggcuaccagguggcgccggccgagcuggagagcauccugcuccagcaccccaacaucuucgacgccggcguggccgggcugccggacgacgacgccggcgagcugccggccgcggugguggugcuggagcacggcaagaccaugacggagaaggagaucgucgacuacguggccagccaggugaccaccgccaagaagcugcggggcggcgugguguucguggacgaggucccgaagggccugaccgggaagcucgacgcccggaagauccgcgagauccugaucaaggccaagaagggcggcaagaucgccguguaagacuaguuauaagacugacuagcccgaugggccucccaacgggcccuccuccccuccuugcaccgagauuaauaaaaaaaaaaaaaaaaaaaaaaaaaaaaaaaaaaaaaaaaaaaaaaaaaaaaaaaaaaaaaaaauauuccccccccccccccccccccccccccccccucuagacaauuggaauu

SEQ ID NO: 3 - RNA, 2023 nt, Artificial Sequence
  R2763 coding for the mouse IL-12 protein
ggggcgcugccuacggagguggcagccaucuccuucucggcaucaagcuuaccaugugcccccagaagcugaccaucagcugguucgccaucgugcuccuggucuccccgcugauggccaugugggagcucgagaaggacguguacguggucgagguggacuggacccccgacgcgcccggcgagacggugaaccugaccugcgacacccccgaggaggacgacaucaccuggacgagcgaccagcggcacggggucaucggcuccgggaagacccugaccaucaccgugaaggaguuccucgacgccggccaguacacgugccacaagggcggcgagacccugagccacucccaccugcuccugcacaagaaggagaacgggaucuggagcaccgagauccugaagaacuucaagaacaagaccuuccucaagugcgaggccccgaacuacuccgggcgcuucacgugcagcuggcuggugcagcggaacauggaccugaaguucaacaucaaguccagcuccagcucccccgacagccgcgccgucaccugcggcauggccucccucagcgcggagaaggugacccuggaccagcgggacuacgagaaguacuccgugagcugccaggaggacgucaccugccccacggccgaggagacccugcccaucgagcucgcccuggaggcccgccagcagaacaaguacgagaacuacuccaccagcuucuucauccgggacaucaucaagccggacccccccaagaaccugcagaugaagccccucaagaacagccagguggagguguccugggaguacccggacagcugguccaccccgcacagcuacuucucccugaaguucuucguccgcauccagcggaagaaggagaagaugaaggagacggaggaggggugcaaccagaagggcgcguuccugguggagaagaccagcaccgaggugcagugcaagggcgggaacgucugcgugcaggcccaggaccgguacuacaacuccagcugcuccaagugggccugcgugcccugccggguccgcagcggcaguacuucgggcagugguaagccugguaguggugaggguaguacuaagggucgcgugauccccgucagcggcccggcccggugccugucccagagccgcaaccugcucaagaccacggacgacauggugaagaccgcccgggagaagcugaagcacuacuccugcaccgccgaggacaucgaccacgaggacaucacccgcgaccagacgagcacccugaagaccugccucccccuggagcugcacaagaacgaguccugccucgccacccgggagacgagcuccaccacccgcgggagcugccugccgccccagaagaccucccugaugaugacgcucugccugggcagcaucuacgaggaccugaagauguaccagaccgaguuccaggcgaucaacgccgcccuccagaaccacaaccaccagcagaucauccuggacaaggggaugcugguggccaucgacgagcucaugcagucccugaaccacaacggcgagacccugcggcagaagccgcccgucggggaggcggaccccuaccgcgugaagaugaagcucugcauccugcugcacgccuucagcacccggguggucacgaucaaccgcgugaugggcuaccucuccagcgccugaggacuagugcaucacauuuaaaagcaucucagccuaccaugagaauaagagaaagaaaaugaagaucaauagcuuauucaucucuuuuucuuuuucguugguguaaagccaacacccugucuaaaaaacauaaauuucuuuaaucauuuugccucuuuucucugugcuucaauuaauaaaaaauggaaagaaccuagaucuaaaaaaaaaaaaaaaaaaaaaaaaaaaaaaaaaaaaaaaaaaaaaaaaaaaaaaaaaaaaaaaaugcaucccccccccccccccccccccccccccccccaaaggcucuuuucagagccaccagaauu

SEQ ID NO: 4 - RNA, 2034 nt, Artificial Sequence
  R2244 coding for the Photinus pyralis luciferase protein
gggcgcugccuacggagguggcagccaucuccuucucggcaucaagcuugaggauggaggacgccaagaacaucaagaagggcccggcgcccuucuacccgcuggaggacgggaccgccggcgagcagcuccacaaggccaugaagcgguacgcccuggugccgggcacgaucgccuucaccgacgcccacaucgaggucgacaucaccuacgcggaguacuucgagaugagcgugcgccuggccgaggccaugaagcgguacggccugaacaccaaccaccggaucguggugugcucggagaacagccugcaguucuucaugccggugcugggcgcccucuucaucggcguggccgucgccccggcgaacgacaucuacaacgagcgggagcugcugaacagcauggggaucagccagccgaccgugguguucgugagcaagaagggccugcagaagauccugaacgugcagaagaagcugcccaucauccagaagaucaucaucauggacagcaagaccgacuaccagggcuuccagucgauguacacguucgugaccagccaccucccgccgggcuucaacgaguacgacuucgucccggagagcuucgaccgggacaagaccaucgcccugaucaugaacagcagcggcagcaccggccugccgaaggggguggcccugccgcaccggaccgccugcgugcgcuucucgcacgcccgggaccccaucuucggcaaccagaucaucccggacaccgccauccugagcguggugccguuccaccacggcuucggcauguucacgacccugggcuaccucaucugcggcuuccgggugguccugauguaccgguucgaggaggagcuguuccugcggagccugcaggacuacaagauccagagcgcgcugcucgugccgacccuguucagcuucuucgccaagagcacccugaucgacaaguacgaccugucgaaccugcacgagaucgccagcgggggcgccccgcugagcaaggaggugggcgaggccguggccaagcgguuccaccucccgggcauccgccagggcuacggccugaccgagaccacgagcgcgauccugaucacccccgagggggacgacaagccgggcgccgugggcaagguggucccguucuucgaggccaaggugguggaccuggacaccggcaagacccugggcgugaaccagcggggcgagcugugcgugcgggggccgaugaucaugagcggcuacgugaacaacccggaggccaccaacgcccucaucgacaaggacggcuggcugcacagcggcgacaucgccuacugggacgaggacgagcacuucuucaucgucgaccggcugaagucgcugaucaaguacaagggcuaccagguggcgccggccgagcuggagagcauccugcuccagcaccccaacaucuucgacgccggcguggccgggcugccggacgacgacgccggcgagcugccggccgcggugguggugcuggagcacggcaagaccaugacggagaaggagaucgucgacuacguggccagccaggugaccaccgccaagaagcugcggggcggcgugguguucguggacgaggucccgaagggccugaccgggaagcucgacgcccggaagauccgcgagauccugaucaaggccaagaagggcggcaagaucgccguguaagacuagugcaucacauuuaaaagcaucucagccuaccaugagaauaagagaaagaaaaugaagaucaauagcuuauucaucucuuuuucuuuuucguugguguaaagccaacacccugucuaaaaaacauaaauuucuuuaaucauuuugccucuuuucucugugcuucaauuaauaaaaaauggaaagaaccuagaucuaaaaaaaaaaaaaaaaaaaaaaaaaaaaaaaaaaaaaaaaaaaaaaaaaaaaaaaaaaaaaaaaugcaucccccccccccccccccccccccccccccccaaaggcucuuuucagagccaccagaauu

SEQ ID NO: 5 - RNA, 547 nt, Artificial Sequence
  RNA sequence of the non-coding immunostimulatory RNA
gggagaaagcucaagcuuauccaaguaggcuggucaccuguacaacguagccgguauuuuuuuuuuuuuuuuuuuuuugaccgucucaagguccaaguuagucugccuauaaaggugcggauccacagcugaugaaagacuugugcgguacgguuaaucuccccuuuuuuuuuuuuuuuuuuuuuaguaaaugcgucuacugaauccagcgaugaugcuggcccagaucuucgaccacaagugcauauaguagucaucgagggucgccuuuuuuuuuuuuuuuuuuuuuuuggcccaguucugagacuucgcuagagacuacaguuacagcugcaguaguaaccacugcggcuauugcaggaaaucccguucagguuuuuuuuuuuuuuuuuuuuuccgcucacuaugauuaagaaccagguggagugucacugcucucgaggucucacgagagcgcucgauacaguccuuggaagaaucuuuuuuuuuuuuuuuuuuuuuugugcgacgaucacagagaacuucuauucaugcaggucugcucuag

SEQ ID NO: 6 - RNA, 1879 nt, Artificial Sequence
  R2650/R2651 coding for the influenza nucleoprotein
ggggcgcugccuacggagguggcagccaucuccuucucggcaucaagcuuaccauggccagccagggcaccaagcgguccuacgagcagauggagaccgacggggagcgccagaacgccacggagauccgggcgagcgugggcaagaugaucgggggcaucgggcgcuucuacauccagaugugcaccgagcugaagcucuccgacuacgagggccggcugauccagaacagccugaccaucgagcgcaugguccucuccgccuucgacgagcggcgcaacaaguaccuggaggagcaccccagcgccggcaaggacccgaagaagaccgggggccccaucuaccggcgcgugaacgggaaguggaugcgggagcugauccucuacgacaaggaggagauccgccggaucuggcgccaggccaacaacggcgacgacgccacggcggggcugacccacaugaugaucuggcacuccaaccugaacgacgccaccuaccagcggacccgcgcccucgugcggacgggcauggacccccgcaugugcagccugaugcagggcuccacccugccccggcgcagcggggccgcgggcgccgccgucaagggggugggcaccauggugauggagcucguccggaugaucaagcgcggcaucaacgaccggaacuucuggcggggcgagaacgggcgcaagacccggaucgccuacgagcgcaugugcaacauccugaaggggaaguuccagacggccgcgcagaaggccaugauggaccaggugcgggagucccgcaacccgggcaacgccgaguucgaggaccugaccuuccucgcccggagcgcccugauccugcgcggguccguggcgcacaagagcugccuccccgccugcgucuacggccccgccguggccuccggcuacgacuucgagcgggagggguacagccuggugggcaucgaccccuuccgccugcuccagaacucccaggucuacagccugauccggccgaacgagaaccccgcccacaagucccagcugguguggauggcgugccacagcgccgccuucgaggaccuccgcgugcugagcuucaucaaggggaccaagguccugccccggggcaagcucuccacccgcggggugcagaucgccagcaacgagaacauggagacgauggaguccagcacccuggagcugcggucccgcuacugggccauccggacccgcagcggcggcaacaccaaccagcagcgggcguccgccgggcagaucagcauccagcccacguucuccgugcagcgcaaccucccguucgaccggaccaccaucauggccgccuucaacggcaacaccgaggggcggacgagcgacaugcgcaccgagaucauccggaugauggaguccgcgcgccccgaggacgucagcuuccagggccggggcguguucgagcuguccgacgagaaggccgccagccccaucgugcccuccuucgacaugagcaacgagggguccuacuucuucggcgacaacgccgaggaguacgacaacugaccacuagugcaucacauuuaaaagcaucucagccuaccaugagaauaagagaaagaaaaugaagaucaauagcuuauucaucucuuuuucuuuuucguugguguaaagccaacacccugucuaaaaaacauaaauuucuuuaaucauuuugccucuuuucucugugcuucaauuaauaaaaaauggaaagaaccuagaucuaaaaaaaaaaaaaaaaaaaaaaaaaaaaaaaaaaaaaaaaaaaaaaaaaaaaaaaaaaaaaaaaugcaucccccccccccccccccccccccccccccccaaaggcucuuuucagagccaccagaauu

SEQ ID NO: 7 - protein, 14 aa, Artificial Sequence
  cationic component of the polymeric carrier
CRRRRRRRRRRRRC

SEQ ID NO: 8 - DNA, 24 bp, Artificial Sequence
  Stem-loop nucleotide sequence
caaaggcucuuuucagagccacca

SEQ ID NO: 9 - RNA, 24 nt, Artificial Sequence
  Stem-loop nucleotide sequence
caaaggcucuuuucagagccacca

SEQ ID NO: 10 - protein, 9 aa, Artificial Sequence
  cationic component of the polymeric carrier
CRRRRRRRC

SEQ ID NO: 11 - protein, 10 aa, Artificial Sequence
  cationic component of the polymeric carrier
CRRRRRRRRC

SEQ ID NO: 12 - protein, 11 aa, Artificial Sequence
  cationic component of the polymeric carrier
CRRRRRRRRRC

SEQ ID NO: 13 - protein, 12 aa, Artificial Sequence
  cationic component of the polymeric carrier
CRRRRRRRRRRC

SEQ ID NO: 14 - protein, 13 aa, Artificial Sequence
  cationic component of the polymeric carrier
CRRRRRRRRRRRC

SEQ ID NO: 15 - protein, 14 aa, Artificial Sequence
  cationic component of the polymeric carrier
CRRRRRRRRRRRRC

SEQ ID NO: 16 - protein, 15 aa, Artificial Sequence
  cationic component of the polymeric carrier
CRRRRRRRRRRRRRC

SEQ ID NO: 17 - protein, 16 aa, Artificial Sequence
  cationic component of the polymeric carrier
CRRRRRRRRRRRRRRC

SEQ ID NO: 18 - protein, 17 aa, Artificial Sequence
  cationic component of the polymeric carrier
CRRRRRRRRRRRRRRRC

SEQ ID NO: 19 - protein, 18 aa, Artificial Sequence
  cationic component of the polymeric carrier
CRRRRRRRRRRRRRRRRC

SEQ ID NO: 20 - protein, 19 aa, Artificial Sequence
  cationic component of the polymeric carrier
CRRRRRRRRRRRRRRRRRC

SEQ ID NO: 21 - protein, 20 aa, Artificial Sequence
  cationic component of the polymeric carrier
CRRRRRRRRRRRRRRRRRRC

SEQ ID NO: 22 - protein, 20 aa, Artificial Sequence
  cationic component of the polymeric carrier
CRRRRRRRRRRRRRRRRRRC

SEQ ID NO: 23 - protein, 21 aa, Artificial Sequence
  cationic component of the polymeric carrier
CRRRRRRRRRRRRRRRRRRRC

SEQ ID NO: 24 - protein, 2 aa, Artificial Sequence
  cationic component of the polymeric carrier
WY

SEQ ID NO: 25 - protein, 2 aa, Artificial Sequence
  cationic component of the polymeric carrier
YW

SEQ ID NO: 26 - protein, 2 aa, Artificial Sequence
  cationic component of the polymeric carrier
WW

SEQ ID NO: 27 - protein, 2 aa, Artificial Sequence
  cationic component of the polymeric carrier
YY

SEQ ID NO: 28 - protein, 3 aa, Artificial Sequence
  cationic component of the polymeric carrier
WYW

SEQ ID NO: 29 - protein, 3 aa, Artificial Sequence
  cationic component of the polymeric carrier
YWY

SEQ ID NO: 30 - protein, 3 aa, Artificial Sequence
  cationic component of the polymeric carrier
WWW

SEQ ID NO: 31 - protein, 3 aa, Artificial Sequence
  cationic component of the polymeric carrier
YYY

SEQ ID NO: 32 - protein, 4 aa, Artificial Sequence
  cationic component of the polymeric carrier
WYWY

SEQ ID NO: 33 - protein, 4 aa, Artificial Sequence
  cationic component of the polymeric carrier
YWYW

SEQ ID NO: 34 - protein, 4 aa, Artificial Sequence
  cationic component of the polymeric carrier
WWWW

SEQ ID NO: 35 - protein, 2 aa, Artificial Sequence
  cationic component of the polymeric carrier
FY

SEQ ID NO: 36 - protein, 2 aa, Artificial Sequence
  cationic component of the polymeric carrier
YF

SEQ ID NO: 37 - protein, 2 aa, Artificial Sequence
  cationic component of the polymeric carrier
FF

SEQ ID NO: 38 - protein, 3 aa, Artificial Sequence
  cationic component of the polymeric carrier
FYF

SEQ ID NO: 39 - protein, 3 aa, Artificial Sequence
  cationic component of the polymeric carrier
YFY

SEQ ID NO: 40 - protein, 3 aa, Artificial Sequence
  cationic component of the polymeric carrier
FFF

SEQ ID NO: 41 - protein, 4 aa, Artificial Sequence
  cationic component of the polymeric carrier
FYFY

SEQ ID NO: 42 - protein, 4 aa, Artificial Sequence
  cationic component of the polymeric carrier
YFYF

SEQ ID NO: 43 - protein, 4 aa, Artificial Sequence
  cationic component of the polymeric carrier
FFFF

SEQ ID NO: 44 - protein, 2 aa, Artificial Sequence
  cationic component of the polymeric carrier
FW

SEQ ID NO: 45 - protein, 2 aa, Artificial Sequence
  cationic component of the polymeric carrier
WF

SEQ ID NO: 46 - protein, 2 aa, Artificial Sequence
  cationic component of the polymeric carrier
FF

SEQ ID NO: 47 - protein, 3 aa, Artificial Sequence
  cationic component of the polymeric carrier
FWF

SEQ ID NO: 48 - protein, 3 aa, Artificial Sequence
  cationic component of the polymeric carrier
WFW

SEQ ID NO: 49 - protein, 4 aa, Artificial Sequence
  cationic component of the polymeric carrier
FWFW

SEQ ID NO: 50 - protein, 4 aa, Artificial Sequence
  cationic component of the polymeric carrier
WFWF

SEQ ID NO: 51 - protein, 4 aa, Artificial Sequence
  cationic component of the polymeric carrier
YYYY

SEQ ID NO: 52 - protein, 3 aa, Artificial Sequence
  cationic component of the polymeric carrier
CYC

SEQ ID NO: 53 - protein, 3 aa, Artificial Sequence
  cationic component of the polymeric carrier
CWC

SEQ ID NO: 54 - protein, 4 aa, Artificial Sequence
  cationic component of the polymeric carrier
CWYC

SEQ ID NO: 55 - protein, 4 aa, Artificial Sequence
  cationic component of the polymeric carrier
CYWC

SEQ ID NO: 56 - protein, 4 aa, Artificial Sequence
  cationic component of the polymeric carrier
CWWC

SEQ ID NO: 57 - protein, 4 aa, Artificial Sequence
  cationic component of the polymeric carrier
CYYC

SEQ ID NO: 58 - protein, 5 aa, Artificial Sequence
  cationic component of the polymeric carrier
CWYWC

SEQ ID NO: 59 - protein, 5 aa, Artificial Sequence
  cationic component of the polymeric carrier
CYWYC

SEQ ID NO: 60 - protein, 5 aa, Artificial Sequence
  cationic component of the polymeric carrier
CWWWC

SEQ ID NO: 61 - protein, 5 aa, Artificial Sequence
  cationic component of the polymeric carrier
CYYYC

SEQ ID NO: 62 - protein, 6 aa, Artificial Sequence
  cationic component of the polymeric carrier
CWYWYC

SEQ ID NO: 63 - protein, 6 aa, Artificial Sequence
  cationic component of the polymeric carrier
CYWYWC

SEQ ID NO: 64 - protein, 6 aa, Artificial Sequence
  cationic component of the polymeric carrier
CWWWWC

SEQ ID NO: 65 - protein, 6 aa, Artificial Sequence
  cationic component of the polymeric carrier
CYYYYC

SEQ ID NO: 66 - protein, 3 aa, Artificial Sequence
  cationic component of the polymeric carrier
CFC

SEQ ID NO: 67 - protein, 4 aa, Artificial Sequence
  cationic component of the polymeric carrier
CFYC

SEQ ID NO: 68 - protein, 4 aa, Artificial Sequence
  cationic component of the polymeric carrier
CYFC

SEQ ID NO: 69 - protein, 4 aa, Artificial Sequence
  cationic component of the polymeric carrier
CFFC

SEQ ID NO: 70 - protein, 4 aa, Artificial Sequence
  cationic component of the polymeric carrier
CYYC

SEQ ID NO: 71 - protein, 5 aa, Artificial Sequence
  cationic component of the polymeric carrier
CFYFC

SEQ ID NO: 72 - protein, 5 aa, Artificial Sequence
  cationic component of the polymeric carrier
CYFYC

SEQ ID NO: 73 - protein, 5 aa, Artificial Sequence
  cationic component of the polymeric carrier
CFFFC

SEQ ID NO: 74 - protein, 5 aa, Artificial Sequence
  cationic component of the polymeric carrier
CYYYC

SEQ ID NO: 75 - protein, 6 aa, Artificial Sequence
  cationic component of the polymeric carrier
CFYFYC

SEQ ID NO: 76 - protein, 6 aa, Artificial Sequence
  cationic component of the polymeric carrier
CYFYFC

SEQ ID NO: 77 - protein, 6 aa, Artificial Sequence
  cationic component of the polymeric carrier
CFFFFC

SEQ ID NO: 78 - protein, 4 aa, Artificial Sequence
  cationic component of the polymeric carrier
CFWC

SEQ ID NO: 79 - protein, 4 aa, Artificial Sequence
  cationic component of the polymeric carrier
CWFC

SEQ ID NO: 80 - protein, 4 aa, Artificial Sequence
  cationic component of the polymeric carrier
CFFC

SEQ ID NO: 81 - protein, 5 aa, Artificial Sequence
  cationic component of the polymeric carrier
CFWFC

SEQ ID NO: 82 - protein, 5 aa, Artificial Sequence
  cationic component of the polymeric carrier
CWFWC

SEQ ID NO: 83 - protein, 6 aa, Artificial Sequence
  cationic component of the polymeric carrier
CFWFWC

SEQ ID NO: 84 - protein, 6 aa, Artificial Sequence
  cationic component of the polymeric carrier
CWFWFC

SEQ ID NO: 85 - protein, 2 aa, Artificial Sequence
  cationic component of the polymeric carrier
ST

SEQ ID NO: 86 - protein, 2 aa, Artificial Sequence
  cationic component of the polymeric carrier
TS

SEQ ID NO: 87 - protein, 2 aa, Artificial Sequence
  cationic component of the polymeric carrier
SS

SEQ ID NO: 88 - protein, 2 aa, Artificial Sequence
  cationic component of the polymeric carrier
TT

SEQ ID NO: 89 - protein, 3 aa, Artificial Sequence
  cationic component of the polymeric carrier
STS

SEQ ID NO: 90 - protein, 3 aa, Artificial Sequence
  cationic component of the polymeric carrier
TST

SEQ ID NO: 91 - protein, 3 aa, Artificial Sequence
  cationic component of the polymeric carrier
SSS

SEQ ID NO: 92 - protein, 3 aa, Artificial Sequence
  cationic component of the polymeric carrier
TTT

SEQ ID NO: 93 - protein, 4 aa, Artificial Sequence
  cationic component of the polymeric carrier
STST

SEQ ID NO: 94 - protein, 4 aa, Artificial Sequence
  cationic component of the polymeric carrier
TSTS

SEQ ID NO: 95 - protein, 4 aa, Artificial Sequence
  cationic component of the polymeric carrier
SSSS

SEQ ID NO: 96 - protein, 4 aa, Artificial Sequence
  cationic component of the polymeric carrier
TTTT

SEQ ID NO: 97 - protein, 2 aa, Artificial Sequence
  cationic component of the polymeric carrier
QN

SEQ ID NO: 98 - protein, 2 aa, Artificial Sequence
  cationic component of the polymeric carrier
NQ

SEQ ID NO: 99 - protein, 2 aa, Artificial Sequence
  cationic component of the polymeric carrier
QQ

SEQ ID NO: 100 - protein, 2 aa, Artificial Sequence
  cationic component of the polymeric carrier
NN

SEQ ID NO: 101 - protein, 3 aa, Artificial Sequence
  cationic component of the polymeric carrier
QNQ

SEQ ID NO: 102 - protein, 3 aa, Artificial Sequence
  cationic component of the polymeric carrier
NQN

SEQ ID NO: 103 - protein, 3 aa, Artificial Sequence
  cationic component of the polymeric carrier
QQQ

SEQ ID NO: 104 - protein, 3 aa, Artificial Sequence
  cationic component of the polymeric carrier
NNN

SEQ ID NO: 105 - protein, 4 aa, Artificial Sequence
  cationic component of the polymeric carrier
QNQN

SEQ ID NO: 106 - protein, 4 aa, Artificial Sequence
  cationic component of the polymeric carrier
NQNQ

SEQ ID NO: 107 - protein, 4 aa, Artificial Sequence
  cationic component of the polymeric carrier
QQQQ

SEQ ID NO: 108 - protein, 4 aa, Artificial Sequence
  cationic component of the polymeric carrier
NNNN

SEQ ID NO: 109 - protein, 2 aa, Artificial Sequence
  cationic component of the polymeric carrier
SN

SEQ ID NO: 110 - protein, 2 aa, Artificial Sequence
  cationic component of the polymeric carrier
NS

SEQ ID NO: 111 - protein, 2 aa, Artificial Sequence
  cationic component of the polymeric carrier
SS

SEQ ID NO: 112 - protein, 2 aa, Artificial Sequence
  cationic component of the polymeric carrier
NN

SEQ ID NO: 113 - protein, 3 aa, Artificial Sequence
  cationic component of the polymeric carrier
SNS

SEQ ID NO: 114 - protein, 3 aa, Artificial Sequence
  cationic component of the polymeric carrier
NSN

SEQ ID NO: 115 - protein, 3 aa, Artificial Sequence
  cationic component of the polymeric carrier
SSS

SEQ ID NO: 116 - protein, 3 aa, Artificial Sequence
  cationic component of the polymeric carrier
NNN

SEQ ID NO: 117 - protein, 4 aa, Artificial Sequence
  cationic component of the polymeric carrier
SNSN

SEQ ID NO: 118 - protein, 4 aa, Artificial Sequence
  cationic component of the polymeric carrier
NSNS

SEQ ID NO: 119 - protein, 4 aa, Artificial Sequence
  cationic component of the polymeric carrier
SSSS

SEQ ID NO: 120 - protein, 4 aa, Artificial Sequence
  cationic component of the polymeric carrier
NNNN

SEQ ID NO: 121 - protein, 3 aa, Artificial Sequence
  cationic component of the polymeric carrier
CTC

SEQ ID NO: 122 - protein, 3 aa, Artificial Sequence
  cationic component of the polymeric carrier
CSC

SEQ ID NO: 123 - protein, 4 aa, Artificial Sequence
  cationic component of the polymeric carrier
CSTC

SEQ ID NO: 124 - protein, 4 aa, Artificial Sequence
  cationic component of the polymeric carrier
CTSC

SEQ ID NO: 125 - protein, 4 aa, Artificial Sequence
  cationic component of the polymeric carrier
CSSC

SEQ ID NO: 126 - protein, 4 aa, Artificial Sequence
  cationic component of the polymeric carrier
CTTC

SEQ ID NO: 127 - protein, 5 aa, Artificial Sequence
  cationic component of the polymeric carrier
CSTSC

SEQ ID NO: 128 - protein, 5 aa, Artificial Sequence
  cationic component of the polymeric carrier
CTSTC

SEQ ID NO: 129 - protein, 5 aa, Artificial Sequence
  cationic component of the polymeric carrier
CSSSC

SEQ ID NO: 130 - protein, 5 aa, Artificial Sequence
  cationic component of the polymeric carrier
CTTTC

SEQ ID NO: 131 - protein, 6 aa, Artificial Sequence
  cationic component of the polymeric carrier
CSTSTC

SEQ ID NO: 132 - protein, 6 aa, Artificial Sequence
  cationic component of the polymeric carrier
CTSTSC

SEQ ID NO: 133 - protein, 6 aa, Artificial Sequence
  cationic component of the polymeric carrier
CSSSSC

SEQ ID NO: 134 - protein, 6 aa, Artificial Sequence
  cationic component of the polymeric carrier
CTTTTC

SEQ ID NO: 135 - protein, 3 aa, Artificial Sequence
  cationic component of the polymeric carrier
CNC

SEQ ID NO: 136 - protein, 3 aa, Artificial Sequence
  cationic component of the polymeric carrier
CQC

SEQ ID NO: 137 - protein, 4 aa, Artificial Sequence
  cationic component of the polymeric carrier
CQNC

SEQ ID NO: 138 - protein, 4 aa, Artificial Sequence
  cationic component of the polymeric carrier
CNQC

SEQ ID NO: 139 - protein, 4 aa, Artificial Sequence
  cationic component of the polymeric carrier
CQQC

SEQ ID NO: 140 - protein, 4 aa, Artificial Sequence
  cationic component of the polymeric carrier
CNNC

SEQ ID NO: 141 - protein, 5 aa, Artificial Sequence
  cationic component of the polymeric carrier
CQNQC

SEQ ID NO: 142 - protein, 5 aa, Artificial Sequence
  cationic component of the polymeric carrier
CNQNC

SEQ ID NO: 143 - protein, 5 aa, Artificial Sequence
  cationic component of the polymeric carrier
CQQQC

SEQ ID NO: 144 - protein, 5 aa, Artificial Sequence
  cationic component of the polymeric carrier
CNNNC

SEQ ID NO: 145 - protein, 6 aa, Artificial Sequence
  cationic component of the polymeric carrier
CQNQNC

SEQ ID NO: 146 - protein, 6 aa, Artificial Sequence
  cationic component of the polymeric carrier
CNQNQC

SEQ ID NO: 147 - protein, 6 aa, Artificial Sequence
  cationic component of the polymeric carrier
CQQQQC

SEQ ID NO: 148 - protein, 6 aa, Artificial Sequence
  cationic component of the polymeric carrier
CNNNNC

SEQ ID NO: 149 - protein, 3 aa, Artificial Sequence
  cationic component of the polymeric carrier
CNC

SEQ ID NO: 150 - protein, 3 aa, Artificial Sequence
  cationic component of the polymeric carrier
CSC

SEQ ID NO: 151 - protein, 4 aa, Artificial Sequence
  cationic component of the polymeric carrier
CSNC

SEQ ID NO: 152 - protein, 4 aa, Artificial Sequence
  cationic component of the polymeric carrier
CNSC

SEQ ID NO: 153 - protein, 4 aa, Artificial Sequence
  cationic component of the polymeric carrier
CSSC

SEQ ID NO: 154 - protein, 4 aa, Artificial Sequence
  cationic component of the polymeric carrier
CNNC

SEQ ID NO: 155 - protein, 5 aa, Artificial Sequence
  cationic component of the polymeric carrier
CSNSC

SEQ ID NO: 156 - protein, 5 aa, Artificial Sequence
  cationic component of the polymeric carrier
CNSNC

SEQ ID NO: 157 - protein, 5 aa, Artificial Sequence
  cationic component of the polymeric carrier
CSSSC

SEQ ID NO: 158 - protein, 5 aa, Artificial Sequence
  cationic component of the polymeric carrier
CNNNC

SEQ ID NO: 159 - protein, 6 aa, Artificial Sequence
  cationic component of the polymeric carrier
CSNSNC

SEQ ID NO: 160 - protein, 6 aa, Artificial Sequence
  cationic component of the polymeric carrier
CNSNSC

SEQ ID NO: 161 - protein, 6 aa, Artificial Sequence
  cationic component of the polymeric carrier
CSSSSC

SEQ ID NO: 162 - protein, 6 aa, Artificial Sequence
  cationic component of the polymeric carrier
CNNNNC

SEQ ID NO: 163 - protein, 2 aa, Artificial Sequence
  cationic component of the polymeric carrier
LV

SEQ ID NO: 164 - protein, 2 aa, Artificial Sequence
  cationic component of the polymeric carrier
VL

SEQ ID NO: 165 - protein, 2 aa, Artificial Sequence
  cationic component of the polymeric carrier
LL

SEQ ID NO: 166 - protein, 2 aa, Artificial Sequence
  cationic component of the polymeric carrier
VV

SEQ ID NO: 167 - protein, 3 aa, Artificial Sequence
  cationic component of the polymeric carrier
LVL

SEQ ID NO: 168 - protein, 3 aa, Artificial Sequence
  cationic component of the polymeric carrier
VLV

SEQ ID NO: 169 - protein, 3 aa, Artificial Sequence
  cationic component of the polymeric carrier
LLL

SEQ ID NO: 170 - protein, 3 aa, Artificial Sequence
  cationic component of the polymeric carrier
VVV

SEQ ID NO: 171 - protein, 4 aa, Artificial Sequence
  cationic component of the polymeric carrier
LVLV

SEQ ID NO: 172 - protein, 4 aa, Artificial Sequence
  cationic component of the polymeric carrier
VLVL

SEQ ID NO: 173 - protein, 4 aa, Artificial Sequence
  cationic component of the polymeric carrier
LLLL

SEQ ID NO: 174 - protein, 4 aa, Artificial Sequence
  cationic component of the polymeric carrier
VVVV

SEQ ID NO: 175 - protein, 2 aa, Artificial Sequence
  cationic component of the polymeric carrier
IA

SEQ ID NO: 176 - protein, 2 aa, Artificial Sequence
  cationic component of the polymeric carrier
AI

SEQ ID NO: 177 - protein, 2 aa, Artificial Sequence
  cationic component of the polymeric carrier
II

SEQ ID NO: 178 - protein, 2 aa, Artificial Sequence
  cationic component of the polymeric carrier
AA

SEQ ID NO: 179 - protein, 3 aa, Artificial Sequence
  cationic component of the polymeric carrier
IAI

SEQ ID NO: 180 - protein, 3 aa, Artificial Sequence
  cationic component of the polymeric carrier
AIA

SEQ ID NO: 181 - protein, 3 aa, Artificial Sequence
  cationic component of the polymeric carrier
III

SEQ ID NO: 182 - protein, 3 aa, Artificial Sequence
  cationic component of the polymeric carrier
AAA

SEQ ID NO: 183 - protein, 4 aa, Artificial Sequence
  cationic component of the polymeric carrier
IAIA

SEQ ID NO: 184 - protein, 4 aa, Artificial Sequence
  cationic component of the polymeric carrier
AIAI

SEQ ID NO: 185 - protein, 4 aa, Artificial Sequence
  cationic component of the polymeric carrier
IIII

SEQ ID NO: 186 - protein, 4 aa, Artificial Sequence
  cationic component of the polymeric carrier
AAAA

SEQ ID NO: 187 - protein, 2 aa, Artificial Sequence
  cationic component of the polymeric carrier
MA

SEQ ID NO: 188 - protein, 2 aa, Artificial Sequence
  cationic component of the polymeric carrier
AM

SEQ ID NO: 189 - protein, 2 aa, Artificial Sequence
  cationic component of the polymeric carrier
MM

SEQ ID NO: 190 - protein, 2 aa, Artificial Sequence
  cationic component of the polymeric carrier
AA

SEQ ID NO: 191 - protein, 3 aa, Artificial Sequence
  cationic component of the polymeric carrier
MAM

SEQ ID NO: 192 - protein, 3 aa, Artificial Sequence
  cationic component of the polymeric carrier
AMA

SEQ ID NO: 193 - protein, 3 aa, Artificial Sequence
  cationic component of the polymeric carrier
MMM

SEQ ID NO: 194 - protein, 3 aa, Artificial Sequence
  cationic component of the polymeric carrier
AAA

SEQ ID NO: 195 - protein, 4 aa, Artificial Sequence
  cationic component of the polymeric carrier
MAMA

SEQ ID NO: 196 - protein, 4 aa, Artificial Sequence
  cationic component of the polymeric carrier
AMAM

SEQ ID NO: 197 - protein, 4 aa, Artificial Sequence
  cationic component of the polymeric carrier
MMMM

SEQ ID NO: 198 - protein, 3 aa, Artificial Sequence
  cationic component of the polymeric carrier
CVC

SEQ ID NO: 199 - protein, 3 aa, Artificial Sequence
  cationic component of the polymeric carrier
CLC

SEQ ID NO: 200 - protein, 4 aa, Artificial Sequence
  cationic component of the polymeric carrier
CLVC

SEQ ID NO: 201 - protein, 4 aa, Artificial Sequence
  cationic component of the polymeric carrier
CVLC

SEQ ID NO: 202 - protein, 4 aa, Artificial Sequence
  cationic component of the polymeric carrier
CLLC

SEQ ID NO: 203 - protein, 4 aa, Artificial Sequence
  cationic component of the polymeric carrier
CVVC

SEQ ID NO: 204 - protein, 5 aa, Artificial Sequence
  cationic component of the polymeric carrier
CLVLC

SEQ ID NO: 205 - protein, 5 aa, Artificial Sequence
  cationic component of the polymeric carrier
CVLVC

SEQ ID NO: 206 - protein, 5 aa, Artificial Sequence
  cationic component of the polymeric carrier
CLLLC

SEQ ID NO: 207 - protein, 5 aa, Artificial Sequence
  cationic component of the polymeric carrier
CVVVC

SEQ ID NO: 208 - protein, 6 aa, Artificial Sequence
  cationic component of the polymeric carrier
CLVLVC

SEQ ID NO: 209 - protein, 6 aa, Artificial Sequence
  cationic component of the polymeric carrier
CVLVLC

SEQ ID NO: 210 - protein, 6 aa, Artificial Sequence
  cationic component of the polymeric carrier
CLLLLC

SEQ ID NO: 211 - protein, 6 aa, Artificial Sequence
  cationic component of the polymeric carrier
CVVVVC

SEQ ID NO: 212 - protein, 3 aa, Artificial Sequence
  cationic component of the polymeric carrier
CAC

SEQ ID NO: 213 - protein, 3 aa, Artificial Sequence
  cationic component of the polymeric carrier
CIC

SEQ ID NO: 214 - protein, 4 aa, Artificial Sequence
  cationic component of the polymeric carrier
CIAC

SEQ ID NO: 215 - protein, 4 aa, Artificial Sequence
  cationic component of the polymeric carrier
CAIC

SEQ ID NO: 216 - protein, 4 aa, Artificial Sequence
  cationic component of the polymeric carrier
CIIC

SEQ ID NO: 217 - protein, 4 aa, Artificial Sequence
  cationic component of the polymeric carrier
CAAC

SEQ ID NO: 218 - protein, 5 aa, Artificial Sequence
  cationic component of the polymeric carrier
CIAIC

SEQ ID NO: 219 - protein, 5 aa, Artificial Sequence
  cationic component of the polymeric carrier
CAIAC

SEQ ID NO: 220 - protein, 5 aa, Artificial Sequence
  cationic component of the polymeric carrier
CIIIC

SEQ ID NO: 221 - protein, 5 aa, Artificial Sequence
  cationic component of the polymeric carrier
CAAAC

SEQ ID NO: 222 - protein, 6 aa, Artificial Sequence
  cationic component of the polymeric carrier
CIAIAC

SEQ ID NO: 223 - protein, 6 aa, Artificial Sequence
  cationic component of the polymeric carrier
CAIAIC

SEQ ID NO: 224 - protein, 6 aa, Artificial Sequence
  cationic component of the polymeric carrier
CIIIIC

SEQ ID NO: 225 - protein, 6 aa, Artificial Sequence
  cationic component of the polymeric carrier
CAAAAC

SEQ ID NO: 226 - protein, 3 aa, Artificial Sequence
  cationic component of the polymeric carrier
CMC

SEQ ID NO: 227 - protein, 4 aa, Artificial Sequence
  cationic component of the polymeric carrier
CMAC

SEQ ID NO: 228 - protein, 4 aa, Artificial Sequence
  cationic component of the polymeric carrier
CAMC

SEQ ID NO: 229 - protein, 4 aa, Artificial Sequence
  cationic component of the polymeric carrier
CMMC

SEQ ID NO: 230 - protein, 4 aa, Artificial Sequence
  cationic component of the polymeric carrier
CAAC

SEQ ID NO: 231 - protein, 5 aa, Artificial Sequence
  cationic component of the polymeric carrier
CMAMC

SEQ ID NO: 232 - protein, 5 aa, Artificial Sequence
  cationic component of the polymeric carrier
CAMAC

SEQ ID NO: 233 - protein, 5 aa, Artificial Sequence
  cationic component of the polymeric carrier
CMMMC

SEQ ID NO: 234 - protein, 5 aa, Artificial Sequence
  cationic component of the polymeric carrier
CAAAC

SEQ ID NO: 235 - protein, 6 aa, Artificial Sequence
  cationic component of the polymeric carrier
CMAMAC

SEQ ID NO: 236 - protein, 6 aa, Artificial Sequence
  cationic component of the polymeric carrier
CAMAMC

SEQ ID NO: 237 - protein, 6 aa, Artificial Sequence
  cationic component of the polymeric carrier
CMMMMC

SEQ ID NO: 238 - protein, 6 aa, Artificial Sequence
  cationic component of the polymeric carrier
CAAAAC

SEQ ID NO: 239 - protein, 2 aa, Artificial Sequence
  cationic component of the polymeric carrier
DH

SEQ ID NO: 240 - protein, 2 aa, Artificial Sequence
  cationic component of the polymeric carrier
HD

SEQ ID NO: 241 - protein, 2 aa, Artificial Sequence
  cationic component of the polymeric carrier
DD

SEQ ID NO: 242 - protein, 2 aa, Artificial Sequence
  cationic component of the polymeric carrier
HH

SEQ ID NO: 243 - protein, 3 aa, Artificial Sequence
  cationic component of the polymeric carrier
DHD

SEQ ID NO: 244 - protein, 3 aa, Artificial Sequence
  cationic component of the polymeric carrier
HDH

SEQ ID NO: 245 - protein, 3 aa, Artificial Sequence
  cationic component of the polymeric carrier
DDD

SEQ ID NO: 246 - protein, 3 aa, Artificial Sequence
  cationic component of the polymeric carrier
HHH

SEQ ID NO: 247 - protein, 4 aa, Artificial Sequence
  cationic component of the polymeric carrier
DHDH

SEQ ID NO: 248 - protein, 4 aa, Artificial Sequence
  cationic component of the polymeric carrier
HDHD

SEQ ID NO: 249 - protein, 4 aa, Artificial Sequence
  cationic component of the polymeric carrier
DDDD

SEQ ID NO: 250 - protein, 4 aa, Artificial Sequence
  cationic component of the polymeric carrier
HHHH

SEQ ID NO: 251 - protein, 3 aa, Artificial Sequence
  cationic component of the polymeric carrier
CHC

SEQ ID NO: 252 - protein, 3 aa, Artificial Sequence
  cationic component of the polymeric carrier
CDC

SEQ ID NO: 253 - protein, 4 aa, Artificial Sequence
  cationic component of the polymeric carrier
CDHC

SEQ ID NO: 254 - protein, 4 aa, Artificial Sequence
  cationic component of the polymeric carrier
CHDC

SEQ ID NO: 255 - protein, 4 aa, Artificial Sequence
  cationic component of the polymeric carrier
CDDC

SEQ ID NO: 256 - protein, 4 aa, Artificial Sequence
  cationic component of the polymeric carrier
CHHC

SEQ ID NO: 257 - protein, 5 aa, Artificial Sequence
  cationic component of the polymeric carrier
CDHDC

SEQ ID NO: 258 - protein, 5 aa, Artificial Sequence
  cationic component of the polymeric carrier
CHDHC

SEQ ID NO: 259 - protein, 5 aa, Artificial Sequence
  cationic component of the polymeric carrier
CDDDC

SEQ ID NO: 260 - protein, 5 aa, Artificial Sequence
  cationic component of the polymeric carrier
CHHHC

SEQ ID NO: 261 - protein, 6 aa, Artificial Sequence
  cationic component of the polymeric carrier
CDHDHC

SEQ ID NO: 262 - protein, 6 aa, Artificial Sequence
  cationic component of the polymeric carrier
CHDHDC

SEQ ID NO: 263 - protein, 6 aa, Artificial Sequence
  cationic component of the polymeric carrier
CDDDDC

SEQ ID NO: 264 - protein, 6 aa, Artificial Sequence
  cationic component of the polymeric carrier
CHHHHC

SEQ ID NO: 265 - protein, 4 aa, Artificial Sequence
  cationic component of the polymeric carrier
KDEL

SEQ ID NO: 266 - protein, 4 aa, Artificial Sequence
  cationic component of the polymeric carrier
DDEL

SEQ ID NO: 267 - protein, 4 aa, Artificial Sequence
  cationic component of the polymeric carrier
DEEL

SEQ ID NO: 268 - protein, 4 aa, Artificial Sequence
  cationic component of the polymeric carrier
QEDL

SEQ ID NO: 269 - protein, 4 aa, Artificial Sequence
  cationic component of the polymeric carrier
RDEL

SEQ ID NO: 270 - protein, 8 aa, Artificial Sequence
  cationic component of the polymeric carrier
GQNLSTSN

SEQ ID NO: 271 - protein, 7 aa, Artificial Sequence
  cationic component of the polymeric carrier
PKKKRKV

SEQ ID NO: 272 - protein, 7 aa, Artificial Sequence
  cationic component of the polymeric carrier
PQKKIKS

SEQ ID NO: 273 - protein, 5 aa, Artificial Sequence
  cationic component of the polymeric carrier
QPKKP

SEQ ID NO: 274 - protein, 4 aa, Artificial Sequence
  cationic component of the polymeric carrier
RKKR

SEQ ID NO: 275 - protein, 12 aa, Artificial Sequence
  cationic component of the polymeric carrier
RKKRRQRRRAHQ

SEQ ID NO: 276 - protein, 16 aa, Artificial Sequence
  cationic component of the polymeric carrier
RQARRNRRRRWRERQR

SEQ ID NO: 277 - protein, 19 aa, Artificial Sequence
  cationic component of the polymeric carrier
MPLTRRRPAASQALAPPTP

SEQ ID NO: 278 - protein, 8 aa, Artificial Sequence
  cationic component of the polymeric carrier
GAALTILV

SEQ ID NO: 279 - protein, 8 aa, Artificial Sequence
  cationic component of the polymeric carrier
GAALTLLG

SEQ ID NO: 280 - protein, 15 aa, Artificial Sequence
  cationic component of the polymeric carrier
MDDQRDLISNNEQLP

SEQ ID NO: 281 - protein, 32 aa, Artificial Sequence
  Synthetic polypeptide
  UNSURE (7)..(7): cationic component of the polymeric carrier
  misc_feature (8)..(8): Xaa can be any naturally occurring amino acid
  misc_feature (32)..(32): Xaa can be any naturally occurring amino acid
MLFNLRXXLNNAAFRHGHNFMVRNFRCGQPLX

SEQ ID NO: 282 - protein, 8 aa, Artificial Sequence
  cationic component of the polymeric carrier
GCVCSSNP

SEQ ID NO: 283 - protein, 8 aa, Artificial Sequence
  cationic component of the polymeric carrier
GQTVTTPL

SEQ ID NO: 284 - protein, 8 aa, Artificial Sequence
  cationic component of the polymeric carrier
GQELSQHE

SEQ ID NO: 285 - protein, 8 aa, Artificial Sequence
  cationic component of the polymeric carrier
GNSPSYNP

SEQ ID NO: 286 - protein, 8 aa, Artificial Sequence
  cationic component of the polymeric carrier
GVSGSKGQ

SEQ ID NO: 287 - protein, 8 aa, Artificial Sequence
  cationic component of the polymeric carrier
GQTITTPL

SEQ ID NO: 288 - protein, 8 aa, Artificial Sequence
  cationic component of the polymeric carrier
GQTLTTPL

SEQ ID NO: 289 - protein, 8 aa, Artificial Sequence
  cationic component of the polymeric carrier
GQIFSRSA

SEQ ID NO: 290 - protein, 8 aa, Artificial Sequence
  cationic component of the polymeric carrier
GQIHGLSP

SEQ ID NO: 291 - protein, 8 aa, Artificial Sequence
  cationic component of the polymeric carrier
GARASVLS

SEQ ID NO: 292 - protein, 8 aa, Artificial Sequence
  cationic component of the polymeric carrier
GCTLSAEE

SEQ ID NO: 293 - protein, 8 aa, Artificial Sequence
  cationic component of the polymeric carrier
GAQVSSQK

SEQ ID NO: 294 - protein, 8 aa, Artificial Sequence
  cationic component of the polymeric carrier
GAQLSRNT

SEQ ID NO: 295 - protein, 8 aa, Artificial Sequence
  cationic component of the polymeric carrier
GNAAAAKK

SEQ ID NO: 296 - protein, 8 aa, Artificial Sequence
  cationic component of the polymeric carrier
GNEASYPL

SEQ ID NO: 297 - protein, 8 aa, Artificial Sequence
  cationic component of the polymeric carrier
GSSKSKPK

SEQ ID NO: 298 - RNA, 20 nt, Artificial Sequence
  immune stimmulatory RNA
gguuuuuuuuuuuuuuuggg

SEQ ID NO: 299 - RNA, 20 nt, Artificial Sequence
  immune stimmulatory RNA
ggggguuuuuuuuuuggggg

SEQ ID NO: 300 - RNA, 40 nt, Artificial Sequence
  immune stimmulatory RNA
ggggguuuuuuuuuuuuuuuuuuuuuuuuuuuuuuggggg

SEQ ID NO: 301 - RNA, 39 nt, Artificial Sequence
  immune stimmulatory RNA
guguguguguguuuuuuuuuuuuuuuugugugugugugu

SEQ ID NO: 302 - RNA, 39 nt, Artificial Sequence
  immune stimmulatory RNA
gguugguugguuuuuuuuuuuuuuuuugguugguugguu

SEQ ID NO: 303 - RNA, 20 nt, Artificial Sequence
  immune stimmulatory RNA
ggggggggguuugggggggg

SEQ ID NO: 304 - RNA, 20 nt, Artificial Sequence
  immune stimmulatory RNA
gggggggguuuugggggggg

SEQ ID NO: 305 - RNA, 20 nt, Artificial Sequence
  immune stimmulatory RNA
ggggggguuuuuuggggggg

SEQ ID NO: 306 - RNA, 20 nt, Artificial Sequence
  immune stimmulatory RNA
ggggggguuuuuuugggggg

SEQ ID NO: 307 - RNA, 20 nt, Artificial Sequence
  immune stimmulatory RNA
gggggguuuuuuuugggggg

SEQ ID NO: 308 - RNA, 20 nt, Artificial Sequence
  immune stimmulatory RNA
gggggguuuuuuuuuggggg

SEQ ID NO: 309 - RNA, 20 nt, Artificial Sequence
  immune stimmulatory RNA
gggggguuuuuuuuuugggg

SEQ ID NO: 310 - RNA, 20 nt, Artificial Sequence
  immune stimmulatory RNA
ggggguuuuuuuuuuugggg

SEQ ID NO: 311 - RNA, 20 nt, Artificial Sequence
  immune stimmulatory RNA
ggggguuuuuuuuuuuuggg

SEQ ID NO: 312 - RNA, 20 nt, Artificial Sequence
  immune stimmulatory RNA
gggguuuuuuuuuuuuuggg

SEQ ID NO: 313 - RNA, 20 nt, Artificial Sequence
  immune stimmulatory RNA
gggguuuuuuuuuuuuuugg

SEQ ID NO: 314 - RNA, 20 nt, Artificial Sequence
  immune stimmulatory RNA
gguuuuuuuuuuuuuuuugg

SEQ ID NO: 315 - RNA, 20 nt, Artificial Sequence
  immune stimmulatory RNA
guuuuuuuuuuuuuuuuuug

SEQ ID NO: 316 - RNA, 22 nt, Artificial Sequence
  immune stimmulatory RNA
gggggggggguuuggggggggg

SEQ ID NO: 317 - RNA, 22 nt, Artificial Sequence
  immune stimmulatory RNA
ggggggggguuuuggggggggg

SEQ ID NO: 318 - RNA, 22 nt, Artificial Sequence
  immune stimmulatory RNA
gggggggguuuuuugggggggg

SEQ ID NO: 319 - RNA, 22 nt, Artificial Sequence
  immune stimmulatory RNA
gggggggguuuuuuuggggggg

SEQ ID NO: 320 - RNA, 22 nt, Artificial Sequence
  immune stimmulatory RNA
ggggggguuuuuuuuggggggg

SEQ ID NO: 321 - RNA, 22 nt, Artificial Sequence
  immune stimmulatory RNA
ggggggguuuuuuuuugggggg

SEQ ID NO: 322 - RNA, 22 nt, Artificial Sequence
  immune stimmulatory RNA
ggggggguuuuuuuuuuggggg

SEQ ID NO: 323 - RNA, 22 nt, Artificial Sequence
  immune stimmulatory RNA
gggggguuuuuuuuuuuggggg

SEQ ID NO: 324 - RNA, 22 nt, Artificial Sequence
  immune stimmulatory RNA
gggggguuuuuuuuuuuugggg

SEQ ID NO: 325 - RNA, 22 nt, Artificial Sequence
  immune stimmulatory RNA
ggggguuuuuuuuuuuuugggg

SEQ ID NO: 326 - RNA, 22 nt, Artificial Sequence
  immune stimmulatory RNA
ggggguuuuuuuuuuuuuuggg

SEQ ID NO: 327 - RNA, 22 nt, Artificial Sequence
  immune stimmulatory RNA
ggguuuuuuuuuuuuuuuuggg

SEQ ID NO: 328 - RNA, 22 nt, Artificial Sequence
  immune stimmulatory RNA
gguuuuuuuuuuuuuuuuuugg

SEQ ID NO: 329 - RNA, 24 nt, Artificial Sequence
  immune stimmulatory RNA
ggggggggggguuugggggggggg

SEQ ID NO: 330 - RNA, 24 nt, Artificial Sequence
  immune stimmulatory RNA
gggggggggguuuugggggggggg

SEQ ID NO: 331 - RNA, 24 nt, Artificial Sequence
  immune stimmulatory RNA
ggggggggguuuuuuggggggggg

SEQ ID NO: 332 - RNA, 24 nt, Artificial Sequence
  immune stimmulatory RNA
ggggggggguuuuuuugggggggg

SEQ ID NO: 333 - RNA, 24 nt, Artificial Sequence
  immune stimmulatory RNA
gggggggguuuuuuuugggggggg

SEQ ID NO: 334 - RNA, 24 nt, Artificial Sequence
  immune stimmulatory RNA
gggggggguuuuuuuuuggggggg

SEQ ID NO: 335 - RNA, 24 nt, Artificial Sequence
  immune stimmulatory RNA
gggggggguuuuuuuuuugggggg

SEQ ID NO: 336 - RNA, 24 nt, Artificial Sequence
  immune stimmulatory RNA
ggggggguuuuuuuuuuugggggg

SEQ ID NO: 337 - RNA, 24 nt, Artificial Sequence
  immune stimmulatory RNA
ggggggguuuuuuuuuuuuggggg

SEQ ID NO: 338 - RNA, 24 nt, Artificial Sequence
  immune stimmulatory RNA
gggggguuuuuuuuuuuuuggggg

SEQ ID NO: 339 - RNA, 24 nt, Artificial Sequence
  immune stimmulatory RNA
gggggguuuuuuuuuuuuuugggg

SEQ ID NO: 340 - RNA, 24 nt, Artificial Sequence
  immune stimmulatory RNA
gggguuuuuuuuuuuuuuuugggg

SEQ ID NO: 341 - RNA, 24 nt, Artificial Sequence
  immune stimmulatory RNA
ggguuuuuuuuuuuuuuuuuuggg

SEQ ID NO: 342 - RNA, 32 nt, Artificial Sequence
  immune stimmulatory RNA
guuuuuuuuuuuuuuuuuuuuuuuuuuuuuug

SEQ ID NO: 343 - RNA, 34 nt, Artificial Sequence
  immune stimmulatory RNA
gguuuuuuuuuuuuuuuuuuuuuuuuuuuuuugg

SEQ ID NO: 344 - RNA, 36 nt, Artificial Sequence
  immune stimmulatory RNA
ggguuuuuuuuuuuuuuuuuuuuuuuuuuuuuuggg

SEQ ID NO: 345 - RNA, 37 nt, Artificial Sequence
  immune stimmulatory RNA
gggguuuuuuuuuuuuuuuuuuuuuuuuuuuuuuggg

SEQ ID NO: 346 - RNA, 39 nt, Artificial Sequence
  immune stimmulatory RNA
ggggguuuuuuuuuuuuuuuuuuuuuuuuuuuuuugggg

SEQ ID NO: 347 - RNA, 41 nt, Artificial Sequence
  immune stimmulatory RNA
gggggguuuuuuuuuuuuuuuuuuuuuuuuuuuuuuggggg

SEQ ID NO: 348 - RNA, 43 nt, Artificial Sequence
  immune stimmulatory RNA
ggggggguuuuuuuuuuuuuuuuuuuuuuuuuuuuuugggggg

SEQ ID NO: 349 - RNA, 45 nt, Artificial Sequence
  immune stimmulatory RNA
gggggggguuuuuuuuuuuuuuuuuuuuuuuuuuuuuuggggggg

SEQ ID NO: 350 - RNA, 47 nt, Artificial Sequence
  immune stimmulatory RNA
ggggggggguuuuuuuuuuuuuuuuuuuuuuuuuuuuuugggggggg

SEQ ID NO: 351 - RNA, 7 nt, Artificial Sequence
  immune stimmulatory RNA
gguuugg

SEQ ID NO: 352 - RNA, 8 nt, Artificial Sequence
  immune stimmulatory RNA
gguuuugg

SEQ ID NO: 353 - RNA, 9 nt, Artificial Sequence
  immune stimmulatory RNA
gguuuuugg

SEQ ID NO: 354 - RNA, 10 nt, Artificial Sequence
  immune stimmulatory RNA
gguuuuuugg

SEQ ID NO: 355 - RNA, 11 nt, Artificial Sequence
  immune stimmulatory RNA
gguuuuuuugg

SEQ ID NO: 356 - RNA, 12 nt, Artificial Sequence
  immune stimmulatory RNA
gguuuuuuuugg

SEQ ID NO: 357 - RNA, 13 nt, Artificial Sequence
  immune stimmulatory RNA
gguuuuuuuuugg

SEQ ID NO: 358 - RNA, 14 nt, Artificial Sequence
  immune stimmulatory RNA
gguuuuuuuuuugg

SEQ ID NO: 359 - RNA, 15 nt, Artificial Sequence
  immune stimmulatory RNA
gguuuuuuuuuuugg

SEQ ID NO: 360 - RNA, 16 nt, Artificial Sequence
  immune stimmulatory RNA
gguuuuuuuuuuuugg

SEQ ID NO: 361 - RNA, 17 nt, Artificial Sequence
  immune stimmulatory RNA
gguuuuuuuuuuuuugg

SEQ ID NO: 362 - RNA, 18 nt, Artificial Sequence
  immune stimmulatory RNA
gguuuuuuuuuuuuuugg

SEQ ID NO: 363 - RNA, 19 nt, Artificial Sequence
  immune stimmulatory RNA
gguuuuuuuuuuuuuuugg

SEQ ID NO: 364 - RNA, 9 nt, Artificial Sequence
  immune stimmulatory RNA
ggguuuggg

SEQ ID NO: 365 - RNA, 10 nt, Artificial Sequence
  immune stimmulatory RNA
ggguuuuggg

SEQ ID NO: 366 - RNA, 11 nt, Artificial Sequence
  immune stimmulatory RNA
ggguuuuuggg

SEQ ID NO: 367 - RNA, 12 nt, Artificial Sequence
  immune stimmulatory RNA
ggguuuuuuggg

SEQ ID NO: 368 - RNA, 13 nt, Artificial Sequence
  immune stimmulatory RNA
ggguuuuuuuggg

SEQ ID NO: 369 - RNA, 14 nt, Artificial Sequence
  immune stimmulatory RNA
ggguuuuuuuuggg

SEQ ID NO: 370 - RNA, 15 nt, Artificial Sequence
  immune stimmulatory RNA
ggguuuuuuuuuggg

SEQ ID NO: 371 - RNA, 16 nt, Artificial Sequence
  immune stimmulatory RNA
ggguuuuuuuuuuggg

SEQ ID NO: 372 - RNA, 17 nt, Artificial Sequence
  immune stimmulatory RNA
ggguuuuuuuuuuuggg

SEQ ID NO: 373 - RNA, 18 nt, Artificial Sequence
  immune stimmulatory RNA
ggguuuuuuuuuuuuggg

SEQ ID NO: 374 - RNA, 19 nt, Artificial Sequence
  immune stimmulatory RNA
ggguuuuuuuuuuuuuggg

SEQ ID NO: 375 - RNA, 57 nt, Artificial Sequence
  immune stimmulatory RNA
ggguuuuuuuuuuuuuuuggguuuuuuuuuuuuuuuggguuuuuuuuuuuuuuuggg

SEQ ID NO: 376 - RNA, 42 nt, Artificial Sequence
  immune stimmulatory RNA
ggguuuuuuuuuuuuuuugggggguuuuuuuuuuuuuuuggg

SEQ ID NO: 377 - RNA, 51 nt, Artificial Sequence
  immune stimmulatory RNA
ggguuuggguuuggguuuggguuuggguuuggguuuggguuuggguuuggg

SEQ ID NO: 378 - RNA, 20 nt, Artificial Sequence
  immune stimmulatory RNA
gguuuuuuuuuuuuuuuggg

SEQ ID NO: 379 - RNA, 57 nt, Artificial Sequence
  immune stimmulatory RNA
cccuuuuuuuuuuuuuuucccuuuuuuuuuuuuuuucccuuuuuuuuuuuuuuuccc

SEQ ID NO: 380 - RNA, 51 nt, Artificial Sequence
  immune stimmulatory RNA
cccuuucccuuucccuuucccuuucccuuucccuuucccuuucccuuuccc

SEQ ID NO: 381 - RNA, 42 nt, Artificial Sequence
  immune stimmulatory RNA
cccuuuuuuuuuuuuuuuccccccuuuuuuuuuuuuuuuccc

SEQ ID NO: 382 - RNA, 60 nt, Artificial Sequence
  immune stimmulatory RNA
uagcgaagcucuuggaccuagguuuuuuuuuuuuuuugggugcguuccuagaaguacacg

SEQ ID NO: 383 - RNA, 120 nt, Artificial Sequence
  immune stimmulatory RNA
uagcgaagcucuuggaccuagguuuuuuuuuuuuuuugggugcguuccuagaaguacacgaucgcuucgagaaccuggauccaaaaaaaaaaaaaaacccacgcaaggaucuucaugugc

SEQ ID NO: 384 - RNA, 229 nt, Artificial Sequence
  immune stimmulatory RNA
gggagaaagcucaagcuuggagcaaugcccgcacauugaggaaaccgaguugcauaucucagaguauuggcccccguguagguuauucuugacagacaguggagcuuauucacucccaggauccgagucgcauacuacgguacuggugacagaccuaggucgucaguugaccaguccgccacuagacgugaguccgucaaagcaguuagauguuacacucuauuagauc

SEQ ID NO: 385 - RNA, 547 nt, Artificial Sequence
  immune stimmulatory RNA
gggagaaagcucaagcuuggagcaaugcccgcacauugaggaaaccgaguugcauaucucagaguauuggcccccguguagguuauucuugacagacaguggagcuuauucacucccaggauccgagucgcauacuacgguacuggugacagaccuaggucgucaguugaccaguccgccacuagacgugaguccgucaaagcaguuagauguuacacucuauuagaucucggauuacagcuggaaggagcaggaguaguguucuugcucuaaguaccgagugugcccaauacccgaucagcuuauuaacgaacggcuccuccucuuagacugcagcguaagugcggaaucuggggaucaaauuacugacugccuggauuacccucggacauauaaccuuguagcacgcuguugcuguauaggugaccaacgcccacucgaguagaccagcucucuuaguccggacaaugauaggaggcgcggucaaucuacuucuggcuaguuaagaauaggcugcaccgaccucuauaaguagcguguccucuag

SEQ ID NO: 386 - RNA, 1083 nt, Artificial Sequence
  immune stimmulatory RNA
gggagaaagcucaagcuuggagcaaugcccgcacauugaggaaaccgaguugcauaucucagaguauuggcccccguguagguuauucuugacagacaguggagcuuauucacucccaggauccgagucgcauacuacgguacuggugacagaccuaggucgucaguugaccaguccgccacuagacgugaguccgucaaagcaguuagauguuacacucuauuagaucucggauuacagcuggaaggagcaggaguaguguucuugcucuaaguaccgagugugcccaauacccgaucagcuuauuaacgaacggcuccuccucuuagacugcagcguaagugcggaaucuggggaucaaauuacugacugccuggauuacccucggacauauaaccuuguagcacgcuguugcuguauaggugaccaacgcccacucgaguagaccagcucucuuaguccggacaaugauaggaggcgcggucaaucuacuucuggcuaguuaagaauaggcugcaccgaccucuauaaguagcguguccucuagagcuacgcagguucgcaauaaaagcguugauuagugugcauagaacagaccucuuauucggugaaacgccagaaugcuaaauuccaauaacucuucccaaaacgcguacggccgaagacgcgcgcuuaucuuguguacguucucgcacauggaagaaucagcgggcauggugguagggcaauaggggagcuggguagcagcgaaaaagggccccugcgcacguagcuucgcuguucgucugaaacaacccggcauccguuguagcgaucccguuaucaguguuauucuugugcgcacuaagauucaugguguagucgacaauaacagcgucuuggcagauucuggucacgugcccuaugcccgggcuugugccucucaggugcacagcgauacuuaaagccuucaagguacucgacguggguaccgauucgugacacuuccuaagauuauuccacuguguuagccccgcaccgccgaccuaaacugguccaauguauacgcauucgcugagcggaucgauaauaaaagcuugaauu

SEQ ID NO: 387 - RNA, 229 nt, Artificial Sequence
  immune stimmulatory RNA
gggagaaagcucaagcuuauccaaguaggcuggucaccuguacaacguagccgguauuuuuuuuuuuuuuuuuuuuuugaccgucucaagguccaaguuagucugccuauaaaggugcggauccacagcugaugaaagacuugugcgguacgguuaaucuccccuuuuuuuuuuuuuuuuuuuuuaguaaaugcgucuacugaauccagcgaugaugcuggcccagauc

SEQ ID NO: 388 - RNA, 546 nt, Artificial Sequence
  immune stimmulatory RNA
gggagaaagcucaagcuuauccaaguaggcuggucaccuguacaacguagccgguauuuuuuuuuuuuuuuuuuuuuugaccgucucaagguccaaguuagucugccuauaaaggugcggauccacagcugaugaaagacuugugcgguacgguuaaucuccccuuuuuuuuuuuuuuuuuuuuuaguaaaugcgucuacugaauccagcgaugaugcuggcccagaucuucgaccacaagugcauauaguagucaucgagggucgccuuuuuuuuuuuuuuuuuuuuuuuggcccaguucugagacuucgcuagagacuacaguuacagcugcaguaguaaccacugcggcuauugcaggaaaucccguucagguuuuuuuuuuuuuuuuuuuuuccgcucacuaugauuaagaaccagguggagugucacugcucucgaggucucacgagagcgcucgauacaguccuuggaagaaucuuuuuuuuuuuuuuuuuuuuuugugcgacgaucacagagaacuucuauucaugcaggucugcucua

SEQ ID NO: 389 - RNA, 856 nt, Artificial Sequence
  R3971 coding for the mouse Pdcd1(1-157,C83S) protein
ggggcgcugccuacggagguggcagccaucuccuucucggcaucaagcuuaccaugugggugcgccagguccccuggagcuucaccugggccgugcugcagcucuccuggcagagcggcuggcugcuggaggugccgaacgggcccuggcggucccucaccuucuaccccgccuggcugacggucagcgagggcgcgaacgccaccuucaccugcucccugagcaacugguccgaggaccucaugcugaacuggaaccgccugagccccuccaaccagaccgagaagcaggccgccuucagcaacgggcucucccagccggugcaggacgcccgguuccagaucauccagcugcccaaccgccacgacuuccacaugaacauccuggacacgcggcgcaacgacagcggcaucuaccucugcggggcgaucucccugcaccccaaggccaagaucgaggagagccccggcgccgagcugguggucaccgagcggauccucgagaccuccacccgcuacccgagcugaggacuagugcaucacauuuaaaagcaucucagccuaccaugagaauaagagaaagaaaaugaagaucaauagcuuauucaucucuuuuucuuuuucguugguguaaagccaacacccugucuaaaaaacauaaauuucuuuaaucauuuugccucuuuucucugugcuucaauuaauaaaaaauggaaagaaccuagaucuaaaaaaaaaaaaaaaaaaaaaaaaaaaaaaaaaaaaaaaaaaaaaaaaaaaaaaaaaaaaaaaaugcaucccccccccccccccccccccccccccccccaaaggcucuuuucagagccaccagaauu

SEQ ID NO: 390 - protein, 862 aa, Artificial Sequence
  AXIN1__Homo sapiens__O15169
MNIQEQGFPLDLGASFTEDAPRPPVPGEEGELVSTDPRPASYSFCSGKGVGIKGETSTATPRRSDLDLGYEPEGSASPTPPYLKWAESLHSLLDDQDGISLFRTFLKQEGCADLLDFWFACTGFRKLEPCDSNEEKRLKLARAIYRKYILDNNGIVSRQTKPATKSFIKGCIMKQLIDPAMFDQAQTEIQATMEENTYPSFLKSDIYLEYTRTGSESPKVCSDQSSGSGTGKGISGYLPTLNEDEEWKCDQDMDEDDGRDAAPPGRLPQKLLLETAAPRVSSSRRYSEGREFRYGSWREPVNPYYVNAGYALAPATSANDSEQQSLSSDADTLSLTDSSVDGIPPYRIRKQHRREMQESVQVNGRVPLPHIPRTYRVPKEVRVEPQKFAEELIHRLEAVQRTREAEEKLEERLKRVRMEEEGEDGDPSSGPPGPCHKLPPAPAWHHFPPRCVDMGCAGLRDAHEENPESILDEHVQRVLRTPGRQSPGPGHRSPDSGHVAKMPVALGGAASGHGKHVPKSGAKLDAAGLHHHRHVHHHVHHSTARPKEQVEAEATRRAQSSFAWGLEPHSHGARSRGYSESVGAAPNASDGLAHSGKVGVACKRNAKKAESGKSASTEVPGASEDAEKNQKIMQWIIEGEKEISRHRRTGHGSSGTRKPQPHENSRPLSLEHPWAGPQLRTSVQPSHLFIQDPTMPPHPAPNPLTQLEEARRRLEEEEKRASRAPSKQRYVQEVMRRGRACVRPACAPVLHVVPAVSDMELSETETRSQRKVGGGSAQPCDSIVVAYYFCGEPIPYRTLVRGRAVTLGQFKELLTKKGSYRYYFKKVSDEFDCGVVFEEVREDEAVLPVFEEKIIGKVEKVD

SEQ ID NO: 391 - protein, 695 aa, Artificial Sequence
  DVL1__Homo sapiens__O14640
MAETKIIYHMDEEETPYLVKLPVAPERVTLADFKNVLSNRPVHAYKFFFKSMDQDFGVVKEEIFDDNAKLPCFNGRVVSWLVLAEGAHSDAGSQGTDSHTDLPPPLERTGGIGDSRPPSFHPNVASSRDGMDNETGTESMVSHRRERARRRNREEAARTNGHPRGDRRRDVGLPPDSASTALSSELESSSFVDSDEDGSTSRLSSSTEQSTSSRLIRKHKRRRRKQRLRQADRASSFSSITDSTMSLNIVTVTLNMERHHFLGISIVGQSNDRGDGGIYIGSIMKGGAVAADGRIEPGDMLLQVNDVNFENMSNDDAVRVLREIVSQTGPISLTVAKCWDPTPRSYFTVPRADPVRPIDPAAWLSHTAALTGALPRYGTSPCSSAVTRTSSSSLTSSVPGAPQLEEAPLTVKSDMSAVVRVMQLPDSGLEIRDRMWLKITIANAVIGADVVDWLYTHVEGFKERREARKYASSLLKHGFLRHTVNKITFSEQCYYVFGDLCSNLATLNLNSGSSGTSDQDTLAPLPHPAAPWPLGQGYPYQYPGPPPCFPPAYQDPGFSYGSGSTGSQQSEGSKSSGSTRSSRRAPGREKERRAAGAGGSGSESDHTAPSGVGSSWRERPAGQLSRGSSPRSQASATAPGLPPPHPTTKAYTVVGGPPGGPPVRELAAVPPELTGSRQSFQKAMGNPCEFFVDIM

SEQ ID NO: 392 - protein, 619 aa, Artificial Sequence
  TF7L2__Homo sapiens__Q9NQB0
MPQLNGGGGDDLGANDELISFKDEGEQEEKSSENSSAERDLADVKSSLVNESETNQNSSSDSEAERRPPPRSESFRDKSRESLEEAAKRQDGGLFKGPPYPGYPFIMIPDLTSPYLPNGSLSPTARTLHFQSGSTHYSAYKTIEHQIAVQYLQMKWPLLDVQAGSLQSRQALKDARSPSPAHIVSNKVPVVQHPHHVHPLTPLITYSNEHFTPGNPPPHLPADVDPKTGIPRPPHPPDISPYYPLSPGTVGQIPHPLGWLVPQQGQPVYPITTGGFRHPYPTALTVNASMSRFPPHMVPPHHTLHTTGIPHPAIVTPTVKQESSQSDVGSLHSSKHQDSKKEEEKKKPHIKKPLNAFMLYMKEMRAKVVAECTLKESAAINQILGRRWHALSREEQAKYYELARKERQLHMQLYPGWSARDNYGKKKKRKRDKQPGETNEHSECFLNPCLSLPPITDLSAPKKCRARFGLDQQNNWCGPCRRKKKCVRYIQGEGSCLSPPSSDGSLLDSPPPSPNLLGSPPRDAKSQTEQTQPLSLSLKPDPLAHLSMMPPPPALLLAEATHKASALCPNGALDLPPAALQPAAPSSSIAQPSTSSLHSHSSLAGTQPQPLSLVTKSLE

SEQ ID NO: 393 - protein, 420 aa, Artificial Sequence
  GSK3B__Homo sapiens__P49841
MSGRPRTTSFAESCKPVQQPSAFGSMKVSRDKDGSKVTTVVATPGQGPDRPQEVSYTDTKVIGNGSFGVVYQAKLCDSGELVAIKKVLQDKRFKNRELQIMRKLDHCNIVRLRYFFYSSGEKKDEVYLNLVLDYVPETVYRVARHYSRAKQTLPVIYVKLYMYQLFRSLAYIHSFGICHRDIKPQNLLLDPDTAVLKLCDFGSAKQLVRGEPNVSYICSRYYRAPELIFGATDYTSSIDVWSAGCVLAELLLGQPIFPGDSGVDQLVEIIKVLGTPTREQIREMNPNYTEFKFPQIKAHPWTKVFRPRTPPEAIALCSRLLEYTPTARLTPLEACAHSFFDELRDPNVKLPNGRDTPALFNFTTQELSSNPPLATILIPPHARIQAAASTPTNATAASDANTGDRGQTNNAASASASNST

SEQ ID NO: 394 - RNA, 547 nt, Artificial Sequence; identical to SEQ ID NO: 5
  immune stimmulatory RNA R2025

SEQ ID NO: 395 - RNA, 1083 nt, Artificial Sequence
  immune stimmulatory RNA
gggagaaagcucaagcuuauccaaguaggcuggucaccuguacaacguagccgguauuuuuuuuuuuuuuuuuuuuuugaccgucucaagguccaaguuagucugccuauaaaggugcggauccacagcugaugaaagacuugugcgguacgguuaaucuccccuuuuuuuuuuuuuuuuuuuuuaguaaaugcgucuacugaauccagcgaugaugcuggcccagaucuucgaccacaagugcauauaguagucaucgagggucgccuuuuuuuuuuuuuuuuuuuuuuuggcccaguucugagacuucgcuagagacuacaguuacagcugcaguaguaaccacugcggcuauugcaggaaaucccguucagguuuuuuuuuuuuuuuuuuuuuccgcucacuaugauuaagaaccagguggagugucacugcucucgaggucucacgagagcgcucgauacaguccuuggaagaaucuuuuuuuuuuuuuuuuuuuuuugugcgacgaucacagagaacuucuauucaugcaggucugcucuagaacgaacugaccugacgccugaacuuaugagcgugcguauuuuuuuuuuuuuuuuuuuuuuuccucccaacaaaugucgaucaauagcugggcuguuggagacgcgucagcaaaugccguggcuccauaggacguguagacuucuauuuuuuuuuuuuuuuuuuuuucccgggaccacaaauaauauucuugcuugguugggcgcaagggccccguaucaggucauaaacggguacauguugcacaggcuccuuuuuuuuuuuuuuuuuuuuuuucgcugaguuauuccggucucaaaagacggcagacgucagucgacaacacggucuaaagcagugcuacaaucugccguguucguguuuuuuuuuuuuuuuuuuuugugaaccuacacggcgugcacuguaguucgcaauucauaggguaccggcucagaguuaugccuugguugaaaacugcccagcauacuuuuuuuuuuuuuuuuuuuucauauucccaugcuaagcaagggaugccgcgagucauguuaagcuugaauu

SEQ ID NO: 396 - RNA, 59 nt, Artificial Sequence
  immune stimmulatory RNA
uagcgaagcucuuggaccuaccuuuuuuuuuuuuuucccugcguuccuagaaguacacg

SEQ ID NO: 397 - RNA, 120 nt, Artificial Sequence
  immune stimmulatory RNA
uagcgaagcucuuggaccuaccuuuuuuuuuuuuuuucccugcguuccuagaaguacacgaucgcuucgagaaccuggauggaaaaaaaaaaaaaaagggacgcaaggaucuucaugugc

SEQ ID NO: 398 - protein, 365 aa, Artificial Sequence
  1A01_HLA-A/m__Homo_sapiens__P30443
MAVMAPRTLLLLLSGALALTQTWAGSHSMRYFFTSVSRPGRGEPRFIAVGYVDDTQFVRFDSDAASQKMEPRAPWIEQEGPEYWDQETRNMKAHSQTDRANLGTLRGYYNQSEDGSHTIQIMYGCDVGPDGRFLRGYRQDAYDGKDYIALNEDLRSWTAADMAAQITKRKWEAVHAAEQRRVYLEGRCVDGLRRYLENGKETLQRTDPPKTHMTHHPISDHEATLRCWALGFYPAEITLTWQRDGEDQTQDTELVETRPAGDGTFQKWAAVVVPSGEEQRYTCHVQHEGLPKPLTLRWELSSQPTIPIVGIIAGLVLLGAVITGAVVAAVMWRRKSSDRKGGSYTQAASSDSAQGSDVSLTACKV

SEQ ID NO: 399 - RNA, 1098 nt, Artificial Sequence
  1A01_HLA-A/m__Homo_sapiens__AAA59652
auggccgucauggcgccccgaacccuccuccugcuacucucgggggcccuggcccugacccagaccugggcgggcucccacuccaugagguauuucuucacauccgugucccggcccggccgcggggagccccgcuucaucgccgugggcuacguggacgacacgcaguucgugcgguucgacagcgacgccgcgagccagaagauggagccgcgggcgccguggauagagcaggaggggccggaguauugggaccaggagacacggaauaugaaggcccacucacagacugaccgagcgaaccuggggacccugcgcggcuacuacaaccagagcgaggacgguucucacaccauccagauaauguauggcugcgacguggggccggacgggcgcuuccuccgcggguaccggcaggacgccuacgacggcaaggauuacaucgcccugaacgaggaccugcgcucuuggaccgcggcggacauggcagcucagaucaccaagcgcaagugggaggcgguccaugcggcggagcagcggagagucuaccuggagggccggugcguggacgggcuccgcagauaccuggagaacgggaaggagacgcugcagcgcacggacccccccaagacacauaugacccaccaccccaucucugaccaugaggccacccugaggugcugggcccugggcuucuacccugcggagaucacacugaccuggcagcgggauggggaggaccagacccaggacacggagcucguggagaccaggccugcaggggauggaaccuuccagaagugggcggcugugguggugccuucuggagaggagcagagauacaccugccaugugcagcaugagggucugcccaagccccucacccugagaugggagcugucuucccagcccaccauccccaucgugggcaucauugcuggccugguucuccuuggagcugugaucacuggagcuguggucgcugccgugauguggaggaggaagagcucagauagaaaaggagggaguuacacucaggcugcaagcagugacagugcccagggcucugaugugucucucacagcuuguaaaguguga

SEQ ID NO: 400 - RNA, 1098 nt, Artificial Sequence
  derived and/or modified sequence opt1 from 1A01_HLA-A/m__Homo_sapiens__AAA59652
auggccgugauggcgccccgcacccugcuccugcugcucagcggcgcccuggcccugacccagacgugggccgggucccacagcaugcgguacuucuucaccuccgucagccgcccgggccgcggggagccccgguucaucgccgugggcuacguggacgacacccaguucguccgguucgacuccgacgccgcgagccagaagauggagccccgcgcccccuggaucgagcaggaggggccggaguacugggaccaggagacccggaacaugaaggcccacucccagacggaccgcgccaaccucggcacccugcggggcuacuacaaccagagcgaggacgggucccacaccauccagaucauguacggcugcgacguggggcccgacggccgcuuccugcggggguaccgccaggacgcguacgacggcaaggacuacaucgcccucaacgaggaccugcggagcuggaccgccgccgacauggccgcgcagaucacgaagcgcaagugggaggccgugcacgccgccgagcagcggcgcgucuaccuggagggccggugcguggacgggcuccgccgguaccuggagaacggcaaggagacccugcagcgcaccgacccgcccaagacccacaugacgcaccaccccaucuccgaccacgaggccacccuccggugcugggcgcugggguucuaccccgccgagaucacccugaccuggcagcgcgacggcgaggaccagacgcaggacaccgagcucguggagacccgccccgccggcgacgggaccuuccagaagugggccgccgucguggugcccagcggcgaggagcagcgguacacgugccacguccagcacgaggggcugccgaagccccugacccuccgcugggagcuguccagccagcccaccauccccaucgugggcaucaucgcggggcuggugcuccugggcgccgucaucaccggcgccgugguggccgccgucauguggcggcgcaaguccagcgaccggaagggcggguccuacacgcaggcggccagcuccgacagcgcccaggggagcgacgugucccugaccgccugcaagguguga

SEQ ID NO: 401 - RNA, 1098 nt, Artificial Sequence
  derived and/or modified sequence opt2 from 1A01_HLA-A/m__Homo_sapiens__AAA59652
auggccgucauggccccccgcacccuccuccuccuccucuccggcgcccucgcccucacccagaccugggccggcucccacuccaugcgcuacuucuucaccuccgucucccgccccggccgcggcgagccccgcuucaucgccgucggcuacgucgacgacacccaguucguccgcuucgacuccgacgccgccucccagaagauggagccccgcgcccccuggaucgagcaggagggccccgaguacugggaccaggagacccgcaacaugaaggcccacucccagaccgaccgcgccaaccucggcacccuccgcggcuacuacaaccaguccgaggacggcucccacaccauccagaucauguacggcugcgacgucggccccgacggccgcuuccuccgcggcuaccgccaggacgccuacgacggcaaggacuacaucgcccucaacgaggaccuccgcuccuggaccgccgccgacauggccgcccagaucaccaagcgcaagugggaggccguccacgccgccgagcagcgccgcgucuaccucgagggccgcugcgucgacggccuccgccgcuaccucgagaacggcaaggagacccuccagcgcaccgacccccccaagacccacaugacccaccaccccaucuccgaccacgaggccacccuccgcugcugggcccucggcuucuaccccgccgagaucacccucaccuggcagcgcgacggcgaggaccagacccaggacaccgagcucgucgagacccgccccgccggcgacggcaccuuccagaagugggccgccgucgucguccccuccggcgaggagcagcgcuacaccugccacguccagcacgagggccuccccaagccccucacccuccgcugggagcucuccucccagcccaccauccccaucgucggcaucaucgccggccucguccuccucggcgccgucaucaccggcgccgucgucgccgccgucauguggcgccgcaaguccuccgaccgcaagggcggcuccuacacccaggccgccuccuccgacuccgcccagggcuccgacgucucccucaccgccugcaaggucuga

SEQ ID NO: 402 - RNA, 1098 nt, Artificial Sequence
  derived and/or modified sequence opt3 from 1A01_HLA-A/m__Homo_sapiens__AAA59652
auggccgugauggcucccagaacccugcuccuucuguugagcggcgcauuagcccugacacagacuugggcggggucccacucuaugagguacuucuuuacgucagucagucggccuggacgcggugagccacgauucaucgcuguuggcuauguggacgauacccaauuuguacguuucgacagcgaugccgcaucccagaagauggaaccgagagcccccuggauugagcaggaagggccugaguacugggaccaggaaacaaggaacaugaaagcucauucucaaacugaucgggcaaaucuaggaacccuccgcggcuauuacaaccagucggaggacgguucacacacaauacagaucauguaugggugcgaugugggaccagacggcagauuucugaggggcuaccggcaggaugccuaugacgggaaggauuacauugcucuuaaugaggaccugcgcagcuggaccgccgcggauauggcagcccaaaucacuaaacgaaagugggaagcuguccaugccgcagagcagagaaggguguacuuggaaggacgguguguugacggucuccgucgcuaucuggagaacggcaaagagacacugcagagaaccgaucccccuaagacgcacaugacucaucacccaauuagugaccacgaagcuacccucaggugcugggccuuaggguucuaccccgcggagaucacacugacuuggcagcgggacggagaagaucaaacccaggacacagagcuuguggaaacccgaccugccggcgaugguacguuucagaagugggcagcugucgugguaccauccggggaggagcaacgcuauacuugucauguucagcacgaaggauugccgaaaccccugacacuaagaugggagcucucuagccagccuaccauaccaaucgugggcauuaucgccggccugguccuucugggggcugugauuacuggagccguggucgcagccguuauguggaggcggaaguccucagaccgcaaagguggcaguuacacacaggcugcgagcucugauuccgcacaagggucagacgugagcuugaccgccugcaagguauga

SEQ ID NO: 403 - RNA, 1098 nt, Artificial Sequence
  derived and/or modified sequence opt4 from 1A01_HLA-A/m__Homo_sapiens__AAA59652
auggccgugauggcccccagaacccugcugcugcugcugagcggcgcccuggcccugacccagaccugggccggcagccacagcaugagauacuucuucaccagcgugagcagacccggcagaggcgagcccagauucaucgccgugggcuacguggacgacacccaguucgugagauucgacagcgacgccgccagccagaagauggagcccagagcccccuggaucgagcaggagggccccgaguacugggaccaggagaccagaaacaugaaggcccacagccagaccgacagagccaaccugggcacccugagaggcuacuacaaccagagcgaggacggcagccacaccauccagaucauguacggcugcgacgugggccccgacggcagauuccugagaggcuacagacaggacgccuacgacggcaaggacuacaucgcccugaacgaggaccugagaagcuggaccgccgccgacauggccgcccagaucaccaagagaaagugggaggccgugcacgccgccgagcagagaagaguguaccuggagggcagaugcguggacggccugagaagauaccuggagaacggcaaggagacccugcagagaaccgacccccccaagacccacaugacccaccaccccaucagcgaccacgaggccacccugagaugcugggcccugggcuucuaccccgccgagaucacccugaccuggcagagagacggcgaggaccagacccaggacaccgagcugguggagaccagacccgccggcgacggcaccuuccagaagugggccgccgugguggugcccagcggcgaggagcagagauacaccugccacgugcagcacgagggccugcccaagccccugacccugagaugggagcugagcagccagcccaccauccccaucgugggcaucaucgccggccuggugcugcugggcgccgugaucaccggcgccgugguggccgccgugauguggagaagaaagagcagcgacagaaagggcggcagcuacacccaggccgccagcagcgacagcgcccagggcagcgacgugagccugaccgccugcaagguguga

SEQ ID NO: 404 - RNA, 1098 nt, Artificial Sequence
  derived and/or modified sequence opt5 from 1A01_HLA-A/m__Homo_sapiens__AAA59652
auggccgugauggcucccagaacccugcuccugcuucugagcggcgcccucgcgcugacacagacgugggcugggucccacucuaugcgguacuucuuuaccagcgucucccgcccuggaagaggcgagccgcgguucaucgccguuggguauguggacgauacacaauuugugcgcuucgacucugaugccgcuagccagaagauggaacccagagccccuuggauugagcaggaaggacccgaguacugggaccaggaaacccggaacaugaaagcucauucccaaacagaucgcgccaaucuuggcacccugagaggguauuacaaccagucugaggacggaagccacacaauccagauuauguauggcugcgaugucggcccugacgggcgguuucuccgcggauacagacaggaugcguaugacggcaaggauuacaucgcccugaaugaggaccugcgguccuggaccgcugccgauauggcugcccaaauuacgaaacgcaagugggaagcggugcaugccgcugagcagagacggguuuaccucgaagggcgcuguguggacggacugagacgguaucuugagaacggcaaagagacccugcagagaacagaucccccuaagacccacaugacacaucacccgaucagcgaccacgaagccacccuccgcugcugggcucugggguucuaccccgccgagaucacgcuuacauggcagcgggacggagaagaucaaacccaggacacagagcuggucgaaaccagaccugccggcgauggcaccuuucagaagugggcugcggugguugugcccucuggggaggagcaacgcuauacaugucauguccagcacgaaggacucccuaaaccccugacgcugcggugggagcucuccagccagccgaccauuccuaucgugggcauuaucgccgggcuggugcuucugggagcugucauuacaggcgccguuguggccgcugugauguggagacgcaagucuuccgaccggaaagggggaagcuacacccaggccgcgucuuccgauagcgcucaaggcuccgacgucucucucacagccugcaagguguga

SEQ ID NO: 405 - protein, 365 aa, Artificial Sequence [sequence omitted]

SEQ ID NO: 406 - RNA, 1098 nt, Artificial Sequence
  1A02__Homo_sapiens__AAA59606
auggccgucauggcgccccgaacccucguccugcuacucucgggggcucuggcccugacccagaccugggcgggcucucacuccaugagguauuucuucacauccgugucccggcccggccgcggggagccccgcuucaucgcagugggcuacguggacgacacgcaguucgugcgguucgacagcgacgccgcgagccagaggauggagccgcgggcgccguggauagagcaggaggguccggaguauugggacggggagacacggaaagugaaggcccacucacagacucaccgaguggaccuggggacccugcgcggcuacuacaaccagagcgaggccgguucucacaccguccagaggauguauggcugcgacguggggucggacuggcgcuuccuccgcggguaccaccaguacgccuacgacggcaaggauuacaucgcccugaaagaggaccugcgcucuuggaccgcggcggacauggcagcucagaccaccaagcacaagugggaggcggcccauguggcggagcaguugagagccuaccuggagggcacgugcguggaguggcuccgcagauaccuggagaacgggaaggagacgcugcagcgcacggacgcccccaaaacgcauaugacucaccacgcugucucugaccaugaagccacccugaggugcugggcccugagcuucuacccugcggagaucacacugaccuggcagcgggauggggaggaccagacccaggacacggagcucguggagaccaggccugcaggggauggaaccuuccagaagugggcggcugugguggugccuucuggacaggagcagagauacaccugccaugugcagcaugaggguuugcccaagccccucacccugagaugggagccgucuucccagcccaccauccccaucgugggcaucauugcuggccugguucucuuuggagcugugaucacuggagcuguggucgcugcugugauguggaggaggaagagcucagauagaaaaggagggagcuacucucaggcugcaagcagugacagugcccagggcucugaugugucucucacagcuuguaaaguguga

SEQ ID NO: 407 - RNA, 1098 nt, Artificial Sequence
  derived and/or modified sequence opt1 from 1A02__Homo_sapiens__AAA59606
auggccgugauggcgccccgcacccugguccuccugcugagcggcgcccucgcccugacccagacgugggccgggucccacagcaugcgguacuucuucaccuccgugagccgcccgggccggggcgagccccgcuucaucgccgugggcuacgucgacgacacccaguucgugcgguucgacuccgacgccgcgagccagcgcauggagccccgggcccccuggaucgagcaggaggggccggaguacugggacggcgagacccgcaaggugaaggcccacucccagacgcaccgggucgaccugggcacccuccgcggguacuacaaccagagcgaggccggcucccacaccgugcagcggauguacgggugcgacgugggcagcgacuggcgcuuccugcggggguaccaccaguacgcguacgacggcaaggacuacaucgcccugaaggaggaccuccgcuccuggaccgccgccgacauggccgcgcagacgaccaagcacaagugggaggccgcccacgucgccgagcagcugcgggccuaccuggaggggaccugcguggaguggcuccgccgguaccuggagaacgggaaggagacccugcagcgcacggacgcgcccaagacccacaugacccaccacgccgugagcgaccacgaggccacccuccggugcugggcccuguccuucuaccccgccgagaucacgcugaccuggcagcgcgacggcgaggaccagacccaggacaccgagcucgucgagacgcggcccgcgggggacggcaccuuccagaagugggccgccgugguggucccgagcggccaggagcagcgcuacacgugccacgugcagcacgaggggcugcccaagccccugacccuccgcugggagcccuccagccagccgaccauccccaucgugggcaucaucgccgggcugguccuguucggcgccgugaucaccggggcgguggucgccgccgugauguggcggcgcaaguccagcgaccggaagggcggcuccuacagccaggccgcgagcuccgacagcgcccagggguccgacgugagccucaccgccugcaaggucuga

SEQ ID NO: 408 - RNA, 1098 nt, Artificial Sequence
  derived and/or modified sequence opt2 from 1A02__Homo_sapiens__AAA59606
auggccgucauggccccccgcacccucguccuccuccucuccggcgcccucgcccucacccagaccugggccggcucccacuccaugcgcuacuucuucaccuccgucucccgccccggccgcggcgagccccgcuucaucgccgucggcuacgucgacgacacccaguucguccgcuucgacuccgacgccgccucccagcgcauggagccccgcgcccccuggaucgagcaggagggccccgaguacugggacggcgagacccgcaaggucaaggcccacucccagacccaccgcgucgaccucggcacccuccgcggcuacuacaaccaguccgaggccggcucccacaccguccagcgcauguacggcugcgacgucggcuccgacuggcgcuuccuccgcggcuaccaccaguacgccuacgacggcaaggacuacaucgcccucaaggaggaccuccgcuccuggaccgccgccgacauggccgcccagaccaccaagcacaagugggaggccgcccacgucgccgagcagcuccgcgccuaccucgagggcaccugcgucgaguggcuccgccgcuaccucgagaacggcaaggagacccuccagcgcaccgacgcccccaagacccacaugacccaccacgccgucuccgaccacgaggccacccuccgcugcugggcccucuccuucuaccccgccgagaucacccucaccuggcagcgcgacggcgaggaccagacccaggacaccgagcucgucgagacccgccccgccggcgacggcaccuuccagaagugggccgccgucgucguccccuccggccaggagcagcgcuacaccugccacguccagcacgagggccuccccaagccccucacccuccgcugggagcccuccucccagcccaccauccccaucgucggcaucaucgccggccucguccucuucggcgccgucaucaccggcgccgucgucgccgccgucauguggcgccgcaaguccuccgaccgcaagggcggcuccuacucccaggccgccuccuccgacuccgcccagggcuccgacgucucccucaccgccugcaaggucuga

SEQ ID NO: 409 - RNA, 1098 nt, Artificial Sequence
  derived and/or modified sequence opt3 from 1A02__Homo_sapiens__AAA59606
auggccgugauggcucccagaacccugguccuccuucugagcggcgcauuggccuuaacacagacuugggcggggucccacucuaugagguacuucuuuacgucaguuagucggccuggacgcggugagccacgauucaucgcugugggcuauguagacgauacccaauuugugcguuucgacagcgaugccgcaucccagagaauggaaccgagggcccccuggauugagcaggaagggccugaguacugggacggagaaacacggaaggucaaagcucauucucagacucaccgcguggaucugggcacccuaagagguuauuacaaccaaucggaggcagggucacauacaguucagaggauguauggaugcgacgugggcagcgauuggcgguuucuccgcggcuaccaccaguaugccuacgacgggaaggauuacauagcucugaaagaggaccuucgaaguuggaccgccgcggauauggcagcccagacuacaaagcauaaaugggaagcugcccacgucgcagagcaacugagagcuuauuuggaaggaaccuguguggaguggcucaggcgguaccuggagaaugguaaggaaacgcugcagcguacugacgccccaaagacccacaugacacaucacgcgguauccgaucaugaggccacucuccgcugcugggcauuaucuuucuaucccgcugaaaucacccugacauggcagagagacggcgaggaccagacccaagauacggaacuuguugagacuaggccugccggggacggaacauuucagaaaugggcugccguggucgugccaagcggccaggagcaacgguacaccugucacgugcagcacgaagguuugcccaagccucugacucuacgaugggagccauccucacagccgacaauucccaucgucgggauuaucgcaggacucguucuguucggcgccgugauaaccggcgcuguaguggcggcagucauguggcgcagaaaaaguagcgauaggaaagggggaucuuauucccaggccgcuucaagcgacagugcccaagguucugaugugucccuuacggcaugcaagguuuga

SEQ ID NO: 410 - RNA, 1098 nt, Artificial Sequence
  derived and/or modified sequence opt4 from 1A02__Homo_sapiens__AAA59606
auggccgugauggcccccagaacccuggugcugcugcugagcggcgcccuggcccugacccagaccugggccggcagccacagcaugagauacuucuucaccagcgugagcagacccggcagaggcgagcccagauucaucgccgugggcuacguggacgacacccaguucgugagauucgacagcgacgccgccagccagagaauggagcccagagcccccuggaucgagcaggagggccccgaguacugggacggcgagaccagaaaggugaaggcccacagccagacccacagaguggaccugggcacccugagaggcuacuacaaccagagcgaggccggcagccacaccgugcagagaauguacggcugcgacgugggcagcgacuggagauuccugagaggcuaccaccaguacgccuacgacggcaaggacuacaucgcccugaaggaggaccugagaagcuggaccgccgccgacauggccgcccagaccaccaagcacaagugggaggccgcccacguggccgagcagcugagagccuaccuggagggcaccugcguggaguggcugagaagauaccuggagaacggcaaggagacccugcagagaaccgacgcccccaagacccacaugacccaccacgccgugagcgaccacgaggccacccugagaugcugggcccugagcuucuaccccgccgagaucacccugaccuggcagagagacggcgaggaccagacccaggacaccgagcugguggagaccagacccgccggcgacggcaccuuccagaagugggccgccgugguggugcccagcggccaggagcagagauacaccugccacgugcagcacgagggccugcccaagccccugacccugagaugggagcccagcagccagcccaccauccccaucgugggcaucaucgccggccuggugcuguucggcgccgugaucaccggcgccgugguggccgccgugauguggagaagaaagagcagcgacagaaagggcggcagcuacagccaggccgccagcagcgacagcgcccagggcagcgacgugagccugaccgccugcaagguguga

SEQ ID NO: 411 - RNA, 1098 nt, Artificial Sequence
  derived and/or modified sequence opt5 from 1A02__Homo_sapiens__AAA59606
auggccgugauggcucccagaacccugguccuccugcuuagcggcgcccuggcgcucacacagacgugggcugggucccacucuaugcgguacuucuuuaccagcguuucccgcccuggaagaggcgagccgcgguucaucgccgugggguauguggacgauacacaauuuguccgcuucgacucugaugccgcuagccagagaauggaaccccgggccccuuggauugagcaggaaggacccgaguacugggacggcgaaacccgcaaggugaaagcucauucccagacacacagaguugaucuggggacccuucggggauauuacaaccaaucugaggccggcagccauacagugcagcgcauguauggcugcgacgucggguccgauuggagauuucugcggggauaccaccaguaugcguacgacggcaaggauuacaucgcccucaaagaggaccugcgcagcuggaccgcugccgauauggcugcccagacgaccaagcauaaaugggaagcggcccacguggcugagcaacugagagccuaucucgaagggacauguguugaguggcugcggcgcuaccuugagaauggaaaggaaacccugcagagaacagacgcuccuaagacccacaugacgcaucacgccgugucugaucaugaggccacacuccggugcugggcucuguccuucuaucccgcggaaauuacccuuacauggcagagagacggcgaggaccagacccaagauaccgaacuggucgagacacgcccugccggggacggaacguuucagaaaugggcugccgugguggucccgagcggccaggagcaacgguacaccugucacguucagcacgaaggccuccccaagccucugacacugagaugggagcccucuucccagccuaccauccccauuguggggaucaucgccggacucgugcuguucggcgcugucauuacaggggccgugguugcggcugugauguggcgccggaaaagcucugauagaaagggaggcuccuauagccaggccgccuccucugacagcgcucaaggguccgaugucagccuuaccgccugcaaaguguga

SEQ ID NO: 412 - protein, 420 aa, Artificial Sequence
  5T4__Homo_sapiens__Q13641
MPGGCSRGPAAGDGRLRLARLALVLLGWVSSSSPTSSASSFSSSAPFLASAVSAQPPLPDQCPALCECSEAARTVKCVNRNLTEVPTDLPAYVRNLFLTGNQLAVLPAGAFARRPPLAELAALNLSGSRLDEVRAGAFEHLPSLRQLDLSHNPLADLSPFAFSGSNASVSAPSPLVELILNHIVPPEDERQNRSFEGMVVAALLAGRALQGLRRLELASNHFLYLPRDVLAQLPSLRHLDLSNNSLVSLTYVSFRNLTHLESLHLEDNALKVLHNGTLAELQGLPHIRVFLDNNPWVCDCHMADMVTWLKETEVVQGKDRLTCAYPEKMRNRVLLELNSADLDCDPILPPSLQTSYVFLGIVLALIGAIFLLVLYLNRKGIKKWMHNIRDACRDHMEGYHYRYEINADPRLTNLSSNSDV

SEQ ID NO: 413 - RNA, 1263 nt, Artificial Sequence
  5T4__Homo_sapiens__AAH37161
augccuggggggugcucccggggccccgccgccggggacgggcgucugcggcuggcgcgacuagcgcugguacuccugggcugggucuccucgucuucucccaccuccucggcauccuccuucuccuccucggcgccguuccuggcuuccgccguguccgcccagcccccgcugccggaccagugccccgcgcugugcgagugcuccgaggcagcgcgcacagucaagugcguuaaccgcaaucugaccgaggugcccacggaccugcccgccuacgugcgcaaccucuuccuuaccggcaaccagcuggccgugcucccugccggcgccuucgcccgccggccgccgcuggcggagcuggccgcgcucaaccucagcggcagccgccuggacgaggugcgcgcgggcgccuucgagcaucugcccagccugcgccagcucgaccucagccacaacccacuggccgaccucagucccuucgcuuucucgggcagcaaugccagcgucucggcccccaguccccuuguggaacugauccugaaccacaucgugcccccugaagaugagcggcagaaccggagcuucgagggcauggugguggcggcccugcuggcgggccgugcacugcaggggcuccgccgcuuggagcuggccagcaaccacuuccuuuaccugccgcgggaugugcuggcccaacugcccagccucaggcaccuggacuuaaguaauaauucgcuggugagccugaccuacguguccuuccgcaaccugacacaucuagaaagccuccaccuggaggacaaugcccucaagguccuucacaauggcacccuggcugaguugcaaggucuaccccacauuaggguuuuccuggacaacaaucccugggucugcgacugccacauggcagacauggugaccuggcucaaggaaacagagguagugcagggcaaagaccggcucaccugugcauauccggaaaaaaugaggaaucggguccucuuggaacucaacagugcugaccuggacugugacccgauucuucccccaucccugcaaaccucuuaugucuuccuggguauuguuuuagcccugauaggcgcuauuuuccuccugguuuuguauuugaaccgcaaggggauaaaaaaguggaugcauaacaucagagaugccugcagggaucacauggaaggguaucauuacagauaugaaaucaaugcggaccccagauuaacgaaccucaguucuaacucggaugucuga

SEQ ID NO: 414 - RNA, 1263 nt, Artificial Sequence
  derived and/or modified sequence opt1 from 5T4__Homo_sapiens__AAH37161
augcccggcgggugcagccgcggccccgccgccggggacggccggcugcgccucgcgcggcuggcccuggugcuccuggggugggucuccagcuccagccccaccuccagcgccuccagcuucuccagcuccgcccccuuccuggccagcgcgguguccgcccagcccccgcuccccgaccagugccccgcccugugcgagugcagcgaggccgcgcgcaccgugaagugcgucaaccggaaccugacggaggugcccaccgaccucccggccuacgugcgcaaccuguuccugaccggcaaccagcucgccguccugcccgccggcgccuucgcgcggcgcccgccccuggccgagcucgccgcccugaaccuguccgggagccggcucgacgaggugcgcgccggcgcguucgagcaccuccccucccugcggcagcuggaccugagccacaacccccuggccgaccucucccccuucgccuucagcgggagcaacgccuccgugagcgcccccuccccgcuggucgagcugauccucaaccacaucgugccgcccgaggacgagcgccagaaccggagcuucgagggcaugguggucgcggcccugcuggccgggcgcgcccuccagggccugcggcgccuggagcucgccuccaaccacuuccuguaccugccccgggacgugcucgcgcagcugcccagccugcgccaccucgaccuguccaacaacagccuggugucccucaccuacgucagcuuccggaaccugacgcaccuggagucccuccaccuggaggacaacgcccugaaggugcuccacaacggcacccuggccgagcugcaggggcugccccacauccgcguguuccucgacaacaaccccugggucugcgacugccacauggccgacauggugaccuggcugaaggagaccgaggugguccagggcaaggaccggcugacgugcgcguaccccgagaagaugcgcaaccgcgugcuccuggagcugaacagcgccgaccucgacugcgacccgauccugccgcccucccugcagaccagcuacguguuccucgggaucguccuggcccugaucggcgccaucuuccuccuggugcuguaccucaaccggaagggcaucaagaaguggaugcacaacauccgcgacgccugccgggaccacauggagggguaccacuaccgcuacgagaucaacgcggacccccggcugaccaaccuguccagcaacuccgacgucuga

SEQ ID NO: 415 - RNA, 1263 nt, Artificial Sequence
  derived and/or modified sequence opt2 from 5T4__Homo_sapiens__AAH37161
augcccggcggcugcucccgcggccccgccgccggcgacggccgccuccgccucgcccgccucgcccucguccuccucggcugggucuccuccuccucccccaccuccuccgccuccuccuucuccuccuccgcccccuuccucgccuccgccgucuccgcccagcccccccuccccgaccagugccccgcccucugcgagugcuccgaggccgcccgcaccgucaagugcgucaaccgcaaccucaccgagguccccaccgaccuccccgccuacguccgcaaccucuuccucaccggcaaccagcucgccguccuccccgccggcgccuucgcccgccgccccccccucgccgagcucgccgcccucaaccucuccggcucccgccucgacgagguccgcgccggcgccuucgagcaccuccccucccuccgccagcucgaccucucccacaacccccucgccgaccucucccccuucgccuucuccggcuccaacgccuccgucuccgcccccuccccccucgucgagcucauccucaaccacaucgucccccccgaggacgagcgccagaaccgcuccuucgagggcauggucgucgccgcccuccucgccggccgcgcccuccagggccuccgccgccucgagcucgccuccaaccacuuccucuaccucccccgcgacguccucgcccagcuccccucccuccgccaccucgaccucuccaacaacucccucgucucccucaccuacgucuccuuccgcaaccucacccaccucgagucccuccaccucgaggacaacgcccucaagguccuccacaacggcacccucgccgagcuccagggccucccccacauccgcgucuuccucgacaacaaccccugggucugcgacugccacauggccgacauggucaccuggcucaaggagaccgaggucguccagggcaaggaccgccucaccugcgccuaccccgagaagaugcgcaaccgcguccuccucgagcucaacuccgccgaccucgacugcgaccccauccucccccccucccuccagaccuccuacgucuuccucggcaucguccucgcccucaucggcgccaucuuccuccucguccucuaccucaaccgcaagggcaucaagaaguggaugcacaacauccgcgacgccugccgcgaccacauggagggcuaccacuaccgcuacgagaucaacgccgacccccgccucaccaaccucuccuccaacuccgacgucuga

SEQ ID NO: 416 - RNA, 1263 nt, Artificial Sequence
  derived and/or modified sequence opt3 from 5T4__Homo_sapiens__AAH37161
augcccggcgggugcagcagaggaccugccgcuggugacggcaggcugcggcucgcacgccuugcccugguguuguuagggugggucuccucuucaaguccaaccagcuccgcgucuucguucucaagcagugcuccguuucuggccuccgcaguuucugcccagcccccucuaccagaucaaugucccgcucucugcgaguguagcgaagcagcccgaacagugaagugcguaaaccguaaucugacugaggugccuacggaccuuccagcuuacgucagaaaccuguucuugaccggaaaucagcucgccgugcugcccgcgggcgcauuugccaggcggccuccacuggcugaacucgccgcauuaaaccuguccgguucacgccuugaugagguuagagcuggggccuucgaacacuugccgagucugaggcagcuagaccucagccauaauccccuggcggaucuuucuccuuuugccuucuccggaucaaacgcaagcgugagugcuccaucuccccuggucgaguugauccucaaucacauugugccuccagaggacgaacggcagaaccgcuccuuugagggcaugguaguugccgcucuguuagccggccgagcacugcaagggcucagaaggcuugaacuggccagcaaucauuucuuguaucuaccccgggaugugcuggcucagcucccgucgcugcgucaccuugaccugucuaacaauuccuuggucucacucacauacgugaguuuucgcaaccugacucauuuagagagccugcaccuagaggauaaugcgcucaaagugcugcacaacggaacccuugcagaauugcagggucugccucauauaagagucuuccucgacaauaaccccuggguuugugauugccacauggccgacauggugacauggcugaaggagaccgaaguagugcagggcaaagauaggcuuacuugugcuuauccagagaagaugcggaaccgaguccuguuggaacucaauuccgccgaccuggacugcgauccuaucuuacccccaucucugcaaacaagcuacguguuucuagggauuguucucgcacugaucggagccauuuuccuuuuggugcuguaucucaaccgcaaaggcaucaagaaguggaugcauaauauaagagacgcuuguagggaucacauggaggguuaccacuaucgguacgagaucaacgccgacccccgccugaccaauuuaucaaguaacuccgaugucuga

SEQ ID NO: 417 - RNA, 1263 nt, Artificial Sequence
  derived and/or modified sequence opt4 from 5T4__Homo_sapiens__AAH37161
augcccggcggcugcagcagaggccccgccgccggcgacggcagacugagacuggccagacuggcccuggugcugcugggcugggugagcagcagcagccccaccagcagcgccagcagcuucagcagcagcgcccccuuccuggccagcgccgugagcgcccagcccccccugcccgaccagugccccgcccugugcgagugcagcgaggccgccagaaccgugaagugcgugaacagaaaccugaccgaggugcccaccgaccugcccgccuacgugagaaaccuguuccugaccggcaaccagcuggccgugcugcccgccggcgccuucgccagaagacccccccuggccgagcuggccgcccugaaccugagcggcagcagacuggacgaggugagagccggcgccuucgagcaccugcccagccugagacagcuggaccugagccacaacccccuggccgaccugagccccuucgccuucagcggcagcaacgccagcgugagcgcccccagcccccugguggagcugauccugaaccacaucgugccccccgaggacgagagacagaacagaagcuucgagggcauggugguggccgcccugcuggccggcagagcccugcagggccugagaagacuggagcuggccagcaaccacuuccuguaccugcccagagacgugcuggcccagcugcccagccugagacaccuggaccugagcaacaacagccuggugagccugaccuacgugagcuucagaaaccugacccaccuggagagccugcaccuggaggacaacgcccugaaggugcugcacaacggcacccuggccgagcugcagggccugccccacaucagaguguuccuggacaacaaccccugggugugcgacugccacauggccgacauggugaccuggcugaaggagaccgagguggugcagggcaaggacagacugaccugcgccuaccccgagaagaugagaaacagagugcugcuggagcugaacagcgccgaccuggacugcgaccccauccugccccccagccugcagaccagcuacguguuccugggcaucgugcuggcccugaucggcgccaucuuccugcuggugcuguaccugaacagaaagggcaucaagaaguggaugcacaacaucagagacgccugcagagaccacauggagggcuaccacuacagauacgagaucaacgccgaccccagacugaccaaccugagcagcaacagcgacguguga

SEQ ID NO: 418 - RNA, 1263 nt, Artificial Sequence
  derived and/or modified sequence opt5 from 5T4__Homo_sapiens__AAH37161
augcccggcgggugcagcagaggaccugccgcuggcgacgggcggcugcgccucgccagacuggcgcuugugcugcucggaugggucuccucuagcuccccgaccucuagcgcuuccucuuucagcuccagcgcccccuuucuggccucugcuguuuccgcccagccuccccuuccugaucaaugucccgcucugugcgaguguagcgaagccgcgcggacagugaagugcgugaaccgcaaucucacggaggucccuaccgaccugccggccuacgugagaaaccuguuccucacaggcaaucagcuggcuguucuucccgccggggcuuuugcccggcgcccuccccuggcggaacucgccgcucugaaccuuucuggauccagacuggaugaggugcgggccggcgcuuucgaacaccucccuagccugcgccagcuggaccucucucauaauccccuggccgaucuuuccccguuugccuucagcggcuccaacgcuucugucagcgcgccuagcccccugguggagcucauccugaaucacauuguuccucccgaggacgaaagacagaaccgguccuuugaggggaugguggucgccgcccuucuggcuggacgcgcccuccaaggccugagacggcuggaacucgcuucuaaucauuuccuguaucuuccccgcgaugugcuggcccagcucccuucccugagacaccuugaccugagcaacaauucucucgugagccugaccuacgucuccuuucggaaccugacacaucucgagucucugcaccuugaggauaaugcgcugaaaguucuccacaacgggacccuggcugaacugcagggacuuccgcauaucagaguguuccucgacaauaaccccugggugugugauugccacauggccgacauggucacauggcugaaggagaccgaagugguucagggcaaagaucgccugacgugugccuauccugagaagaugcggaacagagugcuccuggaacuuaauagcgcugaccuggacugcgaucccauucucccucccucccugcaaaccagcuacgucuuucuggggaucgugcuugcccucauuggagcuaucuuccugcugguucucuaucugaaccgcaaaggcaucaagaaguggaugcauaauauucgggacgccuguagagaucacauggagggcuaccacuaucgcuacgagaucaacgcggacccgcggcuuacaaaucugucuuccaacagcgauguguga

SEQ ID NO: 419 - protein, 543 aa, Artificial Sequence
  ACRBP__Homo_sapiens__Q8NEB7
MRKPAAGFLPSLLKVLLLPLAPAAAQDSTQASTPGSPLSPTEYERFFALLTPTWKAETTCRLRATHGCRNPTLVQLDQYENHGLVPDGAVCSNLPYASWFESFCQFTHYRCSNHVYYAKRVLCSQPVSILSPNTLKEIEASAEVSPTTMTSPISPHFTVTERQTFQPWPERLSNNVEELLQSSLSLGGQEQAPEHKQEQGVEHRQEPTQEHKQEEGQKQEEQEEEQEEEGKQEEGQGTKEGREAVSQLQTDSEPKFHSESLSSNPSSFAPRVREVESTPMIMENIQELIRSAQEIDEMNEIYDENSYWRNQNPGSLLQLPHTEALLVLCYSIVENTCIITPTAKAWKYMEEEILGFGKSVCDSLGRRHMSTCALCDFCSLKLEQCHSEASLQRQQCDTSHKTPFVSPLLASQSLSIGNQVGSPESGRFYGLDLYGGLHMDFWCARLATKGCEDVRVSGWLQTEFLSFQDGDFPTKICDTDYIQYPNYCSFKSQQCLMRNRNRKVSRMRCLQNETYSALSPGKSEDVVLRWSQEFSTLTLGQFG

SEQ ID NO: 420 - RNA, 1632 nt, Artificial Sequence
  ACRBP__Homo_sapiens__AAH33010
augaggaagccagccgcuggcuuccuucccucacuccugaaggugcugcuccugccucuggcaccugccgcagcccaggauucgacucaggccuccacuccaggcagcccucucucuccuaccgaauacgaacgcuucuucgcacugcugacuccaaccuggaaggcagagacuaccugccgucuccgugcaacccacggcugccggaaucccacacucguccagcuggaccaauaugaaaaccacggcuuagugcccgauggugcugucugcuccaaccucccuuaugccuccugguuugagucuuucugccaguucacucacuaccguugcuccaaccacgucuacuaugccaagagaguccuguguucccagccagucucuauucucucaccuaacacucucaaggagauagaagcuucagcugaagucucacccaccacgaugaccucccccaucucaccccacuucacagugacagaacgccagaccuuccagcccuggccugagaggcucagcaacaacguggaagagcuccuacaauccuccuugucccugggaggccaggagcaagcgccagagcacaagcaggagcaaggaguggagcacaggcaggagccgacacaagaacacaagcaggaagaggggcagaaacaggaagagcaagaagaggaacaggaagaggagggaaagcaggaagaaggacaggggacuaaggagggacgggaggcugugucucagcugcagacagacucagagcccaaguuucacucugaaucucuaucuucuaacccuuccucuuuugcuccccggguacgagaaguagagucuacuccuaugauaauggagaacauccaggagcucauucgaucagcccaggaaauagaugaaaugaaugaaauauaugaugagaacuccuacuggagaaaccaaaacccuggcagccuccugcagcugccccacacagaggccuugcuggugcugugcuauucgaucguggagaauaccugcaucauaacccccacagccaaggccuggaaguacauggaggaggagauccuugguuucgggaagucggucugugacagccuugggcggcgacacaugucuaccugugcccucugugacuucugcuccuugaagcuggagcagugccacucagaggccagccugcagcggcaacaaugcgacaccucccacaagacucccuuugucagccccuugcuugccucccagagccuguccaucggcaaccagguaggguccccagaaucaggccgcuuuuacgggcuggauuuguacggugggcuccacauggacuucuggugugcccggcuugccacgaaaggcugugaagauguccgagucucuggguggcuccagacugaguuccuuagcuuccaggauggggauuucccuaccaagauuugugacacagacuauauccaguacccaaacuacuguuccuucaaaagccagcagugucugaugagaaaccgcaaucggaaggugucccgcaugagaugucugcagaaugagacuuacagugcgcugagcccuggcaaaagugaggacguugugcuucgauggagccaggaguucagcaccuugacucuaggccaguucggauga

SEQ ID NO: 421 - RNA, 1632 nt, Artificial Sequence
  derived and/or modified sequence opt1 from ACRBP__Homo_sapiens__AAH33010
augcgcaagcccgccgccggcuuccugccgagccuccugaaggugcugcuccugccccuggcgcccgccgccgcccaggacuccacccaggccagcacccccggguccccgcucagccccacggaguacgagcgguucuucgcgcugcugacccccaccuggaaggccgagaccacgugccgccuccgggccacccacggcugccgcaaccccacccugguccagcuggaccaguacgagaaccacgggcucgugccggacggcgccgugugcuccaaccugcccuacgcgagcugguucgaguccuucugccaguucacccacuaccggugcagcaaccacgucuacuacgccaagcgcgugcugugcucccagcccgugagcauccucucccccaacacgcugaaggagaucgaggccagcgccgaggucuccccgaccaccaugaccagccccaucagcccccacuucacggugaccgagcggcagaccuuccagcccuggccggagcgccugagcaacaacguggaggagcuccugcaguccagccugucccucgggggccaggagcaggcccccgagcacaagcaggagcagggcgucgagcaccggcaggagcccacccaggagcacaagcaggaggaggggcagaagcaggaggagcaggaggaggagcaggaggaggagggcaagcaggaggaggggcagggcacgaaggaggggcgcgaggcggugagccagcugcagaccgacagcgagcccaaguuccacuccgagagccuguccagcaacccguccagcuucgcgccccgggugcgcgaggucgaguccacccccaugaucauggagaacauccaggagcucauccggagcgcccaggagaucgacgagaugaacgagaucuacgacgagaacuccuacuggcgcaaccagaaccccggcagccugcugcagcucccgcacaccgaggcccugcuggugcucugcuacuccaucguggagaacacgugcaucaucacccccaccgccaaggccuggaaguacauggaggaggagauccugggcuucgggaaguccgucugcgacucccugggccggcgccacaugagcacgugcgcccucugcgacuucugcucccugaagcuggagcagugccacagcgaggccucccuccagcggcagcagugcgacaccagccacaagacccccuucgugagcccccugcuggccucccagagccucuccaucgggaaccaggugggcagcccggaguccggccgcuucuacgggcuggaccuguacggcgggcuccacauggacuucuggugcgcccggcuggcgaccaagggcugcgaggacguccgcgugagcggguggcugcagaccgaguuccucuccuuccaggacggcgacuuccccacgaagaucugcgacaccgacuacauccaguaccccaacuacugcagcuucaagucccagcagugccugaugcggaaccgcaaccgcaaggugagccggaugcgcugccugcagaacgagaccuacuccgcccucagcccgggcaaguccgaggacgucgugcugcgguggagccaggaguucuccacccugacgcuggggcaguucggcuga

SEQ ID NO: 422 - RNA, 1632 nt, Artificial Sequence
  derived and/or modified sequence opt2 from ACRBP__Homo_sapiens__AAH33010
augcgcaagcccgccgccggcuuccuccccucccuccucaagguccuccuccucccccucgcccccgccgccgcccaggacuccacccaggccuccacccccggcuccccccucucccccaccgaguacgagcgcuucuucgcccuccucacccccaccuggaaggccgagaccaccugccgccuccgcgccacccacggcugccgcaaccccacccucguccagcucgaccaguacgagaaccacggccucguccccgacggcgccgucugcuccaaccuccccuacgccuccugguucgaguccuucugccaguucacccacuaccgcugcuccaaccacgucuacuacgccaagcgcguccucugcucccagcccgucuccauccucucccccaacacccucaaggagaucgaggccuccgccgaggucucccccaccaccaugaccucccccaucuccccccacuucaccgucaccgagcgccagaccuuccagcccuggcccgagcgccucuccaacaacgucgaggagcuccuccaguccucccucucccucggcggccaggagcaggcccccgagcacaagcaggagcagggcgucgagcaccgccaggagcccacccaggagcacaagcaggaggagggccagaagcaggaggagcaggaggaggagcaggaggaggagggcaagcaggaggagggccagggcaccaaggagggccgcgaggccgucucccagcuccagaccgacuccgagcccaaguuccacuccgagucccucuccuccaaccccuccuccuucgccccccgcguccgcgaggucgaguccacccccaugaucauggagaacauccaggagcucauccgcuccgcccaggagaucgacgagaugaacgagaucuacgacgagaacuccuacuggcgcaaccagaaccccggcucccuccuccagcucccccacaccgaggcccuccucguccucugcuacuccaucgucgagaacaccugcaucaucacccccaccgccaaggccuggaaguacauggaggaggagauccucggcuucggcaaguccgucugcgacucccucggccgccgccacauguccaccugcgcccucugcgacuucugcucccucaagcucgagcagugccacuccgaggccucccuccagcgccagcagugcgacaccucccacaagacccccuucgucuccccccuccucgccucccagucccucuccaucggcaaccaggucggcucccccgaguccggccgcuucuacggccucgaccucuacggcggccuccacauggacuucuggugcgcccgccucgccaccaagggcugcgaggacguccgcgucuccggcuggcuccagaccgaguuccucuccuuccaggacggcgacuuccccaccaagaucugcgacaccgacuacauccaguaccccaacuacugcuccuucaagucccagcagugccucaugcgcaaccgcaaccgcaaggucucccgcaugcgcugccuccagaacgagaccuacuccgcccucucccccggcaaguccgaggacgucguccuccgcuggucccaggaguucuccacccucacccucggccaguucggcuga

SEQ ID NO: 423 - RNA, 1632 nt, Artificial Sequence
  derived and/or modified sequence opt3 from ACRBP__Homo_sapiens__AAH33010
augagaaagcccgccgcuggcuuccugccuagccuccuuaaagugcuguuguuaccacuggcaccggccgcggcucaggacuccacccaagccucuacacccgggucaccucuaaguccaacugaguacgaaagguuuuucgcacuccugacgcccaccuggaaggccgagacaacuugccggcuucgcgcuacccacggaugucgaaacccuacacugguccaguuggaucaguaugaaaaucauggucucguuccagacggcgcagugugcagcaaccugcccuacgccuccugguuugagucuuucugucaguuuacccacuaucguugcucgaaucauguauacuaugcuaaaagagugcuguguucacaaccugucagcauccucaguccaaacacuuuaaaggaaauugaggccuccgcggaggugucuccgacaaccaugacgagccccauauccccucacuucacuguuaccgaaaggcagacauuucagccauggcccgagcggcugucaaauaacguggaagaacuuuugcagaguagccugucucuagggggacaagagcaggcaccugaacauaaacaggagcagggcgucgaacaccgccaagagccaacucaggaacacaagcaggaggagggucaaaagcaggaggagcaggaagaggaacaggaggaggaagggaaacaagaggaaggacagggcaccaaggagggcagagaagccgugucccagcuccagacagauucagagcccaaauuccauagcgagagucugucuuccaauccgagcucguuugcuccuaggguacgggaaguugagucuacccccaugaucauggaaaacauucaagagcuuauccgcuccgcccaggagauugacgaaaugaaugagaucuacgaugaaaacucauauuggcgaaaucagaacccagggagucuguugcagcucccucacacggaggcacuguuagugcugugcuacagcauagucgaaaauacuuguaucauuacacccaccgcuaaggccuggaaauacauggaggaggaaauccucggauucgguaaguccgugugcgacucucuuggcagaaggcauaugagcacuugugcgcugugcgauuuuuguucauugaagcuagagcaaugccacagugaagccucccugcagcggcagcagugcgacacaagccacaaaaccccauucgugucuccccuccuggcaucacaaagucuuagcauugggaaccaggucggauccccugagucuggccguuuuuauggucuggauuuguacgggggacuccauauggacuucuggugugcucgccuggccacgaagggcugcgaagauguuagagugucgggcugguuacagaccgaguuccugagcuuucaagacggggauuucccaacaaaaaucugugacacugacuauauacaguacccgaauuauugcuccuuuaagucacagcagugucuaaugaggaaccggaaccgaaaaguaagucgcaugagaugccuccaaaaugagaccuacucugcucugagccccggaaaguccgaagaugugguccuuagguggucacaggaguucagcacauugacucugggucaguuuggcuga

SEQ ID NO: 424 - RNA, 1632 nt, Artificial Sequence
  derived and/or modified sequence opt4 from ACRBP__Homo_sapiens__AAH33010
augagaaagcccgccgccggcuuccugcccagccugcugaaggugcugcugcugccccuggcccccgccgccgcccaggacagcacccaggccagcacccccggcagcccccugagccccaccgaguacgagagauucuucgcccugcugacccccaccuggaaggccgagaccaccugcagacugagagccacccacggcugcagaaaccccacccuggugcagcuggaccaguacgagaaccacggccuggugcccgacggcgccgugugcagcaaccugcccuacgccagcugguucgagagcuucugccaguucacccacuacagaugcagcaaccacguguacuacgccaagagagugcugugcagccagcccgugagcauccugagccccaacacccugaaggagaucgaggccagcgccgaggugagccccaccaccaugaccagccccaucagcccccacuucaccgugaccgagagacagaccuuccagcccuggcccgagagacugagcaacaacguggaggagcugcugcagagcagccugagccugggcggccaggagcaggcccccgagcacaagcaggagcagggcguggagcacagacaggagcccacccaggagcacaagcaggaggagggccagaagcaggaggagcaggaggaggagcaggaggaggagggcaagcaggaggagggccagggcaccaaggagggcagagaggccgugagccagcugcagaccgacagcgagcccaaguuccacagcgagagccugagcagcaaccccagcagcuucgcccccagagugagagagguggagagcacccccaugaucauggagaacauccaggagcugaucagaagcgcccaggagaucgacgagaugaacgagaucuacgacgagaacagcuacuggagaaaccagaaccccggcagccugcugcagcugccccacaccgaggcccugcuggugcugugcuacagcaucguggagaacaccugcaucaucacccccaccgccaaggccuggaaguacauggaggaggagauccugggcuucggcaagagcgugugcgacagccugggcagaagacacaugagcaccugcgcccugugcgacuucugcagccugaagcuggagcagugccacagcgaggccagccugcagagacagcagugcgacaccagccacaagacccccuucgugagcccccugcuggccagccagagccugagcaucggcaaccaggugggcagccccgagagcggcagauucuacggccuggaccuguacggcggccugcacauggacuucuggugcgccagacuggccaccaagggcugcgaggacgugagagugagcggcuggcugcagaccgaguuccugagcuuccaggacggcgacuuccccaccaagaucugcgacaccgacuacauccaguaccccaacuacugcagcuucaagagccagcagugccugaugagaaacagaaacagaaaggugagcagaaugagaugccugcagaacgagaccuacagcgcccugagccccggcaagagcgaggacguggugcugagauggagccaggaguucagcacccugacccugggccaguucggcuga

SEQ ID NO: 425 - RNA, 1632 nt, Artificial Sequence
  derived and/or modified sequence opt5 from ACRBP__Homo_sapiens__AAH33010
augagaaagcccgccgcuggcuuccugccuagccuccugaaagugcuucugcucccgcuggcccccgcggcugcccaggacuccacccaagccucuacaccugggagcccccuuuccccuacggaguacgaacgguuuuucgcucugcucacccccacauggaaggccgagaccacaugccgccugagagcuacccacggaugucggaacccuacacugguccagcucgaucaguaugaaaaucauggccugguuccggacggggccgugugcucuaaccuucccuacgcgagcugguuugaguccuucugucaguuuacccacuaucgcugcucuaaucauguguacuaugccaaaagaguccuguguagccaaccuguguccauccucagccccaacacgcugaaggaaauugaggcuucugccgagguuuccccuaccacaaugaccagccccaucucuccgcacuucacagugaccgaacggcagacguuucagccuuggcccgagcgccuuuccaauaacgucgaagaacugcuccagagcucucugucccugggaggccaagagcaggcuccugaacauaaacaggagcaggggguggaacacagacaagagcccacacaggaacacaagcaggaggagggacaaaagcaggaggagcaggaagaggaacaggaggaggaaggcaaacaagaggaaggccaggggaccaaggagggacgggaagccguuagccagcuccagacagauuccgagcccaaauuccauucugagagccuguccagcaauccuucuuccuuugcgccgcgcgugagagaagucgagagcacccccaugauuauggaaaacauccaagagcuuauucggucugcccaggagaucgacgaaaugaaugagaucuacgaugaaaacagcuauuggcgcaaucagaacccuggcucccugcuccagcugccccacaccgaggcccuucuggugcucugcuacucuauuguggaaaauacauguaucauuacgccuaccgcuaaggcuuggaaauacauggaggaggaaauccugggguucggaaagagcgucugcgacucccugggcagacggcauaugagcacaugugcccucugcgauuuuuguucucugaaacuugagcaaugccacuccgaagccagccugcagcgccagcagugcgacaccucucacaagacacccuucguuuccccgcuccuggcuagccaaucccuuucuauugggaaccaggugggaagcccugaguccggcagauuuuauggccuggaucucuacgggggacugcauauggacuucuggugugcgcggcuggccaccaagggcugcgaagaugugagagucucuggguggcuccagacggaguuccugagcuuucaagacggagauuuccccacaaaaaucugugacaccgacuauauucaguacccuaauuauugcuccuuuaagagccagcagugucuuaugcgcaaccggaacagaaaagugucucgcaugcggugccugcaaaaugagaccuacuccgcucucagccccggcaagucugaagauguugugcugagauggucccaggaguucagcacacugacccuugggcaguuuggauga

SEQ ID NO: 426 - protein, 609 aa, Artificial Sequence
  AFP__Homo_sapiens__P02771
MKWVESIFLIFLLNFTESRTLHRNEYGIASILDSYQCTAEISLADLATIFFAQFVQEATYKEVSKMVKDALTAIEKPTGDEQSSGCLENQLPAFLEELCHEKEILEKYGHSDCCSQSEEGRHNCFLAHKKPTPASIPLFQVPEPVTSCEAYEEDRETFMNKFIYEIARRHPFLYAPTILLWAARYDKIIPSCCKAENAVECFQTKAATVTKELRESSLLNQHACAVMKNFGTRTFQAITVTKLSQKFTKVNFTEIQKLVLDVAHVHEHCCRGDVLDCLQDGEKIMSYICSQQDTLSNKITECCKLTTLERGQCIIHAENDEKPEGLSPNLNRFLGDRDFNQFSSGEKNIFLASFVHEYSRRHPQLAVSVILRVAKGYQELLEKCFQTENPLECQDKGEEELQKYIQESQALAKRSCGLFQKLGEYYLQNAFLVAYTKKAPQLTSSELMAITRKMAATAATCCQLSEDKLLACGEGAADIIIGHLCIRHEMTPVNPGVGQCCTSSYANRRPCFSSLVVDETYVPPAFSDDKFIFHKDLCQAQGVALQTMKQEFLINLVKQKPQITEEQLEAVIADFSGLLEKCCQGQEQEVCFAEEGQKLISKTRAALGV

SEQ ID NO: 427 - RNA, 1830 nt, Artificial Sequence
  AFP__Homo_sapiens__AAB58754
augaaguggguggaaucaauuuuuuuaauuuuccuacuaaauuuuacugaauccagaacacugcauagaaaugaauauggaauagcuuccauauuggauucuuaccaauguacugcagagauaaguuuagcugaccuggcuaccauauuuuuugcccaguuuguucaagaagccacuuacaaggaaguaagcaaaauggugaaagaugcauugacugcaauugagaaacccacuggagaugaacagucuucaggguguuuagaaaaccagcuaccugccuuucuggaagaacuuugccaugagaaagaaauuuuggagaaguacggacauucagacugcugcagccaaagugaagagggaagacauaacuguuuucuugcacacaaaaagcccacuccagcaucgaucccacuuuuccaaguuccagaaccugucacaagcugugaagcauaugaagaagacagggagacauucaugaacaaauucauuuaugagauagcaagaaggcaucccuuccuguaugcaccuacaauucuucuuugggcugcucgcuaugacaaaauaauuccaucuugcugcaaagcugaaaaugcaguugaaugcuuccaaacaaaggcagcaacaguuacaaaagaauuaagagaaagcagcuuguuaaaucaacaugcaugugcaguaaugaaaaauuuugggacccgaacuuuccaagccauaacuguuacuaaacugagucagaaguuuaccaaaguuaauuuuacugaaauccagaaacuaguccuggauguggcccauguacaugagcacuguugcagaggagaugugcuggauugucugcaggauggggaaaaaaucauguccuacauauguucucaacaagacacucugucaaacaaaauaacagaaugcugcaaacugaccacgcuggaacguggucaauguauaauucaugcagaaaaugaugaaaaaccugaaggucuaucuccaaaucuaaacagguuuuuaggagauagagauuuuaaccaauuuucuucaggggaaaaaaauaucuucuuggcaaguuuuguucaugaauauucaagaagacauccucagcuugcugucucaguaauucuaagaguugcuaaaggauaccaggaguuauuggagaaguguuuccagacugaaaacccucuugaaugccaagauaaaggagaagaagaauuacagaaauacauccaggagagccaagcauuggcaaagcgaagcugcggccucuuccagaaacuaggagaauauuacuuacaaaaugcguuucucguugcuuacacaaagaaagccccccagcugaccucgucggagcugauggccaucaccagaaaaauggcagccacagcagccacuuguugccaacucagugaggacaaacuauuggccuguggcgagggagcggcugacauuauuaucggacacuuauguaucagacaugaaaugacuccaguaaacccugguguuggccagugcugcacuucuucauaugccaacaggaggccaugcuucagcagcuuggugguggaugaaacauaugucccuccugcauucucugaugacaaguucauuuuccauaaggaucugugccaagcucaggguguagcgcugcaaacgaugaagcaagaguuucucauuaaccuugugaagcaaaagccacaaauaacagaggaacaacuugaggcugucauugcagauuucucaggccuguuggagaaaugcugccaaggccaggaacaggaagucugcuuugcugaagagggacaaaaacugauuucaaaaacucgugcugcuuugggaguuuaa

SEQ ID NO: 428 - RNA, 1830 nt, Artificial Sequence
  derived and/or modified sequence opt1 from AFP__Homo_sapiens__AAB58754
augaaguggguggagagcaucuuccugaucuuccuccugaacuucaccgagucccgcacccugcaccggaacgaguacggcaucgccagcauccucgacuccuaccagugcacggccgagaucagccuggcggaccuggccaccaucuucuucgcccaguucguccaggaggccaccuacaaggagguguccaagauggugaaggacgcccucaccgcgaucgagaagcccacgggggacgagcagagcuccggcugccuggagaaccagcugcccgccuuccucgaggagcugugccacgagaaggagauccuggagaaguacgggcacagcgacugcugcucccagagcgaggagggccgccacaacugcuuccucgcccacaagaagcccacccccgccuccaucccccuguuccaggucccggagcccgugaccagcugcgaggcguacgaggaggaccgggagaccuucaugaacaaguucaucuacgagaucgcccgccggcaccccuuccuguacgcccccacgauccuccugugggccgcccgcuacgacaagaucaucccguccugcugcaaggcggagaacgccguggagugcuuccagaccaaggccgccaccgucaccaaggagcugcgggagagcucccuccugaaccagcacgccugcgcggugaugaagaacuucgggacgcgcaccuuccaggccaucaccgugaccaagcugagccagaaguucacgaaggucaacuucaccgagauccagaagcucgugcuggacguggcccacguccacgagcacugcugccggggcgacgugcuggacugccuccaggacggcgagaagaucauguccuacaucugcagccagcaggacacccuguccaacaagaucaccgagugcugcaagcugacgacccucgagcgcgggcagugcaucauccacgccgagaacgacgagaagcccgagggccugagccccaaccugaaccgguuccucggggaccgcgacuucaaccaguucagcuccggcgagaagaacaucuuccuggccagcuucgugcacgaguacucccggcgccacccccagcuggcggucagcgugauccuccggguggccaagggguaccaggagcugcuggagaagugcuuccagaccgagaacccgcucgagugccaggacaagggcgaggaggagcugcagaaguacauccaggagucccaggcccuggccaagcgcagcugcggccucuuccagaagcugggggaguacuaccugcagaacgccuuccucgucgcguacaccaagaaggcgccccagcugacguccagcgagcugauggccaucacccggaagauggccgccaccgccgcgaccugcugccagcucuccgaggacaagcugcuggccugcggcgagggggccgccgacaucaucaucggccaccucugcauccgccacgagaugacgcccgugaaccccggcguggggcagugcugcaccagcuccuacgccaaccggcgcccgugcuucagcucccuggucguggacgagaccuacgugccgcccgccuucagcgacgacaaguucaucuuccacaaggaccugugccaggcccagggcgucgcccugcagaccaugaagcaggaguuccucaucaaccuggugaagcagaagccccagaucacggaggagcagcuggaggcggucaucgccgacuucuccgggcuccuggagaagugcugccagggccaggagcaggaggugugcuucgccgaggaggggcagaagcugaucagcaagacccgggccgcccucggcguguga

SEQ ID NO: 429 - RNA, 1830 nt, Artificial Sequence
  derived and/or modified sequence opt2 from AFP__Homo_sapiens__AAB58754
augaagugggucgaguccaucuuccucaucuuccuccucaacuucaccgagucccgcacccuccaccgcaacgaguacggcaucgccuccauccucgacuccuaccagugcaccgccgagaucucccucgccgaccucgccaccaucuucuucgcccaguucguccaggaggccaccuacaaggaggucuccaagauggucaaggacgcccucaccgccaucgagaagcccaccggcgacgagcaguccuccggcugccucgagaaccagcuccccgccuuccucgaggagcucugccacgagaaggagauccucgagaaguacggccacuccgacugcugcucccaguccgaggagggccgccacaacugcuuccucgcccacaagaagcccacccccgccuccaucccccucuuccagguccccgagcccgucaccuccugcgaggccuacgaggaggaccgcgagaccuucaugaacaaguucaucuacgagaucgcccgccgccaccccuuccucuacgcccccaccauccuccucugggccgcccgcuacgacaagaucauccccuccugcugcaaggccgagaacgccgucgagugcuuccagaccaaggccgccaccgucaccaaggagcuccgcgaguccucccuccucaaccagcacgccugcgccgucaugaagaacuucggcacccgcaccuuccaggccaucaccgucaccaagcucucccagaaguucaccaaggucaacuucaccgagauccagaagcucguccucgacgucgcccacguccacgagcacugcugccgcggcgacguccucgacugccuccaggacggcgagaagaucauguccuacaucugcucccagcaggacacccucuccaacaagaucaccgagugcugcaagcucaccacccucgagcgcggccagugcaucauccacgccgagaacgacgagaagcccgagggccucucccccaaccucaaccgcuuccucggcgaccgcgacuucaaccaguucuccuccggcgagaagaacaucuuccucgccuccuucguccacgaguacucccgccgccacccccagcucgccgucuccgucauccuccgcgucgccaagggcuaccaggagcuccucgagaagugcuuccagaccgagaacccccucgagugccaggacaagggcgaggaggagcuccagaaguacauccaggagucccaggcccucgccaagcgcuccugcggccucuuccagaagcucggcgaguacuaccuccagaacgccuuccucgucgccuacaccaagaaggccccccagcucaccuccuccgagcucauggccaucacccgcaagauggccgccaccgccgccaccugcugccagcucuccgaggacaagcuccucgccugcggcgagggcgccgccgacaucaucaucggccaccucugcauccgccacgagaugacccccgucaaccccggcgucggccagugcugcaccuccuccuacgccaaccgccgccccugcuucuccucccucgucgucgacgagaccuacgucccccccgccuucuccgacgacaaguucaucuuccacaaggaccucugccaggcccagggcgucgcccuccagaccaugaagcaggaguuccucaucaaccucgucaagcagaagccccagaucaccgaggagcagcucgaggccgucaucgccgacuucuccggccuccucgagaagugcugccagggccaggagcaggaggucugcuucgccgaggagggccagaagcucaucuccaagacccgcgccgcccucggcgucuga

SEQ ID NO: 430 - RNA, 1830 nt, Artificial Sequence
  derived and/or modified sequence opt3 from AFP__Homo_sapiens__AAB58754
augaaguggguggagagcaucuuccugauuuuucuccuuaacuucaccgaauccagaacacugcacaggaaugaguacggcauagccucuaucuuggacucauaucagugcacugcugaaauuaguuuagcagaucuggccacgaucuuuuucgcgcaauuuguccaggaggcuaccuacaaagaaguuagcaagauggugaaagacgcccuaacagcaauugagaagcccacuggggaugagcaguccucuggaugucucgaaaaccagcugccugccuuccuugaggaacugugccaugagaaagagaucuuggaaaaguauggucacucggacuguugcucacaaagcgaggaaggccggcauaauuguuuucucgcucacaagaaaccaaccccggcaaguauaccccuguuccagguaccugagccagugacauccugcgaagccuacgaggaggaucgcgaaaccuuuaugaacaaguucaucuaugagauugcucgacgucaucccuuucuguacgccccuacuauccucuuaugggcggcaagauaugacaaaauuaucccaucuuguugcaaggccgaaaaugcugucgaguguuuccagacaaaagccgcaaccgugacgaaggaacugagggagagcucccuuuugaaccagcacgcuugcgccguuaugaagaauuuugggacucggaccuuccaagcgauaacagugacuaaacugucacagaaguucaccaaagucaacuuuacagagauucagaagcuagugcucgauguagcccacguucaugaacacuguugccgcggagacgugcuggauugccuucaggacggcgagaaaaucaugaguuacauuuguagccaacaggauacccugucuaauaagaucacggaaugcuguaaauugacuacacucgagagaggucagugcaucauucaugcagaaaacgacgagaagcccgaggggcuguccccuaauuuaaacagguuccugggagaucgggacuuuaaucaauucucaagcggcgaaaagaacauauuucucgcuaguuucguccacgaguacucucgccgacacccacagcuugccguguccgugauccugagagucgcuaaaggcuaucaggaauugcuagagaaguguuuucagaccgagaauccgcuggaaugccaagacaaaggggaggaagaacuccagaaguacauucaggaaagccaggcccuggcaaaaaggucguguggacuuuuccaaaagcugggugaguauuacuugcagaacgccuuucucguugcuuauacuaagaaagcgccccagcugacaucuuccgaguuaauggcaaucacccggaagauggccgcuacggccgcaaccugcugucagcugucagaagauaaacuacucgccugcggcgagggggcugccgacauaauuaucggacaucuguguauccgucacgaaaugacaccugugaacccaggcguaggucaaugcugcaccaguagcuacgcaaaucgcagacccuguuucuccucucuuguggucgaugagacuuaugugccuccagcguuuagcgacgauaaguucauuuuucauaaagacuugugccaggcucaggggguugcccugcagacaaugaagcaagaguuccucaucaaccuggugaagcagaaaccccagauuacugaggagcaacuugaagcagucauagccgauuucucaggacuguuggagaaguguugccagggccaggaacaggagguguguuuugcugaagagggccaaaaacucaucaguaagaccagggccgcacuggggguauga

SEQ ID NO: 431 - RNA, 1830 nt, Artificial Sequence
  derived and/or modified sequence opt4 from AFP__Homo_sapiens__AAB58754
augaaguggguggagagcaucuuccugaucuuccugcugaacuucaccgagagcagaacccugcacagaaacgaguacggcaucgccagcauccuggacagcuaccagugcaccgccgagaucagccuggccgaccuggccaccaucuucuucgcccaguucgugcaggaggccaccuacaaggaggugagcaagauggugaaggacgcccugaccgccaucgagaagcccaccggcgacgagcagagcagcggcugccuggagaaccagcugcccgccuuccuggaggagcugugccacgagaaggagauccuggagaaguacggccacagcgacugcugcagccagagcgaggagggcagacacaacugcuuccuggcccacaagaagcccacccccgccagcaucccccuguuccaggugcccgagcccgugaccagcugcgaggccuacgaggaggacagagagaccuucaugaacaaguucaucuacgagaucgccagaagacaccccuuccuguacgcccccaccauccugcugugggccgccagauacgacaagaucauccccagcugcugcaaggccgagaacgccguggagugcuuccagaccaaggccgccaccgugaccaaggagcugagagagagcagccugcugaaccagcacgccugcgccgugaugaagaacuucggcaccagaaccuuccaggccaucaccgugaccaagcugagccagaaguucaccaaggugaacuucaccgagauccagaagcuggugcuggacguggcccacgugcacgagcacugcugcagaggcgacgugcuggacugccugcaggacggcgagaagaucaugagcuacaucugcagccagcaggacacccugagcaacaagaucaccgagugcugcaagcugaccacccuggagagaggccagugcaucauccacgccgagaacgacgagaagcccgagggccugagccccaaccugaacagauuccugggcgacagagacuucaaccaguucagcagcggcgagaagaacaucuuccuggccagcuucgugcacgaguacagcagaagacacccccagcuggccgugagcgugauccugagaguggccaagggcuaccaggagcugcuggagaagugcuuccagaccgagaacccccuggagugccaggacaagggcgaggaggagcugcagaaguacauccaggagagccaggcccuggccaagagaagcugcggccuguuccagaagcugggcgaguacuaccugcagaacgccuuccugguggccuacaccaagaaggccccccagcugaccagcagcgagcugauggccaucaccagaaagauggccgccaccgccgccaccugcugccagcugagcgaggacaagcugcuggccugcggcgagggcgccgccgacaucaucaucggccaccugugcaucagacacgagaugacccccgugaaccccggcgugggccagugcugcaccagcagcuacgccaacagaagacccugcuucagcagccuggugguggacgagaccuacgugccccccgccuucagcgacgacaaguucaucuuccacaaggaccugugccaggcccagggcguggcccugcagaccaugaagcaggaguuccugaucaaccuggugaagcagaagccccagaucaccgaggagcagcuggaggccgugaucgccgacuucagcggccugcuggagaagugcugccagggccaggagcaggaggugugcuucgccgaggagggccagaagcugaucagcaagaccagagccgcccugggcguguga

SEQ ID NO: 432 - RNA, 1830 nt, Artificial Sequence
  derived and/or modified sequence opt5 from AFP__Homo_sapiens__AAB58754
augaaguggguggagagcaucuuccugauuuuucuccugaacuucaccgaauccagaacacuucaccggaaugaguacggcaucgccucuauucuggacagcuaucagugcacggcugaaaucucccucgccgaucuggcgaccauuuucuucgcucaauuuguccaggaggccacauacaaagaaguuucuaagauggugaaagacgcccuuaccgcuaucgagaagcccacaggggaugagcagagcuccggaugucuggaaaaccagcucccugccuuccuggaggaacugugccaugagaaagagauccucgaaaaguauggccacucugacuguugcagccaauccgaggaagggcgccauaauuguuuucuggcucacaagaaaccgacccccgccagcauuccucuuuuccaggugcccgagccugucacaucuugcgaagcguacgaggaggauagagaaaccuuuaugaacaaguucaucuaugagauugcccggcgccaucccuuucuguacgcuccuacgauccuccugugggccgcuagauaugacaaaauuaucccguccuguugcaaggccgaaaaugcgguggaguguuuccagaccaaagccgcuacaguuaccaaggaacuucgggagagcucucugcucaaccagcacgccugcgcugugaugaagaauuuuggaacacgcaccuuccaagccauuacggucacaaaacugucccagaaguucaccaaagugaacuuuacagagauccagaagcugguucucgauguggcccacguccaugaacacuguugcagaggcgacgugcuggauugccuucaggacggggagaaaaucaugagcuacauuuguucucaacaggauacccuguccaauaagaucaccgaaugcuguaaacucacaacgcuggagcggggacagugcauuauccaugcugaaaacgacgagaagcccgagggccuuagcccuaaucugaaccgcuuccucggcgauagagacuuuaaucaauucuccucuggggaaaagaacauuuuucuggcgagcuucgugcacgaguacucccggcgccacccccagcuggccgucagcguuauccucagaguggcuaaaggauaucaggaacugcuugagaaguguuuucagaccgagaauccucuggaaugccaagacaaaggcgaggaggaacuccagaaguacauccaggaaucucaggcccuggccaaacgguccugugggcuuuuccaaaagcugggagaguauuaccuccagaacgcuuuucugguggccuauacaaagaaagcgccccagcugaccagcucugagcucauggcuauuacacgcaagauggccgccaccgcugccacgugcugucagcugagcgaagauaaacuucuggcuugcggcgagggggccgcggacaucauuaucggacaucucuguauuagacacgaaaugacaccggucaacccuggcgugggccaaugcugcaccuccucuuacgccaaucggagacccuguuucagcucccugguuguggaugagaccuaugucccucccgcuuuuagcgacgauaaguucaucuuucauaaagaccugugccaggcccaggggguggcccuucagacaaugaagcaagaauuucucaucaaccugguuaagcagaaaccccagauuaccgaggagcaacuggaagcugugaucgcggauuucucuggacuccuggagaaguguugccagggccaggaacaggaggucuguuuugccgaagaggggcaaaaacuuauuuccaagacacgcgcugcccugggaguguga

SEQ ID NO: 433 - protein, 854 aa, Artificial Sequence
  AKAP4__Homo_sapiens__Q5JQC9
MMAYSDTTMMSDDIDWLRSHRGVCKVDLYNPEGQQDQDRKVICFVDVSTLNVEDKDYKDAASSSSEGNLNLGSLEEKEIIVIKDTEKKDQSKTEGSVCLFKQAPSDPVSVLNWLLSDLQKYALGFQHALSPSTSTCKHKVGDTEGEYHRASSENCYSVYADQVNIDYLMNRPQNLRLEMTAAKNTNNNQSPSAPPAKPPSTQRAVISPDGECSIDDLSFYVNRLSSLVIQMAHKEIKEKLEGKSKCLHHSICPSPGNKERISPRTPASKIASEMAYEAVELTAAEMRGTGEESREGGQKSFLYSELSNKSKSGDKQMSQRESKEFADSISKGLMVYANQVASDMMVSLMKTLKVHSSGKPIPASVVLKRVLLRHTKEIVSDLIDSCMKNLHNITGVLMTDSDFVSAVKRNLFNQWKQNATDIMEAMLKRLVSALIGEEKETKSQSLSYASLKAGSHDPKCRNQSLEFSTMKAEMKERDKGKMKSDPCKSLTSAEKVGEHILKEGLTIWNQKQGNSCKVATKACSNKDEKGEKINASTDSLAKDLIVSALKLIQYHLTQQTKGKDTCEEDCPGSTMGYMAQSTQYEKCGGGQSAKALSVKQLESHRAPGPSTCQKENQHLDSQKMDMSNIVLMLIQKLLNENPFKCEDPCEGENKCSEPRASKAASMSNRSDKAEEQCQEHQELDCTSGMKQANGQFIDKLVESVMKLCLIMAKYSNDGAALAELEEQAASANKPNFRGTRCIHSGAMPQNYQDSLGHEVIVNNQCSTNSLQKQLQAVLQWIAASQFNVPMLYFMGDKDGQLEKLPQVSAKAAEKGYSVGGLLQEVMKFAKERQPDEAVGKVARKQLLDWLLANL

SEQ ID NO: 434 - RNA, 2565 nt, Artificial Sequence
  AKAP4__Homo_sapiens__AAI26251
augauggcguacucugauacuacaaugaugucugaugauauugacugguuacgcagccacaggggugugugcaagguagaucucuacaacccagaaggacagcaagaucaggaccggaaagugauaugcuuugucgauguguccacccugaauguagaagauaaagauuacaaggaugcugcuaguuccagcucagaaggcaacuuaaaccugggaagucuggaagaaaaagagauuaucgugaucaaggacacugagaagaaagaccagucuaagacagagggaucuguaugccuuuucaaacaagcucccucugauccuguaaguguccucaacuggcuucucagugaucuccagaaguaugccuuggguuuccaacaugcacugagccccucaaccucuaccuguaaacauaaaguaggagacacagagggcgaauaucacagagcauccucugagaacugcuacagugucuaugccgaucaagugaacauagauuauuugaugaacagaccucaaaaccuacgucuagaaaugacagcagcuaaaaacaccaacaauaaucaaaguccuucagcuccuccagccaaaccuccuagcacucagagagcagucauuuccccugauggagaauguucuauagaugaccuuuccuucuacgucaaccgacuaucuucucugguaauccagauggcccauaaggaaaucaaggagaaguuggaagguaaaagcaaaugccuucaucauucaaucuguccauccccugggaacaaagagagaaucaguccccgaacuccugcgagcaagauugcuucugaaauggccuaugaagcuguggaacugacagcugcagaaaugcguggcacuggagaggaguccagggaagguggccagaaaagcuuucuauauagcgaauuauccaacaagagcaaaaguggagacaaacagaugucccagagagagagcaaagaauuugcagauuccaucagcaaggggcucaugguuuaugcaaaucagguggcaucugacaugauggucucucucaugaagaccuugaaagugcacagcucugggaagccaauuccagcaucugugguccugaagaggguguugcuaaggcacaccaaggagauuguguccgauuugauugauucuugcaugaagaaccugcauaauauuacugggguccugaugacugacucagacuuugucucagcugucaagagaaaucuguucaaccaguggaaacaaaaugcuacagacaucauggaggccaugcugaagcgcuuggucagugcccuuauaggugaggagaaggagacuaagucucagagucugucauaugcaucuuuaaaagcugggucccaugaucccaaaugcaggaaucagagucuugaauucuccaccaugaaagcugaaaugaaagagagggacaaaggcaaaaugaaaucagacccaugcaagucacugacuagugcugagaaagucggugaacacauucucaaagagggccuaaccaucuggaaccaaaagcaaggaaacucaugcaagguggcuaccaaagcaugcagcaauaaagaugagaaaggagaaaagaucaaugcuuccacagauucacuggccaaggaccugauugucucugcccuuaagcugauccaguaccaucugacccagcagacuaagggcaaagauacaugugaagaagacuguccugguuccaccaugggcuauauggcucagaguacucaauaugaaaaguguggagguggccaaagugccaaagcacuuucagugaaacaacuagaaucucacagagccccuggaccauccaccugucaaaaggagaaccaacaccuggacucccagaaaauggauaugucaaacaucguucuaaugcugauucagaaacugcuuaaugagaaccccuucaaaugugaggauccaugcgaaggugagaacaaguguucugagcccagggcaagcaaagcagcuuccauguccaacagaucugacaaagcggaagaacaaugccaggagcaucaagaacuugacuguaccagugggaugaagcaagcgaacgggcaauuuauagauaaacuaguagaaucugugaugaagcucugccuuaucauggcuaaguauagcaacgauggggcagcccuugcugaguuggaagaacaagcagccucggcaaauaagcccaauuucaggggcaccagaugcauucacaguggugcaaugccacagaacuaucaagacucucuuggacaugaaguaauugucaauaaucagugcucuacaaauagcuugcagaagcagcuccaggcuguccugcaguggauugcagccucccaguuuaacgugcccaugcucuacuucaugggagauaaggauggacaacuggaaaagcuuccucagguuucagcuaaagcagcagagaagggguacaguguaggaggucuucuucaagaggucaugaaguuugccaaggaacggcaaccagaugaagcugugggaaagguggccaggaaacaguugcuggacuggcugcucgcuaaccuguga

SEQ ID NO: 435 - RNA, 2565 nt, Artificial Sequence
  derived and/or modified sequence opt1 from AKAP4__Homo_sapiens__AAI26251
augauggccuacagcgacaccaccaugauguccgacgacaucgacuggcugcgcagccaccggggcgugugcaaggucgaccucuacaaccccgaggggcagcaggaccaggaccgcaaggugaucugcuucguggacgucuccacccugaacguggaggacaaggacuacaaggacgccgcgagcuccagcuccgagggcaaccugaaccucgggagccuggaggagaaggagaucaucgugaucaaggacaccgagaagaaggaccaguccaagaccgagggcagcgucugccuguucaagcaggccccguccgaccccgugagcgugcucaacuggcugcuguccgaccuccagaaguacgcccugggguuccagcacgcccugagccccuccaccagcacgugcaagcacaaggucggcgacaccgagggcgaguaccaccgggccuccagcgagaacugcuacuccguguacgcggaccaggugaacaucgacuaccucaugaaccgcccccagaaccugcggcuggagaugaccgccgccaagaacaccaacaacaaccagagcccgagcgccccgcccgcgaagccgcccuccacgcagcgcgccgucaucagccccgacggggagugcuccaucgacgaccucagcuucuacgugaaccggcuguccagccuggugauccagauggcccacaaggagaucaaggagaagcucgagggcaaguccaagugccugcaccacagcaucugccccucccccgggaacaaggagcgcaucagcccccggacccccgccuccaagaucgccagcgagauggcguacgaggccgucgagcugaccgccgccgagaugcgcggcaccggggaggagucccgggagggcggccagaaguccuuccucuacagcgagcugagcaacaaguccaagagcggggacaagcagaugucccagcgcgagagcaaggaguucgccgacagcaucuccaagggccugaugguguacgcgaaccagguggccagcgacaugauggucucccucaugaagacgcugaaggugcacagcuccgggaagcccauccccgccagcgugguccugaagcgggugcuccugcgccacaccaaggagaucguguccgaccugaucgacagcugcaugaagaaccuccacaacaucaccggcguccugaugaccgacuccgacuucgugagcgccgucaagcggaaccuguucaaccaguggaagcagaacgccacggacaucauggaggcgaugcucaagcgccugguguccgcccugaucggcgaggagaaggagaccaagagccagucccucagcuacgccucccugaaggccgggagccacgacccgaagugccggaaccagucccuggaguucagcaccaugaaggccgagaugaaggagcgcgacaagggcaagaugaaguccgaccccugcaagagccucaccagcgcggagaaggugggggagcacauccugaaggagggccugacgaucuggaaccagaagcaggggaacuccugcaaggucgccaccaaggccugcagcaacaaggacgagaagggcgagaagaucaacgccuccaccgacagccucgcgaaggaccugaucguguccgcccugaagcucauccaguaccaccugacccagcagacgaagggcaaggacacgugcgaggaggacugccccgggagcaccaugggcuacauggcccaguccacccaguacgagaagugcgggggcgggcagagcgccaaggcccuguccgugaagcagcucgagagccaccgggcgcccggcccguccacgugccagaaggagaaccagcaccuggacagccagaagauggacauguccaacaucguccugaugcugauccagaagcuccugaacgagaaccccuucaagugcgaggaccccugcgagggcgagaacaagugcagcgagccccgcgccuccaaggccgccagcauguccaaccggagcgacaaggccgaggagcagugccaggagcaccaggagcuggacugcaccagcgggaugaagcaggcgaacggccaguucaucgacaagcucguggaguccgugaugaagcugugccugaucauggccaaguacagcaacgacggggccgcccucgccgagcuggaggagcaggcggccuccgccaacaagccgaacuuccgcggcacccgcugcauccacagcggggccaugccccagaacuaccaggacucccugggccacgaggucaucgugaacaaccagugcagcaccaacucccuccagaagcagcugcaggcggugcugcaguggaucgccgccagccaguucaacguccccaugcucuacuucaugggcgacaaggacgggcagcuggagaagcugccccagguguccgccaaggccgcggagaagggcuacagcgucgggggccuccugcaggaggugaugaaguucgccaaggagcggcagccggacgaggccgugggcaagguggcccgcaagcagcugcucgacuggcugcuggccaaccucuga

SEQ ID NO: 436 - RNA, 2565 nt, Artificial Sequence
  derived and/or modified sequence opt2 from AKAP4__Homo_sapiens__AAI26251
augauggccuacuccgacaccaccaugauguccgacgacaucgacuggcuccgcucccaccgcggcgucugcaaggucgaccucuacaaccccgagggccagcaggaccaggaccgcaaggucaucugcuucgucgacgucuccacccucaacgucgaggacaaggacuacaaggacgccgccuccuccuccuccgagggcaaccucaaccucggcucccucgaggagaaggagaucaucgucaucaaggacaccgagaagaaggaccaguccaagaccgagggcuccgucugccucuucaagcaggcccccuccgaccccgucuccguccucaacuggcuccucuccgaccuccagaaguacgcccucggcuuccagcacgcccucucccccuccaccuccaccugcaagcacaaggucggcgacaccgagggcgaguaccaccgcgccuccuccgagaacugcuacuccgucuacgccgaccaggucaacaucgacuaccucaugaaccgcccccagaaccuccgccucgagaugaccgccgccaagaacaccaacaacaaccagucccccuccgccccccccgccaagccccccuccacccagcgcgccgucaucucccccgacggcgagugcuccaucgacgaccucuccuucuacgucaaccgccucuccucccucgucauccagauggcccacaaggagaucaaggagaagcucgagggcaaguccaagugccuccaccacuccaucugccccucccccggcaacaaggagcgcaucuccccccgcacccccgccuccaagaucgccuccgagauggccuacgaggccgucgagcucaccgccgccgagaugcgcggcaccggcgaggagucccgcgagggcggccagaaguccuuccucuacuccgagcucuccaacaaguccaaguccggcgacaagcagaugucccagcgcgaguccaaggaguucgccgacuccaucuccaagggccucauggucuacgccaaccaggucgccuccgacaugauggucucccucaugaagacccucaagguccacuccuccggcaagcccauccccgccuccgucguccucaagcgcguccuccuccgccacaccaaggagaucgucuccgaccucaucgacuccugcaugaagaaccuccacaacaucaccggcguccucaugaccgacuccgacuucgucuccgccgucaagcgcaaccucuucaaccaguggaagcagaacgccaccgacaucauggaggccaugcucaagcgccucgucuccgcccucaucggcgaggagaaggagaccaagucccagucccucuccuacgccucccucaaggccggcucccacgaccccaagugccgcaaccagucccucgaguucuccaccaugaaggccgagaugaaggagcgcgacaagggcaagaugaaguccgaccccugcaagucccucaccuccgccgagaaggucggcgagcacauccucaaggagggccucaccaucuggaaccagaagcagggcaacuccugcaaggucgccaccaaggccugcuccaacaaggacgagaagggcgagaagaucaacgccuccaccgacucccucgccaaggaccucaucgucuccgcccucaagcucauccaguaccaccucacccagcagaccaagggcaaggacaccugcgaggaggacugccccggcuccaccaugggcuacauggcccaguccacccaguacgagaagugcggcggcggccaguccgccaaggcccucuccgucaagcagcucgagucccaccgcgcccccggccccuccaccugccagaaggagaaccagcaccucgacucccagaagauggacauguccaacaucguccucaugcucauccagaagcuccucaacgagaaccccuucaagugcgaggaccccugcgagggcgagaacaagugcuccgagccccgcgccuccaaggccgccuccauguccaaccgcuccgacaaggccgaggagcagugccaggagcaccaggagcucgacugcaccuccggcaugaagcaggccaacggccaguucaucgacaagcucgucgaguccgucaugaagcucugccucaucauggccaaguacuccaacgacggcgccgcccucgccgagcucgaggagcaggccgccuccgccaacaagcccaacuuccgcggcacccgcugcauccacuccggcgccaugccccagaacuaccaggacucccucggccacgaggucaucgucaacaaccagugcuccaccaacucccuccagaagcagcuccaggccguccuccaguggaucgccgccucccaguucaacguccccaugcucuacuucaugggcgacaaggacggccagcucgagaagcucccccaggucuccgccaaggccgccgagaagggcuacuccgucggcggccuccuccaggaggucaugaaguucgccaaggagcgccagcccgacgaggccgucggcaaggucgcccgcaagcagcuccucgacuggcuccucgccaaccucuga

SEQ ID NO: 437 - RNA, 2565 nt, Artificial Sequence
  derived and/or modified sequence opt3 from AKAP4__Homo_sapiens__AAI26251
augauggccuacagcgacaccacaaugauguccgaugacaucgauuggcugagaucucacaggggcgugugcaaggucgaccucuauaaccccgaggggcagcaagaucaggaccggaaaguuauuuguuucguggauguaucaacucuuaauguggaagacaaggauuacaaagacgcugcaaguagcuccucugagggaaaccugaauuuggguucguuagaagagaaggaaauaaucgucauuaaagauacggagaagaaggaccagucaaaaaccgagggcagcgugugccuguuuaagcaggccccuagugauccaguuuccgugcuaaacuggcuccugucugaccuucaaaaauaugcgcugggguuccagcaugcuuugagcccguccacaucaacuuguaagcacaaagucggagacaccgaaggcgaguaccaucgcgccaguagcgaaaauugcuauucuguguacgcagaucagguaaacaucgacuaucucaugaaucgaccccagaaccugcgucuggagaugacagccgcuaagaauaccaacaauaaccaauccccuucagcaccacccgccaagccuccaagcacucagagagcuguuauuagucccgauggugaguguucuaucgacgaucucuccuuuuacgugaauagguuaagcucgcuggucauacagauggcccacaaagaaaucaaggagaaacuugaagggaagucuaaaugcuugcaucacuccauuuguccuucaccaggaaacaaggagcggaucaguccgcgcacacccgcgagcaaaauugcauccgaaauggccuacgaggcuguggagcugaccgccgcagaaaugagaggcacgggcgaggaaucuagggaagggggacaaaagagcuuccuauauucagaacucaguaauaaguccaaaagcggugacaagcagaugucucagcgggagucaaaagaguuugcugauaguaucagcaagggccugaugguguacgccaaccaggucgcguccgacaugaugguuucucuuaugaaaacucugaaggugcacucgagcgggaagccuauaccagccuccguaguguugaaacgcguccuccugcgacauaccaaggaaauugugucagauuuaaucgacaguugcaugaaaaaccugcacaauauuacaggaguucucaugacugauucugacuucgugagcgcagucaagagaaaccuuuuuaaucaauggaaacagaacgcuaccgacaucauggaggccaugcugaagagguugguguccgcucuaaucggcgaagagaaggaaacaaaaucacagagccugucuuaugccucccucaaggcagguagucaugaucccaaaugucggaaucagagccuggaguucucuaccaugaaggccgagaugaaagaacgugacaaggggaagaugaaauccgauccuugcaagucacuuacgagugcugagaaaguaggagaacacauucugaaggagggcuugacuauauggaaccaaaaacagggcaauagcuguaagguugcgacaaaagcaugcucgaacaaggacgagaagggggagaaaaucaaugccuccaccgauucucucgcuaaggaccugauugugagcgccuuaaaacugauccaguaccaccuaacucagcaaacaaagggaaaagauaccugcgaggaagacuguccagguucaacgaugggcuauauggcacagaguacccaguacgagaagugcgggggaggccaguccgccaaggcucucucugucaaacaacuggaaagccaucgcgcccccgguccguccacaugucagaaggagaaccagcaccuugauucacagaaaauggacaugagcaauauaguguugaugcugauucaaaagcuccugaacgagaauccuuuuaaaugcgaagaucccugugagggggaaaacaagugcagugagccaagagcaucuaaggcggcuuccaugagcaauaggucggacaaagccgaggaacagugucaggagcaucaagaacuugauugcacuucaggcaugaagcaggcaaacggacaguucaucgacaaacuggucgagucugugaugaaguugugucucaucauggccaaauauaguaacgacggcgcugcccuggcagaauuagaggaacaggcugccuccgcgaauaagccuaacuuucgggggacccgaugcauucacagcggagccaugccccaaaauuaccaggauucucugggucaugagguuaucgugaacaaucaguguagcacaaacucccuacagaagcaacuccaggcuguacugcaguggauugcagccucacaguucaaugucccaaugcuuuacuuuaugggcgacaaagaugggcaauuggagaagcugccccaggugagugcuaaagccgcagaaaagggauauagcguuggcggucuccugcaggaggugaugaaauucgcgaaggaacgccaaccugacgaggccgucgggaaaguggcuagaaagcaguuacuggauuggcuuuuggccaaccucuga

SEQ ID NO: 438 - RNA, 2565 nt, Artificial Sequence
  derived and/or modified sequence opt4 from AKAP4__Homo_sapiens__AAI26251
augauggccuacagcgacaccaccaugaugagcgacgacaucgacuggcugagaagccacagaggcgugugcaagguggaccuguacaaccccgagggccagcaggaccaggacagaaaggugaucugcuucguggacgugagcacccugaacguggaggacaaggacuacaaggacgccgccagcagcagcagcgagggcaaccugaaccugggcagccuggaggagaaggagaucaucgugaucaaggacaccgagaagaaggaccagagcaagaccgagggcagcgugugccuguucaagcaggcccccagcgaccccgugagcgugcugaacuggcugcugagcgaccugcagaaguacgcccugggcuuccagcacgcccugagccccagcaccagcaccugcaagcacaaggugggcgacaccgagggcgaguaccacagagccagcagcgagaacugcuacagcguguacgccgaccaggugaacaucgacuaccugaugaacagaccccagaaccugagacuggagaugaccgccgccaagaacaccaacaacaaccagagccccagcgccccccccgccaagccccccagcacccagagagccgugaucagccccgacggcgagugcagcaucgacgaccugagcuucuacgugaacagacugagcagccuggugauccagauggcccacaaggagaucaaggagaagcuggagggcaagagcaagugccugcaccacagcaucugccccagccccggcaacaaggagagaaucagccccagaacccccgccagcaagaucgccagcgagauggccuacgaggccguggagcugaccgccgccgagaugagaggcaccggcgaggagagcagagagggcggccagaagagcuuccuguacagcgagcugagcaacaagagcaagagcggcgacaagcagaugagccagagagagagcaaggaguucgccgacagcaucagcaagggccugaugguguacgccaaccagguggccagcgacaugauggugagccugaugaagacccugaaggugcacagcagcggcaagcccauccccgccagcguggugcugaagagagugcugcugagacacaccaaggagaucgugagcgaccugaucgacagcugcaugaagaaccugcacaacaucaccggcgugcugaugaccgacagcgacuucgugagcgccgugaagagaaaccuguucaaccaguggaagcagaacgccaccgacaucauggaggccaugcugaagagacuggugagcgcccugaucggcgaggagaaggagaccaagagccagagccugagcuacgccagccugaaggccggcagccacgaccccaagugcagaaaccagagccuggaguucagcaccaugaaggccgagaugaaggagagagacaagggcaagaugaagagcgaccccugcaagagccugaccagcgccgagaaggugggcgagcacauccugaaggagggccugaccaucuggaaccagaagcagggcaacagcugcaagguggccaccaaggccugcagcaacaaggacgagaagggcgagaagaucaacgccagcaccgacagccuggccaaggaccugaucgugagcgcccugaagcugauccaguaccaccugacccagcagaccaagggcaaggacaccugcgaggaggacugccccggcagcaccaugggcuacauggcccagagcacccaguacgagaagugcggcggcggccagagcgccaaggcccugagcgugaagcagcuggagagccacagagcccccggccccagcaccugccagaaggagaaccagcaccuggacagccagaagauggacaugagcaacaucgugcugaugcugauccagaagcugcugaacgagaaccccuucaagugcgaggaccccugcgagggcgagaacaagugcagcgagcccagagccagcaaggccgccagcaugagcaacagaagcgacaaggccgaggagcagugccaggagcaccaggagcuggacugcaccagcggcaugaagcaggccaacggccaguucaucgacaagcugguggagagcgugaugaagcugugccugaucauggccaaguacagcaacgacggcgccgcccuggccgagcuggaggagcaggccgccagcgccaacaagcccaacuucagaggcaccagaugcauccacagcggcgccaugccccagaacuaccaggacagccugggccacgaggugaucgugaacaaccagugcagcaccaacagccugcagaagcagcugcaggccgugcugcaguggaucgccgccagccaguucaacgugcccaugcuguacuucaugggcgacaaggacggccagcuggagaagcugccccaggugagcgccaaggccgccgagaagggcuacagcgugggcggccugcugcaggaggugaugaaguucgccaaggagagacagcccgacgaggccgugggcaagguggccagaaagcagcugcuggacuggcugcuggccaaccuguga

SEQ ID NO: 439 - RNA, 2565 nt, Artificial Sequence
  derived and/or modified sequence opt5 from AKAP4__Homo_sapiens__AAI26251
augauggccuacagcgacaccacaaugauguccgaugacaucgauuggcugagaucucaccggggcgugugcaaggucgaccucuauaaccccgaggggcagcaagaucaggaccgcaaaguuauuuguuucguggaugugagcacgcugaaugucgaagacaaggauuacaaagacgcugccuccucuagcuccgagggaaaccuuaaucugggcucucucgaagagaaggaaaucauugugaucaaagauaccgagaagaaggaccagagcaaaacagagggguccguuugccuguuuaagcaggcgccuagcgauccggugucuguccuuaacuggcugcucuccgaccugcaaaaauaugcucugggauuccagcaugcccucagccccucuaccuccacauguaagcacaaagugggcgacaccgaaggggaguaccauagagccagcucugaaaauugcuauuccguuuacgcugaucaggugaacauugacuaucugaugaaucggccucagaaccuucgccuggagaugacagccgcuaagaauaccaacaauaaccaaagccccuccgccccucccgcgaagccuccgucuacgcagagagccgucaucagccccgauggagaguguuccaucgacgaucucagcuuuuacgugaaucggcugucuucccuugugauucagauggcucacaaagaaaucaaggagaaacuggaaggcaagagcaaaugccuccaucacucuauuuguccuagccccggcaacaaggagcgcaucuccccuagaacccccgccucuaaaauugcuagcgaaauggccuacgaggcggucgagcugacagccgcugaaaugcgggggaccggagaggaaucccgcgagggcgggcagaagucuuuccuguauucugaacucuccaauaagagcaaaucuggagacaagcaaaugucccagagagagagcaaagaguuugccgauuccaucucuaagggccugaugguuuacgcuaaccagguggccagcgacaugauggugucccuuaugaaaacacugaagguccacucuagcgggaagccgauuccugccuccgugguucucaaacgggugcugcuucgccauaccaaggaaaucgucagcgaucugaucgacucuugcaugaaaaaccuccacaauauuacgggagugcugaugacagauuccgacuucguuagcgcugugaagagaaaccuguuuaaucaauggaaacagaacgcgaccgacaucauggaggccaugcucaagcggcuggucucugcucuuauuggcgaagagaaggaaacaaaaucccagagccugucuuaugccagccucaaggccggcucccaugaucccaaaugucgcaaucagagccuggaguucucuaccaugaaggcugagaugaaagaaagagacaaggggaagaugaaauccgauccuugcaagagccuuaccuccgccgagaaagugggagaacacauccugaaggagggccucacaauuuggaaccaaaaacaggggaauagcuguaaggucgcgacgaaggcuugcagcaacaaagacgagaagggagagaaaaucaaugccuccaccgauucucuggccaaggaccugaucgugagcgcucucaaacugauucaguaccaccuuacacagcaaaccaagggcaaagauacaugcgaggaagacugucccggguccaccaugggauauauggcccagucuacgcaguacgagaagugcggcggcgggcagagcgcuaaggcccuguccguuaaacaacucgaaagccaucgggcgcccggaccuucuacaugucagaaggagaaccagcaccuggauucccagaaaauggacaugagcaauaucgugcugaugcuuauucaaaagcuccugaacgagaauccguuuaaaugcgaagaucccugugagggcgaaaacaagugcucugagccuagagccuccaaggcugccagcaugucuaaucgcuccgacaaagcugaagaacagugucaggagcaucaagaacuggauugcaccagcgggaugaagcaggccaacggacaguucaucgacaaacucgucgaguccgugaugaagcugugucuuauuauggcgaaauauagcaacgacggcgccgcucuggccgaacucgaggaacaggcugccucugccaauaagcccaacuuucgggggaccagaugcauccacagcggcgcuaugccucaaaauuaccaggauucccugggacaugagguuaucgugaacaaucaguguucuacaaacagccugcagaagcaacuucaggcgguccuccaguggauugccgcuucccaguucaaugugcccaugcuguacuuuaugggcgacaaagaugggcaacuggagaagcucccucaggugucugccaaagccgcugaaaagggauauagcguuggcgggcugcuucaggaggucaugaaauucgccaaggaacgccaaccggacgaggcggugggaaaaguggcucggaagcagcugcucgauuggcugcuggccaaccuuuga

SEQ ID NO: 440 - protein, 416 aa, Artificial Sequence
  alpha-actinin-_4/m__Homo_sapiens__B4DSX0
MVDYHAANQSYQYGPSSAGNGAGGGGSMGDYMAQEDDWDRDLLLDPAWEKQQRKTFTAWCNSHLRKAGTQIENIDEDFRDGLKLMLLLEVISGERLPKPERGKMRVHKINNVNKALDFIASKGVKLVSIGAEEIVDGNAKMTLGMIWTIILRFAIQDISVEETSAKEGLLLWCQRKTAPYKNVNVQNFHISWKDGLAFNALIHRHRPELIEYDKLRKDDPVTNLNNAFEVAEKYLDIPKMLDAEDIVNTARPDEKAIMTYVSSFYHAFSGAQKAETAANRICKVLAVNQENEHLMEDYEKLASDLLEWIRRTIPWLEDRVPQKTIQEMQQKLEDFRDYRRVHKPPKVQEKCQLEINFNTLQTKLRLSNRPAFMPSWRSRASSSPTSTCAASSPARPMLWGPGSRPRWRRSGASPLR

SEQ ID NO: 441 - RNA, 1251 nt, Artificial Sequence
  alpha-actinin-_4/m__Homo_sapiens__BAG61782
augguggacuaccacgcggcgaaccagucguaccaguacggccccagcagcgcgggcaauggcgcuggcggcgggggcagcaugggcgacuacauggcccaggaggacgacugggaccgggaccugcugcuggacccggccugggagaagcagcagcgcaagaccuucacggcauggugcaacucccaccugcggaaggcaggcacacagaucgagaacauugaugaggacuuccgagacgggcucaagcucaugcugcuccuggaggucauaucaggggagcgguuaccuaagccggagcgggggaagaugagagugcacaaaaucaacaaugugaacaaagcgcuggacuuuauugccagcaaaggcgucaagcuggucuccaucggggcagaagagauuguggacggcaacgcaaagaugacccugggaaugaucuggaccaucauccuuagguucgccauccaggacaucuccguggaagagaccucggccaaggaagggcuccuucucuggugccagagaaagacagccccguauaagaacgucaaugugcagaacuuccacaucagcuggaaggauggucuugccuucaaugcccugauccaccggcacagaccagagcugauugaguaugacaagcugaggaaggacgacccugucaccaaccugaacaaugccuucgaaguggcugagaaauaccucgacauccccaagaugcuggaugcagaggacaucgugaacacggcccggcccgacgagaaggccauaaugaccuauguguccagcuucuaccaugccuuuucaggagcgcagaaggcugaaacugccgccaaccggaucuguaaggugcuggcugucaaccaagagaacgagcaccugauggaggacuacgagaagcuggccagcgaccuccuggaguggauccggcgcaccauccccuggcuggaggaccgugugccccaaaagacuauccaggagaugcagcagaagcuggaggacuuccgcgacuaccggcgugugcacaagccgcccaaggugcaggagaagugccagcuggagaucaacuucaacacgcugcagaccaagcugcgccucagcaaccggcccgccuucaugcccuccuggaggagcagagcaagcagcaguccaacgagcaccugcgccgccaguucgccagccaggccaauguuguggggcccuggauccagaccaagauggaggagaucgggcgcaucuccauugagauga

SEQ ID NO: 442 - RNA, 1251 nt, Artificial Sequence
  derived and/or modified sequence opt1 from alpha-actinin-_4/m__Homo_sapiens__BAG61782
augguggacuaccacgccgccaaccaguccuaccaguacggccccuccagcgcggggaacggcgccgggggcgggggcuccaugggcgacuacauggcccaggaggacgacugggaccgcgaccugcuccuggacccggccugggagaagcagcagcggaagaccuucaccgccuggugcaacagccaccuccgcaaggcggggacccagaucgagaacaucgacgaggacuuccgggacggccugaagcugaugcugcuccuggaggucaucuccggggagcgccugcccaagcccgagcggggcaagaugcgcgugcacaagaucaacaacgugaacaaggcccucgacuucaucgccagcaagggggucaagcugguguccaucggcgccgaggagaucguggacggcaacgcgaagaugacccuggggaugaucuggaccaucauccuccgguucgccauccaggacaucagcgucgaggagaccuccgccaaggagggccugcugcucuggugccagcgcaagacggcccccuacaagaacgugaacgugcagaacuuccacaucagcuggaaggacgggcuggccuucaacgcgcugauccaccggcaccgcccggagcucaucgaguacgacaagcugcggaaggacgaccccgucaccaaccugaacaacgccuucgagguggccgagaaguaccucgacauccccaagaugcuggacgccgaggacaucgugaacaccgcccgccccgacgagaaggcgaucaugaccuacgucuccagcuucuaccacgccuucuccggcgcccagaaggccgagacggccgcgaaccggaucugcaaggugcuggccgugaaccaggagaacgagcaccucauggaggacuacgagaagcuggccagcgaccugcucgaguggauccgccggaccaucccguggcuggaggaccgcgucccccagaagaccauccaggagaugcagcagaagcuggaggacuuccgggacuaccgccgggugcacaagccgcccaaggugcaggagaagugccagcucgagaucaacuucaacacccugcagacgaagcugcgccucuccaaccggcccgccuucaugcccagcuggcgcucccgcgccagcuccagccccaccagcacgugcgcggccuccagccccgcccggccgaugcuguggggccccgggucccgcccccgguggcgccggagcggcgccagcccccugcgcuga

SEQ ID NO: 443 - RNA, 1251 nt, Artificial Sequence
  derived and/or modified sequence opt2 from alpha-actinin-_4/m__Homo_sapiens__BAG61782
auggucgacuaccacgccgccaaccaguccuaccaguacggccccuccuccgccggcaacggcgccggcggcggcggcuccaugggcgacuacauggcccaggaggacgacugggaccgcgaccuccuccucgaccccgccugggagaagcagcagcgcaagaccuucaccgccuggugcaacucccaccuccgcaaggccggcacccagaucgagaacaucgacgaggacuuccgcgacggccucaagcucaugcuccuccucgaggucaucuccggcgagcgccuccccaagcccgagcgcggcaagaugcgcguccacaagaucaacaacgucaacaaggcccucgacuucaucgccuccaagggcgucaagcucgucuccaucggcgccgaggagaucgucgacggcaacgccaagaugacccucggcaugaucuggaccaucauccuccgcuucgccauccaggacaucuccgucgaggagaccuccgccaaggagggccuccuccucuggugccagcgcaagaccgcccccuacaagaacgucaacguccagaacuuccacaucuccuggaaggacggccucgccuucaacgcccucauccaccgccaccgccccgagcucaucgaguacgacaagcuccgcaaggacgaccccgucaccaaccucaacaacgccuucgaggucgccgagaaguaccucgacauccccaagaugcucgacgccgaggacaucgucaacaccgcccgccccgacgagaaggccaucaugaccuacgucuccuccuucuaccacgccuucuccggcgcccagaaggccgagaccgccgccaaccgcaucugcaagguccucgccgucaaccaggagaacgagcaccucauggaggacuacgagaagcucgccuccgaccuccucgaguggauccgccgcaccauccccuggcucgaggaccgcgucccccagaagaccauccaggagaugcagcagaagcucgaggacuuccgcgacuaccgccgcguccacaagccccccaagguccaggagaagugccagcucgagaucaacuucaacacccuccagaccaagcuccgccucuccaaccgccccgccuucaugcccuccuggcgcucccgcgccuccuccucccccaccuccaccugcgccgccuccucccccgcccgccccaugcucuggggccccggcucccgcccccgcuggcgccgcuccggcgccuccccccuccgcuga

SEQ ID NO: 444 - RNA, 1251 nt, Artificial Sequence
  derived and/or modified sequence opt3 from alpha-actinin-_4/m__Homo_sapiens__BAG61782
augguggacuaccacgccgcuaaccagagcuaucaauacggccccuccucugcagggaauggagccgguggcgggggaucaaugggcgauuauauggcgcaggaggacgauugggacagagaucugcuccuugacccugcuugggaaaagcagcagaggaaaaccuucacagccuggugcaacagucaucugcggaaggcagguacucaaaucgagaauauugaugaagacuuucgcgauggguugaaauuaaugcugcuacucgaggucauaagcggagaacgacugccaaagccggagcguggcaaaaugagaguucacaagaucaacaaugugaacaaggcccuugacuucauugcuuccaaaggcguaaagcuggugucuaucggggcagaggaaauugucgauggaaaugccaaaaugacguuggguaugaucuggaccauaauccucagguuugcuauucaggacaucucgguggaggaaacaucagccaaggagggccugcugcucuggugucagcggaaaacugcgcccuacaagaacguuaaugugcagaacuuccauauuagcuggaaggauggguuagcauuuaaugcccugauccaccgccauagaccugagcuuauagaauaugacaaauugaggaaggacgauccagucaccaaccugaauaacgcuuucgagguggccgaaaaauaccuagacauucccaagaugcucgaugcagaggacaucguaaauacagcucggccugaugaaaaagccauuaugaccuauguuaguuccuuuuaccacgcguucucuggagcccaaaaggcagagacugcugccaaccgcaucugcaaagugcuggcugucaaccaggagaaugaacaccuuauggaggacuacgaaaagcuggccagcgauuugcucgaguggauccgaagaacaauuccauggcuggaagacagggugccccagaagaccauacaggagaugcaacagaaauuagaggauuuucgggacuaucgucgcgugcauaagccuccaaaaguccaggaaaagugucaacuggagaucaacuucaauacgcuccagacuaaacuuagacuguccaacaggccggcauuuaugcccucauggcggagucgagccucuagcuccccuaccucaacaugcgcugcgagcaguccagcacgccccauguuguggggcccugguucuagaccaagguggcggcgcuccggggccagcccccuaagauga

SEQ ID NO: 445 - RNA, 1251 nt, Artificial Sequence
  derived and/or modified sequence opt4 from alpha-actinin-_4/m__Homo_sapiens__BAG61782
augguggacuaccacgccgccaaccagagcuaccaguacggccccagcagcgccggcaacggcgccggcggcggcggcagcaugggcgacuacauggcccaggaggacgacugggacagagaccugcugcuggaccccgccugggagaagcagcagagaaagaccuucaccgccuggugcaacagccaccugagaaaggccggcacccagaucgagaacaucgacgaggacuucagagacggccugaagcugaugcugcugcuggaggugaucagcggcgagagacugcccaagcccgagagaggcaagaugagagugcacaagaucaacaacgugaacaaggcccuggacuucaucgccagcaagggcgugaagcuggugagcaucggcgccgaggagaucguggacggcaacgccaagaugacccugggcaugaucuggaccaucauccugagauucgccauccaggacaucagcguggaggagaccagcgccaaggagggccugcugcuguggugccagagaaagaccgcccccuacaagaacgugaacgugcagaacuuccacaucagcuggaaggacggccuggccuucaacgcccugauccacagacacagacccgagcugaucgaguacgacaagcugagaaaggacgaccccgugaccaaccugaacaacgccuucgagguggccgagaaguaccuggacauccccaagaugcuggacgccgaggacaucgugaacaccgccagacccgacgagaaggccaucaugaccuacgugagcagcuucuaccacgccuucagcggcgcccagaaggccgagaccgccgccaacagaaucugcaaggugcuggccgugaaccaggagaacgagcaccugauggaggacuacgagaagcuggccagcgaccugcuggaguggaucagaagaaccauccccuggcuggaggacagagugccccagaagaccauccaggagaugcagcagaagcuggaggacuucagagacuacagaagagugcacaagccccccaaggugcaggagaagugccagcuggagaucaacuucaacacccugcagaccaagcugagacugagcaacagacccgccuucaugcccagcuggagaagcagagccagcagcagccccaccagcaccugcgccgccagcagccccgccagacccaugcuguggggccccggcagcagacccagauggagaagaagcggcgccagcccccugagauga

SEQ ID NO: 446 - RNA, 1251 nt, Artificial Sequence
  derived and/or modified sequence opt5 from alpha-actinin-_4/m__Homo_sapiens__BAG61782
augguggacuaccacgccgcuaaccagagcuaucaauacggccccuccucugccgggaauggagcgggcgggggaggcagcaugggggauuauauggcucaggaggacgauugggacagagaucugcuccuggacccugccugggaaaagcagcagcggaaaaccuucacagccuggugcaacucccaucuucgcaaggcuggaacgcaaaucgagaauauugaugaagacuuuagagauggccugaaacucaugcugcuucuggaggucaucucuggcgaacggcucccgaagcccgagcgcgggaaaaugagaguucacaagauuaacaaugugaacaaggcccuggacuucaucgcuagcaaaggagugaagcuggucuccauuggcgccgaggaaaucguggaugggaaugcgaaaaugacccucggaaugaucuggacaauuauccugcgguuugccauucaggacaucucuguugaggaaaccagcgcuaaggagggccuucugcucuggugucagcgcaaaacagccccuuacaagaacgugaauguccagaacuuccauauuuccuggaaggaugggcuggcuuuuaaugcccuuauccacagacaucggcccgagcugauugaauaugacaaacuccgcaaggacgauccugugaccaaccugaauaacgcguucgagguugccgaaaaauaccuggacauccccaagaugcucgaugcugaggacaucgugaauacagccagaccugaugaaaaagcuauuaugaccuaugucagcucuuuuuaccacgccuucuccggagcccaaaaggcugagacggcggccaaccggaucugcaaagugcuggcugugaaccaggagaaugaacaccuuauggaggacuacgaaaagcuggccagcgaucuccuggaguggauucgcagaaccaucccguggcuugaagaccgggucccccagaagacaauucaggagaugcaacagaaacuggaggauuuucgcgacuauagacggguucauaagccucccaaagugcaggaaaagugucaacucgagaucaacuucaauacccugcagacaaaacugagacucucuaaccgcccugccuuuaugcccuccuggcggagcagagcuucuuccagcccgaccuccacgugcgccgcgucuagcccugcucgccccaugcuguggggcccuggcucccggcccagauggcgccggagcggggccucuccccuuagauga

SEQ ID NO: 447 - protein, 562 aa, Artificial Sequence [sequence omitted]

SEQ ID NO: 448 - RNA, 1689 nt, Artificial Sequence
  alpha-actinin-_4/m__Homo_sapiens__BAG65349
augguggacuaccacgcggcgaaccagucguaccaguacggccccagcagcgcgggcaauggcgcuggcggcgggggcagcaugggcgacuacauggcccaggaggacgacugggaccgggaccugcugcuggacccggccugggagaagcagcagcgcaagaccuucacggcauggugcaacucccaccugcggaaggcaggcacacagaucgagaacauugaugaggacuuccgagacgggcucaagcucaugcugcuccuggaggucauaucaggggagcgguuaccuaagccggagcgggggaagaugagagugcacaaaaucaacaaugugaacaaagcgcuggacuuuauugccagcaaaggcgucaagcuggucuccaucggggcagaagagauuguggacggcaacgcaaagaugacccugggaaugaucuggaccaucauccuuagguucgccauccaggacaucuccguggaagagaccucggccaaggaagggcuccuucucuggugccagagaaagacagccccauauaagaacgucaaugugcagaacuuccacaucagcuggaaggauggucuugccuucaaugcccugauccaccggcacagaccagagcugauugaguaugacaagcugaggaaggacgacccugucaccaaccugaacaaugccuucgaaguggcugagaaauaccucgacauccccaagaugcuggaugcagaggacaucgugaacacggcccggcccgacgagaaggccauaaugaccuauguguccagcuucuaccaugccuuuucaggagcgcagaaggcugaaacugccgccaaccggaucuguaaggugcuggcugucaaccaagagaacgagcaccugauggaggacuacgagaagcuggccagcgaccuccuggaguggauccagcgcaccauccccuggcuggaggaccgugugccccaaaaggcuauccaggagaugcagcagaagcuggaggacuuccgcgacuaccggcgugugcacaagccgcccaaggugcaggagaagugccagcuggagaucaacuucaacacgcugcagaccaagcugcgccucagcaaccggcccgccuucaugcccuccgagggcaagauggucucggacaucaacaauggcuggcagcacuuggagcaggcugagaagggcuacgaggaguggcugcugaaugagauccgcaggcuggagcggcucgaccaccuggcagagaaguuccggcagaaggccuccauccacgaggccuggacugacgggaaggaagccaugcugaagcaccgggacuacgagacggccacacuaucggacaucaaagcccucauucgcaagcacgaggccuucgagagcgaccuggcugcgcaccaggaccgcguggagcagaucgccgccauugcccaggagcucaacgagcuggauuacuacgacucccacaaugucaacacccccgacggccuccaggaggggccugggcagccccacagucccauuccuccacucuguaucuaugcaaagcacucucugcaguccuccggggugggugggugggcagggaggggcuggggcaggcucucuccucucucucuuuguggguuggccaggagguucccccgaccagguuggggagacuuggggccagcgcuucuggucugguaa

SEQ ID NO: 449 - RNA, 1689 nt, Artificial Sequence
  derived and/or modified sequence opt1 from alpha-actinin-_4/m__Homo_sapiens__BAG65349
augguggacuaccacgccgccaaccagagcuaccaguacggccccuccagcgcggggaacggcgccgggggcgggggcuccaugggcgacuacauggcccaggaggacgacugggaccgcgaccugcuccuggacccggccugggagaagcagcagcggaagaccuucaccgccuggugcaacagccaccuccgcaaggcggggacgcagaucgagaacaucgacgaggacuuccgggacggccugaagcugaugcugcuccuggaggucaucuccggggagcgccugcccaagcccgagcggggcaagaugcgcgugcacaagaucaacaacgugaacaaggcccucgacuucaucgccagcaagggggucaagcugguguccaucggcgccgaggagaucguggacggcaacgcgaagaugacccuggggaugaucuggaccaucauccuccgguucgccauccaggacaucagcgucgaggagaccuccgccaaggagggccugcugcucuggugccagcgcaagacggcccccuacaagaacgugaacgugcagaacuuccacaucagcuggaaggacgggcuggccuucaacgcgcugauccaccggcaccgcccggagcucaucgaguacgacaagcugcggaaggacgaccccgucaccaaccugaacaacgccuucgagguggccgagaaguaccucgacauccccaagaugcuggacgccgaggacaucgugaacaccgcccgccccgacgagaaggcgaucaugaccuacgucuccagcuucuaccacgccuucuccggcgcccagaaggccgagacggccgcgaaccggaucugcaaggugcuggccgugaaccaggagaacgagcaccucauggaggacuacgagaagcuggccagcgaccugcucgaguggauccagcgcaccaucccguggcuggaggaccgggucccccagaaggccauccaggagaugcagcagaagcuggaggacuuccgcgacuaccggcgcgugcacaagccgcccaaggugcaggagaagugccagcucgagaucaacuucaacacccugcagaccaagcugcggcucuccaaccgccccgccuucaugcccagcgagggcaagauggucuccgacaucaacaacggguggcagcaccuggagcaggcggagaagggcuacgaggaguggcugcucaacgagauccggcgccuggagcgccuggaccaccucgccgagaaguuccggcagaaggccagcauccacgaggccuggacggacgggaaggaggcgaugcugaagcaccgcgacuacgagaccgccacccuguccgacaucaaggcccucauccggaagcacgaggccuucgagagcgaccuggccgcgcaccaggaccgcguggagcagaucgccgccaucgcccaggagcugaacgagcucgacuacuacgacagccacaacgugaacacccccgacggccugcaggaggggcccggccagccgcacucccccaucccgccccugugcaucuacgccaagcacagccuccaguccagcggcgucgggggcugggcggggcggggcugggggcgccugagcccccugucccugugcggccucgcccggcgcuucccccggcccggcuggggcgaccuggggcccgcccugcucgugugguga

SEQ ID NO: 450 - RNA, 1689 nt, Artificial Sequence
  derived and/or modified sequence opt2 from alpha-actinin-_4/m__Homo_sapiens__BAG65349
auggucgacuaccacgccgccaaccaguccuaccaguacggccccuccuccgccggcaacggcgccggcggcggcggcuccaugggcgacuacauggcccaggaggacgacugggaccgcgaccuccuccucgaccccgccugggagaagcagcagcgcaagaccuucaccgccuggugcaacucccaccuccgcaaggccggcacccagaucgagaacaucgacgaggacuuccgcgacggccucaagcucaugcuccuccucgaggucaucuccggcgagcgccuccccaagcccgagcgcggcaagaugcgcguccacaagaucaacaacgucaacaaggcccucgacuucaucgccuccaagggcgucaagcucgucuccaucggcgccgaggagaucgucgacggcaacgccaagaugacccucggcaugaucuggaccaucauccuccgcuucgccauccaggacaucuccgucgaggagaccuccgccaaggagggccuccuccucuggugccagcgcaagaccgcccccuacaagaacgucaacguccagaacuuccacaucuccuggaaggacggccucgccuucaacgcccucauccaccgccaccgccccgagcucaucgaguacgacaagcuccgcaaggacgaccccgucaccaaccucaacaacgccuucgaggucgccgagaaguaccucgacauccccaagaugcucgacgccgaggacaucgucaacaccgcccgccccgacgagaaggccaucaugaccuacgucuccuccuucuaccacgccuucuccggcgcccagaaggccgagaccgccgccaaccgcaucugcaagguccucgccgucaaccaggagaacgagcaccucauggaggacuacgagaagcucgccuccgaccuccucgaguggauccagcgcaccauccccuggcucgaggaccgcgucccccagaaggccauccaggagaugcagcagaagcucgaggacuuccgcgacuaccgccgcguccacaagccccccaagguccaggagaagugccagcucgagaucaacuucaacacccuccagaccaagcuccgccucuccaaccgccccgccuucaugcccuccgagggcaagauggucuccgacaucaacaacggcuggcagcaccucgagcaggccgagaagggcuacgaggaguggcuccucaacgagauccgccgccucgagcgccucgaccaccucgccgagaaguuccgccagaaggccuccauccacgaggccuggaccgacggcaaggaggccaugcucaagcaccgcgacuacgagaccgccacccucuccgacaucaaggcccucauccgcaagcacgaggccuucgaguccgaccucgccgcccaccaggaccgcgucgagcagaucgccgccaucgcccaggagcucaacgagcucgacuacuacgacucccacaacgucaacacccccgacggccuccaggagggccccggccagccccacucccccauccccccccucugcaucuacgccaagcacucccuccaguccuccggcgucggcggcugggccggccgcggcuggggccgccucuccccccucucccucugcggccucgcccgccgcuucccccgccccggcuggggcgaccucggccccgcccuccucgucugguga

SEQ ID NO: 451 - RNA, 1689 nt, Artificial Sequence
  derived and/or modified sequence opt3 from alpha-actinin-_4/m__Homo_sapiens__BAG65349
augguggacuaccacgcugcuaaccagagcuaucaauacggccccuccucugcagggaauggagccgguggcgggggaucaaugggcgauuauauggcgcaggaggacgauugggacagagaucugcuccuugacccugcuugggaaaagcagcagaggaaaaccuucacagccuggugcaacagucaucugcggaaggcagguacucaaaucgagaauauugaugaagacuuucgcgauggguugaaauuaaugcugcuacucgaggucauaagcggagaacgacugccaaagccggagcguggcaaaaugagaguucacaagaucaacaaugugaacaaggcccuugacuucauugcuuccaaaggcguaaagcuggugucuaucggggcagaggaaauugucgauggaaaugccaaaaugacguuggguaugaucuggaccauaauccucagguuugcuauucaggacaucucgguggaggaaacaucagccaaggagggccugcugcucuggugucagcggaaaacugcgcccuacaagaacguuaaugugcagaacuuccauauuagcuggaaggauggguuagcauuuaaugcccugauccaccgccauagaccugagcuuauagaauaugacaaauugaggaaggacgauccagucaccaaccugaauaacgcuuucgagguggccgaaaaauaccuagacauucccaagaugcucgaugcagaggacaucguaaauacagcucggccugaugaaaaagccauuaugaccuauguuaguuccuuuuaccacgcguucucuggagcccaaaaggcagagacugcugccaaccgcaucugcaaagugcuggcugucaaccaggagaaugaacaccuuauggaggacuacgaaaagcuggccagcgauuugcucgaguggauccagcgaacaauuccauggcuggaagacagagugccccagaaggcaauacaagagaugcagcagaaauuagaggauuuuagggacuaucggcgugugcauaagccuccaaaaguccaagaaaagugucagcuggagaucaacuucaauacccuccagacgaaacuucgccuguccaacagaccggccuuuaugcccucagaaggcaagaugguuagugauauuaauaacgguuggcagcacuuggagcaagcugaaaagggguacgaggaguggcuacugaaugaaaucaggcggcucgagcgacuggaccaucuugcggaaaaauuccgccagaaggcaagcauacacgaggccuggacugacggaaaagaggcuaugcugaagcacagagauuaugaaaccgccacauugucugacauuaaagcacucaucaggaagcaugaggccuuugaauccgaucuggcugcccaccaggaccggguggagcagaucgcagcgauugcucaagaauuaaacgagcuggauuacuaugacucacauaauguaaacacuccugauggccuacaggagggcccagggcagccccacagcccuaucccaccccucugcauuuacgccaagcauagucugcagucuuccggaguggguggcugggcagggcgcggauggggcagacuuagcccguugucgcuguguggucucgccaggcguuucccucggcccggguggggcgaccugggaccagcccuucuggucugguga

SEQ ID NO: 452 - RNA, 1689 nt, Artificial Sequence
  derived and/or modified sequence opt4 from alpha-actinin-_4/m__Homo_sapiens__BAG65349
augguggacuaccacgccgccaaccagagcuaccaguacggccccagcagcgccggcaacggcgccggcggcggcggcagcaugggcgacuacauggcccaggaggacgacugggacagagaccugcugcuggaccccgccugggagaagcagcagagaaagaccuucaccgccuggugcaacagccaccugagaaaggccggcacccagaucgagaacaucgacgaggacuucagagacggccugaagcugaugcugcugcuggaggugaucagcggcgagagacugcccaagcccgagagaggcaagaugagagugcacaagaucaacaacgugaacaaggcccuggacuucaucgccagcaagggcgugaagcuggugagcaucggcgccgaggagaucguggacggcaacgccaagaugacccugggcaugaucuggaccaucauccugagauucgccauccaggacaucagcguggaggagaccagcgccaaggagggccugcugcuguggugccagagaaagaccgcccccuacaagaacgugaacgugcagaacuuccacaucagcuggaaggacggccuggccuucaacgcccugauccacagacacagacccgagcugaucgaguacgacaagcugagaaaggacgaccccgugaccaaccugaacaacgccuucgagguggccgagaaguaccuggacauccccaagaugcuggacgccgaggacaucgugaacaccgccagacccgacgagaaggccaucaugaccuacgugagcagcuucuaccacgccuucagcggcgcccagaaggccgagaccgccgccaacagaaucugcaaggugcuggccgugaaccaggagaacgagcaccugauggaggacuacgagaagcuggccagcgaccugcuggaguggauccagagaaccauccccuggcuggaggacagagugccccagaaggccauccaggagaugcagcagaagcuggaggacuucagagacuacagaagagugcacaagccccccaaggugcaggagaagugccagcuggagaucaacuucaacacccugcagaccaagcugagacugagcaacagacccgccuucaugcccagcgagggcaagauggugagcgacaucaacaacggcuggcagcaccuggagcaggccgagaagggcuacgaggaguggcugcugaacgagaucagaagacuggagagacuggaccaccuggccgagaaguucagacagaaggccagcauccacgaggccuggaccgacggcaaggaggccaugcugaagcacagagacuacgagaccgccacccugagcgacaucaaggcccugaucagaaagcacgaggccuucgagagcgaccuggccgcccaccaggacagaguggagcagaucgccgccaucgcccaggagcugaacgagcuggacuacuacgacagccacaacgugaacacccccgacggccugcaggagggccccggccagccccacagccccauccccccccugugcaucuacgccaagcacagccugcagagcagcggcgugggcggcugggccggcagaggcuggggcagacugagcccccugagccugugcggccuggccagaagauuccccagacccggcuggggcgaccugggccccgcccugcuggugugguga

SEQ ID NO: 453 - RNA, 1689 nt, Artificial Sequence
  derived and/or modified sequence opt5 from alpha-actinin-_4/m__Homo_sapiens__BAG65349
augguggacuaccacgccgcuaaccagagcuaucaauacggccccuccucugccgggaauggagcgggcgggggaggcagcaugggggauuauauggcucaggaggacgauugggacagagaucugcuccuggacccugccugggaaaagcagcagcggaaaaccuucacagccuggugcaacucccaucuucgcaaggcuggaacgcaaaucgagaauauugaugaagacuuuagagauggccugaaacucaugcugcuucuggaggucaucucuggcgaacggcucccgaagcccgagcgcgggaaaaugagaguucacaagauuaacaaugugaacaaggcccuggacuucaucgcuagcaaaggagugaagcuggucuccauuggcgccgaggaaaucguggaugggaaugcgaaaaugacccucggaaugaucuggacaauuauccugcgguuugccauucaggacaucucuguugaggaaaccagcgcuaaggagggccuucugcucuggugucagcgcaaaacagccccuuacaagaacgugaauguccagaacuuccauauuuccuggaaggaugggcuggcuuuuaaugcccuuauccacagacaucggcccgagcugauugaauaugacaaacuccgcaaggacgauccugugaccaaccugaauaacgcguucgagguugccgaaaaauaccuggacauccccaagaugcucgaugcugaggacaucgugaauacagccagaccugaugaaaaagcuauuaugaccuaugucagcucuuuuuaccacgccuucuccggagcccaaaaggcugagacggcggccaaccggaucugcaaagugcuggcugugaaccaggagaaugaacaccuuauggaggacuacgaaaagcuggccagcgaucuccuggaguggauucagcgcaccaucccguggcuugaagacagagucccccagaaggccauucaagagaugcagcagaaacuggaggauuuucgggacuaucgcagaguucauaagccucccaaagugcaagaaaagugucagcucgagaucaacuucaauacacugcagaccaaacugcggcucucuaacagaccugcuuuuaugcccuccgaaggcaagauggugagcgauaucaauaacggcuggcagcaccuggagcaagccgaaaagggguacgaggaguggcuucugaaugaaauucgccggcucgagagacuggaccaucuugcggaaaaauuccgccagaaggcuucuauccacgaggccuggacagacggaaaagaggccaugcugaagcaccgggauuaugaaaccgcuacgcucuccgacauuaaagcccugaucagaaagcaugaggcuuuugaaagcgaucuggccgcgcaccaggaccgcgucgagcagauugccgcuaucgcccaagaacucaacgagcuggauuacuaugacucccauaaugugaacacaccggauggccuucaggaggggccuggacagccccacucuccuaucccuccccugugcauuuacgcuaagcauagccuccaguccagcggcguugggggaugggccggccggggcugggggagacugucuccccugucccuuuguggacucgcgcgccgguucccgagacccggcuggggagaccuggggccugcccugcucgugugguga

SEQ ID NO: 454 - protein, 911 aa, Artificial Sequence
  alpha-actinin-_4/m__Homo_sapiens__O43707
MVDYHAANQSYQYGPSSAGNGAGGGGSMGDYMAQEDDWDRDLLLDPAWEKQQRKTFTAWCNSHLRKAGTQIENIDEDFRDGLKLMLLLEVISGERLPKPERGKMRVHKINNVNKALDFIASKGVKLVSIGAEEIVDGNAKMTLGMIWTIILRFAIQDISVEETSAKEGLLLWCQRKTAPYKNVNVQNFHISWKDGLAFNALIHRHRPELIEYDKLRKDDPVTNLNNAFEVAEKYLDIPKMLDAEDIVNTARPDEKAIMTYVSSFYHAFSGAQKAETAANRICKVLAVNQENEHLMEDYEKLASDLLEWIRRTIPWLEDRVPQKTIQEMQQKLEDFRDYRRVHKPPKVQEKCQLEINFNTLQTKLRLSNRPAFMPSEGKMVSDINNGWQHLEQAEKGYEEWLLNEIRRLERLDHLAEKFRQKASIHEAWTDGKEAMLKHRDYETATLSDIKALIRKHEAFESDLAAHQDRVEQIAAIAQELNELDYYDSHNVNTRCQKICDQWDALGSLTHSRREALEKTEKQLEAIDQLHLEYAKRAAPFNNWMESAMEDLQDMFIVHTIEEIEGLISAHDQFKSTLPDADREREAILAIHKEAQRIAESNHIKLSGSNPYTTVTPQIINSKWEKVQQLVPKRDHALLEEQSKQQSNEHLRRQFASQANVVGPWIQTKMEEIGRISIEMNGTLEDQLSHLKQYERSIVDYKPNLDLLEQQHQLIQEALIFDNKHTNYTMEHIRVGWEQLLTTIARTINEVENQILTRDAKGISQEQMQEFRASFNHFDKDHGGALGPEEFKACLISLGYDVENDRQGEAEFNRIMSLVDPNHSGLVTFQAFIDFMSRETTDTDTADQVIASFKVLAGDKNFITAEELRRELPPDQAEYCIARMAPYQGPDAVPGALDYKSFSTALYGESDL

SEQ ID NO: 455 - RNA, 2736 nt, Artificial Sequence
  alpha-actinin-_4/m__Homo_sapiens__AAH05033
augguggacuaccacgcggcgaaccagucguaccaguacggccccagcagcgcgggcaauggcgcuggcggcgggggcagcaugggcgacuacauggcccaggaggacgacugggaccgggaccugcugcuggacccggccugggagaagcagcagcgcaagaccuucacggcauggugcaacucccaccugcggaaggcaggcacacagaucgagaacauugaugaggacuuccgagacgggcucaagcucaugcugcuccuggaggucauaucaggggagcgguuaccuaagccggagcgggggaagaugagagugcacaaaaucaacaaugugaacaaagcgcuggacuuuauugccagcaaaggcgucaagcuggucuccaucggggcagaagagauuguggacggcaacgcaaagaugacccugggaaugaucuggaccaucauccuuagguucgccauccaggacaucuccguggaagagaccucggccaaggaagggcuccuucucuggugccagagaaagacagccccguauaagaacgucaaugugcagaacuuccacaucagcuggaaggauggucuugccuucaaugcccugauccaccggcacagaccagagcugauugaguaugacaagcugaggaaggacgacccugucaccaaccugaacaaugccuucgaaguggcugagaaauaccucgacauccccaagaugcuggaugcagaggacaucgugaacacggcccggcccgacgagaaggccauaaugaccuauguguccagcuucuaccaugccuuuucaggagcgcagaaggcugaaacugccgccaaccggaucuguaaggugcuggcugucaaccaagagaacgagcaccugauggaggacuacgagaagcuggccagcgaccuccuggaguggauccggcgcaccauccccuggcuggaggaccgugugccccaaaagacuauccaggagaugcagcagaagcuggaggacuuccgcgacuaccggcgugugcacaagccgcccaaggugcaggagaagugccagcuggagaucaacuucaacacgcugcagaccaagcugcgccucagcaaccggcccgccuucaugcccuccgagggcaagauggucucggacaucaacaauggcuggcagcacuuggagcaggcugagaagggcuacgaggaguggcugcugaaugagauccgcaggcuggagcggcucgaccaccuggcagagaaguuccggcagaaggccuccauccacgaggccuggacugacgggaaggaagccaugcugaagcaccgggacuacgagacggccacacuaucggacaucaaagcccucauucgcaagcacgaggccuucgagagcgaccuggcugcgcaccaggaccgcguggagcagaucgccgccauugcccaggagcucaacgagcuggauuacuacgacucccacaaugucaacacccggugccagaagaucugugaccagugggacgcccucggcucucugacacauagucgcagggaagcccuggagaaaacagagaagcagcuggaggccaucgaccagcugcaccuggaauacgccaagcgcgcggcccccuucaacaacuggauggagagcgccauggaggaccuccaggacauguucaucguccauaccaucgaggagauugagggccugaucucagcccaugaccaguucaaguccacccugccggacgccgauagggagcgcgaggccauccuggccauccacaaggaggcccagaggaucgcugagagcaaccacaucaagcugucgggcagcaaccccuacaccaccgucaccccgcaaaucaucaacuccaagugggagaaggugcagcagcuggugccaaaacgggaccaugcccuccuggaggagcagagcaagcagcaguccaacgagcaccugcgccgccaguucgccagccaggccaauguuguggggcccuggauccagaccaagauggaggagaucgggcgcaucuccauugagaugaacgggacccuggaggaccagcugagccaccugaagcaguaugaacgcagcaucguggacuacaagcccaaccuggaccugcuggagcagcagcaccagcucauccaggaggcccucaucuucgacaacaagcacaccaacuauaccauggagcacauccgcgugggcugggagcagcugcucaccaccauugcccgcaccaucaacgagguggagaaccagauccucacccgcgacgccaagggcaucagccaggagcagaugcaggaguuccgggcguccuucaaccacuucgacaaggaucauggcggggcgcuggggcccgaggaguucaaggccugccucaucagccugggcuacgacguggagaacgaccggcagggugaggccgaguucaaccgcaucaugagccuggucgaccccaaccauagcggccuugugaccuuccaagccuucaucgacuucaugucgcgggagaccaccgacacggacacggcugaccaggucaucgcuuccuucaaggucuuagcaggggacaagaacuucaucacagcugaggagcugcggagagagcugccccccgaccaggccgaguacugcaucgcccgcauggcgccauaccagggcccugacgccgugcccggugcccucgacuacaaguccuucuccacggccuuguauggcgagagcgaccuguga

SEQ ID NO: 456 - RNA, 2736 nt, Artificial Sequence
  derived and/or modified sequence opt1 from alpha-actinin-_4/m__Homo_sapiens__AAH05033
augguggacuaccacgccgccaaccagagcuaccaguacggccccuccagcgcggggaacggcgccgggggcgggggcuccaugggcgacuacauggcccaggaggacgacugggaccgcgaccugcuccuggacccggccugggagaagcagcagcggaagaccuucaccgccuggugcaacagccaccuccgcaaggcggggacgcagaucgagaacaucgacgaggacuuccgggacggccucaagcugaugcugcuccuggaggucaucuccggggagcgccugcccaagcccgagcggggcaagaugcgcgugcacaagaucaacaacgugaacaaggcccucgacuucaucgccagcaagggggucaagcugguguccaucggcgccgaggagaucguggacggcaacgcgaagaugacccuggggaugaucuggaccaucauccuccgguucgccauccaggacaucagcgucgaggagaccuccgccaaggagggccugcugcucuggugccagcgcaagacggcccccuacaagaacgugaacgugcagaacuuccacaucagcuggaaggacgggcuggccuucaacgcgcugauccaccggcaccgcccggagcucaucgaguacgacaagcugcggaaggacgaccccgucaccaaccugaacaacgccuucgagguggccgagaaguaccucgacauccccaagaugcuggacgccgaggacaucgugaacaccgcccgccccgacgagaaggcgaucaugaccuacgucuccagcuucuaccacgccuucuccggcgcccagaaggccgagacggccgcgaaccggaucugcaaggugcuggccgugaaccaggagaacgagcaccucauggaggacuacgagaagcuggccagcgaccugcucgaguggauccgccggaccaucccguggcuggaggaccgcgucccccagaagaccauccaggagaugcagcagaagcuggaggacuuccgggacuaccgccgggugcacaagccgcccaaggugcaggagaagugccagcucgagaucaacuucaacacccugcagacgaagcugcgccucuccaaccggcccgccuucaugcccagcgagggcaagauggucuccgacaucaacaacggguggcagcaccuggagcaggccgagaagggcuacgaggaguggcugcucaacgagauccgccgccuggagcggcuggaccaccucgcggagaaguuccgccagaaggccagcauccacgaggccuggaccgacgggaaggaggccaugcugaagcaccgggacuacgagaccgcgacccuguccgacaucaaggcccucauccgcaagcacgaggccuucgagagcgaccuggccgcccaccaggaccggguggagcagaucgcggccaucgcccaggagcugaacgagcucgacuacuacgacagccacaacgugaacacgcgcugccagaagaucugcgaccagugggacgcccugggcucccugacccacagccggcgcgaggcccucgagaagaccgagaagcagcuggaggcgaucgaccagcugcaccuggaguacgccaagcgggccgcccccuucaacaacuggauggaguccgccauggaggaccuccaggacauguucaucguccacaccaucgaggagaucgaggggcugaucagcgcgcacgaccaguucaaguccacgcugcccgacgccgaccgcgagcgggaggccauccucgccauccacaaggaggcgcagcgcaucgccgagagcaaccacaucaagcuguccggcagcaacccguacaccaccgugacgccccagaucaucaacuccaagugggagaaggugcagcagcugguccccaagcgggaccacgcccuccuggaggagcagagcaagcagcaguccaacgagcaccuccgccggcaguucgccagccaggccaacguggucggccccuggauccagaccaagauggaggagaucgggcgcaucuccaucgagaugaacggcacccuggaggaccagcugagccaccugaagcaguacgagcgguccaucguggacuacaagccgaaccucgaccugcuggagcagcagcaccagcucauccaggaggcgcugaucuucgacaacaagcacaccaacuacaccauggagcacauccgcguggggugggagcagcugcucacgaccaucgcccggaccaucaacgaggucgagaaccagauccugacccgcgacgccaagggcaucagccaggagcagaugcaggaguuccgcgccuccuucaaccacuucgacaaggaccacgggggcgcccugggccccgaggaguucaaggcgugccucaucagccugggguacgacguggagaacgaccggcagggcgaggccgaguucaaccgcaucaugucccugguggaccccaaccacagcgggcucgucacguuccaggccuucaucgacuucaugagccgggagaccaccgacaccgacacggccgaccaggugaucgccuccuucaaggugcuggcgggcgacaagaacuucaucaccgccgaggagcugcgccgggagcugcccccggaccaggccgaguacugcaucgcccgcauggcgcccuaccaggggcccgacgccguccccggcgcccuggacuacaagagcuucuccaccgcccuguacggcgagagcgaccucuga

SEQ ID NO: 457 - RNA, 2736 nt, Artificial Sequence
  derived and/or modified sequence opt2 from alpha-actinin-_4/m__Homo_sapiens__AAH05033
auggucgacuaccacgccgccaaccaguccuaccaguacggccccuccuccgccggcaacggcgccggcggcggcggcuccaugggcgacuacauggcccaggaggacgacugggaccgcgaccuccuccucgaccccgccugggagaagcagcagcgcaagaccuucaccgccuggugcaacucccaccuccgcaaggccggcacccagaucgagaacaucgacgaggacuuccgcgacggccucaagcucaugcuccuccucgaggucaucuccggcgagcgccuccccaagcccgagcgcggcaagaugcgcguccacaagaucaacaacgucaacaaggcccucgacuucaucgccuccaagggcgucaagcucgucuccaucggcgccgaggagaucgucgacggcaacgccaagaugacccucggcaugaucuggaccaucauccuccgcuucgccauccaggacaucuccgucgaggagaccuccgccaaggagggccuccuccucuggugccagcgcaagaccgcccccuacaagaacgucaacguccagaacuuccacaucuccuggaaggacggccucgccuucaacgcccucauccaccgccaccgccccgagcucaucgaguacgacaagcuccgcaaggacgaccccgucaccaaccucaacaacgccuucgaggucgccgagaaguaccucgacauccccaagaugcucgacgccgaggacaucgucaacaccgcccgccccgacgagaaggccaucaugaccuacgucuccuccuucuaccacgccuucuccggcgcccagaaggccgagaccgccgccaaccgcaucugcaagguccucgccgucaaccaggagaacgagcaccucauggaggacuacgagaagcucgccuccgaccuccucgaguggauccgccgcaccauccccuggcucgaggaccgcgucccccagaagaccauccaggagaugcagcagaagcucgaggacuuccgcgacuaccgccgcguccacaagccccccaagguccaggagaagugccagcucgagaucaacuucaacacccuccagaccaagcuccgccucuccaaccgccccgccuucaugcccuccgagggcaagauggucuccgacaucaacaacggcuggcagcaccucgagcaggccgagaagggcuacgaggaguggcuccucaacgagauccgccgccucgagcgccucgaccaccucgccgagaaguuccgccagaaggccuccauccacgaggccuggaccgacggcaaggaggccaugcucaagcaccgcgacuacgagaccgccacccucuccgacaucaaggcccucauccgcaagcacgaggccuucgaguccgaccucgccgcccaccaggaccgcgucgagcagaucgccgccaucgcccaggagcucaacgagcucgacuacuacgacucccacaacgucaacacccgcugccagaagaucugcgaccagugggacgcccucggcucccucacccacucccgccgcgaggcccucgagaagaccgagaagcagcucgaggccaucgaccagcuccaccucgaguacgccaagcgcgccgcccccuucaacaacuggauggaguccgccauggaggaccuccaggacauguucaucguccacaccaucgaggagaucgagggccucaucuccgcccacgaccaguucaaguccacccuccccgacgccgaccgcgagcgcgaggccauccucgccauccacaaggaggcccagcgcaucgccgaguccaaccacaucaagcucuccggcuccaaccccuacaccaccgucaccccccagaucaucaacuccaagugggagaagguccagcagcucguccccaagcgcgaccacgcccuccucgaggagcaguccaagcagcaguccaacgagcaccuccgccgccaguucgccucccaggccaacgucgucggccccuggauccagaccaagauggaggagaucggccgcaucuccaucgagaugaacggcacccucgaggaccagcucucccaccucaagcaguacgagcgcuccaucgucgacuacaagcccaaccucgaccuccucgagcagcagcaccagcucauccaggaggcccucaucuucgacaacaagcacaccaacuacaccauggagcacauccgcgucggcugggagcagcuccucaccaccaucgcccgcaccaucaacgaggucgagaaccagauccucacccgcgacgccaagggcaucucccaggagcagaugcaggaguuccgcgccuccuucaaccacuucgacaaggaccacggcggcgcccucggccccgaggaguucaaggccugccucaucucccucggcuacgacgucgagaacgaccgccagggcgaggccgaguucaaccgcaucaugucccucgucgaccccaaccacuccggccucgucaccuuccaggccuucaucgacuucaugucccgcgagaccaccgacaccgacaccgccgaccaggucaucgccuccuucaagguccucgccggcgacaagaacuucaucaccgccgaggagcuccgccgcgagcucccccccgaccaggccgaguacugcaucgcccgcauggcccccuaccagggccccgacgccguccccggcgcccucgacuacaaguccuucuccaccgcccucuacggcgaguccgaccucuga

SEQ ID NO: 458 - RNA, 2736 nt, Artificial Sequence
  derived and/or modified sequence opt3 from alpha-actinin-_4/m__Homo_sapiens__AAH05033
augguggacuaccacgccgcuaaccagagcuaucaauacggccccuccucugcagggaauggagccgguggcgggggaucaaugggcgauuauauggcgcaggaggacgauugggacagagaucugcuccuugacccugcuugggaaaagcagcagaggaaaaccuucacagccuggugcaacagucaucugcggaaggcagguacucaaaucgagaauauugaugaagacuuucgcgauggguugaaauuaaugcugcuacucgaggucauaagcggagaacgacugccaaagccggagcguggcaaaaugagaguucacaagaucaacaaugugaacaaggcccuugacuucauugcuuccaaaggcguaaagcuggugucuaucggggcagaggaaauugucgauggaaaugccaaaaugacguuggguaugaucuggaccauaauccucagguuugcuauucaggacaucucgguggaggaaacaucagccaaggagggccugcugcucuggugucagcggaaaacugcgcccuacaagaacguuaaugugcagaacuuccauauuagcuggaaggauggguuagcauuuaaugcccugauccaccgccauagaccugagcuuauagaauaugacaaauugaggaaggacgauccagucaccaaccugaauaacgcuuucgagguggccgaaaaauaccuagacauucccaagaugcucgaugcagaggacaucguaaauacagcucggccugaugaaaaagccauuaugaccuauguuaguuccuuuuaccacgcguucucuggagcccaaaaggcagagacugcugccaaccgcaucugcaaagugcuggcugucaaccaggagaaugaacaccuuauggaggacuacgaaaagcuggccagcgauuugcucgaguggauccgaagaacaauuccauggcuggaagacagggugccccagaagaccauacaggagaugcaacagaaauuagaggauuuucgggacuaucgucgcgugcauaagccuccaaaaguccaggaaaagugucaacuggagaucaacuucaauacgcuccagacuaaacuuagacuguccaacaggccggcauuuaugcccucagaaggcaagaugguuagugauauuaauaacgguuggcagcacuuggagcaggccgaaaagggguacgaggaguggcuacugaaugaaauccggcgacucgagcgccuggaccaucuugcugaaaaauucagacaaaaggcgagcauacacgaggcauggaccgacggaaaagaggccaugcugaagcacagggauuaugaaacagcuacuuugucugacauuaaagcccucauccggaagcaugaggcauuugaauccgaucuggccgcucaccaggaccgcguggagcagaucgccgcaauugcgcaggaauuaaacgagcuggauuacuaugacucacauaauguaaacaccagaugccaaaagaucugugaucagugggacgcucuaggcagccucacacacaguaggcgugaggcccuggagaaaaccgagaagcagcuugaagcaauugaucaguugcaucuggaguacgccaaacgggcugccccuuucaauaacuggauggaaucugcaauggaggaccuccaagauauguucauagugcacacgaucgaggaaauugagggccugaucuccgcucacgaccaguuuaagagcacucuuccagaugccgaccgagaaagagaggcgauccuggccauucauaaagaagcucagaggauagcagagucgaaucacaucaaguugucuggguccaaccccuauacaaccgucacuccucagauuaucaauucaaagugggagaaagugcaacagcucguuccaaagcgcgaccaugcccuguuagaagaacagaguaaacaacagagcaacgaacaucugcggagacaguucgcuucccaggccaacguggucggacccuggauucaaacaaagauggaggagaucgguaggauaucuaucgaaaugaauggcacccuagaggaucagcucagccaccugaaacaguacgaacgcucaauuguggacuacaagccgaaccuugauuugcuggagcagcaacaccagcucauccaggaagcacugauuuuugacaauaaacacacgaacuauaccauggagcauauccgaguagggugggagcaguuacugacaacuauagcgcggaccauuaaugaaguugagaaccaaauccuuacacgugaugccaagggaauuagucaggaacagaugcaagaguucagagcuuccuuuaaucacuucgacaaggaucauggcggugccuuggggccugaagaguuuaaagcaugccucaucagccugggcuacgacguggagaacgauaggcagggagaagcugaguucaaucgcauaaugucucuagucgaccccaaccacucaggccuggugacuuuucaggccuucaucgauuuuaugagucgggaaaccacagacaccgauacugcagaccaggucauugccagcuucaaggugcucgcuggggacaaaaauuuuaucacggcggaggaacugagaagggagcuuccaccugaucaagccgaguauuguauugcacgaauggcucccuaccagggaccagacgccguucccggugccuuggauuauaaguccuucucuacagcucuguacggcgaaucggacuuauga

SEQ ID NO: 459 - RNA, 2736 nt, Artificial Sequence
  derived and/or modified sequence opt4 from alpha-actinin-_4/m__Homo_sapiens__AAH05033
augguggacuaccacgccgccaaccagagcuaccaguacggccccagcagcgccggcaacggcgccggcggcggcggcagcaugggcgacuacauggcccaggaggacgacugggacagagaccugcugcuggaccccgccugggagaagcagcagagaaagaccuucaccgccuggugcaacagccaccugagaaaggccggcacccagaucgagaacaucgacgaggacuucagagacggccugaagcugaugcugcugcuggaggugaucagcggcgagagacugcccaagcccgagagaggcaagaugagagugcacaagaucaacaacgugaacaaggcccuggacuucaucgccagcaagggcgugaagcuggugagcaucggcgccgaggagaucguggacggcaacgccaagaugacccugggcaugaucuggaccaucauccugagauucgccauccaggacaucagcguggaggagaccagcgccaaggagggccugcugcuguggugccagagaaagaccgcccccuacaagaacgugaacgugcagaacuuccacaucagcuggaaggacggccuggccuucaacgcccugauccacagacacagacccgagcugaucgaguacgacaagcugagaaaggacgaccccgugaccaaccugaacaacgccuucgagguggccgagaaguaccuggacauccccaagaugcuggacgccgaggacaucgugaacaccgccagacccgacgagaaggccaucaugaccuacgugagcagcuucuaccacgccuucagcggcgcccagaaggccgagaccgccgccaacagaaucugcaaggugcuggccgugaaccaggagaacgagcaccugauggaggacuacgagaagcuggccagcgaccugcuggaguggaucagaagaaccauccccuggcuggaggacagagugccccagaagaccauccaggagaugcagcagaagcuggaggacuucagagacuacagaagagugcacaagccccccaaggugcaggagaagugccagcuggagaucaacuucaacacccugcagaccaagcugagacugagcaacagacccgccuucaugcccagcgagggcaagauggugagcgacaucaacaacggcuggcagcaccuggagcaggccgagaagggcuacgaggaguggcugcugaacgagaucagaagacuggagagacuggaccaccuggccgagaaguucagacagaaggccagcauccacgaggccuggaccgacggcaaggaggccaugcugaagcacagagacuacgagaccgccacccugagcgacaucaaggcccugaucagaaagcacgaggccuucgagagcgaccuggccgcccaccaggacagaguggagcagaucgccgccaucgcccaggagcugaacgagcuggacuacuacgacagccacaacgugaacaccagaugccagaagaucugcgaccagugggacgcccugggcagccugacccacagcagaagagaggcccuggagaagaccgagaagcagcuggaggccaucgaccagcugcaccuggaguacgccaagagagccgcccccuucaacaacuggauggagagcgccauggaggaccugcaggacauguucaucgugcacaccaucgaggagaucgagggccugaucagcgcccacgaccaguucaagagcacccugcccgacgccgacagagagagagaggccauccuggccauccacaaggaggcccagagaaucgccgagagcaaccacaucaagcugagcggcagcaaccccuacaccaccgugaccccccagaucaucaacagcaagugggagaaggugcagcagcuggugcccaagagagaccacgcccugcuggaggagcagagcaagcagcagagcaacgagcaccugagaagacaguucgccagccaggccaacguggugggccccuggauccagaccaagauggaggagaucggcagaaucagcaucgagaugaacggcacccuggaggaccagcugagccaccugaagcaguacgagagaagcaucguggacuacaagcccaaccuggaccugcuggagcagcagcaccagcugauccaggaggcccugaucuucgacaacaagcacaccaacuacaccauggagcacaucagagugggcugggagcagcugcugaccaccaucgccagaaccaucaacgagguggagaaccagauccugaccagagacgccaagggcaucagccaggagcagaugcaggaguucagagccagcuucaaccacuucgacaaggaccacggcggcgcccugggccccgaggaguucaaggccugccugaucagccugggcuacgacguggagaacgacagacagggcgaggccgaguucaacagaaucaugagccugguggaccccaaccacagcggccuggugaccuuccaggccuucaucgacuucaugagcagagagaccaccgacaccgacaccgccgaccaggugaucgccagcuucaaggugcuggccggcgacaagaacuucaucaccgccgaggagcugagaagagagcugccccccgaccaggccgaguacugcaucgccagaauggcccccuaccagggccccgacgccgugcccggcgcccuggacuacaagagcuucagcaccgcccuguacggcgagagcgaccuguga

SEQ ID NO: 460 - RNA, 2736 nt, Artificial Sequence
  derived and/or modified sequence opt5 from alpha-actinin-_4/m__Homo_sapiens__AAH05033
augguggacuaccacgccgcuaaccagagcuaucaauacggccccuccucugccgggaauggagcgggcgggggaggcagcaugggggauuauauggcucaggaggacgauugggacagagaucugcuccuggacccugccugggaaaagcagcagcggaaaaccuucacagccuggugcaacucccaucuucgcaaggcuggaacgcaaaucgagaauauugaugaagacuuuagagauggccugaaacucaugcugcuucuggaggucaucucuggcgaacggcucccgaagcccgagcgcgggaaaaugagaguucacaagauuaacaaugugaacaaggcccuggacuucaucgcuagcaaaggagugaagcuggucuccauuggcgccgaggaaaucguggaugggaaugcgaaaaugacccucggaaugaucuggacaauuauccugcgguuugccauucaggacaucucuguugaggaaaccagcgcuaaggagggccuucugcucuggugucagcgcaaaacagccccuuacaagaacgugaauguccagaacuuccauauuuccuggaaggaugggcuggcuuuuaaugcccuuauccacagacaucggcccgagcugauugaauaugacaaacuccgcaaggacgauccugugaccaaccugaauaacgcguucgagguugccgaaaaauaccuggacauccccaagaugcucgaugcugaggacaucgugaauacagccagaccugaugaaaaagcuauuaugaccuaugucagcucuuuuuaccacgccuucuccggagcccaaaaggcugagacggcggccaaccggaucugcaaagugcuggcugugaaccaggagaaugaacaccuuauggaggacuacgaaaagcuggccagcgaucuccuggaguggauucgcagaaccaucccguggcuugaagaccgggucccccagaagacaauucaggagaugcaacagaaacuggaggauuuucgcgacuauagacggguucauaagccucccaaagugcaggaaaagugucaacucgagaucaacuucaauacccugcagacaaaacugagacucucuaaccgcccugccuuuaugcccuccgaaggcaagauggugagcgauaucaauaacggcuggcagcaccuggagcaggcugaaaagggguacgaggaguggcuucugaaugaaauucggagacucgagcgccuggaccaucuugccgaaaaauuccggcaaaaggcgucuauccacgaggcuuggaccgacggaaaagaggccaugcugaagcacagagauuaugaaacggccacacucuccgacauuaaagcucugauccgcaagcaugaggccuuugaaagcgaucuggcugcccaccaggaccgggucgagcagauugcggccaucgcucaggaacucaacgagcuggauuacuaugacucccauaaugugaacaccagaugccaaaagaucugugaucagugggacgcccuuggcucucugacacacagccgccgggaggcucucgagaaaaccgagaagcagcuggaagccauugaucagcugcaucuugaguacgcgaaaagagccgcuccguucaauaacuggauggaauccgccauggaggaccuccaagauauguucaucguucacaccauugaggaaaucgaggggcugauuagcgcucacgaccaguuuaagucuacacugccugaugccgaccgcgaacgggaggccauccucgcuauucauaaagaagcgcagagaaucgccgaguccaaucacaucaagcugagcggaucuaaccccuauacgaccgugacaccucagauuaucaauagcaagugggagaaaguccaacagcuugugcccaagcgggaccaugcucugcucgaagaacaguccaaacaacagucuaacgaacaucugcgcagacaguucgccagccaggccaacguugugggccccuggauucaaaccaagauggaggagaucgggcggauuuccaucgaaaugaauggaacacuggaggaucagcuuagccaccucaaacaguacgaaagaucuaucgucgacuacaagccuaaccuggaucugcucgagcagcaacaccagcugauucaggaagcucuuaucuuugacaauaaacacaccaacuauacgauggagcauauucgcgugggcugggagcagcugcucacaaccaucgcccggaccauuaaugaagucgagaaccaaauccugacaagagaugcgaagggcaucucccaggaacagaugcaagaguuccgcgcuagcuuuaaucacuucgacaaggaucaugggggagcccugggcccggaagaguuuaaagccugccuuauuucucucggguacgacguggagaacgauagacagggagaagcugaguucaaucggaucaugucccugguugaccccaaccacagcggccuggugaccuuucaggccuucauugauuuuaugucccgcgaaacaacggacaccgauacagcggaccaggucaucgcuucuuucaaggugcucgccggggacaaaaauuuuauuaccgccgaggaacugagacgggagcuuccucccgaucaagcugaguauuguaucgcccgcauggcuccuuaccagggccccgacgccguuccgggagcgcuggauuauaagagcuucuccacagcccucuacggcgaaucugaccuguga

SEQ ID NO: 461 - protein, 198 aa, Artificial Sequence [sequence omitted]

SEQ ID NO: 462 - RNA, 597 nt, Artificial Sequence
  alpha-methylacyl-coenzyme_A_racemase__Homo_sapiens__EAX10817
auggcacugcagggcaucucggucauggagcuguccggccuggccccgggcccguucugugcuaugguccuggcugacuucggggcgcgugugguacgcguggaccggcccggcucccgcuacgacgugagccgcuugggccggggcaagcgcucgcuagugcuggaccugaagcagccgcggggagccgccgugcugcggcgucugugcaagcggucggaugugcugcuggagcccuuccgccgcggugucauggagaaacuccagcugggcccagagauucugcagcgggaaaauccaaggcuuauuuaugccaggcugaguggauuuggccagucaggaagcuucugccgguuagcuggccacgauaucaacuauuuggcuuugucagguggaaggaacagcauauuuaaguucuuuucuguggaaaacucagaaaucgagucugugggaagcaccucgaggacagaacauguuggaugguggagcaccuuucuauacgacuuacaggacagcagauggggaauucauggcuguuggagcaauagaaccccaguucuacgagcugcugaucaaaggacuuggacuaaagucuga

SEQ ID NO: 463 - RNA, 597 nt, Artificial Sequence
  derived and/or modified sequence opt1 from alpha-methylacyl-coenzyme_A_racemase__Homo_sapiens__EAX10817
auggcccugcagggcaucagcgugauggagcucuccgggcuggcccccggcccguucugcgcgaugguccuggccgacuucggggcccgcguggugcgggucgaccgccccggcagccgguacgacgugucccgccucgggcggggcaagcgcagccuggugcuggaccucaagcagccccggggcgccgccguccugcgccggcugugcaagcgcuccgacgugcuccuggagcccuuccggcgcggggugauggagaagcugcagcucggcccggagauccugcagcgggagaacccccgccugaucuacgcgcggcucagcggguucggccaguccgggagcuucugccgccuggccggccacgacaucaacuaccuggcccucuccggcgggcggaacagcaucuucaaguucuucuccgucgagaacagcgagaucgaguccgugggcagcaccucccgcaccgagcacguggggugguggagcacguuccuguacgaccugcaggacucccgguggggcauccacggcugcuggagcaaccgcacccccguccuccgggccgcggaccagcgcaccuggaccaagguguga

SEQ ID NO: 464 - RNA, 597 nt, Artificial Sequence
  derived and/or modified sequence opt2 from alpha-methylacyl-coenzyme_A_racemase__Homo_sapiens__EAX10817
auggcccuccagggcaucuccgucauggagcucuccggccucgcccccggccccuucugcgccaugguccucgccgacuucggcgcccgcgucguccgcgucgaccgccccggcucccgcuacgacgucucccgccucggccgcggcaagcgcucccucguccucgaccucaagcagccccgcggcgccgccguccuccgccgccucugcaagcgcuccgacguccuccucgagcccuuccgccgcggcgucauggagaagcuccagcucggccccgagauccuccagcgcgagaacccccgccucaucuacgcccgccucuccggcuucggccaguccggcuccuucugccgccucgccggccacgacaucaacuaccucgcccucuccggcggccgcaacuccaucuucaaguucuucuccgucgagaacuccgagaucgaguccgucggcuccaccucccgcaccgagcacgucggcuggugguccaccuuccucuacgaccuccaggacucccgcuggggcauccacggcugcugguccaaccgcacccccguccuccgcgccgccgaccagcgcaccuggaccaaggucuga

SEQ ID NO: 465 - RNA, 597 nt, Artificial Sequence
  derived and/or modified sequence opt3 from alpha-methylacyl-coenzyme_A_racemase__Homo_sapiens__EAX10817
auggcccugcagggcaucagcgugauggagcucuccgggcuugcucccggaccuuucugcgcaaugguccuggccgacuuuggugcgagaguugugaggguagaucggccaggcucucgcuacgacgugucacgauuggggcguggaaagagaaguuuaguccuggaucuaaaacaaccgaggggcgcugccgugcuccggcgccuguguaagagaagcgacguucuucuggaacccuucaggcggggugugauggagaaauugcagcucgggccugaaauucugcagcgcgagaacccacgacugauauaugcaagacucuccggauuuggccagucuggcucguucugcagguuagccgggcacgauaucaauuaccuggcucuuucaggaggucggaacagcauuuuuaaguucuuuagugucgaaaauuccgagaucgagucugugggcagcaccucccguacagaacauguagggugguggucaacuuucuuguaugaccugcaagauagucgcuggggcauucacggauguuggagcaacagaacgcccguucuaagggcagccgaccagcggaccuggacaaaaguguga

SEQ ID NO: 466 - RNA, 597 nt, Artificial Sequence
  derived and/or modified sequence opt4 from alpha-methylacyl-coenzyme_A_racemase__Homo_sapiens__EAX10817
auggcccugcagggcaucagcgugauggagcugagcggccuggcccccggccccuucugcgccauggugcuggccgacuucggcgccagaguggugagaguggacagacccggcagcagauacgacgugagcagacugggcagaggcaagagaagccuggugcuggaccugaagcagcccagaggcgccgccgugcugagaagacugugcaagagaagcgacgugcugcuggagcccuucagaagaggcgugauggagaagcugcagcugggccccgagauccugcagagagagaaccccagacugaucuacgccagacugagcggcuucggccagagcggcagcuucugcagacuggccggccacgacaucaacuaccuggcccugagcggcggcagaaacagcaucuucaaguucuucagcguggagaacagcgagaucgagagcgugggcagcaccagcagaaccgagcacgugggcugguggagcaccuuccuguacgaccugcaggacagcagauggggcauccacggcugcuggagcaacagaacccccgugcugagagccgccgaccagagaaccuggaccaagguguga

SEQ ID NO: 467 - RNA, 597 nt, Artificial Sequence
  derived and/or modified sequence opt5 from alpha-methylacyl-coenzyme_A_racemase__Homo_sapiens__EAX10817
auggcccugcagggcaucagcgugauggagcucuccgggcuggcucccggaccuuucugcgccaugguccuugcggacuuuggcgcuagaguugugcggguggaucgcccggggucuagauacgacgucagccggcugggacgcggcaagagaucccucgugcuggaucuuaaacaaccccgcggggccgccguucugcggagacucuguaagcggucugacgugcugcuggaaccuuuccgcagaggagucauggagaaacuccagcugggccccgaaauucuucagcgggagaacccucgccugaucuaugcuagacucagcggcuuugggcaguccggaucuuucugccggcuggccggccacgauauuaauuaccuugcucugagcgggggacgcaacuccaucuuuaaguucuuuagcguggaaaauucugagauugaguccguuggcagcaccucuagaacagaacaugugggguggugguccacguuccucuaugaccugcaagauagccgguggggaauccacggcuguuggucuaacagaacccccguccugcgcgccgcggaccagcggacauggaccaaaguguga

SEQ ID NO: 468 - protein, 198 aa, Artificial Sequence [sequence omitted]

SEQ ID NO: 469 - RNA, 597 nt, Artificial Sequence
  alpha-methylacyl-coenzyme_A_racemase__Homo_sapiens__BAF85677
auggcacugcagggcaucucggucguggagcuguccggccuggccccgggcccguucugugcuaugguccuggcugacuucggggcgcgugugguacgcguggaccggcccggcucccgcuacgacgugagccgcuugggccggggcaagcgcucgcuagugcuggaccugaagcagccgcggggagccgccgugcugcggcgucugugcaagcggucggaugugcugcuggagcccuuccgccgcggugucauggagaaacuccagcugggcccagagauucugcagcgggaaaauccaaggcuuauuuaugccaggcugaguggauuuggccagucaggaagcuucugccgguuagcuggccacgauaucaacuauuuggcuuugucagguggaaggaacagcauauuuaaguucuuuucuguggaaaacucagaaaucgagucugugggaagcaccucgaggacagaacauguuggaugguggagcaccuuucuauacgacuuacaggacagcagauggggaauucauggcuguuggagcaauagaaccccauuucuacgagcugcugaucaaaggacuuggacuaaagucuga

SEQ ID NO: 470 - RNA, 597 nt, Artificial Sequence
  derived and/or modified sequence opt1 from alpha-methylacyl-coenzyme_A_racemase__Homo_sapiens__BAF85677
auggcccugcagggcaucagcguggucgagcucuccgggcuggcccccggcccguucugcgcgauggugcuggccgacuucggggcccgcgugguccggguggaccgccccggcagccgguacgacgugucccgccucgggcggggcaagcgcagccugguccuggaccucaagcagccccggggcgccgccgugcugcgccggcugugcaagcgcuccgacgugcuccuggagcccuuccggcgcggggucauggagaagcugcagcucggcccggagauccugcagcgggagaacccccgccugaucuacgcgcggcucagcggguucggccaguccgggagcuucugccgccuggccggccacgacaucaacuaccuggcccucuccggcgggcggaacagcaucuucaaguucuucuccguggagaacagcgagaucgaguccgugggcagcaccucccgcaccgagcacgucgggugguggagcacguuccuguacgaccugcaggacucccgguggggcauccacggcugcuggagcaaccgcacccccuuccuccgggccgcggaccagcgcaccuggaccaagguguga

SEQ ID NO: 471 - RNA, 597 nt, Artificial Sequence
  derived and/or modified sequence opt2 from alpha-methylacyl-coenzyme_A_racemase__Homo_sapiens__BAF85677
auggcccuccagggcaucuccgucgucgagcucuccggccucgcccccggccccuucugcgccaugguccucgccgacuucggcgcccgcgucguccgcgucgaccgccccggcucccgcuacgacgucucccgccucggccgcggcaagcgcucccucguccucgaccucaagcagccccgcggcgccgccguccuccgccgccucugcaagcgcuccgacguccuccucgagcccuuccgccgcggcgucauggagaagcuccagcucggccccgagauccuccagcgcgagaacccccgccucaucuacgcccgccucuccggcuucggccaguccggcuccuucugccgccucgccggccacgacaucaacuaccucgcccucuccggcggccgcaacuccaucuucaaguucuucuccgucgagaacuccgagaucgaguccgucggcuccaccucccgcaccgagcacgucggcuggugguccaccuuccucuacgaccuccaggacucccgcuggggcauccacggcugcugguccaaccgcacccccuuccuccgcgccgccgaccagcgcaccuggaccaaggucuga

SEQ ID NO: 472 - RNA, 597 nt, Artificial Sequence
  derived and/or modified sequence opt3 from alpha-methylacyl-coenzyme_A_racemase__Homo_sapiens__BAF85677
auggcccugcagggcaucagcguggucgagcucuccgggcuugcucccggaccuuucugcgcaaugguucuggccgacuuuggugcgagagugguaaggguggaucggccaggcucucgcuacgacgucucacgauuggggcguggaaagagaaguuuagugcuggaucuaaaacaaccgaggggcgcugccguucuccggcgccuguguaagagaagcgacgugcuucuggaacccuucaggcggggugucauggagaaauugcagcucgggccugaaauucugcagcgcgagaacccacgacugauauaugcaagacucuccggauuuggccagucuggcucguucugcagguuagccgggcacgauaucaauuaccuggcucuuucaggaggucggaacagcauuuuuaaguucuuuaguguggaaaauuccgagaucgagucuguaggcagcaccucccguacagaacauguugggugguggucaacuuucuuguaugaccugcaagauagucgcuggggcauucacggauguuggagcaacagaacgcccuuucuaagggcagccgaccagcggaccuggacaaaaguguga

SEQ ID NO: 473 - RNA, 597 nt, Artificial Sequence
  derived and/or modified sequence opt4 from alpha-methylacyl-coenzyme_A_racemase__Homo_sapiens__BAF85677
auggcccugcagggcaucagcgugguggagcugagcggccuggcccccggccccuucugcgccauggugcuggccgacuucggcgccagaguggugagaguggacagacccggcagcagauacgacgugagcagacugggcagaggcaagagaagccuggugcuggaccugaagcagcccagaggcgccgccgugcugagaagacugugcaagagaagcgacgugcugcuggagcccuucagaagaggcgugauggagaagcugcagcugggccccgagauccugcagagagagaaccccagacugaucuacgccagacugagcggcuucggccagagcggcagcuucugcagacuggccggccacgacaucaacuaccuggcccugagcggcggcagaaacagcaucuucaaguucuucagcguggagaacagcgagaucgagagcgugggcagcaccagcagaaccgagcacgugggcugguggagcaccuuccuguacgaccugcaggacagcagauggggcauccacggcugcuggagcaacagaacccccuuccugagagccgccgaccagagaaccuggaccaagguguga

SEQ ID NO: 474 - RNA, 597 nt, Artificial Sequence
  derived and/or modified sequence opt5 from alpha-methylacyl-coenzyme_A_racemase__Homo_sapiens__BAF85677
auggcccugcagggcaucagcguggucgagcucuccgggcuggcucccggaccuuucugcgccaugguucuugcggacuuuggcgcuagaguggugcgggucgaucgcccggggucuagauacgacgugagccggcugggacgcggcaagagaucccucguucuggaucuuaaacaaccccgcggggccgccgugcugcggagacucuguaagcggucugacguccugcuggaaccuuuccgcagaggagugauggagaaacuccagcugggccccgaaauucuucagcgggagaacccucgccugaucuaugcuagacucagcggcuuugggcaguccggaucuuucugccggcuggccggccacgauauuaauuaccuugcucugagcgggggacgcaacuccaucuuuaaguucuuuagcguugaaaauucugagauugaguccgugggcagcaccucuagaacagaacaugucggguggugguccacguuccucuaugaccugcaagauagccgguggggaauccacggcuguuggucuaacagaacccccuuucugcgcgccgcggaccagcggacauggaccaaaguguga

SEQ ID NO: 475 - protein, 920 aa, Artificial Sequence
  ANDR__Homo_sapiens__P10275
MEVQLGLGRVYPRPPSKTYRGAFQNLFQSVREVIQNPGPRHPEAASAAPPGASLLLLQQQQQQQQQQQQQQQQQQQQQQQETSPRQQQQQQGEDGSPQAHRRGPTGYLVLDEEQQPSQPQSALECHPERGCVPEPGAAVAASKGLPQQLPAPPDEDDSAAPSTLSLLGPTFPGLSSCSADLKDILSEASTMQLLQQQQQEAVSEGSSSGRAREASGAPTSSKDNYLGGTSTISDNAKELCKAVSVSMGLGVEALEHLSPGEQLRGDCMYAPLLGVPPAVRPTPCAPLAECKGSLLDDSAGKSTEDTAEYSPFKGGYTKGLEGESLGCSGSAAAGSSGTLELPSTLSLYKSGALDEAAAYQSRDYYNFPLALAGPPPPPPPPHPHARIKLENPLDYGSAWAAAAAQCRYGDLASLHGAGAAGPGSGSPSAAASSSWHTLFTAEEGQLYGPCGGGGGGGGGGGGGGGGGGGGGGGEAGAVAPYGYTRPPQGLAGQESDFTAPDVWYPGGMVSRVPYPSPTCVKSEMGPWMDSYSGPYGDMRLETARDHVLPIDYYFPPQKTCLICGDEASGCHYGALTCGSCKVFFKRAAEGKQKYLCASRNDCTIDKFRRKNCPSCRLRKCYEAGMTLGARKLKKLGNLKLQEEGEASSTTSPTEETTQKLTVSHIEGYECQPIFLNVLEAIEPGVVCAGHDNNQPDSFAALLSSLNELGERQLVHVVKWAKALPGFRNLHVDDQMAVIQYSWMGLMVFAMGWRSFTNVNSRMLYFAPDLVFNEYRMHKSRMYSQCVRMRHLSQEFGWLQITPQEFLCMKALLLFSIIPVDGLKNQKFFDELRMNYIKELDRIIACKRKNPTSCSRRFYQLTKLLDSVQPIARELHQFTFDLLIKSHMVSVDFPEMMAEIISVQVPKILSGKVKPIYFHTQ

SEQ ID NO: 476 - RNA, 2763 nt, Artificial Sequence
  ANDR__Homo_sapiens__EAX05380
auggaagugcaguuagggcugggaagggucuacccucggccgccguccaagaccuaccgaggagcuuuccagaaucuguuccagagcgugcgcgaagugauccagaacccgggccccaggcacccagaggccgcgagcgcagcaccucccggcgccaguuugcugcugcugcagcagcagcagcagcagcagcagcagcagcagcagcagcagcagcagcagcagcagcagcagcagcaagagacuagccccaggcagcagcagcagcagcagggugaggaugguucuccccaagcccaucguagaggccccacaggcuaccugguccuggaugaggaacagcaaccuucacagccgcagucggcccuggagugccaccccgagagagguugcgucccagagccuggagccgccguggccgccagcaaggggcugccgcagcagcugccagcaccuccggacgaggaugacucagcugccccauccacguugucccugcugggccccacuuuccccggcuuaagcagcugcuccgcugaccuuaaagacauccugagcgaggccagcaccaugcaacuccuucagcaacagcagcaggaagcaguauccgaaggcagcagcagcgggagagcgagggaggccucgggggcucccacuuccuccaaggacaauuacuuagggggcacuucgaccauuucugacaacgccaaggaguuguguaaggcagugucgguguccaugggccuggguguggaggcguuggagcaucugaguccaggggaacagcuucggggggauugcauguacgccccacuuuugggaguuccacccgcugugcgucccacuccuugugccccauuggccgaaugcaaagguucucugcuagacgacagcgcaggcaagagcacugaagauacugcugaguauuccccuuucaagggagguuacaccaaagggcuagaaggcgagagccuaggcugcucuggcagcgcugcagcagggagcuccgggacacuugaacugccgucuacccugucucucuacaaguccggagcacuggacgaggcagcugcguaccagagucgcgacuacuacaacuuuccacuggcucuggccggaccgccgcccccuccgccgccuccccauccccacgcucgcaucaagcuggagaacccgcuggacuacggcagcgccugggcggcugcggcggcgcagugccgcuauggggaccuggcgagccugcauggcgcgggugcagcgggacccgguucugggucacccucagccgccgcuuccucauccuggcacacucucuucacagccgaagaaggccaguuguauggaccguguggugguggugggggugguggcggcggcggcggcggcggcggcggcggcggcggcggcggcggcggcggcgaggcgggagcuguagcccccuacggcuacacucggcccccucaggggcuggcgggccaggaaagcgacuucaccgcaccugaugugugguacccuggcggcauggugagcagagugcccuaucccagucccacuugugucaaaagcgaaaugggccccuggauggauagcuacuccggaccuuacggggacaugcguuuggagacugccagggaccauguuuugcccauugacuauuacuuuccaccccagaagaccugccugaucuguggagaugaagcuucugggugucacuauggagcucucacauguggaagcugcaaggucuucuucaaaagagccgcugaagggaaacagaaguaccugugcgccagcagaaaugauugcacuauugauaaauuccgaaggaaaaauuguccaucuugucgucuucggaaauguuaugaagcagggaugacucugggagcccggaagcugaagaaacuugguaaucugaaacuacaggaggaaggagaggcuuccagcaccaccagccccacugaggagacaacccagaagcugacagugucacacauugaaggcuaugaaugucagcccaucuuucugaauguccuggaagccauugagccagguguagugugugcuggacacgacaacaaccagcccgacuccuuugcagccuugcucucuagccucaaugaacugggagagagacagcuuguacacguggucaagugggccaaggccuugccuggcuuccgcaacuuacacguggacgaccagauggcugucauucaguacuccuggauggggcucaugguguuugccaugggcuggcgauccuucaccaaugucaacuccaggaugcucuacuucgccccugaucugguuuucaaugaguaccgcaugcacaagucccggauguacagccaguguguccgaaugaggcaccucucucaagaguuuggauggcuccaaaucaccccccaggaauuccugugcaugaaagcacugcuacucuucagcauuauuccaguggaugggcugaaaaaucaaaaauucuuugaugaacuucgaaugaacuacaucaaggaacucgaucguaucauugcaugcaaaagaaaaaaucccacauccugcucaagacgcuucuaccagcucaccaagcuccuggacuccgugcagccuauugcgagagagcugcaucaguucacuuuugaccugcuaaucaagucacacauggugagcguggacuuuccggaaaugauggcagagaucaucucugugcaagugcccaagauccuuucugggaaagucaagcccaucuauuuccacacccaguga

SEQ ID NO: 477 - RNA, 2763 nt, Artificial Sequence
  derived and/or modified sequence opt1 from ANDR__Homo_sapiens__EAX05380
auggaggugcagcugggccucgggcgcgucuacccccggccgcccagcaagaccuaccgcggcgccuuccagaaccuguuccaguccgugcgggaggugauccagaaccccgggccccgccacccggaggccgcgagcgccgccccccccggcgccucccugcuccugcugcagcagcagcagcagcagcagcagcagcagcagcagcagcagcagcagcagcagcagcagcagcagcaggagaccagcccccggcagcagcagcagcagcagggggaggacggcuccccgcaggcccaccgccggggccccacgggguaccucguccuggacgaggagcagcagcccagccagccccaguccgcgcuggagugccacccggagcgcggcugcgugcccgagcccggggccgccguggccgcgagcaagggccucccccagcagcugccggccccccccgacgaggacgacuccgccgcccccagcacccugucccuccuggggccgaccuuccccggccugagcuccugcagcgccgaccucaaggacauccuguccgaggcgagcaccaugcagcugcuccagcagcagcagcaggaggccgucuccgagggcagcuccagcgggcgggcccgcgaggccagcggcgcccccacguccagcaaggacaacuaccuggggggcaccuccaccaucagcgacaacgcgaaggagcugugcaaggccguguccgugagcaugggccucggggucgaggcccuggagcaccugucccccggcgagcagcuccggggggacugcauguacgccccgcugcugggcgugccccccgccgugcgccccaccccgugcgcgccccucgccgagugcaaggggagccugcuggacgacuccgccggcaagagcacggaggacaccgccgaguacucccccuucaagggcggguacaccaagggccucgagggggagagccugggcugcuccgggagcgccgcggccggcuccagcggcacccuggagcucccguccacgcugagccuguacaaguccggggcccucgacgaggccgcggccuaccagagccgggacuacuacaacuucccccuggcccuggccggcccccccccgcccccccccccgccccacccccacgcccgcaucaagcucgagaacccccuggacuacgggagcgcgugggccgccgccgccgcgcagugccgguacggcgaccuggccucccuccacggggccggcgccgccggcccggggagcggcucccccagcgcggccgccuccagcuccuggcacacccuguucaccgccgaggaggggcagcuguacggccccugcggcgggggcgggggcgggggcggcgggggcgggggcgggggcggcgggggcgggggcgggggcggcggggaggcgggcgccgucgcccccuacggguacacccgcccgccccagggccucgccgggcaggagagcgacuucacggcccccgacgugugguaccccggcggcauggugucccgggucccguaccccagccccaccugcgugaaguccgagauggggcccuggauggacagcuacuccggcccguacggggacaugcgccuggagaccgcgcgggaccacgugcugcccaucgacuacuacuuccccccgcagaagaccugccucaucugcggcgacgaggccagcggcugccacuacggggcccugacgugcggcuccugcaaggucuucuucaagcgcgccgccgaggggaagcagaaguaccugugcgcgagccggaacgacugcaccaucgacaaguuccgccgcaagaacugccccuccugccggcugcgcaagugcuacgaggccggcaugacccucggggcccggaagcugaagaagcugggcaaccucaagcugcaggaggagggcgaggccagcagcaccacgucccccaccgaggagaccacccagaagcugacggugagccacaucgagggguacgagugccagcccaucuuccucaacgugcuggaggccaucgagccgggcgucgugugcgcggggcacgacaacaaccagcccgacuccuucgccgcccugcucagcucccugaacgagcugggcgagcgccagcucgugcacgucgugaagugggccaaggcgcugcccggguuccggaaccugcacgucgacgaccagauggccgugauccaguacagcuggaugggccucaugguguucgccaugggcuggcgcuccuucaccaacgucaacagccggaugcuguacuucgcccccgaccugguguucaacgaguaccgcaugcacaagucccggauguacagccagugcgugcgcaugcggcaccucucccaggaguucggguggcugcagaucaccccgcaggaguuccugugcaugaaggcccuccugcuguucagcaucauccccgucgacggccucaagaaccagaaguucuucgacgagcugcgcaugaacuacaucaaggagcuggaccggaucaucgcgugcaagcgcaagaaccccaccuccugcagccggcgcuucuaccagcucacgaagcugcuggacuccgugcagcccaucgcccgggagcuccaccaguucaccuucgaccugcugaucaagagccacaugguguccgucgacuucccggagaugauggccgagaucaucagcgugcaggugcccaagauccucuccgggaaggucaagcccaucuacuuccacacccaguga

SEQ ID NO: 478 - RNA, 2763 nt, Artificial Sequence
  derived and/or modified sequence opt2 from ANDR__Homo_sapiens__EAX05380
auggagguccagcucggccucggccgcgucuacccccgcccccccuccaagaccuaccgcggcgccuuccagaaccucuuccaguccguccgcgaggucauccagaaccccggcccccgccaccccgaggccgccuccgccgccccccccggcgccucccuccuccuccuccagcagcagcagcagcagcagcagcagcagcagcagcagcagcagcagcagcagcagcagcagcagcaggagaccuccccccgccagcagcagcagcagcagggcgaggacggcuccccccaggcccaccgccgcggccccaccggcuaccucguccucgacgaggagcagcagcccucccagccccaguccgcccucgagugccaccccgagcgcggcugcguccccgagcccggcgccgccgucgccgccuccaagggccucccccagcagcuccccgccccccccgacgaggacgacuccgccgcccccuccacccucucccuccucggccccaccuuccccggccucuccuccugcuccgccgaccucaaggacauccucuccgaggccuccaccaugcagcuccuccagcagcagcagcaggaggccgucuccgagggcuccuccuccggccgcgcccgcgaggccuccggcgcccccaccuccuccaaggacaacuaccucggcggcaccuccaccaucuccgacaacgccaaggagcucugcaaggccgucuccgucuccaugggccucggcgucgaggcccucgagcaccucucccccggcgagcagcuccgcggcgacugcauguacgccccccuccucggcgucccccccgccguccgccccacccccugcgccccccucgccgagugcaagggcucccuccucgacgacuccgccggcaaguccaccgaggacaccgccgaguacucccccuucaagggcggcuacaccaagggccucgagggcgagucccucggcugcuccggcuccgccgccgccggcuccuccggcacccucgagcuccccuccacccucucccucuacaaguccggcgcccucgacgaggccgccgccuaccagucccgcgacuacuacaacuucccccucgcccucgccggccccccccccccccccccccccccccacccccacgcccgcaucaagcucgagaacccccucgacuacggcuccgccugggccgccgccgccgcccagugccgcuacggcgaccucgccucccuccacggcgccggcgccgccggccccggcuccggcucccccuccgccgccgccuccuccuccuggcacacccucuucaccgccgaggagggccagcucuacggccccugcggcggcggcggcggcggcggcggcggcggcggcggcggcggcggcggcggcggcggcggcggcggcggcgaggccggcgccgucgcccccuacggcuacacccgccccccccagggccucgccggccaggaguccgacuucaccgcccccgacgucugguaccccggcggcauggucucccgcguccccuaccccucccccaccugcgucaaguccgagaugggccccuggauggacuccuacuccggccccuacggcgacaugcgccucgagaccgcccgcgaccacguccuccccaucgacuacuacuuccccccccagaagaccugccucaucugcggcgacgaggccuccggcugccacuacggcgcccucaccugcggcuccugcaaggucuucuucaagcgcgccgccgagggcaagcagaaguaccucugcgccucccgcaacgacugcaccaucgacaaguuccgccgcaagaacugccccuccugccgccuccgcaagugcuacgaggccggcaugacccucggcgcccgcaagcucaagaagcucggcaaccucaagcuccaggaggagggcgaggccuccuccaccaccucccccaccgaggagaccacccagaagcucaccgucucccacaucgagggcuacgagugccagcccaucuuccucaacguccucgaggccaucgagcccggcgucgucugcgccggccacgacaacaaccagcccgacuccuucgccgcccuccucuccucccucaacgagcucggcgagcgccagcucguccacgucgucaagugggccaaggcccuccccggcuuccgcaaccuccacgucgacgaccagauggccgucauccaguacuccuggaugggccucauggucuucgccaugggcuggcgcuccuucaccaacgucaacucccgcaugcucuacuucgcccccgaccucgucuucaacgaguaccgcaugcacaagucccgcauguacucccagugcguccgcaugcgccaccucucccaggaguucggcuggcuccagaucaccccccaggaguuccucugcaugaaggcccuccuccucuucuccaucauccccgucgacggccucaagaaccagaaguucuucgacgagcuccgcaugaacuacaucaaggagcucgaccgcaucaucgccugcaagcgcaagaaccccaccuccugcucccgccgcuucuaccagcucaccaagcuccucgacuccguccagcccaucgcccgcgagcuccaccaguucaccuucgaccuccucaucaagucccacauggucuccgucgacuuccccgagaugauggccgagaucaucuccguccagguccccaagauccucuccggcaaggucaagcccaucuacuuccacacccaguga

SEQ ID NO: 479 - RNA, 2763 nt, Artificial Sequence
  derived and/or modified sequence opt3 from ANDR__Homo_sapiens__EAX05380
auggaggugcagcugggccucgggagagucuaccccaggccuccaagcaagaccuaucggggagccuuccaaaaccuuuuucaguccguucgcgaagugauccagaauccggguccccgacacccugaggcugcaucugccgcgccacccggcgcuucacuguuguuacugcagcaacagcagcagcaacagcagcagcaacagcagcaacagcagcagcaacagcagcagcaacagcaggaaacaaguccucgucagcaacagcagcagcaaggggaggacggaagcccacaggcccauagaaggggccccacugguuaccuaguacucgaugaggaacagcaaccuucccagccacagucugcacuggagugccacccggaacgggggugugugcccgagccuggagccgcugucgcagccucgaaaggccuuccacagcaacugcccgcuccuccagacgaagaugacucagccgcgcccagcacguugagucuccugggcccgaccuucccugggcuguccucuugcagcgcagaucucaaggacauuuuauccgaggccucaacaaugcagcugcuucagcagcaacagcaggaggcugugagugaaggaagcagcuccggucgcgccagagaggcaucaggcgcucccacuagcaguaaagauaacuaucuugggggaaccucuacaauauccgacaaugccaaggaacuguguaaagcgguuagcgugucgaugggccuaggugucgaggcccucgaacaucugucuccaggggagcagcuuaggggagauugcauguacgcaccucuguugggcgugcccccagcuguacggcccaccccuugugccccacucgcugagugcaagggcucccuguuagacgauucagccgggaagaguacugaagacacagcagaguauagcccguuuaaaggagguuacaccaagggccuggaaggggagucccucggauguucuggcagcgccgcugcggguucaagugggacgcuugaacugcccuccacuuugagccuauauaaaucuggcgcacuggaugaggccgcugccuaccaaucacgcgacuacuauaacuucccucucgcacuggccggaccacccccuccacccccgccuccacacccccaugcucgaaucaaguuggagaauccucuggacuacggcagugccugggcagcggcugccgcacagugcagauauggggauuuggccagccuccacggagcuggugccgcaggccccggguccggaucuccaucggcugccgcgagcuccucauggcacacccuguuuacagccgaagagggccaguuauacgguccuugugggggcggaggcgggggagguggcgggggaggcggugggggcggaggcgggggaggcggugggggaggcgaagcuggugcaguugcccccuauggcuacacuaggccaccgcaagggcuggcuggacaggagagugacuucaccgccccugaugugugguaucccggcgggauggucucucgggugccauaccccagcccuacaugcgugaaauccgaaaugggaccauggauggacucauacagcggccccuauggugauaugcgucuagagaccgcacgcgaccauguccucccuauugauuacuauuuuccgccacagaagacgugucugaucugcggggacgaggcgucuggaugccacuacggcgcccuuacuugugguuccugcaagguuuucuuuaaaagagcugccgaaggcaagcagaaauauuugugugcaaguaggaacgauugcacaauugacaaguuccggcgaaagaauugucccagcugccgccugagaaaguguuacgaggcugggaugacccucggagccaggaaacugaagaaacuuggcaaccugaaauugcaagaagagggggaggcaucuuccacuacaucaccuaccgaagagacgacccagaagcucacagugagucauaucgaaggauaugagugccagccaauauuucugaauguauuagaagccaucgagcccggcguggucugugcuggucacgauaacaaucagccugacagcuucgcggcccugcuaucgucccucaacgagcugggggaacggcaacuugugcacguugugaaaugggcaaaggcuuugccgggauuucgcaaucugcaugucgacgaucagauggccgugauucaguacucuuggaugggccucaugguauucgccauggguuggagaucuuucacuaacguuaauucaaggaugcuguacuuugcucccgacuuaguguucaacgaguaucguaugcacaaaagucggauguacucccagugcguccgaaugagacaucugucucaagaauuuggcuggcuucagaucaccccacaggaguucuuguguaugaaggcacuccugcuauuuagcauuaucccuguggaugggcugaagaaccagaaauucuuugacgaacucaggaugaauuauauaaaggagcuggaucgcauuaucgccugcaaacggaagaaccccacauccugcucaagaagguucuaccaacuuacuaaauugcuggacagcguccagccaauugcgcgcgaguuacaccaguuuaccuucgaucuccugaucaagagucauauggugucuguugacuuuccugaaaugauggcugagaucauuuccgugcaaguacccaagauacuuagcggaaaagucaagccaaucuauuuccacacacaguga

SEQ ID NO: 480 - RNA, 2763 nt, Artificial Sequence
  derived and/or modified sequence opt4 from ANDR__Homo_sapiens__EAX05380
auggaggugcagcugggccugggcagaguguaccccagaccccccagcaagaccuacagaggcgccuuccagaaccuguuccagagcgugagagaggugauccagaaccccggccccagacaccccgaggccgccagcgccgccccccccggcgccagccugcugcugcugcagcagcagcagcagcagcagcagcagcagcagcagcagcagcagcagcagcagcagcagcagcagcaggagaccagccccagacagcagcagcagcagcagggcgaggacggcagcccccaggcccacagaagaggccccaccggcuaccuggugcuggacgaggagcagcagcccagccagccccagagcgcccuggagugccaccccgagagaggcugcgugcccgagcccggcgccgccguggccgccagcaagggccugccccagcagcugcccgccccccccgacgaggacgacagcgccgcccccagcacccugagccugcugggccccaccuuccccggccugagcagcugcagcgccgaccugaaggacauccugagcgaggccagcaccaugcagcugcugcagcagcagcagcaggaggccgugagcgagggcagcagcagcggcagagccagagaggccagcggcgcccccaccagcagcaaggacaacuaccugggcggcaccagcaccaucagcgacaacgccaaggagcugugcaaggccgugagcgugagcaugggccugggcguggaggcccuggagcaccugagccccggcgagcagcugagaggcgacugcauguacgccccccugcugggcgugccccccgccgugagacccacccccugcgccccccuggccgagugcaagggcagccugcuggacgacagcgccggcaagagcaccgaggacaccgccgaguacagccccuucaagggcggcuacaccaagggccuggagggcgagagccugggcugcagcggcagcgccgccgccggcagcagcggcacccuggagcugcccagcacccugagccuguacaagagcggcgcccuggacgaggccgccgccuaccagagcagagacuacuacaacuucccccuggcccuggccggccccccccccccccccccccccccccacccccacgccagaaucaagcuggagaacccccuggacuacggcagcgccugggccgccgccgccgcccagugcagauacggcgaccuggccagccugcacggcgccggcgccgccggccccggcagcggcagccccagcgccgccgccagcagcagcuggcacacccuguucaccgccgaggagggccagcuguacggccccugcggcggcggcggcggcggcggcggcggcggcggcggcggcggcggcggcggcggcggcggcggcggcggcgaggccggcgccguggcccccuacggcuacaccagacccccccagggccuggccggccaggagagcgacuucaccgcccccgacgugugguaccccggcggcauggugagcagagugcccuaccccagccccaccugcgugaagagcgagaugggccccuggauggacagcuacagcggccccuacggcgacaugagacuggagaccgccagagaccacgugcugcccaucgacuacuacuuccccccccagaagaccugccugaucugcggcgacgaggccagcggcugccacuacggcgcccugaccugcggcagcugcaagguguucuucaagagagccgccgagggcaagcagaaguaccugugcgccagcagaaacgacugcaccaucgacaaguucagaagaaagaacugccccagcugcagacugagaaagugcuacgaggccggcaugacccugggcgccagaaagcugaagaagcugggcaaccugaagcugcaggaggagggcgaggccagcagcaccaccagccccaccgaggagaccacccagaagcugaccgugagccacaucgagggcuacgagugccagcccaucuuccugaacgugcuggaggccaucgagcccggcguggugugcgccggccacgacaacaaccagcccgacagcuucgccgcccugcugagcagccugaacgagcugggcgagagacagcuggugcacguggugaagugggccaaggcccugcccggcuucagaaaccugcacguggacgaccagauggccgugauccaguacagcuggaugggccugaugguguucgccaugggcuggagaagcuucaccaacgugaacagcagaaugcuguacuucgcccccgaccugguguucaacgaguacagaaugcacaagagcagaauguacagccagugcgugagaaugagacaccugagccaggaguucggcuggcugcagaucaccccccaggaguuccugugcaugaaggcccugcugcuguucagcaucauccccguggacggccugaagaaccagaaguucuucgacgagcugagaaugaacuacaucaaggagcuggacagaaucaucgccugcaagagaaagaaccccaccagcugcagcagaagauucuaccagcugaccaagcugcuggacagcgugcagcccaucgccagagagcugcaccaguucaccuucgaccugcugaucaagagccacauggugagcguggacuuccccgagaugauggccgagaucaucagcgugcaggugcccaagauccugagcggcaaggugaagcccaucuacuuccacacccaguga

SEQ ID NO: 481 - RNA, 2763 nt, Artificial Sequence
  derived and/or modified sequence opt5 from ANDR__Homo_sapiens__EAX05380
auggaggugcagcugggccucgggagagucuacccccggccuccgagcaagaccuaucgcggagccuuccaaaaccuguuucaguccguuagagaagugauccagaaucccggcccucggcaccccgaggcugccucugcggcuccucccggggccagccuucugcuccugcagcaacagcagcagcaacagcagcagcaacagcagcaacagcagcagcaacagcagcagcaacagcaggaaacauccccucgccagcaacagcagcagcaaggagaggacggcucuccgcaggcccauagacgggggcccacgggauaccuugugcuggaugaggaacagcaaccuagccagccccaguccgcucucgagugccacccugaacgcggcuguguccccgagccgggcgccgcuguggccgcgucuaaagggcugccucagcaacugcccgccccucccgacgaagaugacagcgcugcccccuccacccucagccugcuuggaccuacauucccgggccugucuuccugcagcgcugaucucaaggacauucugucugaggccuccaccaugcagcuucugcagcagcaacagcaggaggcgguuagcgaagggucuuccagcggcagagcccgggaggcuuccggagcccccacaucuagcaaagauaacuaucucgggggaaccuccacaaucagcgacaaugcuaaggaacuguguaaagccgugucugucuccaugggccugggcguggaggcccucgaacaucugagcccuggggagcagcuucgcggagauugcauguacgcuccccugcucggcguuccucccgcggugagaccgaccccuugugcuccccuggcugagugcaaggggucucuucuggacgauagcgccggaaaguccacggaagacaccgccgaguauucuccuuuuaaaggcggguacacaaagggacucgaaggcgagagccugggcuguuccgggagcgcugccgcgggaucuuccggcacccuggaacuccccagcacacugucucuuuauaaauccggggcucuggaugaggccgccgcuuaccaaagccgggacuacuauaacuucccucucgcccuggcuggacccccgccucccccucccccgccccacccucaugcccgcauuaaacuugagaauccccuggacuacggcuccgcgugggccgcugccgcugcccagugcagauauggggaucucgcgucucugcacggcgccggagcugccggcccugggagcggaucccccucugcugccgccagcuccagcuggcacacccuguuuacggcugaagagggccagcucuacgggccuuguggaggcgggggcggaggcgggggaggcgggggaggcgggggcggaggcgggggaggcgggggaggcggggaagcgggcgccgucgcucccuauggauacacacggccgccucaaggccuggccgggcaggagucugacuucaccgcccccgaugugugguauccuggaggcauggugucccgcguccccuacccgagcccuacaugcguuaaaucugaaauggggcccuggauggacuccuacagcggaccuuauggcgauaugagacuugagaccgcucgggaccaugugcugcccaucgauuacuauuuucccccucagaagaccugucucauuugcggcgacgaggccucugggugccacuacggagcgcugacauguggcagcugcaagguguucuuuaaaagagcugccgaagggaagcagaaauaucugugugccucccgcaacgauugcacgaucgacaaguuccggagaaagaauuguccgagcugccgccuucggaaguguuacgaggcuggaaugacccucggcgccagaaaacugaagaagcuggggaaccucaaacugcaagaagagggagaggcgucuuccacaaccagccccacagaagagaccacgcagaaacuuacagucucccauaucgaaggcuaugagugccagccuauuuuucugaaugugcucgaagcuaucgagcccggcguugugugugccgggcacgauaacaaucagccugacucuuucgccgcucugcugagcucccuuaacgagcucggagaacgccaacugguccacgugguuaagugggccaaggcucugcccggcuuucggaaucuccauguggacgaucagauggccgucauucaguacucuuggauggggcugaugguguucgcgaugggauggcgcagcuucaccaacgucaauuccagaaugcuuuacuuugccccugaccugguguucaacgaguaucggaugcacaaaucuagaauguacagccagugcguucgcaugcggcaucucucccaagaauuuggcuggcugcagaucaccccgcaggaguuccuguguaugaaggcccuucuccuguuuagcauuauccccguggaugggcugaagaaccagaaauucuuugacgaacucagaaugaauuauauuaaggagcuggaucggaucaucgccugcaaacgcaagaacccuacaucuugcuccagacgguucuaccaacuuaccaaacugcucgacagcguccagcccauugcuagagagcugcaccaguuuacauucgaucugcuuaucaagucucauaugguguccguugacuuuccugaaaugauggccgagauuaucagcgugcaaguccccaagauucucucuggaaaagugaagccgaucuauuuccacacgcaguga

SEQ ID NO: 482 - protein, 412 aa, Artificial Sequence [sequence omitted]

SEQ ID NO: 483 - RNA, 1239 nt, Artificial Sequence
  ART-4__Homo_sapiens__AAH64630
auggcuccaguggagcacguuguggcggaugcuggggcuuuccugcggcaugcggcucugcaggacaucgggaagaacauuuacaccauccgggagguggucacugagauucgggacaaggccacacgcaggcggcucgcuguccugcccuacgagcugcgguucaaggagcccuuaccggaauacgugcggcuggugacugaguuuucaaagaaaacaggagacuaccccagccucucugccacggacauccaagugcuugcacucacauaccaguuggaagcagaguuuguuggggugucucaccuaaaacaagaaccacagaagguuaaggugagcucaucgauucagcacccagaaacaccucugcacauuucugguuuccaucugcccuacaagccuaaacccccacaagaaacagaaaaaggacacucagcuugugagccugagaaccuggaauuuaguuccuucauguucuggagaaacccuuugcccaacaucgaucaugaacugcaggagcugcugauugacagaggugaggacguuccaagugaggaggaggaggaggaagaaaacggguuugaagacagaaaagaugacagcgaugacgacggggguggcuggauaacccccaguaacaucaagcagauccagcaggagcuggagcagugugacguccccgaggacgugcggguuggcugccugaccacagacuucgccaugcagaauguucugcugcagauggggcugcacgugcuggcggugaacggcaugcugauucgugaggcccggagcuacaucuugcgcugccauggcuguuucaagacaacgucugacaugagccgaguguucugcucacacugugggaacaagacccugaagaaaguguccgugaccgucagcgacgacggcacccugcacaugcacuucucccgcaaccccaaggugcugaacccccgcggccuccgguacucgcuucccacucccaaagggggcaaauacgccaucaacccccaucucaccgaggaucagcgcuucccucagcugcgacucucccaaaaggccaggcagaaaaccaacguguucgccccugacuacaucgccggggugucacccuuugucgagaaugacaucuccagccgcucagcuacccugcagguccgggacagcaccuugggagcugggcggagacgcuuaaaucccaacgcuuccagaaagaaguuugugaagaaaagguga

SEQ ID NO: 484 - RNA, 1239 nt, Artificial Sequence
  derived and/or modified sequence opt1 from ART-4__Homo_sapiens__AAH64630
auggcccccguggagcacgucguggccgacgcgggcgccuuccugcgccacgccgcccuccaggacaucgggaagaacaucuacaccauccgggagguggucaccgagauccgcgacaaggccacgcggcgccggcuggcggugcugccguacgagcuccgcuucaaggagccccugcccgaguacgugcggcuggucaccgaguucagcaagaagaccggcgacuaccccucccucagcgccaccgacauccaggugcuggcccugacguaccagcucgaggccgaguucgugggggucucccaccugaagcaggagccgcagaaggugaaggugagcuccagcauccagcaccccgagacgccccugcacaucuccggcuuccaccuccccuacaagccgaagccgccccaggagaccgagaaggggcacagcgcgugcgagcccgagaaccuggaguucuccagcuucauguucuggcgcaacccccugcccaacaucgaccacgagcuccaggagcugcugaucgaccggggcgaggacguccccuccgaggaggaggaggaggaggagaacggcuucgaggaccgcaaggacgacagcgacgacgacgggggcggguggaucacccccuccaacaucaagcagauccagcaggagcucgagcagugcgacgugccggaggacgugcgggucggcugccugaccaccgacuucgccaugcagaacgugcugcuccagauggggcugcacgugcuggccgucaacggcaugcucauccgcgaggcccggagcuacauccugcgcugccacggcugcuucaagaccaccuccgacaugagccggguguucugcucccacugcgggaacaagacgcugaagaaggugagcgucaccguguccgacgacggcacccuccacaugcacuucagccgcaaccccaaggugcugaacccccgggggcugcgcuacagccuccccaccccgaagggcggcaaguacgccaucaacccccaccugacggaggaccagcgguucccccagcugcgccucucccagaaggcgcggcagaagaccaacgucuucgcccccgacuacaucgccggggugagcccguucgucgagaacgacaucuccagccgcuccgccacccuccaggugcgcgacagcacccugggcgccgggcggcgccggcugaaccccaacgcgucccgcaagaaguucgugaagaagcgguga

SEQ ID NO: 485 - RNA, 1239 nt, Artificial Sequence
  derived and/or modified sequence opt2 from ART-4__Homo_sapiens__AAH64630
auggcccccgucgagcacgucgucgccgacgccggcgccuuccuccgccacgccgcccuccaggacaucggcaagaacaucuacaccauccgcgaggucgucaccgagauccgcgacaaggccacccgccgccgccucgccguccuccccuacgagcuccgcuucaaggagccccuccccgaguacguccgccucgucaccgaguucuccaagaagaccggcgacuaccccucccucuccgccaccgacauccagguccucgcccucaccuaccagcucgaggccgaguucgucggcgucucccaccucaagcaggagccccagaaggucaaggucuccuccuccauccagcaccccgagaccccccuccacaucuccggcuuccaccuccccuacaagcccaagcccccccaggagaccgagaagggccacuccgccugcgagcccgagaaccucgaguucuccuccuucauguucuggcgcaacccccuccccaacaucgaccacgagcuccaggagcuccucaucgaccgcggcgaggacguccccuccgaggaggaggaggaggaggagaacggcuucgaggaccgcaaggacgacuccgacgacgacggcggcggcuggaucacccccuccaacaucaagcagauccagcaggagcucgagcagugcgacguccccgaggacguccgcgucggcugccucaccaccgacuucgccaugcagaacguccuccuccagaugggccuccacguccucgccgucaacggcaugcucauccgcgaggcccgcuccuacauccuccgcugccacggcugcuucaagaccaccuccgacaugucccgcgucuucugcucccacugcggcaacaagacccucaagaaggucuccgucaccgucuccgacgacggcacccuccacaugcacuucucccgcaaccccaagguccucaacccccgcggccuccgcuacucccuccccacccccaagggcggcaaguacgccaucaacccccaccucaccgaggaccagcgcuucccccagcuccgccucucccagaaggcccgccagaagaccaacgucuucgcccccgacuacaucgccggcgucucccccuucgucgagaacgacaucuccucccgcuccgccacccuccagguccgcgacuccacccucggcgccggccgccgccgccucaaccccaacgccucccgcaagaaguucgucaagaagcgcuga

SEQ ID NO: 486 - RNA, 1239 nt, Artificial Sequence
  derived and/or modified sequence opt3 from ART-4__Homo_sapiens__AAH64630
auggcccccguggagcacgucguugcugacgcaggcgccuuccugagacaugcggcucuccaggauaucgggaagaacauuuacaccauaagggaagugguaacagagauccgggacaaagccacucgccgacgucuugcagugcugccuuaugaauugagauuuaaggagccauuaccggaauacgucaggcuggugacggaguucagcaaaaagaccggagauuaucccucccuaucugccacagacauucaaguucucgcucugacuuaccagcuugaggcagaauuugugggugucucacaccugaaacaggagccucagaaggugaagguaaguagcuccauccaacauccagaaacccccuugcacauuucuggcuuccaucucccuuauaaaccaaagcccccucaggagacagagaaagggcacucggccugcgaaccagagaaucuggaauuuagcucauucauguuuuggcggaacccgcugcccaauaucgaucacgagcuccaggaauuacugauagaccgcggagaggauguuccuagugaggaagaggaagaggaagagaacggcuucgaggacagaaaggaugacuccgaugacgauggugggggauggaucaccccaucuaauauuaaacagauccaacaggaacuugagcagugugacgugcccgaagacgucagggugggcugcuugacuacagauuuugcuaugcagaacgugcugcuacaaaugggccuccauguccuggccguuaaugggaugcuuauucgggaggcgcgcagcuacauccugcgaugucacggaugcuucaagaccacguccgacaugucaagaguguuuuguagucauugcgguaacaagacuuugaaaaagguaagcgugaccgucucugaugacggcacacuccacaugcacuucuccaggaauccuaaagugcugaacccacggggguuacguuauucacugcccacuccgaagggaggcaaauacgcaauaaauccucaucucaccgaagaucagcgcuuuccccagcuuagacugagccaaaaggccaggcagaaaacaaacguuuucgcuccagacuacauugccggugugaguccuuucgucgagaaugauaucucuucccggagcgcaaccuugcagguacgagacucgacgcuaggggcuggacgcagaaggcugaaccccaaugccucucggaagaaguuugugaaaaagcgcuga

SEQ ID NO: 487 - RNA, 1239 nt, Artificial Sequence
  derived and/or modified sequence opt4 from ART-4__Homo_sapiens__AAH64630
auggcccccguggagcacgugguggccgacgccggcgccuuccugagacacgccgcccugcaggacaucggcaagaacaucuacaccaucagagagguggugaccgagaucagagacaaggccaccagaagaagacuggccgugcugcccuacgagcugagauucaaggagccccugcccgaguacgugagacuggugaccgaguucagcaagaagaccggcgacuaccccagccugagcgccaccgacauccaggugcuggcccugaccuaccagcuggaggccgaguucgugggcgugagccaccugaagcaggagccccagaaggugaaggugagcagcagcauccagcaccccgagaccccccugcacaucagcggcuuccaccugcccuacaagcccaagcccccccaggagaccgagaagggccacagcgccugcgagcccgagaaccuggaguucagcagcuucauguucuggagaaacccccugcccaacaucgaccacgagcugcaggagcugcugaucgacagaggcgaggacgugcccagcgaggaggaggaggaggaggagaacggcuucgaggacagaaaggacgacagcgacgacgacggcggcggcuggaucacccccagcaacaucaagcagauccagcaggagcuggagcagugcgacgugcccgaggacgugagagugggcugccugaccaccgacuucgccaugcagaacgugcugcugcagaugggccugcacgugcuggccgugaacggcaugcugaucagagaggccagaagcuacauccugagaugccacggcugcuucaagaccaccagcgacaugagcagaguguucugcagccacugcggcaacaagacccugaagaaggugagcgugaccgugagcgacgacggcacccugcacaugcacuucagcagaaaccccaaggugcugaaccccagaggccugagauacagccugcccacccccaagggcggcaaguacgccaucaacccccaccugaccgaggaccagagauucccccagcugagacugagccagaaggccagacagaagaccaacguguucgcccccgacuacaucgccggcgugagccccuucguggagaacgacaucagcagcagaagcgccacccugcaggugagagacagcacccugggcgccggcagaagaagacugaaccccaacgccagcagaaagaaguucgugaagaagagauga

SEQ ID NO: 488 - RNA, 1239 nt, Artificial Sequence
  derived and/or modified sequence opt5 from ART-4__Homo_sapiens__AAH64630
auggcccccguggagcacgucguugcugacgccggcgcguuccugagacaugcugcccuccaggauaucgggaagaacauuuacaccauccgggaaguggugacagagauucgcgacaaagccacgagacggcgccuggcuguccuuccuuaugaacugagauuuaaggagccgcuccccgaauacgugcggcugguuaccgaguucagcaaaaagacaggagauuauccuucccuuucugccaccgacauccaagugcuggcucucacauaccagcuggaggccgaauuugucggcgugagccaccugaaacaggagccccagaagguuaagguguccucuagcauucaacauccugaaacaccccuccacaucuccggguuccaucugccuuauaaaccgaagcccccucaggagaccgagaaaggacacucugcgugcgaacccgagaaucuugaauuuagcuccuucauguuuuggcgcaacccucugcccaauaucgaucacgagcuccaggaacugcuuauugacagaggcgaggaugucccgagcgaggaagaggaagaggaagagaacggguucgaggaccggaaggaugacucugaugacgauggaggcggcuggaucaccccuuccaauauuaaacagauccaacaggaacuggagcagugugacgugcccgaagacgugcgcgucgggugccucacgaccgauuuugccaugcagaacguucugcugcaaaugggacuccaugugcuggcugugaauggcaugcuuauuagagaggcccggagcuacauccugcgcugucacgggugcuucaagacaaccucugacauguccagagucuuuuguagccauugcggaaacaagacacucaaaaaggugucuguuaccguguccgaugacggcacgcugcacaugcacuucagccggaauccuaaaguccuuaacccccgcgggcugagauauucccuccccacaccuaagggaggcaaauacgcuauuaauccgcaucugaccgaagaucagcgguuuccccagcugagacucucucaaaaggcccgccagaaaacaaacguguucgcgccugacuacaucgccggcguuagccccuucguggagaaugauaucuccagccggucugcuacccugcaggucagagacuccacccuuggggccggacgccggagacugaacccuaaugcuagccgcaagaaguuugugaaaaagcgguga

SEQ ID NO: 489 - protein, 327 aa, Artificial Sequence
  ARTC1/m__Homo_sapiens__P52961
MQMPAMMSLLLVSVGLMEALQAQSHPITRRDLFSQEIQLDMALASFDDQYAGCAAAMTAALPDLNHTEFQANQVYADSWTLASSQWQERQARWPEWSLSPTRPSPPPLGFRDEHGVALLAYTANSPLHKEFNAAVREAGRSRAHYLHHFSFKTLHFLLTEALQLLGSGQRPPRCHQVFRGVHGLRFRPAGPRATVRLGGFASASLKHVAAQQFGEDTFFGIWTCLGAPIKGYSFFPGEEEVLIPPFETFQVINASRLAQGPARIYLRALGKHSTYNCEYIKDKKCKSGPCHLDNSAMGQSPLSAVWSLLLLLWFLVVRAFPDGPGLL

SEQ ID NO: 490 - RNA, 984 nt, Artificial Sequence
  ARTC1/m__Homo_sapiens__AAH69102
augcagaugccugcuaugaugucucugcuucuugugucugugggccucauggaagcacuucaggcccagagccaccccaucacacgacgagaccucuucucucaagagauucagcuggacauggcccuggccuccuuugaugaccaguacgcuggcugugcugcugccaugacagcugcucucccggaucucaaccacacggaguuccaggccaaccagguguaugcagacagcuggacacuggcaagcagccaauggcaggagcgucaggccagguggccagaguggagucucagccccacccguccauccccgccaccccugggcuuccgcgaugagcaugggguggcccuccuggccuacacagccaacagcccccugcacaaggaguucaaugcagccgugcgugaggcgggccgcucccgggcccacuaccuccaccacuucuccuucaagacacuccauuuccugcugacugaggcccugcagcuccugggcagcggccagcguccaccccggugccaccagguguuccgaggugugcacggccugcgcuuccggccagcagggccccgggccaccgugaggcuggggggcuuugcuucugccucccugaagcauguugcagcccagcaguuuggugaggacaccuucuucggcaucuggaccugccuuggggccccuaucaagggcuacuccuucuucccuggagaggaagaggugcugaucccccccuuugagaccuuccaagugaucaaugccagcagacuggcccagggccccgcccgcaucuaccuccgagcccugggcaagcacagcaccuacaacugcgaguacaucaaagacaagaagugcaagucugggccuugccaucuggauaauucagccaugggucagagcccccucucugcagucuggucuuugcugcugcugcucugguuccucguggugagggccuuuccagaugguccaggccuccuuuga

SEQ ID NO: 491 - RNA, 984 nt, Artificial Sequence
  derived and/or modified sequence opt1 from ARTC1/m__Homo_sapiens__AAH69102
augcagaugcccgccaugaugagccugcuccugguguccgucggccugauggaggcccuccaggcgcagagccaccccaucacccgccgggaccuguucucccaggagauccagcuggacauggcccucgccagcuucgacgaccaguacgccgggugcgccgcggccaugaccgccgcccugcccgaccugaaccacacggaguuccaggcgaaccagguguacgccgacuccuggacccucgccagcucccaguggcaggagcgccaggcccgguggcccgaguggagccugucccccacccgcccguccccgccgccccugggcuuccgggacgagcacgggguggcccuccuggcguacaccgccaacagcccccugcacaaggaguucaacgccgccguccgcgaggccggccggagccgcgcgcacuaccuccaccacuucuccuucaagacgcugcacuuccugcucaccgaggcccugcagcugcucgggagcggccagcggccgccccgcugccaccagguguuccggggcgugcacgggcugcgcuuccggcccgccggcccccgcgccaccguccggcucgggggcuucgccuccgcgagccugaagcacguggccgcccagcaguucggggaggacaccuucuucggcaucuggacgugccugggcgcccccaucaagggguacuccuucuuccccggcgaggaggaggugcugaucccgcccuucgagaccuuccaggucaucaacgccagccgccucgcgcaggggcccgcccggaucuaccugcgcgcccugggcaagcacuccaccuacaacugcgaguacaucaaggacaagaagugcaagagcggccccugccaccucgacaacagcgccauggggcaguccccgcugagcgcgguguggucccugcuccugcugcucugguuccuggugguccgggccuuccccgacggccccgggcugcucuga

SEQ ID NO: 492 - RNA, 984 nt, Artificial Sequence
  derived and/or modified sequence opt2 from ARTC1/m__Homo_sapiens__AAH69102
augcagaugcccgccaugaugucccuccuccucgucuccgucggccucauggaggcccuccaggcccagucccaccccaucacccgccgcgaccucuucucccaggagauccagcucgacauggcccucgccuccuucgacgaccaguacgccggcugcgccgccgccaugaccgccgcccuccccgaccucaaccacaccgaguuccaggccaaccaggucuacgccgacuccuggacccucgccuccucccaguggcaggagcgccaggcccgcuggcccgaguggucccucucccccacccgccccuccccccccccccucggcuuccgcgacgagcacggcgucgcccuccucgccuacaccgccaacuccccccuccacaaggaguucaacgccgccguccgcgaggccggccgcucccgcgcccacuaccuccaccacuucuccuucaagacccuccacuuccuccucaccgaggcccuccagcuccucggcuccggccagcgccccccccgcugccaccaggucuuccgcggcguccacggccuccgcuuccgccccgccggcccccgcgccaccguccgccucggcggcuucgccuccgccucccucaagcacgucgccgcccagcaguucggcgaggacaccuucuucggcaucuggaccugccucggcgcccccaucaagggcuacuccuucuuccccggcgaggaggagguccucaucccccccuucgagaccuuccaggucaucaacgccucccgccucgcccagggccccgcccgcaucuaccuccgcgcccucggcaagcacuccaccuacaacugcgaguacaucaaggacaagaagugcaaguccggccccugccaccucgacaacuccgccaugggccaguccccccucuccgccgucuggucccuccuccuccuccucugguuccucgucguccgcgccuuccccgacggccccggccuccucuga

SEQ ID NO: 493 - RNA, 984 nt, Artificial Sequence
  derived and/or modified sequence opt3 from ARTC1/m__Homo_sapiens__AAH69102
augcagaugcccgccaugaugagccugcuccuuguguccgucggccugauggaggcuuugcaagcacagucucacccuaucaccagaagggacuuauucucacaggaaauucagcuggauauggcccuagcgaguuuugacgaucaauacgcugggugcgccgcagccaugacagcugcacucccagaccugaaccauacugaguuccaggccaaucagguuuaugcugauagcuggacgcuugccuccucucaguggcaagaacggcaggcgcgcuggccggaguggucgcugucacccacccgaccuagcccacccccuuugggauuucgugacgaacacgguguggcacuccuggccuacacagcuaacaguccacugcauaaggaguucaaugccgcaguaagagaggcuggcaggucccgggcccacuaucuccaucacuuuucuuucaaaacuuuacacuuucugcuuaccgaagcguugcagcugcuagggagcggacagagacccccucgcugucaucaaguguucaggggcguccacggucuccgguuucgcccagccgggccgcgagcaacagugagacugggaggcuucgcuuccgccucacuuaagcauguugcugcccagcaguuuggcgaggauaccuucuuugggauauggacuugccugggagcacccaucaaagguuacaguuucuucccuggcgaagaggagguguugauuccacccuuugaaacauuccaagucaucaacgccagcaggcucgcucaggggccugcgcggauuuaucugcgugcauuaggaaagcacucuaccuacaauugugaguauaucaaagacaagaagugcaaauccggcccaugucaccuggauaacucagccaugggucagagcccccucagugcuguguggucucuucuguugcuacugugguuucucguaguucgcgccuucccggacgggccuggacugcuuuga

SEQ ID NO: 494 - RNA, 984 nt, Artificial Sequence
  derived and/or modified sequence opt4 from ARTC1/m__Homo_sapiens__AAH69102
augcagaugcccgccaugaugagccugcugcuggugagcgugggccugauggaggcccugcaggcccagagccaccccaucaccagaagagaccuguucagccaggagauccagcuggacauggcccuggccagcuucgacgaccaguacgccggcugcgccgccgccaugaccgccgcccugcccgaccugaaccacaccgaguuccaggccaaccagguguacgccgacagcuggacccuggccagcagccaguggcaggagagacaggccagauggcccgaguggagccugagccccaccagacccagcccccccccccugggcuucagagacgagcacggcguggcccugcuggccuacaccgccaacagcccccugcacaaggaguucaacgccgccgugagagaggccggcagaagcagagcccacuaccugcaccacuucagcuucaagacccugcacuuccugcugaccgaggcccugcagcugcugggcagcggccagagaccccccagaugccaccagguguucagaggcgugcacggccugagauucagacccgccggccccagagccaccgugagacugggcggcuucgccagcgccagccugaagcacguggccgcccagcaguucggcgaggacaccuucuucggcaucuggaccugccugggcgcccccaucaagggcuacagcuucuuccccggcgaggaggaggugcugaucccccccuucgagaccuuccaggugaucaacgccagcagacuggcccagggccccgccagaaucuaccugagagcccugggcaagcacagcaccuacaacugcgaguacaucaaggacaagaagugcaagagcggccccugccaccuggacaacagcgccaugggccagagcccccugagcgccguguggagccugcugcugcugcugugguuccugguggugagagccuuccccgacggccccggccugcuguga

SEQ ID NO: 495 - RNA, 984 nt, Artificial Sequence
  derived and/or modified sequence opt5 from ARTC1/m__Homo_sapiens__AAH69102
augcagaugcccgccaugaugagccugcuccugguguccgucggccuuauggaggcucugcaagcccagucucacccuaucaccagacgggaccucuucagccaggaaauucagcuggauauggcgcuugcuuccuuugacgaucaauacgccgggugcgccgcugccaugacagcugcccugccggaccucaaccauacggaguuccaggcgaaucagguuuaugccgauucuuggacccuggcuagcucccaguggcaagaacgccaggccagauggcccgaguggucucugagcccuacacggcccuccccucccccucucggauuucgcgacgaacacggcguggcucugcuugccuacaccgcgaacagcccgcugcauaaggaguucaaugccgcugugagagaggccgggcggucucgcgcucacuaucuccaucacuuuuccuucaaaacacugcacuuucuucugaccgaagcccuccagcugcugggaagcggccagagacccccucggugucaucaagucuuccgcggggugcacggacucagauuucggcccgccggcccucgcgcuacaguuagacugggcggguucgcgucugccucccuuaagcauguggcugcccagcaguuuggagaggauaccuucuuuggcaucuggacgugccugggggcccccauuaaaggauacagcuucuucccgggcgaagaggagguccucaucccucccuuugaaaccuuccaagugauuaacgcuucucggcuggcccaggggccugcgcgcaucuaucuuagagcucugggaaagcacuccacauacaauugugaguauaucaaagacaagaagugcaaaagcggccccugucaccucgauaacuccgccaugggccagucuccccugagcgccguuuggucccugcuccugcuucugugguuucucgugguccgggcuuucccugacgggccgggacugcuuuga

SEQ ID NO: 496 - protein, 344 aa, Artificial Sequence
  AURKB__Homo_sapiens__Q96GD4
MAQKENSYPWPYGRQTAPSGLSTLPQRVLRKEPVTPSALVLMSRSNVQPTAAPGQKVMENSSGTPDILTRHFTIDDFEIGRPLGKGKFGNVYLAREKKSHFIVALKVLFKSQIEKEGVEHQLRREIEIQAHLHHPNILRLYNYFYDRRRIYLILEYAPRGELYKELQKSCTFDEQRTATIMEELADALMYCHGKKVIHRDIKPENLLLGLKGELKIADFGWSVHAPSLRRKTMCGTLDYLPPEMIEGRMHNEKVDLWCIGVLCYELLVGNPPFESASHNETYRRIVKVDLKFPASVPMGAQDLISKLLRHNPSERLPLAQVSAHPWVRANSRRVLPPSALQSVA

SEQ ID NO: 497 - RNA, 1035 nt, Artificial Sequence
  AURKB__Homo_sapiens__AAH09751
auggcccagaaggagaacuccuaccccuggcccuacggccgacagacggcuccaucuggccugagcacccugccccagcgaguccuccggaaagagccugucaccccaucugcacuuguccucaugagccgcuccaauguccagcccacagcugccccuggccagaaggugauggagaauagcagugggacacccgacaucuuaacgcggcacuucacaauugaugacuuugagauugggcguccucugggcaaaggcaaguuuggaaacguguacuuggcucgggagaagaaaagccauuucaucguggcgcucaagguccucuucaagucccagauagagaaggagggcguggagcaucagcugcgcagagagaucgaaauccaggcccaccugcaccaucccaacauccugcgucucuacaacuauuuuuaugaccggaggaggaucuacuugauucuagaguaugccccccgcggggagcucuacaaggagcugcagaagagcugcacauuugacgagcagcgaacagccacgaucauggaggaguuggcagaugcucuaauguacugccaugggaagaaggugauucacagagacauaaagccagaaaaucugcucuuagggcucaagggagagcugaagauugcugacuucggcuggucugugcaugcgcccucccugaggaggaagacaauguguggcacccuggacuaccugcccccagagaugauugaggggcgcaugcacaaugagaagguggaucuguggugcauuggagugcuuugcuaugagcugcugguggggaacccacccuuugagagugcaucacacaacgagaccuaucgccgcaucgucaagguggaccuaaaguuccccgcuuccgugcccaugggagcccaggaccucaucuccaaacugcucaggcauaaccccucggaacggcugccccuggcccaggucucagcccacccuuggguccgggccaacucucggagggugcugccucccucugcccuucaaucugucgccuga

SEQ ID NO: 498 - RNA, 1035 nt, Artificial Sequence
  derived and/or modified sequence opt1 from AURKB__Homo_sapiens__AAH09751
auggcccagaaggagaacagcuaccccuggcccuacggccgccagaccgcccccuccgggcugagcacccucccccagcgggugcugcgcaaggagcccgucacgccguccgcgcuggugcucaugagccgguccaacgugcagcccaccgccgcccccggccagaaggucauggagaacagcuccgggacccccgacauccugacccgccacuucacgaucgacgacuucgagaucggccggccgcuggggaagggcaaguucggcaacguguaccucgcccgcgagaagaagucccacuucaucguggcccugaagguccuguucaagagccagaucgagaaggaggggguggagcaccagcuccggcgcgagaucgagauccaggcgcaccuccaccaccccaacauccugcggcuguacaacuacuucuacgaccgccggcgcaucuaccugauccuggaguacgcgccccggggcgagcucuacaaggagcugcagaaguccugcaccuucgacgagcagcgcaccgccaccaucauggaggagcuggccgacgcccucauguacugccacgggaagaaggugauccaccgggacaucaagcccgagaaccugcugcucggccugaagggggagcugaagaucgccgacuucggcuggagcguccacgccccgagccuccgccggaagacgaugugcggcacccuggacuaccugccgcccgagaugaucgaggggcgcaugcacaacgagaagguggaccucuggugcaucggcgugcugugcuacgagcugcucgucgggaacccgcccuucgaguccgccagccacaacgagaccuaccggcgcaucgugaagguggaccugaaguuccccgccuccguccccaugggcgcgcaggaccugaucagcaagcuccugcggcacaaccccuccgagcgccugccccucgcccaggugagcgcccaccccugggugcgcgccaacucccggcgcguccugccgcccagcgcccugcagagcguggcguga

SEQ ID NO: 499 - RNA, 1035 nt, Artificial Sequence
  derived and/or modified sequence opt2 from AURKB__Homo_sapiens__AAH09751
auggcccagaaggagaacuccuaccccuggcccuacggccgccagaccgcccccuccggccucuccacccucccccagcgcguccuccgcaaggagcccgucacccccuccgcccucguccucaugucccgcuccaacguccagcccaccgccgcccccggccagaaggucauggagaacuccuccggcacccccgacauccucacccgccacuucaccaucgacgacuucgagaucggccgcccccucggcaagggcaaguucggcaacgucuaccucgcccgcgagaagaagucccacuucaucgucgcccucaagguccucuucaagucccagaucgagaaggagggcgucgagcaccagcuccgccgcgagaucgagauccaggcccaccuccaccaccccaacauccuccgccucuacaacuacuucuacgaccgccgccgcaucuaccucauccucgaguacgccccccgcggcgagcucuacaaggagcuccagaaguccugcaccuucgacgagcagcgcaccgccaccaucauggaggagcucgccgacgcccucauguacugccacggcaagaaggucauccaccgcgacaucaagcccgagaaccuccuccucggccucaagggcgagcucaagaucgccgacuucggcugguccguccacgcccccucccuccgccgcaagaccaugugcggcacccucgacuaccucccccccgagaugaucgagggccgcaugcacaacgagaaggucgaccucuggugcaucggcguccucugcuacgagcuccucgucggcaacccccccuucgaguccgccucccacaacgagaccuaccgccgcaucgucaaggucgaccucaaguuccccgccuccguccccaugggcgcccaggaccucaucuccaagcuccuccgccacaaccccuccgagcgccucccccucgcccaggucuccgcccaccccuggguccgcgccaacucccgccgcguccucccccccuccgcccuccaguccgucgccuga

SEQ ID NO: 500 - RNA, 1035 nt, Artificial Sequence
  derived and/or modified sequence opt3 from AURKB__Homo_sapiens__AAH09751
auggcccagaaggagaacagcuaccccuggccuuauggcagacaaaccgcuccauccgggcugucuacacucccgcagagggugcuucggaaagaacccgucacuccuucagcacugguuuugaugagucgcagcaaugugcagccaacggccgcgcccggacagaagguaauggagaacuccucugguaccccugacaucuuaacacgacacuucacuauugaugacuuugaaauaggccguccacuggggaaaggaaaguucggcaauguguaccuagcuagagagaaaaagucgcauuuuaucgucgcccucaaggugcuguucaaaucacaaauugaaaaggaggguguugagcaccagcuuaggcgggaaaucgagauucaggcacaucugcaccaucccaacaucuugcgccucuauaauuacuuuuaugauagaaggcggauauaccugauccuggaauaugccccucgcggggagcucuacaaagaguuacagaaaagcugcaccuucgacgaacaacgaacagcuaccauuauggaggaacuggcagaugcccuuauguacugucacggaaagaaggugauccacagagacauuaagccagagaacuugcugcuaggccucaaaggcgaacugaagaucgcugauuuuggguggaguguccaugccccgucccuuaggcggaaaacuaugugcggaacacuggacuauuugcccccugagaugauagagggucguaugcacaaugaaaagguggaucucugguguauuggcguacugugcuacgaguuacugguugggaacccacccuucgaaucugcgagccauaaugagaccuaucgcagaaucgugaaagucgaccucaaguuuccugcauccgugccaaugggagcccaggaucuuauuucaaaacuguugaggcacaaccccagugaacggcuaccgcuggcucaggugagcgcccacccuuggguccgagcaaauucucgcagaguucugcccccauccgcucuccagucaguggccuga

SEQ ID NO: 501 - RNA, 1035 nt, Artificial Sequence
  derived and/or modified sequence opt4 from AURKB__Homo_sapiens__AAH09751
auggcccagaaggagaacagcuaccccuggcccuacggcagacagaccgcccccagcggccugagcacccugccccagagagugcugagaaaggagcccgugacccccagcgcccuggugcugaugagcagaagcaacgugcagcccaccgccgcccccggccagaaggugauggagaacagcagcggcacccccgacauccugaccagacacuucaccaucgacgacuucgagaucggcagaccccugggcaagggcaaguucggcaacguguaccuggccagagagaagaagagccacuucaucguggcccugaaggugcuguucaagagccagaucgagaaggagggcguggagcaccagcugagaagagagaucgagauccaggcccaccugcaccaccccaacauccugagacuguacaacuacuucuacgacagaagaagaaucuaccugauccuggaguacgcccccagaggcgagcuguacaaggagcugcagaagagcugcaccuucgacgagcagagaaccgccaccaucauggaggagcuggccgacgcccugauguacugccacggcaagaaggugauccacagagacaucaagcccgagaaccugcugcugggccugaagggcgagcugaagaucgccgacuucggcuggagcgugcacgcccccagccugagaagaaagaccaugugcggcacccuggacuaccugccccccgagaugaucgagggcagaaugcacaacgagaagguggaccuguggugcaucggcgugcugugcuacgagcugcuggugggcaacccccccuucgagagcgccagccacaacgagaccuacagaagaaucgugaagguggaccugaaguuccccgccagcgugcccaugggcgcccaggaccugaucagcaagcugcugagacacaaccccagcgagagacugccccuggcccaggugagcgcccaccccugggugagagccaacagcagaagagugcugccccccagcgcccugcagagcguggccuga

SEQ ID NO: 502 - RNA, 1035 nt, Artificial Sequence
  derived and/or modified sequence opt5 from AURKB__Homo_sapiens__AAH09751
auggcccagaaggagaacagcuaccccuggccuuauggcagacaaaccgcuccguccgggcugucuacacucccccagcgggugcugcgcaaagaaccugucacgcccagcgcccuuguucugauguccagaucuaaugugcagccuaccgcggcucccggacagaaggugauggagaacagcuccggcacaccugacauccucacccggcacuucacaauugaugacuuugaaaucgggcgcccgcugggaaaaggcaaguucgggaaugucuaccuugccagagagaaaaagucucauuuuauuguggcccugaagguucucuucaaaagccaaaucgaaaaggagggaguggagcaccagcugcggcgcgaaauugagauccaggcucaucugcaccaucccaacauccucagacuguauaauuacuuuuaugaucggcgcagaauuuaccuuauccuggaauaugccccucggggcgagcucuacaaagagcugcagaaguccugcaccuucgacgaacaacgcacagcuaccauuauggaggaacuugccgaugcgcugauguacugucacggcaaaaaggucauccacagagacauuaagcccgagaaccuccugcuggggcucaaaggagaacugaagaucgccgauuuuggcuggagcgugcaugcuccuucucuucggcgcaaaacgaugugcgggacccuggacuaucugcccccggagaugauugagggaagaaugcacaaugaaaagguugaucucugguguaucggcgugcuuugcuacgagcugcucgucgggaacccucccuucgaauccgccagccauaaugagacauaucggagaaucgugaaaguggaccugaaguuuccugcuucuguccccaugggagcccaggaucugauuuccaaacuccugcgccacaaccccagcgaacggcuuccucuggcgcagguuucugcccacccgugggugagagcuaauucccgccgggugcugcccccuagcgcccuccaguccgucgcuuga

SEQ ID NO: 503 - protein, 119 aa, Artificial Sequence
  B2MG__Homo_sapiens__P61769
MSRSVALAVLALLSLSGLEAIQRTPKIQVYSRHPAENGKSNFLNCYVSGFHPSDIEVDLLKNGERIEKVEHSDLSFSKDWSFYLLYYTEFTPTEKDEYACRVNHVTLSQPKIVKWDRDM

SEQ ID NO: 504 - RNA, 360 nt, Artificial Sequence
  B2MG__Homo_sapiens__AAD48083
augucucgcuccguggccuuagcugugcucgcgcuacucucucuuucuggccuggaggcuauccagcguacuccaaagauucagguuuacucacgucauccagcagagaauggaaagucaaauuuccugaauugcuaugugucuggguuucauccauccgacauugaaguugacuuacugaagaauggagagagaauugaaaaaguggagcauucagacuugucuuucagcaaggacuggucuuucuaucucuuguacuacacugaauucacccccacugaaaaagaugaguaugccugccgugugaaccaugugacuuugucacagcccaagauaguuaagugggaucgagacauguaa

SEQ ID NO: 505 - RNA, 360 nt, Artificial Sequence
  derived and/or modified sequence opt1 from B2MG__Homo_sapiens__AAD48083
augagccgcuccguggcccuggccguccucgcgcugcugagccucuccggccuggaggccauccagcggacccccaagauccagguguacagccgccacccggccgagaacgggaaguccaacuuccugaacugcuacgugagcggcuuccaccccuccgacaucgaggucgaccuccugaagaacggggagcggaucgagaagguggagcacagcgaccuguccuucagcaaggacugguccuucuaccuccuguacuacaccgaguucacgcccaccgagaaggacgaguacgccugccgcgugaaccacgucacccugagccagcccaagaucgugaagugggaccgggacauguga

SEQ ID NO: 506 - RNA, 360 nt, Artificial Sequence
  derived and/or modified sequence opt2 from B2MG__Homo_sapiens__AAD48083
augucccgcuccgucgcccucgccguccucgcccuccucucccucuccggccucgaggccauccagcgcacccccaagauccaggucuacucccgccaccccgccgagaacggcaaguccaacuuccucaacugcuacgucuccggcuuccaccccuccgacaucgaggucgaccuccucaagaacggcgagcgcaucgagaaggucgagcacuccgaccucuccuucuccaaggacugguccuucuaccuccucuacuacaccgaguucacccccaccgagaaggacgaguacgccugccgcgucaaccacgucacccucucccagcccaagaucgucaagugggaccgcgacauguga

SEQ ID NO: 507 - RNA, 360 nt, Artificial Sequence
  derived and/or modified sequence opt3 from B2MG__Homo_sapiens__AAD48083
augagcagauccguggcccuggcuguccucgcacuucugucuuugucaggcuuagaggccauccagaggacccccaagauucaaguuuacagucggcacccugcggaaaacgggaaaagcaauuuccugaacugcuauguguccggauuucauccaucugacauagagguagaucuacucaagaauggugaacgcaucgagaaaguggaacacucggaccugucauucagcaaggauuggaguuuuuaccuucuguauuacacagaguucacuccgacggagaaagacgaauaugcuugucgagucaaccaugugaccuugucccagcccaagauuguuaagugggaucgugacauguga

SEQ ID NO: 508 - RNA, 360 nt, Artificial Sequence
  derived and/or modified sequence opt4 from B2MG__Homo_sapiens__AAD48083
augagcagaagcguggcccuggccgugcuggcccugcugagccugagcggccuggaggccauccagagaacccccaagauccagguguacagcagacaccccgccgagaacggcaagagcaacuuccugaacugcuacgugagcggcuuccaccccagcgacaucgagguggaccugcugaagaacggcgagagaaucgagaagguggagcacagcgaccugagcuucagcaaggacuggagcuucuaccugcuguacuacaccgaguucacccccaccgagaaggacgaguacgccugcagagugaaccacgugacccugagccagcccaagaucgugaagugggacagagacauguga

SEQ ID NO: 509 - RNA, 360 nt, Artificial Sequence
  derived and/or modified sequence opt5 from B2MG__Homo_sapiens__AAD48083
augagcagauccguggcccuggcuguccucgcccugcuuucucugagcggccucgaggcgauccagcggacccccaagauucaaguuuacucccgccacccugcugaaaacgggaaaucuaauuuccugaacugcuaugugagcggauuucauccguccgacaucgagguggaucuucugaagaauggcgaaagaauugagaaagucgaacacucugaccucagcuucuccaaggauuggagcuuuuaccugcuguauuacacagaguucacgcccaccgagaaagacgaauaugccugucgggugaaccauguuacacucucucagccuaagaucgugaagugggaucgcgacauguga

SEQ ID NO: 510 - protein, 378 aa, Artificial Sequence
  B3GN5__Homo_sapiens__Q9BYG0
MRMLVSGRRVKKWQLIIQLFATCFLASLMFFWEPIDNHIVSHMKSYSYRYLINSYDFVNDTLSLKHTSAGPRYQYLINHKEKCQAQDVLLLLFVKTAPENYDRRSGIRRTWGNENYVRSQLNANIKTLFALGTPNPLEGEELQRKLAWEDQRYNDIIQQDFVDSFYNLTLKLLMQFSWANTYCPHAKFLMTADDDIFIHMPNLIEYLQSLEQIGVQDFWIGRVHRGAPPIRDKSSKYYVSYEMYQWPAYPDYTAGAAYVISGDVAAKVYEASQTLNSSLYIDDVFMGLCANKIGIVPQDHVFFSGEGKTPYHPCIYEKMMTSHGHLEDLQDLWKNATDPKVKTISKGFFGQIYCRLMKIILLCKISYVDTYPCRAAFI

SEQ ID NO: 511 - RNA, 1137 nt, Artificial Sequence
  B3GN5__Homo_sapiens__AAH28058
augagaauguugguuaguggcagaagagucaaaaaauggcaguuaauuauucaguuauuugcuacuuguuuuuuagcgagccucauguuuuuuugggaaccaaucgauaaucacauugugagccauaugaagucauauucuuacagauaccucauaaauagcuaugacuuugugaaugauacccugucucuuaagcacaccucagcggggccucgcuaccaauacuugauuaaccacaaggaaaagugucaagcucaagacguccuccuuuuacuguuuguaaaaacugcuccugaaaacuaugaucgacguuccggaauuagaaggacguggggcaaugaaaauuauguucggucucagcugaaugccaacaucaaaacucuguuugccuuaggaacuccuaauccacuggagggagaagaacuacaaagaaaacuggcuugggaagaucaaagguacaaugauauaauucagcaagacuuuguugauucuuucuacaaucuuacucugaaauuacuuaugcaguucaguugggcaaauaccuauuguccacaugccaaauuucuuaugacugcugaugaugacauauuuauucacaugccaaaucugauugaguaccuucaaaguuuagaacaaauugguguucaagacuuuuggauuggucguguucaucguggugccccucccauuagagauaaaagcagcaaauacuacguguccuaugaaauguaccaguggccagcuuacccugacuacacagccggagcugccuauguaaucuccggugauguagcugccaaagucuaugaggcaucacagacacuaaauucaagucuuuacauagacgauguguucaugggccucugugccaauaaaauagggauaguaccgcaggaccauguguuuuuuucuggagaggguaaaacuccuuaucaucccugcaucuaugaaaaaaugaugacaucucauggacacuuagaagaucuccaggaccuuuggaagaaugcuacagauccuaaaguaaaaaccauuuccaaagguuuuuuuggucaaauauacugcagauuaaugaagauaauucuccuuuguaaaauuagcuauguggacacauacccuuguagggcugcguuuaucuaa

SEQ ID NO: 512 - RNA, 1137 nt, Artificial Sequence
  derived and/or modified sequence opt1 from B3GN5__Homo_sapiens__AAH28058
augcgcaugcuggugagcggccggcgcgucaagaaguggcagcucaucauccagcuguucgcgaccugcuuccuggccucccucauguucuucugggagcccaucgacaaccacaucgugagccacaugaaguccuacagcuaccgguaccugaucaacuccuacgacuucgugaacgacacccugagccucaagcacacguccgccgggccgcgcuaccaguaccugaucaaccacaaggagaagugccaggcccaggacguccugcuccugcuguucgugaagaccgcccccgagaacuacgaccggcgcagcggcauccggcgcaccugggggaacgagaacuacgugcggucccagcucaacgccaacaucaagacccuguucgcccugggcacgcccaacccccucgagggggaggagcugcagcgcaagcuggcgugggaggaccagcgguacaacgacaucauccagcaggacuucgucgacagcuucuacaaccucacccugaagcugcucaugcaguucuccugggccaacaccuacugcccgcacgccaaguuccugaugaccgccgacgacgacaucuucauccacaugcccaaccugaucgaguaccuccagagccuggagcagaucggcgugcaggacuucuggaucggccgcgugcaccgcggggcgccgcccauccgggacaaguccagcaaguacuacgucuccuacgagauguaccaguggcccgccuaccccgacuacacggccggcgccgccuacgugaucagcggggacguggcggccaaggucuacgaggccucccagacccugaacagcucccucuacaucgacgacguguucaugggccugugcgccaacaagaucgggaucgugccccaggaccacgucuucuucagcggcgagggcaagacccccuaccacccgugcaucuacgagaagaugaugaccagccacgggcaccuggaggaccuccaggaccuguggaagaacgccacggaccccaaggugaagaccaucuccaagggcuucuucgggcagaucuacugccggcugaugaagaucauccuccugugcaagaucagcuacguggacaccuaccccugccgcgcggccuucaucuga

SEQ ID NO: 513 - RNA, 1137 nt, Artificial Sequence
  derived and/or modified sequence opt2 from B3GN5__Homo_sapiens__AAH28058
augcgcaugcucgucuccggccgccgcgucaagaaguggcagcucaucauccagcucuucgccaccugcuuccucgccucccucauguucuucugggagcccaucgacaaccacaucgucucccacaugaaguccuacuccuaccgcuaccucaucaacuccuacgacuucgucaacgacacccucucccucaagcacaccuccgccggcccccgcuaccaguaccucaucaaccacaaggagaagugccaggcccaggacguccuccuccuccucuucgucaagaccgcccccgagaacuacgaccgccgcuccggcauccgccgcaccuggggcaacgagaacuacguccgcucccagcucaacgccaacaucaagacccucuucgcccucggcacccccaacccccucgagggcgaggagcuccagcgcaagcucgccugggaggaccagcgcuacaacgacaucauccagcaggacuucgucgacuccuucuacaaccucacccucaagcuccucaugcaguucuccugggccaacaccuacugcccccacgccaaguuccucaugaccgccgacgacgacaucuucauccacaugcccaaccucaucgaguaccuccagucccucgagcagaucggcguccaggacuucuggaucggccgcguccaccgcggcgccccccccauccgcgacaaguccuccaaguacuacgucuccuacgagauguaccaguggcccgccuaccccgacuacaccgccggcgccgccuacgucaucuccggcgacgucgccgccaaggucuacgaggccucccagacccucaacuccucccucuacaucgacgacgucuucaugggccucugcgccaacaagaucggcaucgucccccaggaccacgucuucuucuccggcgagggcaagacccccuaccaccccugcaucuacgagaagaugaugaccucccacggccaccucgaggaccuccaggaccucuggaagaacgccaccgaccccaaggucaagaccaucuccaagggcuucuucggccagaucuacugccgccucaugaagaucauccuccucugcaagaucuccuacgucgacaccuaccccugccgcgccgccuucaucuga

SEQ ID NO: 514 - RNA, 1137 nt, Artificial Sequence
  derived and/or modified sequence opt3 from B3GN5__Homo_sapiens__AAH28058
augagaaugcuggugagcggcaggcgggucaagaaauggcagcucaucauucaacuuuucgcuaccugcuuucuggccuccuugauguucuuuugggagcccauagacaaccacaucguuucucauaugaagucauacaguuaucgcuacuuaauuaauagcuaugauuucgugaacgacacacugucccuaaaacacacuucugcagggccucgauaccaguaucucaucaaucauaaggaaaaaugucaggcccaggauguacugcuucuguuguuugugaagacggcgccagagaacuacgaccguagaucgggaauuaggcggaccugggguaaugaaaacuauguccgcucacaacucaaugcuaacaucaagacacuguucgcccugggcacuccgaauccccucgagggggaagaguuacagagaaaacuggcaugggaggaucagagguacaacgacauaauccagcaagauuuuguggacagcuucuacaaucuuaccuugaagcugcuaaugcaguuuaguugggccaacacauauugcccucacgcuaaauuccucaugaccgcagaugacgauauuuuuauccauaugccaaaucugauugaauaccuucagucccuggagcagaucggaguucaagacuucuggauaggccgggugcaccgcggugcucccccuauucgagauaagucuagcaaauauuacgucuccuaugaaauguaccaguggccagccuaucccgacuacacugccggggcggcauacgugaucucaggagacguagccgcuaagguuuaugaggccagucagacauugaacagcucucucuacauugaugacguguuuaugggccugugugcaaauaagaucggcaucgucccucaagaucacguguucuucuccggggagggaaaaaccccauaucauccgugcauuuacgaaaagaugaugacgucacacggucauuuagaggaccugcaggaucucuggaaaaacgcuacugaccccaaggugaaaaccauaagcaagggcuuuuucgggcagaucuauuguagacuuaugaaaauuauccuguugugcaagauaaguuacgucgauacauauccuuguagggccgcguuuauuuga

SEQ ID NO: 515 - RNA, 1137 nt, Artificial Sequence
  derived and/or modified sequence opt4 from B3GN5__Homo_sapiens__AAH28058
augagaaugcuggugagcggcagaagagugaagaaguggcagcugaucauccagcuguucgccaccugcuuccuggccagccugauguucuucugggagcccaucgacaaccacaucgugagccacaugaagagcuacagcuacagauaccugaucaacagcuacgacuucgugaacgacacccugagccugaagcacaccagcgccggccccagauaccaguaccugaucaaccacaaggagaagugccaggcccaggacgugcugcugcugcuguucgugaagaccgcccccgagaacuacgacagaagaagcggcaucagaagaaccuggggcaacgagaacuacgugagaagccagcugaacgccaacaucaagacccuguucgcccugggcacccccaacccccuggagggcgaggagcugcagagaaagcuggccugggaggaccagagauacaacgacaucauccagcaggacuucguggacagcuucuacaaccugacccugaagcugcugaugcaguucagcugggccaacaccuacugcccccacgccaaguuccugaugaccgccgacgacgacaucuucauccacaugcccaaccugaucgaguaccugcagagccuggagcagaucggcgugcaggacuucuggaucggcagagugcacagaggcgccccccccaucagagacaagagcagcaaguacuacgugagcuacgagauguaccaguggcccgccuaccccgacuacaccgccggcgccgccuacgugaucagcggcgacguggccgccaagguguacgaggccagccagacccugaacagcagccuguacaucgacgacguguucaugggccugugcgccaacaagaucggcaucgugccccaggaccacguguucuucagcggcgagggcaagacccccuaccaccccugcaucuacgagaagaugaugaccagccacggccaccuggaggaccugcaggaccuguggaagaacgccaccgaccccaaggugaagaccaucagcaagggcuucuucggccagaucuacugcagacugaugaagaucauccugcugugcaagaucagcuacguggacaccuaccccugcagagccgccuucaucuga

SEQ ID NO: 516 - RNA, 1137 nt, Artificial Sequence
  derived and/or modified sequence opt5 from B3GN5__Homo_sapiens__AAH28058
augagaaugcuggugagcggccggcgcgucaagaaauggcagcucaucauucaacuguucgcuaccugcuuucuugccucccugauguucuuuugggagcccaucgacaaccacauuguuucucauaugaaaagcuacuccuauagauaccucaucaauucuuaugauuucgugaacgacacacugagccuuaagcacacguccgccgggccucgguaccaguaucugauuaaucauaaggaaaaaugucaggcgcaggaugugcuccugcugcucuuugucaagaccgcuccggagaacuacgaccgcagaucuggaauccggcgcacauggggcaaugaaaacuaugugagaagccaacugaaugccaacaucaagacccuuuucgcccuggggacacccaauccucucgagggagaggaacugcagcggaaacuugcuugggaggaucagcgcuacaacgacauuauccagcaagauuuuguugacuccuucuacaaucugacccucaagcugcugaugcaguuuagcugggccaacacauauugcccccacgcuaaauuccucaugaccgccgaugacgauauuuuuauccauaugccuaaucugauugaauaccuucagucucuggagcagaucggcgugcaagacuucuggauugggagaguccaccggggagcgcccccuauccgcgauaaguccagcaaauauuacgugucuuaugaaauguaccaguggccggccuaucccgacuacacggcuggcgccgcuuacguuaucuccggcgacguggccgcgaaggucuaugaggccagccagacccucaacucuucccuguacauugaugacguguuuauggggcuuugugcuaauaagaucggaauugugccucaagaucacgucuucuucagcggcgaggggaaaacacccuaucauccuugcaucuacgaaaagaugaugaccucccacggacaucuggaggaccuccaggaucuguggaaaaacgccacagaccccaagguuaaaaccauuucuaagggcuuuuucgggcagaucuauuguagacugaugaaaaucauucuccugugcaagaucagcuacguggauacguauccgugucgggcugccuuuauuuga

SEQ ID NO: 517 - protein, 533 aa, Artificial Sequence
  B4GN1__Homo_sapiens__Q00973
MWLGRRALCALVLLLACASLGLLYASTRDAPGLRLPLAPWAPPQSPRRPELPDLAPEPRYAHIPVRIKEQVVGLLAWNNCSCESSGGGLPLPFQKQVRAIDLTKAFDPAELRAASATREQEFQAFLSRSQSPADQLLIAPANSPLQYPLQGVEVQPLRSILVPGLSLQAASGQEVYQVNLTASLGTWDVAGEVTGVTLTGEGQADLTLVSPGLDQLNRQLQLVTYSSRSYQTNTADTVRFSTEGHEAAFTIRIRHPPNPRLYPPGSLPQGAQYNISALVTIATKTFLRYDRLRALITSIRRFYPTVTVVIADDSDKPERVSGPYVEHYLMPFGKGWFAGRNLAVSQVTTKYVLWVDDDFVFTARTRLERLVDVLERTPLDLVGGAVREISGFATTYRQLLSVEPGAPGLGNCLRQRRGFHHELVGFPGCVVTDGVVNFFLARTDKVREVGFDPRLSRVAHLEFFLDGLGSLRVGSCSDVVVDHASKLKLPWTSRDAGAETYARYRYPGSLDESQMAKHRLLFFKHRLQCMTSQ

SEQ ID NO: 518 - RNA, 1602 nt, Artificial Sequence
  B4GN1__Homo_sapiens__AAA35516
auguggcugggccgccgggcccugugcgcucugguccuucugcucgccugcgccucgcuggggcuccuguacgcgagcacccgggacgcgcccggccuccggcuaccucuugcgccgugggcgcccccgcaaagcccccgcaggcccgagcugccagaucuugcuccugagccccgcuacgcacacaucccggucaggaucaaggagcaaguaguggggcugcuggcuuggaacaacugcaguugugaguccaguggggggggccucccccuccccuuccagaaacaaguccgagcuauugaccucaccaaggccuuugacccugcagagcugagggcugccucugccacaagagagcaggaguuccaggccuuucugucgaggagccaguccccagcugaccagcugcucauagccccugccaacuccccgcuccaguacccccuacaggguguggaaguucagccccucaggagcaucuuggugccagggcugagccuucaggcagcuucuggucaggagguauaccaggugaaccugacugccucccuaggcaccugggacguggcaggggaagugacuggaguuacucucacuggagagggucaggcagaucucacccuugucagcccagggcuggaccaacucaacaggcaacuacaacuggucacuuacagcagccgaagcuaccagaccaacacagcagacacaguccgguucuccaccgagggacaugaggcugcuuucacuauccgcauaagacacccgcccaacccucggcuguacccaccugggucucuaccccagggagcccaguacaacaucagcgcucuagucacgauugccaccaagaccuuccuccguuaugaucggcuacgggcucucaucaccaguauccgccgcuucuacccaacgguuaccguggucaucgcugacgacagcgacaagccagagcgcguuaguggccccuacguggaacacuaucucaugcccuucggcaagggcugguucgcaggccggaaccuggccgugucucaaguaaccaccaaguacgugcuguggguggacgacgacuucgucuucacggcgcggacgcggcuggagaggcuuguggacgugcuggagcggacgccgcuggaccugguggggggcgcggugcgcgagaucuccggcuuugccaccacuuaucggcagcugcugagcguggagcccggcgccccaggccucgggaacugccuccggcaaaggcgcggcuuccaccacgagcucgucggcuucccaggcugcguggucaccgacggcgugguuaacuucuuccuggcgcggacugacaaggugcgcgaggucgguuucgacccccgccucagccgcguggcucaucuggaauucuucuuggaugggcuugguucccuucggguuggcuccugcuccgacgucgugguggaucaugcauccaaacugaagcugccuuggacaucaagggaugccggagcagagacuuacgcccgguaccguuacccaggaucacuggacgagagccagauggccaaacaccggcugcucuucuucaaacaccggcugcagugcaugaccucccaguga

SEQ ID NO: 519 - RNA, 1602 nt, Artificial Sequence
  derived and/or modified sequence opt1 from B4GN1__Homo_sapiens__AAA35516
auguggcugggccgccgggcccucugcgcccuggugcugcuccuggcgugcgccagccuggggcuccuguacgccuccacccgcgacgcccccggccugcggcucccgcuggcccccugggcgccgccccagagcccccgccggcccgagcugcccgaccucgcccccgagccgcgcuacgcccacauccccguccggaucaaggagcaggucguggggcugcuggccuggaacaacugcuccugcgagagcuccggcgggggccucccccugcccuuccagaagcagguccgcgcgaucgaccugaccaaggccuucgacccggccgagcuccgggccgccagcgcgacgcgcgagcaggaguuccaggccuuccugucccggagccagucccccgccgaccagcugcucaucgcccccgccaacagcccccugcaguacccgcugcagggcguggaggugcagccccuccgcuccauccuggugcccgggcugagccuccaggcggccuccggccaggagguguaccaggugaaccugaccgccagccuggggaccugggacgucgccggcgaggugaccggggugacgcucaccggcgagggccaggccgaccugacccuggucucccccgggcucgaccagcugaaccggcagcugcagcucgugaccuacagcucccgcagcuaccagacgaacaccgcggacaccgugcgguucuccaccgagggccacgaggccgccuucacgauccgcauccggcacccgcccaacccccgccuguacccgcccgggagccugccccagggcgcccaguacaacaucagcgcccucgucaccaucgcgaccaagaccuuccugcgguacgaccgccugcgggcccucaucacguccauccgccgcuucuaccccaccgugaccguggucaucgccgacgacagcgacaagcccgagcggguguccggcccguacguggagcacuaccugaugcccuucgggaagggcugguucgccgggcgcaaccuggcggucagccaggugaccacgaaguacgugcucugggucgacgacgacuucguguucaccgcccggacccgccuggagcggcuggucgacgugcucgagcgcacgccccuggaccuggugggcggggccguccgggagaucuccggcuucgccaccaccuaccgccagcugcucagcguggagccgggcgcccccgggcugggcaacugccugcggcagcgccggggguuccaccacgagcucgugggcuuccccgggugcgucgugaccgacggcguggucaacuucuuccuggcgcgcaccgacaaggugcgggaggugggcuucgacccccgccugucccgggucgcccaccucgaguucuuccuggacgggcugggcagccuccgcgugggguccugcagcgacguggucguggaccacgccuccaagcugaagcugccguggacgagccgggacgccggcgccgagaccuacgcgcgcuaccgguaccccgggucccucgacgagagccagauggccaagcaccgccugcuguucuucaagcaccgccuccagugcaugaccucccaguga

SEQ ID NO: 520 - RNA, 1602 nt, Artificial Sequence
  derived and/or modified sequence opt2 from B4GN1__Homo_sapiens__AAA35516
auguggcucggccgccgcgcccucugcgcccucguccuccuccucgccugcgccucccucggccuccucuacgccuccacccgcgacgcccccggccuccgccucccccucgcccccugggcccccccccaguccccccgccgccccgagcuccccgaccucgcccccgagccccgcuacgcccacauccccguccgcaucaaggagcaggucgucggccuccucgccuggaacaacugcuccugcgaguccuccggcggcggccucccccuccccuuccagaagcagguccgcgccaucgaccucaccaaggccuucgaccccgccgagcuccgcgccgccuccgccacccgcgagcaggaguuccaggccuuccucucccgcucccagucccccgccgaccagcuccucaucgcccccgccaacuccccccuccaguacccccuccagggcgucgagguccagccccuccgcuccauccucguccccggccucucccuccaggccgccuccggccaggaggucuaccaggucaaccucaccgccucccucggcaccugggacgucgccggcgaggucaccggcgucacccucaccggcgagggccaggccgaccucacccucgucucccccggccucgaccagcucaaccgccagcuccagcucgucaccuacuccucccgcuccuaccagaccaacaccgccgacaccguccgcuucuccaccgagggccacgaggccgccuucaccauccgcauccgccacccccccaacccccgccucuacccccccggcucccucccccagggcgcccaguacaacaucuccgcccucgucaccaucgccaccaagaccuuccuccgcuacgaccgccuccgcgcccucaucaccuccauccgccgcuucuaccccaccgucaccgucgucaucgccgacgacuccgacaagcccgagcgcgucuccggccccuacgucgagcacuaccucaugcccuucggcaagggcugguucgccggccgcaaccucgccgucucccaggucaccaccaaguacguccucugggucgacgacgacuucgucuucaccgcccgcacccgccucgagcgccucgucgacguccucgagcgcaccccccucgaccucgucggcggcgccguccgcgagaucuccggcuucgccaccaccuaccgccagcuccucuccgucgagcccggcgcccccggccucggcaacugccuccgccagcgccgcggcuuccaccacgagcucgucggcuuccccggcugcgucgucaccgacggcgucgucaacuucuuccucgcccgcaccgacaagguccgcgaggucggcuucgacccccgccucucccgcgucgcccaccucgaguucuuccucgacggccucggcucccuccgcgucggcuccugcuccgacgucgucgucgaccacgccuccaagcucaagcuccccuggaccucccgcgacgccggcgccgagaccuacgcccgcuaccgcuaccccggcucccucgacgagucccagauggccaagcaccgccuccucuucuucaagcaccgccuccagugcaugaccucccaguga

SEQ ID NO: 521 - RNA, 1602 nt, Artificial Sequence
  derived and/or modified sequence opt3 from B4GN1__Homo_sapiens__AAA35516
auguggcugggcagaagggcccucugcgcucuugugcuguuguuagcaugugccagccuggggcuacucuacgcguccacccgggacgcucccggacugcgccuuccucuggccccaugggcaccgccccagucuccucgacguccagaguugcccgaucucgccccugaaccaagauaugcucacauccccgucaggauuaaggagcaaguugugggucugcuggcauggaacaauugcucaugugaaaguagcggcgggggacucccuuuaccauuccagaaacagguacgggccauagaccugacaaaggcuuuugauccggccgagcuucgcgcggcauccgccacuagagaacaggaguuccaagcauuuuugucuaggucgcagucacccgccgaccagcugcuaaucgcuccugcuaacagcccacuccaguacccccugcaaggcguggagguccagccucuucggaguauucuggugccagguuugucccuccaggccgcgucugggcaggaaguuuaucaagugaaucugacggccagcuuaggaaccugggaugucgcaggcgaggugacaggcguaacucugaccggggaaggacaggcugaccucacacuuguuucccccggucuggaucaguugaaccgccaacuacagcuggugaccuacucaagucgaagcuaucagacuaauacagccgacaccgucagauucucuacggagggccaugaggcugccuuuacuaucaggauucggcacccgccuaacccccgucucuacccaccugggucccugccccagggagcacaauauaauaucucagcccuugugaccauagcuacaaaaacuuuccugcgcuacgauagauugagggcgcucaucaccagcauucggcgauuuuacccaacagugaccgucguuaucgcagacgauagugacaagcccgaacgcgugucuggcccuuauguagagcauuaccugaugccauucgguaaagggugguuugccggaagaaacuuagcugugucccaggucacgacuaaguaugugcuguggguugaugacgacuucguguuuacagccaggacccggcuagaacgccucgucgaugugcuggagagaacuccgcuugacuugguaggcggcgcaguuagggaaauuagcggguucgccacaaccuaccgucagcugcucucgguggagcccggagcuccuggucugggcaauugccuucggcagcgaagaggguuucaccaugagcuggucggauucccaggcuguguggucacggauggugugguuaacuucuuuuuggccaggaccgacaaggugcgcgaaguaggguucgauccccggcucucuagagucgcacaccuggaguuuuucuuagacggccugggaucccuaagggugggcucaugcagugauguuguggucgaccacgcgagcaaacucaagcugccuuggacaucccgcgaugcuggggccgaaacuuaugcacgauaccgguauccaggaucucuugacgagagccaaauggccaaacaucguuugcuguuuuucaagcacagacuccaguguaugaccucacaguga

SEQ ID NO: 522 - RNA, 1602 nt, Artificial Sequence
  derived and/or modified sequence opt4 from B4GN1__Homo_sapiens__AAA35516
auguggcugggcagaagagcccugugcgcccuggugcugcugcuggccugcgccagccugggccugcuguacgccagcaccagagacgcccccggccugagacugccccuggcccccugggcccccccccagagccccagaagacccgagcugcccgaccuggcccccgagcccagauacgcccacauccccgugagaaucaaggagcagguggugggccugcuggccuggaacaacugcagcugcgagagcagcggcggcggccugccccugcccuuccagaagcaggugagagccaucgaccugaccaaggccuucgaccccgccgagcugagagccgccagcgccaccagagagcaggaguuccaggccuuccugagcagaagccagagccccgccgaccagcugcugaucgcccccgccaacagcccccugcaguacccccugcagggcguggaggugcagccccugagaagcauccuggugcccggccugagccugcaggccgccagcggccaggagguguaccaggugaaccugaccgccagccugggcaccugggacguggccggcgaggugaccggcgugacccugaccggcgagggccaggccgaccugacccuggugagccccggccuggaccagcugaacagacagcugcagcuggugaccuacagcagcagaagcuaccagaccaacaccgccgacaccgugagauucagcaccgagggccacgaggccgccuucaccaucagaaucagacacccccccaaccccagacuguacccccccggcagccugccccagggcgcccaguacaacaucagcgcccuggugaccaucgccaccaagaccuuccugagauacgacagacugagagcccugaucaccagcaucagaagauucuaccccaccgugaccguggugaucgccgacgacagcgacaagcccgagagagugagcggccccuacguggagcacuaccugaugcccuucggcaagggcugguucgccggcagaaaccuggccgugagccaggugaccaccaaguacgugcuguggguggacgacgacuucguguucaccgccagaaccagacuggagagacugguggacgugcuggagagaaccccccuggaccuggugggcggcgccgugagagagaucagcggcuucgccaccaccuacagacagcugcugagcguggagcccggcgcccccggccugggcaacugccugagacagagaagaggcuuccaccacgagcuggugggcuuccccggcugcguggugaccgacggcguggugaacuucuuccuggccagaaccgacaaggugagagaggugggcuucgaccccagacugagcagaguggcccaccuggaguucuuccuggacggccugggcagccugagagugggcagcugcagcgacguggugguggaccacgccagcaagcugaagcugcccuggaccagcagagacgccggcgccgagaccuacgccagauacagauaccccggcagccuggacgagagccagauggccaagcacagacugcuguucuucaagcacagacugcagugcaugaccagccaguga

SEQ ID NO: 523 - RNA, 1602 nt, Artificial Sequence
  derived and/or modified sequence opt5 from B4GN1__Homo_sapiens__AAA35516
auguggcugggcagacgggcccucugcgcucuggugcuucugcucgccugugcgagccuggggcuucuguacgcuuccacccgcgacgcccccggacucagacugccucuggccccgugggcucccccucagucuccccggcgcccugagcuccccgaucuggccccugaaccgagauaugcucacauccccguccggauuaaggagcaaguugugggccuucuggccuggaacaauugcagcugugaauccucugggggaggccucccucugcccuuccagaaacaggugcgcgcgaucgaccuuacaaaggccuuugauccugcugagcugagagccgcuagcgccacgcgggaacaggaguuccaagcguuucucucccgcucucagagccccgccgaccagcugcugauugcuccggccaacuccccucuccaguacccccugcaaggggucgaggugcagccucuuagaagcauccugguucccggacucucucugcaggcugccuccggccaggaaguguaucaagucaaucuuaccgccagccugggcacaugggauguggcuggggagguuaccggagugacacucaccggcgaagggcaggcggaccugacacuggucucucccggacucgaucagcugaaccggcaacuucagcuggugaccuacuccagccgcucuuaucagacgaauaccgccgacacagugagauucuccaccgagggccaugaggcugccuuuacaauucggauccgccacccuccgaaccccagacucuacccucccgggagccugccucagggagcccaauauaauaucuccgcucuugucaccauugccacgaaaacauuccugcgguacgauagacuccgcgcgcugaucaccucuauucggagauuuuaccccacaguuaccguggugaucgcugacgauagcgacaagccggaacgcgucuccggcccuuauguggagcauuaccugaugcccuucggcaaagggugguuugccggacggaaccucgccguuagccaggugaccacaaaguauguccuguggguggaugacgacuucguuuuuacggcuagaacccgccuugaacggcugguggauguccucgagagaacaccucuggaccuggugggcggggccguccgcgaaauuucuggauucgcuaccacauaccggcagcuucucuccguggagcccggcgccccugggcugggaaauugccugagacagcgccggggcuuucaccaugagcucguuggcuuccccggguguguggucaccgauggagugguuaacuucuuucuggcgagaacggacaaggugcgggaagucggcuucgauccgcgccuuagcagaguggcccaccuggaguuuuuccucgacgggcugggaucucugcgggugggcagcugcuccgauguugucguggaccacgcuucuaaacuuaagcucccuuggacaagcagagaugccggggcugaaaccuaugcccgcuaccgguaucccggcucccuggacgagagccaaauggcgaaacauagacugcucuuuuucaagcaccgccugcaguguaugaccucucaguga

SEQ ID NO: 524 - protein, 282 aa, Artificial Sequence
  B7H4__Homo_sapiens__Q7Z7D3
MASLGQILFWSIISIIIILAGAIALIIGFGISGRHSITVTTVASAGNIGEDGILSCTFEPDIKLSDIVIQWLKEGVLGLVHEFKEGKDELSEQDEMFRGRTAVFADQVIVGNASLRLKNVQLTDAGTYKCYIITSKGKGNANLEYKTGAFSMPEVNVDYNASSETLRCEAPRWFPQPTVVWASQVDQGANFSEVSNTSFELNSENVTMKVVSVLYNVTINNTYSCMIENDIAKATGDIKVTESEIKRRSHLQLLNSKASLCVSSFFAISWALLPLSPYLMLK

SEQ ID NO: 525 - RNA, 849 nt, Artificial Sequence
  B7H4__Homo_sapiens__AAH74729
auggcuucccuggggcagauccucuucuggagcauaauuagcaucaucauuauucuggcuggagcaauugcacucaucauuggcuuugguauuucagggagacacuccaucacagucacuacugucgccucagcugggaacauuggggaggauggaauccugagcugcacuuuugaaccugacaucaaacuuucugauaucgugauacaauggcugaaggaagguguuuuaggcuugguccaugaguucaaagaaggcaaagaugagcugucggagcaggaugaaauguucagaggccggacagcaguguuugcugaucaagugauaguuggcaaugccucuuugcggcugaaaaacgugcaacucacagaugcuggcaccuacaaauguuauaucaucacuucuaaaggcaaggggaaugcuaaccuugaguauaaaacuggagccuucagcaugccggaagugaauguggacuauaaugccagcucagagaccuugcggugugaggcuccccgaugguucccccagcccacaguggucugggcaucccaaguugaccagggagccaacuucucggaagucuccaauaccagcuuugagcugaacucugagaaugugaccaugaagguugugucugugcucuacaauguuacgaucaacaacacauacuccuguaugauugaaaaugacauugccaaagcaacaggggauaucaaagugacagaaucggagaucaaaaggcggagucaccuacagcugcuaaacucaaaggcuucucugugugucucuucuuucuuugccaucagcugggcacuucugccucucagcccuuaccugaugcuaaaauaa

SEQ ID NO: 526 - RNA, 849 nt, Artificial Sequence
  derived and/or modified sequence opt1 from B7H4__Homo_sapiens__AAH74729
auggccagccugggccagauccucuucugguccaucaucagcaucaucaucauccuggccggggcgaucgcccugaucaucggcuucgggaucuccggccgccacagcaucaccgugaccacggucgccuccgccgggaacaucggcgaggacggcauccucagcugcaccuucgagcccgacaucaagcuguccgacaucgugauccaguggcugaaggagggggugcucggccugguccacgaguucaaggaggggaaggacgagcugagcgagcaggacgagauguuccggggccgcaccgccguguucgcggaccaggugaucgucgggaacgccucccuccggcugaagaacgugcagcugaccgacgccggcacguacaagugcuacaucaucaccagcaagggcaaggggaacgccaaccucgaguacaagaccggcgcguucuccaugccggaggugaacgucgacuacaacgccagcuccgagacccugcgcugcgaggcgccccggugguucccccagcccacgguggugugggccagccaggucgaccagggggccaacuucuccgaggugagcaacaccuccuucgagcugaacagcgagaacgugaccaugaaggucguguccgugcucuacaacgucaccaucaacaacacguacagcugcaugaucgagaacgacaucgccaaggccaccggcgacaucaaggugaccgagagcgagaucaagcgccggucccaccuccagcugcugaacagcaaggccucccugugcgugagcuccuucuucgccaucagcugggcccugcucccgcugucccccuaccugaugcucaaguga

SEQ ID NO: 527 - RNA, 849 nt, Artificial Sequence
  derived and/or modified sequence opt2 from B7H4__Homo_sapiens__AAH74729
auggccucccucggccagauccucuucugguccaucaucuccaucaucaucauccucgccggcgccaucgcccucaucaucggcuucggcaucuccggccgccacuccaucaccgucaccaccgucgccuccgccggcaacaucggcgaggacggcauccucuccugcaccuucgagcccgacaucaagcucuccgacaucgucauccaguggcucaaggagggcguccucggccucguccacgaguucaaggagggcaaggacgagcucuccgagcaggacgagauguuccgcggccgcaccgccgucuucgccgaccaggucaucgucggcaacgccucccuccgccucaagaacguccagcucaccgacgccggcaccuacaagugcuacaucaucaccuccaagggcaagggcaacgccaaccucgaguacaagaccggcgccuucuccaugcccgaggucaacgucgacuacaacgccuccuccgagacccuccgcugcgaggccccccgcugguucccccagcccaccgucgucugggccucccaggucgaccagggcgccaacuucuccgaggucuccaacaccuccuucgagcucaacuccgagaacgucaccaugaaggucgucuccguccucuacaacgucaccaucaacaacaccuacuccugcaugaucgagaacgacaucgccaaggccaccggcgacaucaaggucaccgaguccgagaucaagcgccgcucccaccuccagcuccucaacuccaaggccucccucugcgucuccuccuucuucgccaucuccugggcccuccucccccucucccccuaccucaugcucaaguga

SEQ ID NO: 528 - RNA, 849 nt, Artificial Sequence
  derived and/or modified sequence opt3 from B7H4__Homo_sapiens__AAH74729
auggccagccugggccagauccucuucugguccauuauaucuaucauuaucauucuugcuggggcaaucgcccugauaaucggauuugguauuucaggcagacacaguaucaccgugacaacugucgcgagcgcugggaacauuggagaggacggcaucuuguccugcacguucgaacccgauauaaaguuaucugacauuguuauccaauggcugaaagagggugugcuagggcucguacaugaauuuaaggagggaaaagaugaacugucggagcaggacgagauguucaggggccggaccgccguguuugcagaucaggucauugugggcaaugccucacuucgccugaagaacguucaguugacagacgcugggacuuacaaauguuauaucaucaccagcaagggaaaggguaaugcaaaccucgaauacaaaacaggcgccuucaguaugccugaggugaaugucgauuauaacgcuuccucugaaacccugcgaugcgaggccccacguugguuuccgcaacccacugugguaugggcgagccagguugaccagggggcaaauuucuccgaggugucaaacacaaguuuugaacugaauagcgagaacgucaccaugaagguggugucuguccucuacaauguuacgauuaacaauacuuauuccuguaugauagaaaacgauaucgccaaagcuaccggagacauuaaggugacagagucagaaaucaaaagaaggagccacuuacagcugcuuaauaguaaggccucuuugugcguauccagcuucuuugcaauaucgugggcucugcuaccucucucuccauaccugaugcuuaaguga

SEQ ID NO: 529 - RNA, 849 nt, Artificial Sequence
  derived and/or modified sequence opt4 from B7H4__Homo_sapiens__AAH74729
auggccagccugggccagauccuguucuggagcaucaucagcaucaucaucauccuggccggcgccaucgcccugaucaucggcuucggcaucagcggcagacacagcaucaccgugaccaccguggccagcgccggcaacaucggcgaggacggcauccugagcugcaccuucgagcccgacaucaagcugagcgacaucgugauccaguggcugaaggagggcgugcugggccuggugcacgaguucaaggagggcaaggacgagcugagcgagcaggacgagauguucagaggcagaaccgccguguucgccgaccaggugaucgugggcaacgccagccugagacugaagaacgugcagcugaccgacgccggcaccuacaagugcuacaucaucaccagcaagggcaagggcaacgccaaccuggaguacaagaccggcgccuucagcaugcccgaggugaacguggacuacaacgccagcagcgagacccugagaugcgaggcccccagaugguucccccagcccaccguggugugggccagccagguggaccagggcgccaacuucagcgaggugagcaacaccagcuucgagcugaacagcgagaacgugaccaugaagguggugagcgugcuguacaacgugaccaucaacaacaccuacagcugcaugaucgagaacgacaucgccaaggccaccggcgacaucaaggugaccgagagcgagaucaagagaagaagccaccugcagcugcugaacagcaaggccagccugugcgugagcagcuucuucgccaucagcugggcccugcugccccugagccccuaccugaugcugaaguga

SEQ ID NO: 530 - RNA, 849 nt, Artificial Sequence
  derived and/or modified sequence opt5 from B7H4__Homo_sapiens__AAH74729
auggccagccugggccagauccucuucugguccauuaucucuauuaucauuauccuggcuggggccaucgcgcuuauuaucggauuuggcauuagcgggagacacuccaucaccgugacaacggucgcuucugccggaaacauuggcgaggacgggauccugagcugcaccuucgaacccgauauuaagcucuccgacaucguuauccaauggcugaaagagggagugcuuggccuggugcacgaauuuaaggagggcaaagaugaacucucugagcaggacgagauguuccgggggcgcacagccgucuuugcugaucaggugauuguuggaaaugccagccugagacugaagaacgugcagcucaccgacgcuggcacauacaaauguuauaucauuaccuccaaggggaagggaaaugccaaccuggaauacaaaacaggcgcguucagcaugccugaggucaauguggauuauaacgccucuuccgaaacccuucggugcgaggcuccgcgcugguuuccccaaccuacgguugugugggccagccaggucgaccagggggcuaauuucucugagguguccaacaccagcuuugaacucaauucugagaacgugacaaugaaggucguuuccgugcuguacaaugugaccaucaacaauacauauagcuguaugauugaaaacgauaucgccaaagcgaccggagacaucaaggucacggaguccgaaauuaaaagacggucucaucugcagcuucugaauagcaaggccucccucugcgugagcucuuucuuugcuaucuccugggcccugcugccccucagcccuuaccugaugcuuaaguga

SEQ ID NO: 531 - protein, 43 aa, Artificial Sequence
  BAGE-1__Homo_sapiens__Q13072
MAARAVFLALSAQLLQARLMKEESPVVSWRLEPEDGTALCFIF

SEQ ID NO: 532 - RNA, 132 nt, Artificial Sequence
  BAGE-1__Homo_sapiens__AAC50123
auggcggccagagcgguuuuucuggcauugucugcccagcugcuccaagccaggcugaugaaggaggaguccccuguggugagcuggagguuggagccugaagacggcacagcucugugcuucaucuucuga

SEQ ID NO: 533 - RNA, 132 nt, Artificial Sequence
  derived and/or modified sequence opt1 from BAGE-1__Homo_sapiens__AAC50123
auggccgcccgcgcgguguuccuggcccucagcgcccagcugcugcaggcccggcucaugaaggaggagucccccgucgugagcuggcgccuggagccggaggacggcaccgcccugugcuucaucuucuga

SEQ ID NO: 534 - RNA, 132 nt, Artificial Sequence
  derived and/or modified sequence opt2 from BAGE-1__Homo_sapiens__AAC50123
auggccgcccgcgccgucuuccucgcccucuccgcccagcuccuccaggcccgccucaugaaggaggagucccccgucgucuccuggcgccucgagcccgaggacggcaccgcccucugcuucaucuucuga

SEQ ID NO: 535 - RNA, 132 nt, Artificial Sequence
  derived and/or modified sequence opt3 from BAGE-1__Homo_sapiens__AAC50123
auggccgcuagagcaguguuccuggcccucagcgcgcagcuucugcaagcuagguugaugaaggaggaaucccccgucguuucuuggcgguuagagccugaagacggcaccgcccugugcuuuaucuucuga

SEQ ID NO: 536 - RNA, 132 nt, Artificial Sequence
  derived and/or modified sequence opt4 from BAGE-1__Homo_sapiens__AAC50123
auggccgccagagccguguuccuggcccugagcgcccagcugcugcaggccagacugaugaaggaggagagccccguggugagcuggagacuggagcccgaggacggcaccgcccugugcuucaucuucuga

SEQ ID NO: 537 - RNA, 132 nt, Artificial Sequence
  derived and/or modified sequence opt5 from BAGE-1__Homo_sapiens__AAC50123
auggccgcuagagccguguuccuggcgcucagcgcucagcugcuucaagcccggcugaugaaggaggaaucccccgucguuucuuggcgccucgagccugaagacggcaccgcccugugcuuuaucuucuga

SEQ ID NO: 538 - protein, 385 aa, Artificial Sequence
  BASI__Homo_sapiens__P35613
MAAALFVLLGFALLGTHGASGAAGFVQAPLSQQRWVGGSVELHCEAVGSPVPEIQWWFEGQGPNDTCSQLWDGARLDRVHIHATYHQHAASTISIDTLVEEDTGTYECRASNDPDRNHLTRAPRVKWVRAQAVVLVLEPGTVFTTVEDLGSKILLTCSLNDSATEVTGHRWLKGGVVLKEDALPGQKTEFKVDSDDQWGEYSCVFLPEPMGTANIQLHGPPRVKAVKSSEHINEGETAMLVCKSESVPPVTDWAWYKITDSEDKALMNGSESRFFVSSSQGRSELHIENLNMEADPGQYRCNGTSSKGSDQAIITLRVRSHLAALWPFLGIVAEVLVLVTIIFIYEKRRKPEDVLDDDDAGSAPLKSSGQHQNDKGKNVRQRNSS

SEQ ID NO: 539 - RNA, 1158 nt, Artificial Sequence
  BASI__Homo_sapiens__AAN40694
auggcggcugcgcuguucgugcugcugggauucgcgcugcugggcacccacggagccuccggggcugccggcuucguccaggcgccgcugucccagcagagguggguggggggcaguguggagcugcacugcgaggccgugggcagcccggugcccgagauccaguggugguuugaagggcagggucccaacgacaccugcucccagcucugggacggcgcccggcuggaccgcguccacauccacgccaccuaccaccagcacgcggccagcaccaucuccaucgacacgcucguggaggaggacacgggcacuuacgagugccgggccagcaacgacccggaucgcaaccaccugacccgggcgcccagggucaaguggguccgcgcccaggcagucgugcuaguccuggaacccggcacagucuucacuaccguagaagaccuuggcuccaagauacuccucaccugcuccuugaaugacagcgccacagaggucacagggcaccgcuggcugaaggggggcguggugcugaaggaggacgcgcugcccggccagaaaacggaguucaagguggacuccgacgaccaguggggagaguacuccugcgucuuccuccccgagcccaugggcacggccaacauccagcuccacgggccucccagagugaaggccgugaagucgucagaacacaucaacgagggggagacggccaugcuggucugcaagucagaguccgugccaccugucacugacugggccugguacaagaucacugacucugaggacaaggcccucaugaacggcuccgagagcagguucuucgugaguuccucgcagggccggucagagcuacacauugagaaccugaacauggaggccgaccccggccaguaccggugcaacggcaccagcuccaagggcuccgaccaggccaucaucacgcuccgcgugcgcagccaccuggccgcccucuggcccuuccugggcaucguggcugaggugcuggugcuggucaccaucaucuucaucuacgagaagcgccggaagcccgaggacguccuggaugaugacgacgccggcucugcaccccugaagagcagcgggcagcaccagaaugacaaaggcaagaacguccgccagaggaacucuuccuga

SEQ ID NO: 540 - RNA, 1158 nt, Artificial Sequence
  derived and/or modified sequence opt1 from BASI__Homo_sapiens__AAN40694
auggccgccgcccuguucgugcugcugggcuucgcccugcucgggacccacggcgccagcggggccgccggcuucguccaggcgccccugucccagcagcgcugggucgggggcagcguggagcugcacugcgaggccgugggcuccccggugcccgagauccaguggugguucgaggggcagggccccaacgacacgugcagccagcucugggacggggcccggcuggaccgcgugcacauccacgccaccuaccaccagcacgcggccuccaccaucagcaucgacacccuggucgaggaggacaccggcacguacgagugccgggccuccaacgaccccgaccgcaaccaccucacccgggccccgcgcgugaagugggugcgggcccaggcggucgugcuggugcuggagcccgggaccgucuucaccacgguggaggaccucggcagcaagauccugcugaccugcucccucaacgacagcgccaccgaggugaccggccaccgcuggcugaagggcggggucgugcugaaggaggacgcccuccccgggcagaagacggaguucaagguggacuccgacgaccaguggggcgaguacagcugcgucuuccugcccgagccgaugggcaccgccaacauccagcugcacgggccgccccgggugaaggccgugaaguccagcgagcacaucaacgagggcgagaccgcgaugcucgucugcaaguccgagagcgugccgcccgugaccgacugggccugguacaagaucacggacuccgaggacaaggcccugaugaacgggagcgagucccgcuucuucgucagcagcucccagggccggagcgagcugcacaucgagaaccucaacauggaggccgaccccgggcaguaccgcugcaacggcaccuccagcaagggcuccgaccaggccaucaucacccugcgggugcgcagccaccuggcggcccucuggcccuuccuggggaucgucgccgaggugcuggugcucgucaccaucaucuucaucuacgagaagcggcgcaagcccgaggacgugcuggacgacgacgacgccggcuccgcgccccucaagagcuccgggcagcaccagaacgacaagggcaagaacgugcggcagcgcaacagcuccuga

SEQ ID NO: 541 - RNA, 1158 nt, Artificial Sequence
  derived and/or modified sequence opt2 from BASI__Homo_sapiens__AAN40694
auggccgccgcccucuucguccuccucggcuucgcccuccucggcacccacggcgccuccggcgccgccggcuucguccaggccccccucucccagcagcgcugggucggcggcuccgucgagcuccacugcgaggccgucggcucccccguccccgagauccaguggugguucgagggccagggccccaacgacaccugcucccagcucugggacggcgcccgccucgaccgcguccacauccacgccaccuaccaccagcacgccgccuccaccaucuccaucgacacccucgucgaggaggacaccggcaccuacgagugccgcgccuccaacgaccccgaccgcaaccaccucacccgcgccccccgcgucaaguggguccgcgcccaggccgucguccucguccucgagcccggcaccgucuucaccaccgucgaggaccucggcuccaagauccuccucaccugcucccucaacgacuccgccaccgaggucaccggccaccgcuggcucaagggcggcgucguccucaaggaggacgcccuccccggccagaagaccgaguucaaggucgacuccgacgaccaguggggcgaguacuccugcgucuuccuccccgagcccaugggcaccgccaacauccagcuccacggccccccccgcgucaaggccgucaaguccuccgagcacaucaacgagggcgagaccgccaugcucgucugcaaguccgaguccgucccccccgucaccgacugggccugguacaagaucaccgacuccgaggacaaggcccucaugaacggcuccgagucccgcuucuucgucuccuccucccagggccgcuccgagcuccacaucgagaaccucaacauggaggccgaccccggccaguaccgcugcaacggcaccuccuccaagggcuccgaccaggccaucaucacccuccgcguccgcucccaccucgccgcccucuggcccuuccucggcaucgucgccgagguccucguccucgucaccaucaucuucaucuacgagaagcgccgcaagcccgaggacguccucgacgacgacgacgccggcuccgccccccucaaguccuccggccagcaccagaacgacaagggcaagaacguccgccagcgcaacuccuccuga

SEQ ID NO: 542 - RNA, 1158 nt, Artificial Sequence
  derived and/or modified sequence opt3 from BASI__Homo_sapiens__AAN40694
auggccgccgcacuguucgugcuccuuggcuuugcccuguuggggacccacggagcgagcggugcugccggcuucguccaggcacccuuaucccaacagagauggguugggggaucuguggagcugcauugcgaagccguaggcucaccugugccagagauccaguggugguuugaaggucaggggccgaacgacacauguagucaacuaugggauggagcuaggcucgaccggguccacauucaugcaacuuaccaccagcaugccgcuagcacgauauccaucgauacccugguggaggaagacacaggcacuuaugagugccgcgccucuaaugaucccgaccgaaaccaccuuacccgugcgccuagaguuaagugggugagggcacaggccgucgugcugguauuggagccaggcacaguuuucaccacuguggaagaucucgggucgaaaauucugcugacauguucacucaaugacagcgcuaccgaggucacgggacaccggugguuaaaggguggcguggugcugaaagaagaugcccuucccgggcagaagacugaguuuaaagucgacagugaugaccaauggggagaguacuccugcguuuucuugccugaaccaaugggcaccgcaaacauccagcugcauggucccccucgcgugaaggcuguaaagucuagcgagcacauuaaugaaggggagacagccaugcuaguguguaaauccgaaucagucccaccggugacugauugggcgugguauaagaucaccgacagugaggacaaagcccucaugaacggaagcgagucuagauuuuucguuuccucaagccagggcaggagugaacugcauauagagaaucuuaacauggaagcagaucccggccaguaccggugcaaugggacaucuuccaagggaagcgaccaagcuaucauuacccugcgcgugcgaucgcacuuggccgcucucuggccuuuucuggguaucgucgccgagguguuaguacugguuacgauuaucuucauauaugagaaaagaaggaagccagaagaugugcucgacgaugacgaugcaggcucugcuccccuuaaguccucagggcagcaccagaacgacaaaggaaagaauguccggcaacguaacaguagcuga

SEQ ID NO: 543 - RNA, 1158 nt, Artificial Sequence
  derived and/or modified sequence opt4 from BASI__Homo_sapiens__AAN40694
auggccgccgcccuguucgugcugcugggcuucgcccugcugggcacccacggcgccagcggcgccgccggcuucgugcaggccccccugagccagcagagaugggugggcggcagcguggagcugcacugcgaggccgugggcagccccgugcccgagauccaguggugguucgagggccagggccccaacgacaccugcagccagcugugggacggcgccagacuggacagagugcacauccacgccaccuaccaccagcacgccgccagcaccaucagcaucgacacccugguggaggaggacaccggcaccuacgagugcagagccagcaacgaccccgacagaaaccaccugaccagagcccccagagugaagugggugagagcccaggccguggugcuggugcuggagcccggcaccguguucaccaccguggaggaccugggcagcaagauccugcugaccugcagccugaacgacagcgccaccgaggugaccggccacagauggcugaagggcggcguggugcugaaggaggacgcccugcccggccagaagaccgaguucaagguggacagcgacgaccaguggggcgaguacagcugcguguuccugcccgagcccaugggcaccgccaacauccagcugcacggcccccccagagugaaggccgugaagagcagcgagcacaucaacgagggcgagaccgccaugcuggugugcaagagcgagagcgugccccccgugaccgacugggccugguacaagaucaccgacagcgaggacaaggcccugaugaacggcagcgagagcagauucuucgugagcagcagccagggcagaagcgagcugcacaucgagaaccugaacauggaggccgaccccggccaguacagaugcaacggcaccagcagcaagggcagcgaccaggccaucaucacccugagagugagaagccaccuggccgcccuguggcccuuccugggcaucguggccgaggugcuggugcuggugaccaucaucuucaucuacgagaagagaagaaagcccgaggacgugcuggacgacgacgacgccggcagcgccccccugaagagcagcggccagcaccagaacgacaagggcaagaacgugagacagagaaacagcagcuga

SEQ ID NO: 544 - RNA, 1158 nt, Artificial Sequence
  derived and/or modified sequence opt5 from BASI__Homo_sapiens__AAN40694
auggccgcugcccuguucgugcuccugggcuuugcgcuucuggggacccacggagcuagcggcgccgccggguucguccaggcuccccucucccaacagagauggguuggaggcucuguggagcugcauugcgaagccguggggagcccugucccggagauccaguggugguuugaaggacagggccccaacgacacauguucccaacuuugggauggcgcucggcuggaccgcgugcacauucaugccacguaccaccagcaugcggccucuaccaucagcauugauacacucguugaggaagacaccgggacauaugagugcagagcuuccaaugauccugaccggaaccaccugacccgcgcccccagagugaaguggguccgggcucaggccgugguucuggugcucgagccuggaacagucuucaccacgguggaagaucugggcucuaaaauccuucugaccuguagccucaaugacuccgcgacagaggugaccgggcaccgcuggcugaagggaggcgucguucuuaaagaagaugcccugcccgggcagaagacagaguuuaaaguggacagcgaugaccaauggggagaguacucuugcguguuccucccugaaccgaugggcaccgcuaacauucagcugcaugggcccccuagagucaaggccgugaaguccagcgagcacaucaaugaaggcgagacggcuaugcugguuuguaaaucugaauccgugcccccugucacagauugggccugguauaagaucaccgacagcgaggacaaagcccucaugaacggaucugagucccgguuuuucgugagcuccucucagggccgcagcgaacugcauauugagaaucuuaacauggaagcugaucccgggcaguacagaugcaauggaacauccagcaagggcucugaccaagcgaucauuacccugcggguucgcucccaccucgccgcucuguggccguuucuugggaucguggccgagguccuggugcucgucaccauuaucuucauuuaugagaaaagacggaagccugaagaugugcuggacgaugacgaugccggaagcgcuccccugaagucuagcggccagcaccagaacgacaaaggcaagaauguucgccaaagaaacuccucuuga

SEQ ID NO: 545 - protein, 239 aa, Artificial Sequence [sequence omitted]

SEQ ID NO: 546 - RNA, 720 nt, Artificial Sequence
  BCL-2__Homo_sapiens__ABX60202
auggcgcacgcugggagaacgggguacgauaaccgggagauagugaugaaguacauccauuauaagcugucgcagaggggcuacgagugggaugcgggagaugugggcgccgcgcccccgggggccgcccccgcaccgggcaucuucuccucccagcccgggcacacgccccauccagccgcaucccgggacccggucgccaggaccucgccgcugcagaccccggcugcccccggcgccgccgcggggccugcgcucagcccggugccaccugugguccaccugacccuccgccaggccggcgacgacuucucccgccgcuaccgccgcgacuucgccgagauguccagccagcugcaccugacgcccuucaccgcgcggggacgcuuugccacggugguggaggagcucuucagggacggggugaacugggggaggauuguggccuucuuugaguucgguggggucauguguguggagagcgucaaccgggagaugucgccccugguggacaacaucgcccuguggaugacugaguaccugaaccggcaccugcacaccuggauccaggauaacggaggcugggaugccuuuguggaacuguacggccccagcaugcggccucuguuugauuucuccuggcugucucugaagacucugcucaguuuggcccuggugggagcuugcaucacccugggugccuaucugagccacaaguga

SEQ ID NO: 547 - RNA, 720 nt, Artificial Sequence
  derived and/or modified sequence opt1 from BCL-2__Homo_sapiens__ABX60202
auggcccacgccggccgcaccggguacgacaaccgggagaucgugaugaaguacauccacuacaagcugagccagcgcggcuacgagugggacgcgggggacgucggcgccgcgcccccgggggccgcccccgcccccggcaucuucuccagccagcccggccacaccccgcaccccgccgccucccgggaccccguggcccgcacgagcccccuccagaccccggcggcccccggggccgccgccggccccgcgcugucccccgugccgcccgucgugcaccugacccuccggcaggccggggacgacuucagccgccgguaccgccgggacuucgccgagauguccagccagcugcaccugacccccuucacggcccgcggccgguucgccaccguggucgaggagcuguuccgcgacggggugaacuggggccggaucguggcguucuucgaguucggcggggucaugugcguggaguccgugaaccgcgagaugagcccccuggucgacaacaucgcccuguggaugaccgaguaccucaaccggcaccuccacaccuggauccaggacaacggcgggugggacgccuucguggagcuguacggcccguccaugcgcccccucuucgacuucagcuggcugucccugaagacgcuccugagccuggcccucgugggcgccugcaucacccugggggcguaccugucccacaaguga

SEQ ID NO: 548 - RNA, 720 nt, Artificial Sequence
  derived and/or modified sequence opt2 from BCL-2__Homo_sapiens__ABX60202
auggcccacgccggccgcaccggcuacgacaaccgcgagaucgucaugaaguacauccacuacaagcucucccagcgcggcuacgagugggacgccggcgacgucggcgccgccccccccggcgccgcccccgcccccggcaucuucuccucccagcccggccacaccccccaccccgccgccucccgcgaccccgucgcccgcaccuccccccuccagacccccgccgcccccggcgccgccgccggccccgcccucucccccgucccccccgucguccaccucacccuccgccaggccggcgacgacuucucccgccgcuaccgccgcgacuucgccgagauguccucccagcuccaccucacccccuucaccgcccgcggccgcuucgccaccgucgucgaggagcucuuccgcgacggcgucaacuggggccgcaucgucgccuucuucgaguucggcggcgucaugugcgucgaguccgucaaccgcgagauguccccccucgucgacaacaucgcccucuggaugaccgaguaccucaaccgccaccuccacaccuggauccaggacaacggcggcugggacgccuucgucgagcucuacggccccuccaugcgcccccucuucgacuucuccuggcucucccucaagacccuccucucccucgcccucgucggcgccugcaucacccucggcgccuaccucucccacaaguga

SEQ ID NO: 549 - RNA, 720 nt, Artificial Sequence
  derived and/or modified sequence opt3 from BCL-2__Homo_sapiens__ABX60202
auggcccacgcuggcagaaccggguacgacaacagggagaucgugaugaaguauauucauuacaaacugagccagcggggauaugaaugggaugccggugacgucggcgcagcgcccccuggggcugccccagcaccgggaauauucuccucucaacccggccacacaccucauccagccgcuucacgcgaucccguugcacgaacgaguccucuccagacuccagccgcucccggugccgcggcagggccugcccuuagcccagugccgcccguagugcaccugaccuugcgucaggcuggagacgauuuuuccagaagguaccggcgcgacuucgccgagaugucuucgcaguuacaucugacaccuuuuacugcaagaggcagguucgcuaccgucguggaagaacuauuucgggauggcguuaauugggggcgcaucguggccuucuuugaguucggaggugucaugugcguggagucaguaaaccgagagaugagcccacucguugacaauauugcgcuguggaugacagaauaucuuaacagacaucugcacaccuggauccaagauaauggcgggugggacgccuuuguggaguuguacggacccaguaugaggccucucuucgauuuuuccuggcugucucugaagacucucuuaagccuggcacuugucggcgcuuguauuacauugggugccuaucugucccacaaauga

SEQ ID NO: 550 - RNA, 720 nt, Artificial Sequence
  derived and/or modified sequence opt4 from BCL-2__Homo_sapiens__ABX60202
auggcccacgccggcagaaccggcuacgacaacagagagaucgugaugaaguacauccacuacaagcugagccagagaggcuacgagugggacgccggcgacgugggcgccgccccccccggcgccgcccccgcccccggcaucuucagcagccagcccggccacaccccccaccccgccgccagcagagaccccguggccagaaccagcccccugcagacccccgccgcccccggcgccgccgccggccccgcccugagccccgugccccccguggugcaccugacccugagacaggccggcgacgacuucagcagaagauacagaagagacuucgccgagaugagcagccagcugcaccugacccccuucaccgccagaggcagauucgccaccgugguggaggagcuguucagagacggcgugaacuggggcagaaucguggccuucuucgaguucggcggcgugaugugcguggagagcgugaacagagagaugagcccccugguggacaacaucgcccuguggaugaccgaguaccugaacagacaccugcacaccuggauccaggacaacggcggcugggacgccuucguggagcuguacggccccagcaugagaccccuguucgacuucagcuggcugagccugaagacccugcugagccuggcccuggugggcgccugcaucacccugggcgccuaccugagccacaaguga

SEQ ID NO: 551 - RNA, 720 nt, Artificial Sequence
  derived and/or modified sequence opt5 from BCL-2__Homo_sapiens__ABX60202
auggcccacgcuggcagaaccggguacgacaaccgggagaucgugaugaaguauauucauuacaaacugagccagcgcggauaugaaugggaugccggcgacgucggggcggcucccccuggagccgccccggcucccggcaucuucuccucucaaccugggcacacaccccauccugccgcuagcagagaucccguugcccggacguccccucuccagaccccggcggcccccggagcugccgcuggcccugcccugucucccgugccucccgugguccaccuuacacugcgccaggcgggcgacgauuuuagcagacgguaccgcagagacuucgccgagauguccucucagcuccaucugaccccguuuacagcucgggggcgcuucgccaccgugguugaagaacuuuuuagagauggagugaauuggggccggauugucgcuuucuuugaguucgggggagugaugugcguugagagcgugaaccgcgagauguccccucuggucgacaauaucgcccucuggaugacagaauaucugaacagacaucugcacaccuggauucaagauaauggcgggugggacgccuuuguggagcucuacggacccagcaugcggccucuguucgauuuuucuuggcuuucccugaagacgcuccugagccuugcucuggugggcgcguguaucacccucggcgccuaucugucucacaaauga

SEQ ID NO: 552 - protein, 429 aa, Artificial Sequence [sequence omitted]

SEQ ID NO: 553 - RNA, 1290 nt, Artificial Sequence
  bcr/abl__Homo_sapiens__ABX82700
augguggacccggugggcuucgcggaggcguggaaggcgcaguucccggacucagagcccccgcgcauggagcugcgcucagugggcgacaucgagcaggagcuggagcgcugcaaggccuccauucggcgccuggagcaggaggugaaccaggagcgcuuccgcaugaucuaccugcagacguugcuggccaaggaaaagaagagcuaugaccggcagcgauggggcuuccggcgcgcggcgcaggcccccgacggcgccuccgagccccgagcguccgcgucgcgcccgcagccagcgcccgccgacggagccgacccgccgcccgccgaggagcccgaggcccggcccgacggcgaggguucuccggguaaggccaggcccgggaccgcccgcaggcccggggcagccgcgucgggggaacgggacgaccggggaccccccgccagcguggcggcgcucagguccaacuucgagcggauccgcaagggccauggccagcccggggcggacgccgagaagcccuucuacgugaacgucgaguuucaccacgagcgcggccuggugaaggucaacgacaaagaggugucggaccgcaucagcucccugggcagccaggccaugcagauggagcgcaaaaagucccagcacggcgcgggcucgagcgugggggaugcauccaggcccccuuaccggggacgcuccucggagagcagcugcggcgucgacggcgacuacgaggacgccgaguugaacccccgcuuccugaaggacaaccugaucgacgccaauggcgguagcaggcccccuuggccgccccuggaguaccagcccuaccagagcaucuacgucgggggcaugauggaaggggagggcaagggcccgcuccugcgcagccagagcaccucugagcaggagaagcgccuuaccuggccccgcagguccuacuccccccggaguuuugaggauugcggaggcggcuauaccccggacugcagcuccaaugagaaccucaccuccagcgaggaggacuucuccucuggccaguccagccgcguguccccaagccccaccaccuaccgcauguuccgggacaaaagccgcucucccucgcagaacucgcaacaguccuucgacagcagcaguccccccacgccgcagugccauaagcggcaccggcacugcccgguugucguguccgaggccaccaucgugggcguccgcaagaccgggcagaucuggcccaacgauggcgagggcgccuuccauggagacgcagaugguggauga

SEQ ID NO: 554 - RNA, 1290 nt, Artificial Sequence
  derived and/or modified sequence opt1 from bcr/abl__Homo_sapiens__ABX82700
augguggaccccgucggcuucgccgaggccuggaaggcgcaguucccggacagcgagccgccccgcauggagcugcgguccgugggggacaucgagcaggagcucgagcgcugcaaggccagcauccggcgccuggagcaggaggugaaccaggagcgguuccgcaugaucuaccugcagacccuccuggccaaggagaagaaguccuacgaccggcagcgcuggggcuuccggcgcgccgcccaggcgcccgacggggccagcgagccccgggccuccgccagccgcccccagcccgcgcccgccgacggcgccgacccgccgcccgccgaggagcccgaggcccggcccgacggggagggcucccccggcaaggcgcgccccgggaccgcccggcgccccggcgccgccgccagcggggagcgggacgaccgcggcccgcccgcguccgucgccgcccugcggagcaacuucgagcgcauccggaaggggcacggccagcccggcgccgacgccgagaagcccuucuacgugaacguggaguuccaccacgagcgcgggcucgucaaggugaacgacaaggagguguccgaccgcaucagcucccugggcagccaggcgaugcagauggagcggaagaagucccagcacggggccggcagcuccgucggcgacgccagccgcccgcccuaccgggggcgcuccagcgagagcuccugcggcguggacggggacuacgaggacgccgagcugaacccccgguuccucaaggacaaccugaucgacgccaacggcgggagccggcccccguggccgccccuggaguaccagcccuaccaguccaucuacgugggcggcaugauggagggggagggcaaggggccccuccugcgcagccaguccacgagcgagcaggagaagcgccugaccuggccccggcgcuccuacagcccccgguccuucgaggacugcggcgggggcuacaccccggacugcagcuccaacgagaaccucaccagcuccgaggaggacuucagcuccggccagagcucccgcgucagccccucccccacgaccuaccggauguuccgcgacaagagccggagccccucccagaacagccagcaguccuucgacagcuccagcccgcccacgccccagugccacaagcgccaccggcacugccccgugguggucuccgaggcgaccaucgugggggugcgcaagaccggccagaucuggccgaacgacggggagggcgccuuccacggggacgccgacggcggcuga

SEQ ID NO: 555 - RNA, 1290 nt, Artificial Sequence
  derived and/or modified sequence opt2 from bcr/abl__Homo_sapiens__ABX82700
auggucgaccccgucggcuucgccgaggccuggaaggcccaguuccccgacuccgagcccccccgcauggagcuccgcuccgucggcgacaucgagcaggagcucgagcgcugcaaggccuccauccgccgccucgagcaggaggucaaccaggagcgcuuccgcaugaucuaccuccagacccuccucgccaaggagaagaaguccuacgaccgccagcgcuggggcuuccgccgcgccgcccaggcccccgacggcgccuccgagccccgcgccuccgccucccgcccccagcccgcccccgccgacggcgccgaccccccccccgccgaggagcccgaggcccgccccgacggcgagggcucccccggcaaggcccgccccggcaccgcccgccgccccggcgccgccgccuccggcgagcgcgacgaccgcggcccccccgccuccgucgccgcccuccgcuccaacuucgagcgcauccgcaagggccacggccagcccggcgccgacgccgagaagcccuucuacgucaacgucgaguuccaccacgagcgcggccucgucaaggucaacgacaaggaggucuccgaccgcaucuccucccucggcucccaggccaugcagauggagcgcaagaagucccagcacggcgccggcuccuccgucggcgacgccucccgcccccccuaccgcggccgcuccuccgaguccuccugcggcgucgacggcgacuacgaggacgccgagcucaacccccgcuuccucaaggacaaccucaucgacgccaacggcggcucccgcccccccuggcccccccucgaguaccagcccuaccaguccaucuacgucggcggcaugauggagggcgagggcaagggcccccuccuccgcucccaguccaccuccgagcaggagaagcgccucaccuggccccgccgcuccuacuccccccgcuccuucgaggacugcggcggcggcuacacccccgacugcuccuccaacgagaaccucaccuccuccgaggaggacuucuccuccggccaguccucccgcgucucccccucccccaccaccuaccgcauguuccgcgacaagucccgcucccccucccagaacucccagcaguccuucgacuccuccuccccccccaccccccagugccacaagcgccaccgccacugccccgucgucgucuccgaggccaccaucgucggcguccgcaagaccggccagaucuggcccaacgacggcgagggcgccuuccacggcgacgccgacggcggcuga

SEQ ID NO: 556 - RNA, 1290 nt, Artificial Sequence
  derived and/or modified sequence opt3 from bcr/abl__Homo_sapiens__ABX82700
augguggaccccgucggcuucgccgaggcuuggaaggcacaguuuccugauagcgaaccaccgagaauggagcugagguccguuggggacaucgaacaagagcucgaacggugcaaagccucuauucgccgacuugagcaggaggugaaccaggaacguuucagaaugauauaccugcagaccuuguuagcgaaggagaaaaagucauaugauaggcaacgguggggauuucgcagagcugcccaggcacccgacggugccagugaaccuagggcuagcgcaucccggccacagcccgccccugcugauggcgccgacccacccccugcggaggagccagaagcacgcccggauggggagggaucucccggcaaagcccgaccugguacagcuagaaggccaggggccgcagcuucgggagaacgggacgaucgugggcccccugccucaguagcggcccugcgcagcaauuucgagagaaucaggaagggccacggccagccaggagcagacgcugaaaagcccuuuuacgugaacgucgaguuccaucacgagcggggucuagugaaaguuaaugauaaggaagugagugaccgaauuuccucucucggcagccaagccaugcagauggagcgcaaaaagucccagcauggggcuggaucaagugucggcgaugccagcagaccgccuuauaggggucggucuuccgaaucaagcugugggguggacggagacuacgaggaugcagaacugaacccccgcuuucuuaaagacaaucugaucgaugccaacggcggcaguagaccaccuuggcccccauuggaguaucagcccuaccaaucuauuuauguagggggaaugauggagggugaaggcaaggggccucuccugaggucccagagcacuucggagcaggaaaagcgucugacguggccacggcgaucuuacuccccgagaucauucgaggacugcggaggcgguuacacccccgauuguaguagcaaugaaaaccucacauccucugaggaggacuuuagcucagggcaaaguuccaggguuagcccuucuccaacuaccuaucgcauguuccgggauaaaucaagaagucccagccaaaauucccagcagucuuuugacucgagcuccccuccaacaccccagugccacaagaggcaucgccacuguccgguggucgugucagaagcuaccaucgugggcguccgaaaaacuggacagauauggccuaacgauggcgagggggcguuccacggagacgcagaugguggcuga

SEQ ID NO: 557 - RNA, 1290 nt, Artificial Sequence
  derived and/or modified sequence opt4 from bcr/abl__Homo_sapiens__ABX82700
augguggaccccgugggcuucgccgaggccuggaaggcccaguuccccgacagcgagccccccagaauggagcugagaagcgugggcgacaucgagcaggagcuggagagaugcaaggccagcaucagaagacuggagcaggaggugaaccaggagagauucagaaugaucuaccugcagacccugcuggccaaggagaagaagagcuacgacagacagagauggggcuucagaagagccgcccaggcccccgacggcgccagcgagcccagagccagcgccagcagaccccagcccgcccccgccgacggcgccgaccccccccccgccgaggagcccgaggccagacccgacggcgagggcagccccggcaaggccagacccggcaccgccagaagacccggcgccgccgccagcggcgagagagacgacagaggcccccccgccagcguggccgcccugagaagcaacuucgagagaaucagaaagggccacggccagcccggcgccgacgccgagaagcccuucuacgugaacguggaguuccaccacgagagaggccuggugaaggugaacgacaaggaggugagcgacagaaucagcagccugggcagccaggccaugcagauggagagaaagaagagccagcacggcgccggcagcagcgugggcgacgccagcagaccccccuacagaggcagaagcagcgagagcagcugcggcguggacggcgacuacgaggacgccgagcugaaccccagauuccugaaggacaaccugaucgacgccaacggcggcagcagaccccccuggcccccccuggaguaccagcccuaccagagcaucuacgugggcggcaugauggagggcgagggcaagggcccccugcugagaagccagagcaccagcgagcaggagaagagacugaccuggcccagaagaagcuacagccccagaagcuucgaggacugcggcggcggcuacacccccgacugcagcagcaacgagaaccugaccagcagcgaggaggacuucagcagcggccagagcagcagagugagccccagccccaccaccuacagaauguucagagacaagagcagaagccccagccagaacagccagcagagcuucgacagcagcagcccccccaccccccagugccacaagagacacagacacugccccgugguggugagcgaggccaccaucgugggcgugagaaagaccggccagaucuggcccaacgacggcgagggcgccuuccacggcgacgccgacggcggcuga

SEQ ID NO: 558 - RNA, 1290 nt, Artificial Sequence
  derived and/or modified sequence opt5 from bcr/abl__Homo_sapiens__ABX82700
augguggaccccgucggcuucgccgaggcuuggaaggcccaguuuccugauagcgaaccgcccagaauggagcugcgguccguuggggacaucgaacaagagcucgaacgcugcaaagcgucuauuagacggcuggagcaggaggugaaccaggaacgcuucagaaugaucuaccuucagacccugcucgcuaaggagaaaaagagcuaugaucggcaacgcuggggauuuagacgggccgcccaggcuccugacggcgccuccgaaccccgcgcuucugccagcagaccucagcccgcgccugccgauggggcugacccgcccccugccgaggagcccgaagcucggccugauggagagggcucccccgggaaagcccgcccgggaacagcgagacggccuggcgccgcugccucuggcgaacgcgacgauagagggcccccugcuagcguggccgcccugcgguccaauuucgagcgcauuagaaagggacacggccagcccggggcugacgcggaaaagcccuuuuacgucaacguggaguuccaucacgagcggggacuuguuaaagugaaugauaaggaagucagcgacagaaucucuucccugggcagccaagccaugcagauggagcgcaaaaagucucagcauggggcuggauccagcgugggcgaugccucucggccuccguauagaggccgcuccagcgaauccucuugugggguugacggagacuacgaggaugccgaacucaacccccgguuucugaaagacaaucugauugaugcuaacggcgggagcagaccucccuggccuccccucgaguaucagccguaccaauccaucuaugugggaggcaugauggagggggaaggaaagggcccucugcuucgcagccagucuacguccgagcaggaaaagcggcugaccuggcccagacgcagcuacucuccucggagcuucgaggacugcggcgggggauacacacccgauuguuccucuaaugaaaaccucaccagcuccgaggaggacuuuagcucuggccaauccagcagagucucuccuucccccacaaccuaucggauguuccgcgauaaaagcagauccccgucucagaauagccagcaguccuuugacucuagcuccccucccacaccccaaugccacaagcggcauagacacuguccugugguggucagcgaagccaccaucguuggggugcgcaaaacgggacagauuuggccgaacgauggcgagggggcguuccacggcgacgcugauggaggcuga

SEQ ID NO: 559 - protein, 554 aa, Artificial Sequence [sequence omitted]

SEQ ID NO: 560 - RNA, 1665 nt, Artificial Sequence
  bcr/abl__Homo_sapiens__ABX82703
augguggacccggugggcuucgcggaggcguggaaggcgcaguucccggacucagagcccccgcgcauggagcugcgcucagugggcgacaucgagcaggagcuggagcgcugcaaggccuccauucggcgccuggagcaggaggugaaccaggagcgcuuccgcaugaucuaccugcagacguugcuggccaaggaaaagaagagcuaugaccggcagcgauggggcuuccggcgcgcggcgcaggcccccgacggcgccuccgagccccgagcguccgcgucgcgcccgcagccagcgcccgccgacggagccgacccgccgcccgccgaggagcccgaggcccggcccgacggcgaggguucuccggguaaggccaggcccgggaccgcccgcaggcccggggcagccgcgucgggggaacgggacgaccggggaccccccgccagcguggcggcgcucagguccaacuucgagcggauccgcaagggccauggccagcccggggcggacgccgagaagcccuucuacgugaacgucgaguuucaccacgagcgcggccuggugaaggucaacgacaaagaggugucggaccgcaucagcucccugggcagccaggccaugcagauggagcgcaaaaagucccagcacggcgcgggcucgagcgugggggaugcauccaggcccccuuaccggggacgcuccucggagagcagcugcggcgucgacggcgacuacgaggacgccgaguugaacccccgcuuccugaaggacaaccugaucgacgccaauggcgguagcaggcccccuuggccgccccuggaguaccagcccuaccagagcaucuacgucgggggcaugauggaaggggagggcaagggcccgcuccugcgcagccagagcaccucugagcaggagaagcgccuuaccuggccccgcagguccuacuccccccggaguuuugaggauugcggaggcggcuauaccccggacugcagcuccaaugagaaccucaccuccagcgaggaggacuucuccucuggccaguccagccgcguguccccaagccccaccaccuaccgcauguuccgggacaaaagccgcucucccucgcagaacucgcaacaguccuucgacagcagcaguccccccacgccgcagugccauaagcggcaccggcacugcccgguugucguguccgaggccaccaucgugggcguccgcaagaccgggcagaucuggcccaacgauggcgagggcgccuuccauggagacgcagauggcucguucggaacaccaccuggauacggcugcgcugcagaccgggcagaggagcagcgccggcaccaagaugggcugcccuacauugaugacucgcccuccucaucgccccaccucagcagcaagggcaggggcagccgggaugcgcuggucucgggagcccuggaguccacuaaagcgagugagcuggacuuggaaaagggcuuggagaugagaaaauggguccugucgggaauccuggcuagcgaggagacuuaccugagccaccuggaggcacugcugcugcccaugaagccuuugaaagccgcugccaccaccucucagccggugcugacgagucagcagaucgagaccaucuucuucaaagugccugaucuccucuga

SEQ ID NO: 561 - RNA, 1665 nt, Artificial Sequence
  derived and/or modified sequence opt1 from bcr/abl__Homo_sapiens__ABX82703
augguggaccccgucggcuucgccgaggccuggaaggcgcaguucccggacagcgagccgccccgcauggagcugcgguccgugggggacaucgagcaggagcucgagcgcugcaaggccagcauccggcgccuggagcaggaggugaaccaggagcgguuccgcaugaucuaccugcagacccuccuggccaaggagaagaaguccuacgaccggcagcgcuggggcuuccggcgcgccgcccaggcgcccgacggggccagcgagccccgggccuccgccagccgcccccagcccgcgcccgccgacggcgccgacccgccgcccgccgaggagcccgaggcccggcccgacggggagggcucccccggcaaggcgcgccccgggaccgcccggcgccccggcgccgccgccagcggggagcgggacgaccgcggcccgcccgcguccgucgccgcccugcggagcaacuucgagcgcauccggaaggggcacggccagcccggcgccgacgccgagaagcccuucuacgugaacguggaguuccaccacgagcgcgggcucgucaaggugaacgacaaggagguguccgaccgcaucagcucccugggcagccaggcgaugcagauggagcggaagaagucccagcacggggccggcagcuccgucggcgacgccagccgcccgcccuaccgggggcgcuccagcgagagcuccugcggcguggacggggacuacgaggacgccgagcugaacccccgguuccucaaggacaaccugaucgacgccaacggcgggagccggcccccguggccgccccuggaguaccagcccuaccaguccaucuacgugggcggcaugauggagggggagggcaaggggccccuccugcgcagccaguccacgagcgagcaggagaagcgccugaccuggccccggcgcuccuacagcccccgguccuucgaggacugcggcgggggcuacaccccggacugcagcuccaacgagaaccucaccagcuccgaggaggacuucagcuccggccagagcucccgcgucagccccucccccacgaccuaccggauguuccgcgacaagagccggagccccucccagaacagccagcaguccuucgacagcuccagcccgcccacgccccagugccacaagcgccaccggcacugccccgugguggucuccgaggcgaccaucgugggggugcgcaagaccggccagaucuggccgaacgacggggagggcgccuuccacggggacgccgacggcagcuucggcaccccgcccggguacggcugcgccgcggaccgggccgaggagcagcgccgccaccaggacgggcugcccuacaucgacgacucccccagcuccagcccccaccuguccagcaagggccggggcucccgcgacgcccucgucagcggggcccuggaguccaccaaggccagcgagcuggaccucgagaagggccuggagaugcggaagugggugcugagcgggauccucgcguccgaggagaccuaccugagccaccuggaggcccuccugcugcccaugaagccccucaaggccgccgccacgaccucccagccggugcugaccagccagcagaucgagaccaucuucuucaagguccccgaccugcucuga

SEQ ID NO: 562 - RNA, 1665 nt, Artificial Sequence
  derived and/or modified sequence opt2 from bcr/abl__Homo_sapiens__ABX82703
auggucgaccccgucggcuucgccgaggccuggaaggcccaguuccccgacuccgagcccccccgcauggagcuccgcuccgucggcgacaucgagcaggagcucgagcgcugcaaggccuccauccgccgccucgagcaggaggucaaccaggagcgcuuccgcaugaucuaccuccagacccuccucgccaaggagaagaaguccuacgaccgccagcgcuggggcuuccgccgcgccgcccaggcccccgacggcgccuccgagccccgcgccuccgccucccgcccccagcccgcccccgccgacggcgccgaccccccccccgccgaggagcccgaggcccgccccgacggcgagggcucccccggcaaggcccgccccggcaccgcccgccgccccggcgccgccgccuccggcgagcgcgacgaccgcggcccccccgccuccgucgccgcccuccgcuccaacuucgagcgcauccgcaagggccacggccagcccggcgccgacgccgagaagcccuucuacgucaacgucgaguuccaccacgagcgcggccucgucaaggucaacgacaaggaggucuccgaccgcaucuccucccucggcucccaggccaugcagauggagcgcaagaagucccagcacggcgccggcuccuccgucggcgacgccucccgcccccccuaccgcggccgcuccuccgaguccuccugcggcgucgacggcgacuacgaggacgccgagcucaacccccgcuuccucaaggacaaccucaucgacgccaacggcggcucccgcccccccuggcccccccucgaguaccagcccuaccaguccaucuacgucggcggcaugauggagggcgagggcaagggcccccuccuccgcucccaguccaccuccgagcaggagaagcgccucaccuggccccgccgcuccuacuccccccgcuccuucgaggacugcggcggcggcuacacccccgacugcuccuccaacgagaaccucaccuccuccgaggaggacuucuccuccggccaguccucccgcgucucccccucccccaccaccuaccgcauguuccgcgacaagucccgcucccccucccagaacucccagcaguccuucgacuccuccuccccccccaccccccagugccacaagcgccaccgccacugccccgucgucgucuccgaggccaccaucgucggcguccgcaagaccggccagaucuggcccaacgacggcgagggcgccuuccacggcgacgccgacggcuccuucggcaccccccccggcuacggcugcgccgccgaccgcgccgaggagcagcgccgccaccaggacggccuccccuacaucgacgacucccccuccuccuccccccaccucuccuccaagggccgcggcucccgcgacgcccucgucuccggcgcccucgaguccaccaaggccuccgagcucgaccucgagaagggccucgagaugcgcaaguggguccucuccggcauccucgccuccgaggagaccuaccucucccaccucgaggcccuccuccuccccaugaagccccucaaggccgccgccaccaccucccagcccguccucaccucccagcagaucgagaccaucuucuucaagguccccgaccuccucuga

SEQ ID NO: 563 - RNA, 1665 nt, Artificial Sequence
  derived and/or modified sequence opt3 from bcr/abl__Homo_sapiens__ABX82703
augguggaccccgucggcuucgccgaggcuuggaaggcacaguuuccugauagcgaaccaccgagaauggagcugagguccguuggggacaucgaacaagagcucgaacggugcaaagccucuauucgccgacuugagcaggaggugaaccaggaacguuucagaaugauauaccugcagaccuuguuagcgaaggagaaaaagucauaugauaggcaacgguggggauuucgcagagcugcccaggcacccgacggugccagugaaccuagggcuagcgcaucccggccacagcccgccccugcugauggcgccgacccacccccugcggaggagccagaagcacgcccggauggggagggaucucccggcaaagcccgaccugguacagcuagaaggccaggggccgcagcuucgggagaacgggacgaucgugggcccccugccucaguagcggcccugcgcagcaauuucgagagaaucaggaagggccacggccagccaggagcagacgcugaaaagcccuuuuacgugaacgucgaguuccaucacgagcggggucuagugaaaguuaaugauaaggaagugagugaccgaauuuccucucucggcagccaagccaugcagauggagcgcaaaaagucccagcauggggcuggaucaagugucggcgaugccagcagaccgccuuauaggggucggucuuccgaaucaagcugugggguggacggagacuacgaggaugcagaacugaacccccgcuuucuuaaagacaaucugaucgaugccaacggcggcaguagaccaccuuggcccccauuggaguaucagcccuaccaaucuauuuauguagggggaaugauggagggugaaggcaaggggccucuccugaggucccagagcacuucggagcaggaaaagcgucugacguggccacggcgaucuuacuccccgagaucauucgaggacugcggaggcgguuacacccccgauuguaguagcaaugaaaaccucacauccucugaggaggacuuuagcucagggcaaaguuccaggguuagcccuucuccaacuaccuaucgcauguuccgggauaaaucaagaagucccagccaaaauucccagcagucuuuugacucgagcuccccuccaacaccccagugccacaagaggcaucgccacuguccgguggucgugucagaagcuaccaucgugggcguccgaaaaacuggacagauauggccuaacgauggcgagggggcguuccacggagacgcagaugguaguuuuggcacaccacccggguacggaugcgccgcugaccgggccgaggaacagcguagacaucaggacggcuuaccuuauaucgaugacucucccagcuccucaccacaccugagcucuaaggguagggggucccgcgaugcacuuguuaguggcgccuuggagagcaccaaggcuucugaacuggaccuagagaaaggacucgaaaugcggaaaugggugcuguccggcauucuugccucagaggaaacguaccugagucauuuggaggcacuccuguuaccuaugaagccccugaaggcggcugccacuaccagccaaccaguacucacaucgcagcagaucgagacuauuuucuucaaagugccggaucuucuguga

SEQ ID NO: 564 - RNA, 1665 nt, Artificial Sequence
  derived and/or modified sequence opt4 from bcr/abl__Homo_sapiens__ABX82703
augguggaccccgugggcuucgccgaggccuggaaggcccaguuccccgacagcgagccccccagaauggagcugagaagcgugggcgacaucgagcaggagcuggagagaugcaaggccagcaucagaagacuggagcaggaggugaaccaggagagauucagaaugaucuaccugcagacccugcuggccaaggagaagaagagcuacgacagacagagauggggcuucagaagagccgcccaggcccccgacggcgccagcgagcccagagccagcgccagcagaccccagcccgcccccgccgacggcgccgaccccccccccgccgaggagcccgaggccagacccgacggcgagggcagccccggcaaggccagacccggcaccgccagaagacccggcgccgccgccagcggcgagagagacgacagaggcccccccgccagcguggccgcccugagaagcaacuucgagagaaucagaaagggccacggccagcccggcgccgacgccgagaagcccuucuacgugaacguggaguuccaccacgagagaggccuggugaaggugaacgacaaggaggugagcgacagaaucagcagccugggcagccaggccaugcagauggagagaaagaagagccagcacggcgccggcagcagcgugggcgacgccagcagaccccccuacagaggcagaagcagcgagagcagcugcggcguggacggcgacuacgaggacgccgagcugaaccccagauuccugaaggacaaccugaucgacgccaacggcggcagcagaccccccuggcccccccuggaguaccagcccuaccagagcaucuacgugggcggcaugauggagggcgagggcaagggcccccugcugagaagccagagcaccagcgagcaggagaagagacugaccuggcccagaagaagcuacagccccagaagcuucgaggacugcggcggcggcuacacccccgacugcagcagcaacgagaaccugaccagcagcgaggaggacuucagcagcggccagagcagcagagugagccccagccccaccaccuacagaauguucagagacaagagcagaagccccagccagaacagccagcagagcuucgacagcagcagcccccccaccccccagugccacaagagacacagacacugccccgugguggugagcgaggccaccaucgugggcgugagaaagaccggccagaucuggcccaacgacggcgagggcgccuuccacggcgacgccgacggcagcuucggcaccccccccggcuacggcugcgccgccgacagagccgaggagcagagaagacaccaggacggccugcccuacaucgacgacagccccagcagcagcccccaccugagcagcaagggcagaggcagcagagacgcccuggugagcggcgcccuggagagcaccaaggccagcgagcuggaccuggagaagggccuggagaugagaaagugggugcugagcggcauccuggccagcgaggagaccuaccugagccaccuggaggcccugcugcugcccaugaagccccugaaggccgccgccaccaccagccagcccgugcugaccagccagcagaucgagaccaucuucuucaaggugcccgaccugcuguga

SEQ ID NO: 565 - RNA, 1665 nt, Artificial Sequence
  derived and/or modified sequence opt5 from bcr/abl__Homo_sapiens__ABX82703
augguggaccccgucggcuucgccgaggcuuggaaggcccaguuuccugauagcgaaccgcccagaauggagcugcgguccguuggggacaucgaacaagagcucgaacgcugcaaagcgucuauuagacggcuggagcaggaggugaaccaggaacgcuucagaaugaucuaccuucagacccugcucgcuaaggagaaaaagagcuaugaucggcaacgcuggggauuuagacgggccgcccaggcuccugacggcgccuccgaaccccgcgcuucugccagcagaccucagcccgcgccugccgauggggcugacccgcccccugccgaggagcccgaagcucggccugauggagagggcucccccgggaaagcccgcccgggaacagcgagacggccuggcgccgcugccucuggcgaacgcgacgauagagggcccccugcuagcguggccgcccugcgguccaauuucgagcgcauuagaaagggacacggccagcccggggcugacgcggaaaagcccuuuuacgucaacguggaguuccaucacgagcggggacuuguuaaagugaaugauaaggaagucagcgacagaaucucuucccugggcagccaagccaugcagauggagcgcaaaaagucucagcauggggcuggauccagcgugggcgaugccucucggccuccguauagaggccgcuccagcgaauccucuugugggguugacggagacuacgaggaugccgaacucaacccccgguuucugaaagacaaucugauugaugcuaacggcgggagcagaccucccuggccuccccucgaguaucagccguaccaauccaucuaugugggaggcaugauggagggggaaggaaagggcccucugcuucgcagccagucuacguccgagcaggaaaagcggcugaccuggcccagacgcagcuacucuccucggagcuucgaggacugcggcgggggauacacacccgauuguuccucuaaugaaaaccucaccagcuccgaggaggacuuuagcucuggccaauccagcagagucucuccuucccccacaaccuaucggauguuccgcgauaaaagcagauccccgucucagaauagccagcaguccuuugacucuagcuccccucccacaccccaaugccacaagcggcauagacacuguccugugguggucagcgaagccaccaucguuggggugcgcaaaacgggacagauuuggccgaacgauggcgagggggcguuccacggcgacgcugauggaucuuuuggcacacccccuggguacggaugcgccgccgaccgggcugaggaacagagacgccaucaggacggccugcccuauaucgaugacuccccuagcucuagcccccaccuuuccucuaaggggagaggaagccgggaugcccugguguccggcgcucucgagagcaccaaagccucugaacuggaccuggagaaggggcucgaaaugcgcaaauggguccuguccggcauucuugcgagcgaggaaaccuaccugucccaucucgaggcccugcuucugccuaugaagccccucaaggcugccgcuacaaccucucaaccggugcugacgagccagcagaucgagacaauuuucuucaaaguuccugaucugcucuga

SEQ ID NO: 566 - protein, 514 aa, Artificial Sequence [sequence omitted]

SEQ ID NO: 567 - RNA, 1545 nt, Artificial Sequence
  bcr/abl__Homo_sapiens__ABX82704
augguggacccggugggcuucgcggaggcguggaaggcgcaguucccggacucagagcccccgcgcauggagcugcgcucagugggcgacaucgagcaggagcuggagcgcugcaaggccuccauucggcgccuggagcaggaggugaaccaggagcgcuuccgcaugaucuaccugcagacguugcuggccaaggaaaagaagagcuaugaccggcagcgauggggcuuccggcgcgcggcgcaggcccccgacggcgccuccgagccccgagcguccgcgucgcgcccgcagccagcgcccgccgacggagccgacccgccgcccgccgaggagcccgaggcccggcccgacggcgaggguucuccggguaaggccaggcccgggaccgcccgcaggcccggggcagccgcgucgggggaacgggacgaccggggaccccccgccagcguggcggcgcucagguccaacuucgagcggauccgcaagggccauggccagcccggggcggacgccgagaagcccuucuacgugaacgucgaguuucaccacgagcgcggccuggugaaggucaacgacaaagaggugucggaccgcaucagcucccugggcagccaggccaugcagauggagcgcaaaaagucccagcacggcgcgggcucgagcgugggggaugcauccaggcccccuuaccggggacgcuccucggagagcagcugcggcgucgacggcgacuacgaggacgccgaguugaacccccgcuuccugaaggacaaccugaucgacgccaauggcgguagcaggcccccuuggccgccccuggaguaccagcccuaccagagcaucuacgucgggggcaugauggaaggggagggcaagggcccgcuccugcgcagccagagcaccucugagcaggagaagcgccuuaccuggccccgcagguccuacuccccccggaguuuugaggauugcggaggcggcuauaccccggacugcagcuccaaugagaaccucaccuccagcgaggaggacuucuccucuggccaguccagccgcguguccccaagccccaccaccuaccgcauguuccgggacaaaagccgcucucccucgcagaacucgcaacaguccuucgacagcagcaguccccccacgccgcagugccauaagcggcaccggcacugcccgguugucguguccgaggccaccaucgugggcguccgcaagaccgggcagaucuggcccaacgauggcgagggcgccuuccauggagacgcagauggcucguucggaacaccaccuggauacggcugcgcugcagaccgggcagaggagcagcgccggcaccaagaugggcugcccuacauugaugacucgcccuccucaucgccccaccucagcagcaagggcaggggcagccgggaugcgcuggucucgggagcccuggaguccacuaaagcgagugagcuggacuuggaaaagggcuuggagaugagaaaauggguccugucgggaauccuggcuagcgaggagauaacacucuaa

SEQ ID NO: 568 - RNA, 1545 nt, Artificial Sequence
  derived and/or modified sequence opt1 from bcr/abl__Homo_sapiens__ABX82704
augguggaccccgucggcuucgccgaggccuggaaggcgcaguucccggacagcgagccgccccgcauggagcugcgguccgugggggacaucgagcaggagcucgagcgcugcaaggccagcauccggcgccuggagcaggaggugaaccaggagcgguuccgcaugaucuaccugcagacccuccuggccaaggagaagaaguccuacgaccggcagcgcuggggcuuccggcgcgccgcccaggcgcccgacggggccagcgagccccgggccuccgccagccgcccccagcccgcgcccgccgacggcgccgacccgccgcccgccgaggagcccgaggcccggcccgacggggagggcucccccggcaaggcgcgccccgggaccgcccggcgccccggcgccgccgccagcggggagcgggacgaccgcggcccgcccgcguccgucgccgcccugcggagcaacuucgagcgcauccggaaggggcacggccagcccggcgccgacgccgagaagcccuucuacgugaacguggaguuccaccacgagcgcgggcucgucaaggugaacgacaaggagguguccgaccgcaucagcucccugggcagccaggcgaugcagauggagcggaagaagucccagcacggggccggcagcuccgucggcgacgccagccgcccgcccuaccgggggcgcuccagcgagagcuccugcggcguggacggggacuacgaggacgccgagcugaacccccgguuccucaaggacaaccugaucgacgccaacggcgggagccggcccccguggccgccccuggaguaccagcccuaccaguccaucuacgugggcggcaugauggagggggagggcaaggggccccuccugcgcagccaguccacgagcgagcaggagaagcgccugaccuggccccggcgcuccuacagcccccgguccuucgaggacugcggcgggggcuacaccccggacugcagcuccaacgagaaccucaccagcuccgaggaggacuucagcuccggccagagcucccgcgucagccccucccccacgaccuaccggauguuccgcgacaagagccggagccccucccagaacagccagcaguccuucgacagcuccagcccgcccacgccccagugccacaagcgccaccggcacugccccgugguggucuccgaggcgaccaucgugggggugcgcaagaccggccagaucuggccgaacgacggggagggcgccuuccacggggacgccgacggcagcuucggcaccccgcccggguacggcugcgccgcggaccgggccgaggagcagcgccgccaccaggacgggcugcccuacaucgacgacucccccagcuccagcccccaccuguccagcaagggccggggcucccgcgacgcccucgucagcggggcccuggaguccaccaaggccagcgagcuggaccucgagaagggccuggagaugcggaagugggugcugagcgggauccucgcguccgaggagaucacccuguga

SEQ ID NO: 569 - RNA, 1545 nt, Artificial Sequence
  derived and/or modified sequence opt2 from bcr/abl__Homo_sapiens__ABX82704
auggucgaccccgucggcuucgccgaggccuggaaggcccaguuccccgacuccgagcccccccgcauggagcuccgcuccgucggcgacaucgagcaggagcucgagcgcugcaaggccuccauccgccgccucgagcaggaggucaaccaggagcgcuuccgcaugaucuaccuccagacccuccucgccaaggagaagaaguccuacgaccgccagcgcuggggcuuccgccgcgccgcccaggcccccgacggcgccuccgagccccgcgccuccgccucccgcccccagcccgcccccgccgacggcgccgaccccccccccgccgaggagcccgaggcccgccccgacggcgagggcucccccggcaaggcccgccccggcaccgcccgccgccccggcgccgccgccuccggcgagcgcgacgaccgcggcccccccgccuccgucgccgcccuccgcuccaacuucgagcgcauccgcaagggccacggccagcccggcgccgacgccgagaagcccuucuacgucaacgucgaguuccaccacgagcgcggccucgucaaggucaacgacaaggaggucuccgaccgcaucuccucccucggcucccaggccaugcagauggagcgcaagaagucccagcacggcgccggcuccuccgucggcgacgccucccgcccccccuaccgcggccgcuccuccgaguccuccugcggcgucgacggcgacuacgaggacgccgagcucaacccccgcuuccucaaggacaaccucaucgacgccaacggcggcucccgcccccccuggcccccccucgaguaccagcccuaccaguccaucuacgucggcggcaugauggagggcgagggcaagggcccccuccuccgcucccaguccaccuccgagcaggagaagcgccucaccuggccccgccgcuccuacuccccccgcuccuucgaggacugcggcggcggcuacacccccgacugcuccuccaacgagaaccucaccuccuccgaggaggacuucuccuccggccaguccucccgcgucucccccucccccaccaccuaccgcauguuccgcgacaagucccgcucccccucccagaacucccagcaguccuucgacuccuccuccccccccaccccccagugccacaagcgccaccgccacugccccgucgucgucuccgaggccaccaucgucggcguccgcaagaccggccagaucuggcccaacgacggcgagggcgccuuccacggcgacgccgacggcuccuucggcaccccccccggcuacggcugcgccgccgaccgcgccgaggagcagcgccgccaccaggacggccuccccuacaucgacgacucccccuccuccuccccccaccucuccuccaagggccgcggcucccgcgacgcccucgucuccggcgcccucgaguccaccaaggccuccgagcucgaccucgagaagggccucgagaugcgcaaguggguccucuccggcauccucgccuccgaggagaucacccucuga

SEQ ID NO: 570 - RNA, 1545 nt, Artificial Sequence
  derived and/or modified sequence opt3 from bcr/abl__Homo_sapiens__ABX82704
augguggaccccgucggcuucgccgaggcuuggaaggcacaguuuccugauagcgaaccaccgagaauggagcugagguccguuggggacaucgaacaagagcucgaacggugcaaagccucuauucgccgacuugagcaggaggugaaccaggaacguuucagaaugauauaccugcagaccuuguuagcgaaggagaaaaagucauaugauaggcaacgguggggauuucgcagagcugcccaggcacccgacggugccagugaaccuagggcuagcgcaucccggccacagcccgccccugcugauggcgccgacccacccccugcggaggagccagaagcacgcccggauggggagggaucucccggcaaagcccgaccugguacagcuagaaggccaggggccgcagcuucgggagaacgggacgaucgugggcccccugccucaguagcggcccugcgcagcaauuucgagagaaucaggaagggccacggccagccaggagcagacgcugaaaagcccuuuuacgugaacgucgaguuccaucacgagcggggucuagugaaaguuaaugauaaggaagugagugaccgaauuuccucucucggcagccaagccaugcagauggagcgcaaaaagucccagcauggggcuggaucaagugucggcgaugccagcagaccgccuuauaggggucggucuuccgaaucaagcugugggguggacggagacuacgaggaugcagaacugaacccccgcuuucuuaaagacaaucugaucgaugccaacggcggcaguagaccaccuuggcccccauuggaguaucagcccuaccaaucuauuuauguagggggaaugauggagggugaaggcaaggggccucuccugaggucccagagcacuucggagcaggaaaagcgucugacguggccacggcgaucuuacuccccgagaucauucgaggacugcggaggcgguuacacccccgauuguaguagcaaugaaaaccucacauccucugaggaggacuuuagcucagggcaaaguuccaggguuagcccuucuccaacuaccuaucgcauguuccgggauaaaucaagaagucccagccaaaauucccagcagucuuuugacucgagcuccccuccaacaccccagugccacaagaggcaucgccacuguccgguggucgugucagaagcuaccaucgugggcguccgaaaaacuggacagauauggccuaacgauggcgagggggcguuccacggagacgcagaugguaguuuuggcacaccacccggguacggaugcgccgcugaccgggccgaggaacagcguagacaucaggacggcuuaccuuauaucgaugacucucccagcuccucaccacaccugagcucuaaggguagggggucccgcgaugcacuuguuaguggcgccuuggagagcaccaaggcuucugaacuggaccuagagaaaggacucgaaaugcggaaaugggugcuguccggcauucuugccucagaggaaaucacgcuguga

SEQ ID NO: 571 - RNA, 1545 nt, Artificial Sequence
  derived and/or modified sequence opt4 from bcr/abl__Homo_sapiens__ABX82704
augguggaccccgugggcuucgccgaggccuggaaggcccaguuccccgacagcgagccccccagaauggagcugagaagcgugggcgacaucgagcaggagcuggagagaugcaaggccagcaucagaagacuggagcaggaggugaaccaggagagauucagaaugaucuaccugcagacccugcuggccaaggagaagaagagcuacgacagacagagauggggcuucagaagagccgcccaggcccccgacggcgccagcgagcccagagccagcgccagcagaccccagcccgcccccgccgacggcgccgaccccccccccgccgaggagcccgaggccagacccgacggcgagggcagccccggcaaggccagacccggcaccgccagaagacccggcgccgccgccagcggcgagagagacgacagaggcccccccgccagcguggccgcccugagaagcaacuucgagagaaucagaaagggccacggccagcccggcgccgacgccgagaagcccuucuacgugaacguggaguuccaccacgagagaggccuggugaaggugaacgacaaggaggugagcgacagaaucagcagccugggcagccaggccaugcagauggagagaaagaagagccagcacggcgccggcagcagcgugggcgacgccagcagaccccccuacagaggcagaagcagcgagagcagcugcggcguggacggcgacuacgaggacgccgagcugaaccccagauuccugaaggacaaccugaucgacgccaacggcggcagcagaccccccuggcccccccuggaguaccagcccuaccagagcaucuacgugggcggcaugauggagggcgagggcaagggcccccugcugagaagccagagcaccagcgagcaggagaagagacugaccuggcccagaagaagcuacagccccagaagcuucgaggacugcggcggcggcuacacccccgacugcagcagcaacgagaaccugaccagcagcgaggaggacuucagcagcggccagagcagcagagugagccccagccccaccaccuacagaauguucagagacaagagcagaagccccagccagaacagccagcagagcuucgacagcagcagcccccccaccccccagugccacaagagacacagacacugccccgugguggugagcgaggccaccaucgugggcgugagaaagaccggccagaucuggcccaacgacggcgagggcgccuuccacggcgacgccgacggcagcuucggcaccccccccggcuacggcugcgccgccgacagagccgaggagcagagaagacaccaggacggccugcccuacaucgacgacagccccagcagcagcccccaccugagcagcaagggcagaggcagcagagacgcccuggugagcggcgcccuggagagcaccaaggccagcgagcuggaccuggagaagggccuggagaugagaaagugggugcugagcggcauccuggccagcgaggagaucacccuguga

SEQ ID NO: 572 - RNA, 1545 nt, Artificial Sequence
  derived and/or modified sequence opt5 from bcr/abl__Homo_sapiens__ABX82704
augguggaccccgucggcuucgccgaggcuuggaaggcccaguuuccugauagcgaaccgcccagaauggagcugcgguccguuggggacaucgaacaagagcucgaacgcugcaaagcgucuauuagacggcuggagcaggaggugaaccaggaacgcuucagaaugaucuaccuucagacccugcucgcuaaggagaaaaagagcuaugaucggcaacgcuggggauuuagacgggccgcccaggcuccugacggcgccuccgaaccccgcgcuucugccagcagaccucagcccgcgccugccgauggggcugacccgcccccugccgaggagcccgaagcucggccugauggagagggcucccccgggaaagcccgcccgggaacagcgagacggccuggcgccgcugccucuggcgaacgcgacgauagagggcccccugcuagcguggccgcccugcgguccaauuucgagcgcauuagaaagggacacggccagcccggggcugacgcggaaaagcccuuuuacgucaacguggaguuccaucacgagcggggacuuguuaaagugaaugauaaggaagucagcgacagaaucucuucccugggcagccaagccaugcagauggagcgcaaaaagucucagcauggggcuggauccagcgugggcgaugccucucggccuccguauagaggccgcuccagcgaauccucuugugggguugacggagacuacgaggaugccgaacucaacccccgguuucugaaagacaaucugauugaugcuaacggcgggagcagaccucccuggccuccccucgaguaucagccguaccaauccaucuaugugggaggcaugauggagggggaaggaaagggcccucugcuucgcagccagucuacguccgagcaggaaaagcggcugaccuggcccagacgcagcuacucuccucggagcuucgaggacugcggcgggggauacacacccgauuguuccucuaaugaaaaccucaccagcuccgaggaggacuuuagcucuggccaauccagcagagucucuccuucccccacaaccuaucggauguuccgcgauaaaagcagauccccgucucagaauagccagcaguccuuugacucuagcuccccucccacaccccaaugccacaagcggcauagacacuguccugugguggucagcgaagccaccaucguuggggugcgcaaaacgggacagauuuggccgaacgauggcgagggggcguuccacggcgacgcugauggaucuuuuggcacacccccuggguacggaugcgccgccgaccgggcugaggaacagagacgccaucaggacggccugcccuauaucgaugacuccccuagcucuagcccccaccuuuccucuaaggggagaggaagccgggaugcccugguguccggcgcucucgagagcaccaaagccucugaacuggaccuggagaaggggcucgaaaugcgcaaauggguccuguccggcauucuugcgagcgaggaaaucacccuguga

SEQ ID NO: 573 - protein, 441 aa, Artificial Sequence
  bcr/abl__Homo_sapiens__A9UEZ9
MVDPVGFAEAWKAQFPDSEPPRMELRSVGDIEQELERCKASIRRLEQEVNQERFRMIYLQTLLAKEKKSYDRQRWGFRRAAQAPDGASEPRASASRPQPAPADGADPPPAEEPEARPDGEGSPGKARPGTARRPGAAASGERDDRGPPASVAALRSNFERIRKGHGQPGADAEKPFYVNVEFHHERGLVKVNDKEVSDRISSLGSQAMQMERKKSQHGAGSSVGDASRPPYRGRSSESSCGVDGDYEDAELNPRFLKDNLIDANGGSRPPWPPLEYQPYQSIYVGGMMEGEGKGPLLRSQSTSEQEKRLTWPRRSYSPRSFEDCGGGYTPDCSSNENLTSSEEDFSSGQSSRVSPSPTTYRMFRDKSRSPSQNSQQSFDSSSPPTPQCHKRHRHCPVVVSEATIVGVRKTGQIWPNDGEGAFHGDADGSLELQGKPSRWTQ

SEQ ID NO: 574 - RNA, 1326 nt, Artificial Sequence
  bcr/abl__Homo_sapiens__ABX82705
augguggacccggugggcuucgcggaggcguggaaggcgcaguucccggacucagagcccccgcgcauggagcugcgcucagugggcgacaucgagcaggagcuggagcgcugcaaggccuccauucggcgccuggagcaggaggugaaccaggagcgcuuccgcaugaucuaccugcagacguugcuggccaaggaaaagaagagcuaugaccggcagcgauggggcuuccggcgcgcggcgcaggcccccgacggcgccuccgagccccgagcguccgcgucgcgcccgcagccagcgcccgccgacggagccgacccgccgcccgccgaggagcccgaggcccggcccgacggcgaggguucuccggguaaggccaggcccgggaccgcccgcaggcccggggcagccgcgucgggggaacgggacgaccggggaccccccgccagcguggcggcgcucagguccaacuucgagcggauccgcaagggccauggccagcccggggcggacgccgagaagcccuucuacgugaacgucgaguuucaccacgagcgcggccuggugaaggucaacgacaaagaggugucggaccgcaucagcucccugggcagccaggccaugcagauggagcgcaaaaagucccagcacggcgcgggcucgagcgugggggaugcauccaggcccccuuaccggggacgcuccucggagagcagcugcggcgucgacggcgacuacgaggacgccgaguugaacccccgcuuccugaaggacaaccugaucgacgccaauggcgguagcaggcccccuuggccgccccuggaguaccagcccuaccagagcaucuacgucgggggcaugauggaaggggagggcaagggcccgcuccugcgcagccagagcaccucugagcaggagaagcgccuuaccuggccccgcagguccuacuccccccggaguuuugaggauugcggaggcggcuauaccccggacugcagcuccaaugagaaccucaccuccagcgaggaggacuucuccucuggccaguccagccgcguguccccaagccccaccaccuaccgcauguuccgggacaaaagccgcucucccucgcagaacucgcaacaguccuucgacagcagcaguccccccacgccgcagugccauaagcggcaccggcacugcccgguugucguguccgaggccaccaucgugggcguccgcaagaccgggcagaucuggcccaacgauggcgagggcgccuuccauggagacgcagauggcucguuggaacuccaaggaaaaccuucucgcuggacccaguga

SEQ ID NO: 575 - RNA, 1326 nt, Artificial Sequence
  derived and/or modified sequence opt1 from bcr/abl__Homo_sapiens__ABX82705
augguggaccccgucggcuucgccgaggccuggaaggcgcaguucccggacagcgagccgccccgcauggagcugcgguccgugggggacaucgagcaggagcucgagcgcugcaaggccagcauccggcgccuggagcaggaggugaaccaggagcgguuccgcaugaucuaccugcagacccuccuggccaaggagaagaaguccuacgaccggcagcgcuggggcuuccggcgcgccgcccaggcgcccgacggggccagcgagccccgggccuccgccagccgcccccagcccgcgcccgccgacggcgccgacccgccgcccgccgaggagcccgaggcccggcccgacggggagggcucccccggcaaggcgcgccccgggaccgcccggcgccccggcgccgccgccagcggggagcgggacgaccgcggcccgcccgcguccgucgccgcccugcggagcaacuucgagcgcauccggaaggggcacggccagcccggcgccgacgccgagaagcccuucuacgugaacguggaguuccaccacgagcgcgggcucgucaaggugaacgacaaggagguguccgaccgcaucagcucccugggcagccaggcgaugcagauggagcggaagaagucccagcacggggccggcagcuccgucggcgacgccagccgcccgcccuaccgggggcgcuccagcgagagcuccugcggcguggacggggacuacgaggacgccgagcugaacccccgguuccucaaggacaaccugaucgacgccaacggcgggagccggcccccguggccgccccuggaguaccagcccuaccaguccaucuacgugggcggcaugauggagggggagggcaaggggccccuccugcgcagccaguccacgagcgagcaggagaagcgccugaccuggccccggcgcuccuacagcccccgguccuucgaggacugcggcgggggcuacaccccggacugcagcuccaacgagaaccucaccagcuccgaggaggacuucagcuccggccagagcucccgcgucagccccucccccacgaccuaccggauguuccgcgacaagagccggagccccucccagaacagccagcaguccuucgacagcuccagcccgcccacgccccagugccacaagcgccaccggcacugccccgugguggucuccgaggcgaccaucgugggggugcgcaagaccggccagaucuggccgaacgacggggagggcgccuuccacggggacgccgacggcagccuggagcugcagggcaagcccucccgguggacccaguga

SEQ ID NO: 576 - RNA, 1326 nt, Artificial Sequence
  derived and/or modified sequence opt2 from bcr/abl__Homo_sapiens__ABX82705
auggucgaccccgucggcuucgccgaggccuggaaggcccaguuccccgacuccgagcccccccgcauggagcuccgcuccgucggcgacaucgagcaggagcucgagcgcugcaaggccuccauccgccgccucgagcaggaggucaaccaggagcgcuuccgcaugaucuaccuccagacccuccucgccaaggagaagaaguccuacgaccgccagcgcuggggcuuccgccgcgccgcccaggcccccgacggcgccuccgagccccgcgccuccgccucccgcccccagcccgcccccgccgacggcgccgaccccccccccgccgaggagcccgaggcccgccccgacggcgagggcucccccggcaaggcccgccccggcaccgcccgccgccccggcgccgccgccuccggcgagcgcgacgaccgcggcccccccgccuccgucgccgcccuccgcuccaacuucgagcgcauccgcaagggccacggccagcccggcgccgacgccgagaagcccuucuacgucaacgucgaguuccaccacgagcgcggccucgucaaggucaacgacaaggaggucuccgaccgcaucuccucccucggcucccaggccaugcagauggagcgcaagaagucccagcacggcgccggcuccuccgucggcgacgccucccgcccccccuaccgcggccgcuccuccgaguccuccugcggcgucgacggcgacuacgaggacgccgagcucaacccccgcuuccucaaggacaaccucaucgacgccaacggcggcucccgcccccccuggcccccccucgaguaccagcccuaccaguccaucuacgucggcggcaugauggagggcgagggcaagggcccccuccuccgcucccaguccaccuccgagcaggagaagcgccucaccuggccccgccgcuccuacuccccccgcuccuucgaggacugcggcggcggcuacacccccgacugcuccuccaacgagaaccucaccuccuccgaggaggacuucuccuccggccaguccucccgcgucucccccucccccaccaccuaccgcauguuccgcgacaagucccgcucccccucccagaacucccagcaguccuucgacuccuccuccccccccaccccccagugccacaagcgccaccgccacugccccgucgucgucuccgaggccaccaucgucggcguccgcaagaccggccagaucuggcccaacgacggcgagggcgccuuccacggcgacgccgacggcucccucgagcuccagggcaagcccucccgcuggacccaguga

SEQ ID NO: 577 - RNA, 1326 nt, Artificial Sequence
  derived and/or modified sequence opt3 from bcr/abl__Homo_sapiens__ABX82705
augguggaccccgucggcuucgccgaggcuuggaaggcacaguuuccugauagcgaaccaccgagaauggagcugagguccguuggggacaucgaacaagagcucgaacggugcaaagccucuauucgccgacuugagcaggaggugaaccaggaacguuucagaaugauauaccugcagaccuuguuagcgaaggagaaaaagucauaugauaggcaacgguggggauuucgcagagcugcccaggcacccgacggugccagugaaccuagggcuagcgcaucccggccacagcccgccccugcugauggcgccgacccacccccugcggaggagccagaagcacgcccggauggggagggaucucccggcaaagcccgaccugguacagcuagaaggccaggggccgcagcuucgggagaacgggacgaucgugggcccccugccucaguagcggcccugcgcagcaauuucgagagaaucaggaagggccacggccagccaggagcagacgcugaaaagcccuuuuacgugaacgucgaguuccaucacgagcggggucuagugaaaguuaaugauaaggaagugagugaccgaauuuccucucucggcagccaagccaugcagauggagcgcaaaaagucccagcauggggcuggaucaagugucggcgaugccagcagaccgccuuauaggggucggucuuccgaaucaagcugugggguggacggagacuacgaggaugcagaacugaacccccgcuuucuuaaagacaaucugaucgaugccaacggcggcaguagaccaccuuggcccccauuggaguaucagcccuaccaaucuauuuauguagggggaaugauggagggugaaggcaaggggccucuccugaggucccagagcacuucggagcaggaaaagcgucugacguggccacggcgaucuuacuccccgagaucauucgaggacugcggaggcgguuacacccccgauuguaguagcaaugaaaaccucacauccucugaggaggacuuuagcucagggcaaaguuccaggguuagcccuucuccaacuaccuaucgcauguuccgggauaaaucaagaagucccagccaaaauucccagcagucuuuugacucgagcuccccuccaacaccccagugccacaagaggcaucgccacuguccgguggucgugucagaagcuaccaucgugggcguccgaaaaacuggacagauauggccuaacgauggcgagggggcguuccacggagacgcagaugguaguuuagaacugcagggcaagccaucucgguggacacaguga

SEQ ID NO: 578 - RNA, 1326 nt, Artificial Sequence
  derived and/or modified sequence opt4 from bcr/abl__Homo_sapiens__ABX82705
augguggaccccgugggcuucgccgaggccuggaaggcccaguuccccgacagcgagccccccagaauggagcugagaagcgugggcgacaucgagcaggagcuggagagaugcaaggccagcaucagaagacuggagcaggaggugaaccaggagagauucagaaugaucuaccugcagacccugcuggccaaggagaagaagagcuacgacagacagagauggggcuucagaagagccgcccaggcccccgacggcgccagcgagcccagagccagcgccagcagaccccagcccgcccccgccgacggcgccgaccccccccccgccgaggagcccgaggccagacccgacggcgagggcagccccggcaaggccagacccggcaccgccagaagacccggcgccgccgccagcggcgagagagacgacagaggcccccccgccagcguggccgcccugagaagcaacuucgagagaaucagaaagggccacggccagcccggcgccgacgccgagaagcccuucuacgugaacguggaguuccaccacgagagaggccuggugaaggugaacgacaaggaggugagcgacagaaucagcagccugggcagccaggccaugcagauggagagaaagaagagccagcacggcgccggcagcagcgugggcgacgccagcagaccccccuacagaggcagaagcagcgagagcagcugcggcguggacggcgacuacgaggacgccgagcugaaccccagauuccugaaggacaaccugaucgacgccaacggcggcagcagaccccccuggcccccccuggaguaccagcccuaccagagcaucuacgugggcggcaugauggagggcgagggcaagggcccccugcugagaagccagagcaccagcgagcaggagaagagacugaccuggcccagaagaagcuacagccccagaagcuucgaggacugcggcggcggcuacacccccgacugcagcagcaacgagaaccugaccagcagcgaggaggacuucagcagcggccagagcagcagagugagccccagccccaccaccuacagaauguucagagacaagagcagaagccccagccagaacagccagcagagcuucgacagcagcagcccccccaccccccagugccacaagagacacagacacugccccgugguggugagcgaggccaccaucgugggcgugagaaagaccggccagaucuggcccaacgacggcgagggcgccuuccacggcgacgccgacggcagccuggagcugcagggcaagcccagcagauggacccaguga

SEQ ID NO: 579 - RNA, 1326 nt, Artificial Sequence
  derived and/or modified sequence opt5 from bcr/abl__Homo_sapiens__ABX82705
augguggaccccgucggcuucgccgaggcuuggaaggcccaguuuccugauagcgaaccgcccagaauggagcugcgguccguuggggacaucgaacaagagcucgaacgcugcaaagcgucuauuagacggcuggagcaggaggugaaccaggaacgcuucagaaugaucuaccuucagacccugcucgcuaaggagaaaaagagcuaugaucggcaacgcuggggauuuagacgggccgcccaggcuccugacggcgccuccgaaccccgcgcuucugccagcagaccucagcccgcgccugccgauggggcugacccgcccccugccgaggagcccgaagcucggccugauggagagggcucccccgggaaagcccgcccgggaacagcgagacggccuggcgccgcugccucuggcgaacgcgacgauagagggcccccugcuagcguggccgcccugcgguccaauuucgagcgcauuagaaagggacacggccagcccggggcugacgcggaaaagcccuuuuacgucaacguggaguuccaucacgagcggggacuuguuaaagugaaugauaaggaagucagcgacagaaucucuucccugggcagccaagccaugcagauggagcgcaaaaagucucagcauggggcuggauccagcgugggcgaugccucucggccuccguauagaggccgcuccagcgaauccucuugugggguugacggagacuacgaggaugccgaacucaacccccgguuucugaaagacaaucugauugaugcuaacggcgggagcagaccucccuggccuccccucgaguaucagccguaccaauccaucuaugugggaggcaugauggagggggaaggaaagggcccucugcuucgcagccagucuacguccgagcaggaaaagcggcugaccuggcccagacgcagcuacucuccucggagcuucgaggacugcggcgggggauacacacccgauuguuccucuaaugaaaaccucaccagcuccgaggaggacuuuagcucuggccaauccagcagagucucuccuucccccacaaccuaucggauguuccgcgauaaaagcagauccccgucucagaauagccagcaguccuuugacucuagcuccccucccacaccccaaugccacaagcggcauagacacuguccugugguggucagcgaagccaccaucguuggggugcgcaaaacgggacagauuuggccgaacgauggcgagggggcguuccacggcgacgcugauggaucucuggaacuucagggcaagcccucccgguggacccaguga

SEQ ID NO: 580 - protein, 524 aa, Artificial Sequence
  bcr/abl__Homo_sapiens__A9UF00
MVDPVGFAEAWKAQFPDSEPPRMELRSVGDIEQELERCKASIRRLEQEVNQERFRMIYLQTLLAKEKKSYDRQRWGFRRAAQAPDGASEPRASASRPQPAPADGADPPPAEEPEARPDGEGSPGKARPGTARRPGAAASGERDDRGPPASVAALRSNFERIRKGHGQPGADAEKPFYVNVEFHHERGLVKVNDKEVSDRISSLGSQAMQMERKKSQHGAGSSVGDASRPPYRGRSSESSCGVDGDYEDAELNPRFLKDNLIDANGGSRPPWPPLEYQPYQSIYVGGMMEGEGKGPLLRSQSTSEQEKRLTWPRRSYSPRSFEDCGGGYTPDCSSNENLTSSEEDFSSGQSSRVSPSPTTYRMFRDKSRSPSQNSQQSFDSSSPPTPQCHKRHRHCPVVVSEATIVGVRKTGQIWPNDGEGAFHGDADGSFGTPPGYGCAADRAEEQRRHQDGLPYIDDSPSSSPHLSSKGRGSRDALVSGALESTKASELDLEKGLEMRKWDPVKMTPTFSLHCMILWPVEITL

SEQ ID NO: 581 - RNA, 1575 nt, Artificial Sequence
  bcr/abl__Homo_sapiens__ABX82706
augguggacccggugggcuucgcggaggcguggaaggcgcaguucccggacucagagcccccgcgcauggagcugcgcucagugggcgacaucgagcaggagcuggagcgcugcaaggccuccauucggcgccuggagcaggaggugaaccaggagcgcuuccgcaugaucuaccugcagacguugcuggccaaggaaaagaagagcuaugaccggcagcgauggggcuuccggcgcgcggcgcaggcccccgacggcgccuccgagccccgagcguccgcgucgcgcccgcagccagcgcccgccgacggagccgacccgccgcccgccgaggagcccgaggcccggcccgacggcgaggguucuccggguaaggccaggcccgggaccgcccgcaggcccggggcagccgcgucgggggaacgggacgaccggggaccccccgccagcguggcggcgcucagguccaacuucgagcggauccgcaagggccauggccagcccggggcggacgccgagaagcccuucuacgugaacgucgaguuucaccacgagcgcggccuggugaaggucaacgacaaagaggugucggaccgcaucagcucccugggcagccaggccaugcagauggagcgcaaaaagucccagcacggcgcgggcucgagcgugggggaugcauccaggcccccuuaccggggacgcuccucggagagcagcugcggcgucgacggcgacuacgaggacgccgaguugaacccccgcuuccugaaggacaaccugaucgacgccaauggcgguagcaggcccccuuggccgccccuggaguaccagcccuaccagagcaucuacgucgggggcaugauggaaggggagggcaagggcccgcuccugcgcagccagagcaccucugagcaggagaagcgccuuaccuggccccgcagguccuacuccccccggaguuuugaggauugcggaggcggcuauaccccggacugcagcuccaaugagaaccucaccuccagcgaggaggacuucuccucuggccaguccagccgcguguccccaagccccaccaccuaccgcauguuccgggacaaaagccgcucucccucgcagaacucgcaacaguccuucgacagcagcaguccccccacgccgcagugccauaagcggcaccggcacugcccgguugucguguccgaggccaccaucgugggcguccgcaagaccgggcagaucuggcccaacgauggcgagggcgccuuccauggagacgcagauggcucguucggaacaccaccuggauacggcugcgcugcagaccgggcagaggagcagcgccggcaccaagaugggcugcccuacauugaugacucgcccuccucaucgccccaccucagcagcaagggcaggggcagccgggaugcgcuggucucgggagcccuggaguccacuaaagcgagugagcuggacuuggaaaagggcuuggagaugagaaaaugggacccagugaaaaugaccccaaccuuuucguugcacuguaugauuuuguggccaguggagauaacacucuaa

SEQ ID NO: 582 - RNA, 1575 nt, Artificial Sequence
  derived and/or modified sequence opt1 from bcr/abl__Homo_sapiens__ABX82706
augguggaccccgucggcuucgccgaggccuggaaggcgcaguucccggacagcgagccgccccgcauggagcugcgguccgugggggacaucgagcaggagcucgagcgcugcaaggccagcauccggcgccuggagcaggaggugaaccaggagcgguuccgcaugaucuaccugcagacccuccuggccaaggagaagaaguccuacgaccggcagcgcuggggcuuccggcgcgccgcccaggcgcccgacggggccagcgagccccgggccuccgccagccgcccccagcccgcgcccgccgacggcgccgacccgccgcccgccgaggagcccgaggcccggcccgacggggagggcucccccggcaaggcgcgccccgggaccgcccggcgccccggcgccgccgccagcggggagcgggacgaccgcggcccgcccgcguccgucgccgcccugcggagcaacuucgagcgcauccggaaggggcacggccagcccggcgccgacgccgagaagcccuucuacgugaacguggaguuccaccacgagcgcgggcucgucaaggugaacgacaaggagguguccgaccgcaucagcucccugggcagccaggcgaugcagauggagcggaagaagucccagcacggggccggcagcuccgucggcgacgccagccgcccgcccuaccgggggcgcuccagcgagagcuccugcggcguggacggggacuacgaggacgccgagcugaacccccgguuccucaaggacaaccugaucgacgccaacggcgggagccggcccccguggccgccccuggaguaccagcccuaccaguccaucuacgugggcggcaugauggagggggagggcaaggggccccuccugcgcagccaguccacgagcgagcaggagaagcgccugaccuggccccggcgcuccuacagcccccgguccuucgaggacugcggcgggggcuacaccccggacugcagcuccaacgagaaccucaccagcuccgaggaggacuucagcuccggccagagcucccgcgucagccccucccccacgaccuaccggauguuccgcgacaagagccggagccccucccagaacagccagcaguccuucgacagcuccagcccgcccacgccccagugccacaagcgccaccggcacugccccgugguggucuccgaggcgaccaucgugggggugcgcaagaccggccagaucuggccgaacgacggggagggcgccuuccacggggacgccgacggcagcuucggcaccccgcccggguacggcugcgccgcggaccgggccgaggagcagcgccgccaccaggacgggcugcccuacaucgacgacucccccagcuccagcccccaccuguccagcaagggccggggcucccgcgacgcccucgucagcggggcccuggaguccaccaaggccagcgagcuggaccucgagaagggccuggagaugcggaagugggaccccgugaagaugacccccacguucagccugcacugcaugauccucuggccgguggagaucacccuguga

SEQ ID NO: 583 - RNA, 1575 nt, Artificial Sequence
  derived and/or modified sequence opt2 from bcr/abl__Homo_sapiens__ABX82706
auggucgaccccgucggcuucgccgaggccuggaaggcccaguuccccgacuccgagcccccccgcauggagcuccgcuccgucggcgacaucgagcaggagcucgagcgcugcaaggccuccauccgccgccucgagcaggaggucaaccaggagcgcuuccgcaugaucuaccuccagacccuccucgccaaggagaagaaguccuacgaccgccagcgcuggggcuuccgccgcgccgcccaggcccccgacggcgccuccgagccccgcgccuccgccucccgcccccagcccgcccccgccgacggcgccgaccccccccccgccgaggagcccgaggcccgccccgacggcgagggcucccccggcaaggcccgccccggcaccgcccgccgccccggcgccgccgccuccggcgagcgcgacgaccgcggcccccccgccuccgucgccgcccuccgcuccaacuucgagcgcauccgcaagggccacggccagcccggcgccgacgccgagaagcccuucuacgucaacgucgaguuccaccacgagcgcggccucgucaaggucaacgacaaggaggucuccgaccgcaucuccucccucggcucccaggccaugcagauggagcgcaagaagucccagcacggcgccggcuccuccgucggcgacgccucccgcccccccuaccgcggccgcuccuccgaguccuccugcggcgucgacggcgacuacgaggacgccgagcucaacccccgcuuccucaaggacaaccucaucgacgccaacggcggcucccgcccccccuggcccccccucgaguaccagcccuaccaguccaucuacgucggcggcaugauggagggcgagggcaagggcccccuccuccgcucccaguccaccuccgagcaggagaagcgccucaccuggccccgccgcuccuacuccccccgcuccuucgaggacugcggcggcggcuacacccccgacugcuccuccaacgagaaccucaccuccuccgaggaggacuucuccuccggccaguccucccgcgucucccccucccccaccaccuaccgcauguuccgcgacaagucccgcucccccucccagaacucccagcaguccuucgacuccuccuccccccccaccccccagugccacaagcgccaccgccacugccccgucgucgucuccgaggccaccaucgucggcguccgcaagaccggccagaucuggcccaacgacggcgagggcgccuuccacggcgacgccgacggcuccuucggcaccccccccggcuacggcugcgccgccgaccgcgccgaggagcagcgccgccaccaggacggccuccccuacaucgacgacucccccuccuccuccccccaccucuccuccaagggccgcggcucccgcgacgcccucgucuccggcgcccucgaguccaccaaggccuccgagcucgaccucgagaagggccucgagaugcgcaagugggaccccgucaagaugacccccaccuucucccuccacugcaugauccucuggcccgucgagaucacccucuga

SEQ ID NO: 584 - RNA, 1575 nt, Artificial Sequence
  derived and/or modified sequence opt3 from bcr/abl__Homo_sapiens__ABX82706
augguggaccccgucggcuucgccgaggcuuggaaggcacaguuuccugauagcgaaccaccgagaauggagcugagguccguuggggacaucgaacaagagcucgaacggugcaaagccucuauucgccgacuugagcaggaggugaaccaggaacguuucagaaugauauaccugcagaccuuguuagcgaaggagaaaaagucauaugauaggcaacgguggggauuucgcagagcugcccaggcacccgacggugccagugaaccuagggcuagcgcaucccggccacagcccgccccugcugauggcgccgacccacccccugcggaggagccagaagcacgcccggauggggagggaucucccggcaaagcccgaccugguacagcuagaaggccaggggccgcagcuucgggagaacgggacgaucgugggcccccugccucaguagcggcccugcgcagcaauuucgagagaaucaggaagggccacggccagccaggagcagacgcugaaaagcccuuuuacgugaacgucgaguuccaucacgagcggggucuagugaaaguuaaugauaaggaagugagugaccgaauuuccucucucggcagccaagccaugcagauggagcgcaaaaagucccagcauggggcuggaucaagugucggcgaugccagcagaccgccuuauaggggucggucuuccgaaucaagcugugggguggacggagacuacgaggaugcagaacugaacccccgcuuucuuaaagacaaucugaucgaugccaacggcggcaguagaccaccuuggcccccauuggaguaucagcccuaccaaucuauuuauguagggggaaugauggagggugaaggcaaggggccucuccugaggucccagagcacuucggagcaggaaaagcgucugacguggccacggcgaucuuacuccccgagaucauucgaggacugcggaggcgguuacacccccgauuguaguagcaaugaaaaccucacauccucugaggaggacuuuagcucagggcaaaguuccaggguuagcccuucuccaacuaccuaucgcauguuccgggauaaaucaagaagucccagccaaaauucccagcagucuuuugacucgagcuccccuccaacaccccagugccacaagaggcaucgccacuguccgguggucgugucagaagcuaccaucgugggcguccgaaaaacuggacagauauggccuaacgauggcgagggggcguuccacggagacgcagaugguaguuuuggcacaccacccggguacggaugcgccgcugaccgggccgaggaacagcguagacaucaggacggcuuaccuuauaucgaugacucucccagcuccucaccacaccugagcucuaaggguagggggucccgcgaugcacuuguuaguggcgccuuggagagcaccaaggcuucugaacuggaccuagagaaaggacucgaaaugcggaaaugggauccugugaagaugacgcccacuuucucccugcauuguaugauucuuuggccaguagagaucacccuguga

SEQ ID NO: 585 - RNA, 1575 nt, Artificial Sequence
  derived and/or modified sequence opt4 from bcr/abl__Homo_sapiens__ABX82706
augguggaccccgugggcuucgccgaggccuggaaggcccaguuccccgacagcgagccccccagaauggagcugagaagcgugggcgacaucgagcaggagcuggagagaugcaaggccagcaucagaagacuggagcaggaggugaaccaggagagauucagaaugaucuaccugcagacccugcuggccaaggagaagaagagcuacgacagacagagauggggcuucagaagagccgcccaggcccccgacggcgccagcgagcccagagccagcgccagcagaccccagcccgcccccgccgacggcgccgaccccccccccgccgaggagcccgaggccagacccgacggcgagggcagccccggcaaggccagacccggcaccgccagaagacccggcgccgccgccagcggcgagagagacgacagaggcccccccgccagcguggccgcccugagaagcaacuucgagagaaucagaaagggccacggccagcccggcgccgacgccgagaagcccuucuacgugaacguggaguuccaccacgagagaggccuggugaaggugaacgacaaggaggugagcgacagaaucagcagccugggcagccaggccaugcagauggagagaaagaagagccagcacggcgccggcagcagcgugggcgacgccagcagaccccccuacagaggcagaagcagcgagagcagcugcggcguggacggcgacuacgaggacgccgagcugaaccccagauuccugaaggacaaccugaucgacgccaacggcggcagcagaccccccuggcccccccuggaguaccagcccuaccagagcaucuacgugggcggcaugauggagggcgagggcaagggcccccugcugagaagccagagcaccagcgagcaggagaagagacugaccuggcccagaagaagcuacagccccagaagcuucgaggacugcggcggcggcuacacccccgacugcagcagcaacgagaaccugaccagcagcgaggaggacuucagcagcggccagagcagcagagugagccccagccccaccaccuacagaauguucagagacaagagcagaagccccagccagaacagccagcagagcuucgacagcagcagcccccccaccccccagugccacaagagacacagacacugccccgugguggugagcgaggccaccaucgugggcgugagaaagaccggccagaucuggcccaacgacggcgagggcgccuuccacggcgacgccgacggcagcuucggcaccccccccggcuacggcugcgccgccgacagagccgaggagcagagaagacaccaggacggccugcccuacaucgacgacagccccagcagcagcccccaccugagcagcaagggcagaggcagcagagacgcccuggugagcggcgcccuggagagcaccaaggccagcgagcuggaccuggagaagggccuggagaugagaaagugggaccccgugaagaugacccccaccuucagccugcacugcaugauccuguggcccguggagaucacccuguga

SEQ ID NO: 586 - RNA, 1575 nt, Artificial Sequence
  derived and/or modified sequence opt5 from bcr/abl__Homo_sapiens__ABX82706
augguggaccccgucggcuucgccgaggcuuggaaggcccaguuuccugauagcgaaccgcccagaauggagcugcgguccguuggggacaucgaacaagagcucgaacgcugcaaagcgucuauuagacggcuggagcaggaggugaaccaggaacgcuucagaaugaucuaccuucagacccugcucgcuaaggagaaaaagagcuaugaucggcaacgcuggggauuuagacgggccgcccaggcuccugacggcgccuccgaaccccgcgcuucugccagcagaccucagcccgcgccugccgauggggcugacccgcccccugccgaggagcccgaagcucggccugauggagagggcucccccgggaaagcccgcccgggaacagcgagacggccuggcgccgcugccucuggcgaacgcgacgauagagggcccccugcuagcguggccgcccugcgguccaauuucgagcgcauuagaaagggacacggccagcccggggcugacgcggaaaagcccuuuuacgucaacguggaguuccaucacgagcggggacuuguuaaagugaaugauaaggaagucagcgacagaaucucuucccugggcagccaagccaugcagauggagcgcaaaaagucucagcauggggcuggauccagcgugggcgaugccucucggccuccguauagaggccgcuccagcgaauccucuugugggguugacggagacuacgaggaugccgaacucaacccccgguuucugaaagacaaucugauugaugcuaacggcgggagcagaccucccuggccuccccucgaguaucagccguaccaauccaucuaugugggaggcaugauggagggggaaggaaagggcccucugcuucgcagccagucuacguccgagcaggaaaagcggcugaccuggcccagacgcagcuacucuccucggagcuucgaggacugcggcgggggauacacacccgauuguuccucuaaugaaaaccucaccagcuccgaggaggacuuuagcucuggccaauccagcagagucucuccuucccccacaaccuaucggauguuccgcgauaaaagcagauccccgucucagaauagccagcaguccuuugacucuagcuccccucccacaccccaaugccacaagcggcauagacacuguccugugguggucagcgaagccaccaucguuggggugcgcaaaacgggacagauuuggccgaacgauggcgagggggcguuccacggcgacgcugauggaucuuuuggcacacccccuggguacggaugcgccgccgaccgggcugaggaacagagacgccaucaggacggccugcccuauaucgaugacuccccuagcucuagcccccaccuuuccucuaaggggagaggaagccgggaugcccugguguccggcgcucucgagagcaccaaagccucugaacuggaccuggagaaggggcucgaaaugcgcaaaugggauccugucaagaugacccccacauucucccugcauuguaugauucuuuggccgguggagaucacccuguga

SEQ ID NO: 587 - protein, 465 aa, Artificial Sequence
  bcr/abl__Homo_sapiens__A9UF01
MVDPVGFAEAWKAQFPDSEPPRMELRSVGDIEQELERCKASIRRLEQEVNQERFRMIYLQTLLAKEKKSYDRQRWGFRRAAQAPDGASEPRASASRPQPAPADGADPPPAEEPEARPDGEGSPGKARPGTARRPGAAASGERDDRGPPASVAALRSNFERIRKGHGQPGADAEKPFYVNVEFHHERGLVKVNDKEVSDRISSLGSQAMQMERKKSQHGAGSSVGDASRPPYRGRSSESSCGVDGDYEDAELNPRFLKDNLIDANGGSRPPWPPLEYQPYQSIYVGGMMEGEGKGPLLRSQSTSEQEKRLTWPRRSYSPRSFEDCGGGYTPDCSSNENLTSSEEDFSSGQSSRVSPSPTTYRMFRDKSRSPSQNSQQSFDSSSPPTPQCHKRHRHCPVVVSEATIVGVRKTGQIWPNDGEGAFHGEHPGAAEEVFQKLLPDIRGAADADQLVCETPDCPQHSADHQ

SEQ ID NO: 588 - RNA, 1398 nt, Artificial Sequence
  bcr/abl__Homo_sapiens__ABX82707
augguggacccggugggcuucgcggaggcguggaaggcgcaguucccggacucagagcccccgcgcauggagcugcgcucagugggcgacaucgagcaggagcuggagcgcugcaaggccuccauucggcgccuggagcaggaggugaaccaggagcgcuuccgcaugaucuaccugcagacguugcuggccaaggaaaagaagagcuaugaccggcagcgauggggcuuccggcgcgcggcgcaggcccccgacggcgccuccgagccccgagcguccgcgucgcgcccgcagccagcgcccgccgacggagccgacccgccgcccgccgaggagcccgaggcccggcccgacggcgaggguucuccggguaaggccaggcccgggaccgcccgcaggcccggggcagccgcgucgggggaacgggacgaccggggaccccccgccagcguggcggcgcucagguccaacuucgagcggauccgcaagggccauggccagcccggggcggacgccgagaagcccuucuacgugaacgucgaguuucaccacgagcgcggccuggugaaggucaacgacaaagaggugucggaccgcaucagcucccugggcagccaggccaugcagauggagcgcaaaaagucccagcacggcgcgggcucgagcgugggggaugcauccaggcccccuuaccggggacgcuccucggagagcagcugcggcgucgacggcgacuacgaggacgccgaguugaacccccgcuuccugaaggacaaccugaucgacgccaauggcgguagcaggcccccuuggccgccccuggaguaccagcccuaccagagcaucuacgucgggggcaugauggaaggggagggcaagggcccgcuccugcgcagccagagcaccucugagcaggagaagcgccuuaccuggccccgcagguccuacuccccccggaguuuugaggauugcggaggcggcuauaccccggacugcagcuccaaugagaaccucaccuccagcgaggaggacuucuccucuggccaguccagccgcguguccccaagccccaccaccuaccgcauguuccgggacaaaagccgcucucccucgcagaacucgcaacaguccuucgacagcagcaguccccccacgccgcagugccauaagcggcaccggcacugcccgguugucguguccgaggccaccaucgugggcguccgcaagaccgggcagaucuggcccaacgauggcgagggcgccuuccauggagaacauccgggagcagcagaagaaguguuucagaagcuucucccugacauccguggagcugcagaugcugaccaacucgugugugaaacuccagacuguccacagcauuccgcugaccaucaauaa

SEQ ID NO: 589 - RNA, 1398 nt, Artificial Sequence
  derived and/or modified sequence opt1 from bcr/abl__Homo_sapiens__ABX82707
augguggaccccgucggcuucgccgaggccuggaaggcgcaguucccggacagcgagccgccccgcauggagcugcgguccgugggggacaucgagcaggagcucgagcgcugcaaggccagcauccggcgccuggagcaggaggugaaccaggagcgguuccgcaugaucuaccugcagacccuccuggccaaggagaagaaguccuacgaccggcagcgcuggggcuuccggcgcgccgcccaggcgcccgacggggccagcgagccccgggccuccgccagccgcccccagcccgcgcccgccgacggcgccgacccgccgcccgccgaggagcccgaggcccggcccgacggggagggcucccccggcaaggcgcgccccgggaccgcccggcgccccggcgccgccgccagcggggagcgggacgaccgcggcccgcccgcguccgucgccgcccugcggagcaacuucgagcgcauccggaaggggcacggccagcccggcgccgacgccgagaagcccuucuacgugaacguggaguuccaccacgagcgcgggcucgucaaggugaacgacaaggagguguccgaccgcaucagcucccugggcagccaggcgaugcagauggagcggaagaagucccagcacggggccggcagcuccgucggcgacgccagccgcccgcccuaccgggggcgcuccagcgagagcuccugcggcguggacggggacuacgaggacgccgagcugaacccccgguuccucaaggacaaccugaucgacgccaacggcgggagccggcccccguggccgccccuggaguaccagcccuaccaguccaucuacgugggcggcaugauggagggggagggcaaggggccccuccugcgcagccaguccacgagcgagcaggagaagcgccugaccuggccccggcgcuccuacagcccccgguccuucgaggacugcggcgggggcuacaccccggacugcagcuccaacgagaaccucaccagcuccgaggaggacuucagcuccggccagagcucccgcgucagccccucccccacgaccuaccggauguuccgcgacaagagccggagccccucccagaacagccagcaguccuucgacagcuccagcccgcccacgccccagugccacaagcgccaccggcacugccccgugguggucuccgaggcgaccaucgugggggugcgcaagaccggccagaucuggccgaacgacggggagggcgccuuccacggggagcaccccggcgccgccgaggaggucuuccagaagcugcugcccgacauccggggcgcggccgacgccgaccagcucgugugcgagacccccgacugcccgcagcacagcgccgaccaccaguga

SEQ ID NO: 590 - RNA, 1398 nt, Artificial Sequence
  derived and/or modified sequence opt2 from bcr/abl__Homo_sapiens__ABX82707
auggucgaccccgucggcuucgccgaggccuggaaggcccaguuccccgacuccgagcccccccgcauggagcuccgcuccgucggcgacaucgagcaggagcucgagcgcugcaaggccuccauccgccgccucgagcaggaggucaaccaggagcgcuuccgcaugaucuaccuccagacccuccucgccaaggagaagaaguccuacgaccgccagcgcuggggcuuccgccgcgccgcccaggcccccgacggcgccuccgagccccgcgccuccgccucccgcccccagcccgcccccgccgacggcgccgaccccccccccgccgaggagcccgaggcccgccccgacggcgagggcucccccggcaaggcccgccccggcaccgcccgccgccccggcgccgccgccuccggcgagcgcgacgaccgcggcccccccgccuccgucgccgcccuccgcuccaacuucgagcgcauccgcaagggccacggccagcccggcgccgacgccgagaagcccuucuacgucaacgucgaguuccaccacgagcgcggccucgucaaggucaacgacaaggaggucuccgaccgcaucuccucccucggcucccaggccaugcagauggagcgcaagaagucccagcacggcgccggcuccuccgucggcgacgccucccgcccccccuaccgcggccgcuccuccgaguccuccugcggcgucgacggcgacuacgaggacgccgagcucaacccccgcuuccucaaggacaaccucaucgacgccaacggcggcucccgcccccccuggcccccccucgaguaccagcccuaccaguccaucuacgucggcggcaugauggagggcgagggcaagggcccccuccuccgcucccaguccaccuccgagcaggagaagcgccucaccuggccccgccgcuccuacuccccccgcuccuucgaggacugcggcggcggcuacacccccgacugcuccuccaacgagaaccucaccuccuccgaggaggacuucuccuccggccaguccucccgcgucucccccucccccaccaccuaccgcauguuccgcgacaagucccgcucccccucccagaacucccagcaguccuucgacuccuccuccccccccaccccccagugccacaagcgccaccgccacugccccgucgucgucuccgaggccaccaucgucggcguccgcaagaccggccagaucuggcccaacgacggcgagggcgccuuccacggcgagcaccccggcgccgccgaggaggucuuccagaagcuccuccccgacauccgcggcgccgccgacgccgaccagcucgucugcgagacccccgacugcccccagcacuccgccgaccaccaguga

SEQ ID NO: 591 - RNA, 1398 nt, Artificial Sequence
  derived and/or modified sequence opt3 from bcr/abl__Homo_sapiens__ABX82707
augguggaccccgucggcuucgccgaggcuuggaaggcacaguuuccugauagcgaaccaccgagaauggagcugagguccguuggggacaucgaacaagagcucgaacggugcaaagccucuauucgccgacuugagcaggaggugaaccaggaacguuucagaaugauauaccugcagaccuuguuagcgaaggagaaaaagucauaugauaggcaacgguggggauuucgcagagcugcccaggcacccgacggugccagugaaccuagggcuagcgcaucccggccacagcccgccccugcugauggcgccgacccacccccugcggaggagccagaagcacgcccggauggggagggaucucccggcaaagcccgaccugguacagcuagaaggccaggggccgcagcuucgggagaacgggacgaucgugggcccccugccucaguagcggcccugcgcagcaauuucgagagaaucaggaagggccacggccagccaggagcagacgcugaaaagcccuuuuacgugaacgucgaguuccaucacgagcggggucuagugaaaguuaaugauaaggaagugagugaccgaauuuccucucucggcagccaagccaugcagauggagcgcaaaaagucccagcauggggcuggaucaagugucggcgaugccagcagaccgccuuauaggggucggucuuccgaaucaagcugugggguggacggagacuacgaggaugcagaacugaacccccgcuuucuuaaagacaaucugaucgaugccaacggcggcaguagaccaccuuggcccccauuggaguaucagcccuaccaaucuauuuauguagggggaaugauggagggugaaggcaaggggccucuccugaggucccagagcacuucggagcaggaaaagcgucugacguggccacggcgaucuuacuccccgagaucauucgaggacugcggaggcgguuacacccccgauuguaguagcaaugaaaaccucacauccucugaggaggacuuuagcucagggcaaaguuccaggguuagcccuucuccaacuaccuaucgcauguuccgggauaaaucaagaagucccagccaaaauucccagcagucuuuugacucgagcuccccuccaacaccccagugccacaagaggcaucgccacuguccgguggucgugucagaagcuaccaucgugggcguccgaaaaacuggacagauauggccuaacgauggcgagggggcguuccacggagaacauccaggugcagccgaggagguuuuucagaaguuacugcccgacauccggggcgcugccgaugcagaccagcuugugugcgaaacaccugacuguccccaacacagugccgaucaucaguga

SEQ ID NO: 592 - RNA, 1398 nt, Artificial Sequence
  derived and/or modified sequence opt4 from bcr/abl__Homo_sapiens__ABX82707
augguggaccccgugggcuucgccgaggccuggaaggcccaguuccccgacagcgagccccccagaauggagcugagaagcgugggcgacaucgagcaggagcuggagagaugcaaggccagcaucagaagacuggagcaggaggugaaccaggagagauucagaaugaucuaccugcagacccugcuggccaaggagaagaagagcuacgacagacagagauggggcuucagaagagccgcccaggcccccgacggcgccagcgagcccagagccagcgccagcagaccccagcccgcccccgccgacggcgccgaccccccccccgccgaggagcccgaggccagacccgacggcgagggcagccccggcaaggccagacccggcaccgccagaagacccggcgccgccgccagcggcgagagagacgacagaggcccccccgccagcguggccgcccugagaagcaacuucgagagaaucagaaagggccacggccagcccggcgccgacgccgagaagcccuucuacgugaacguggaguuccaccacgagagaggccuggugaaggugaacgacaaggaggugagcgacagaaucagcagccugggcagccaggccaugcagauggagagaaagaagagccagcacggcgccggcagcagcgugggcgacgccagcagaccccccuacagaggcagaagcagcgagagcagcugcggcguggacggcgacuacgaggacgccgagcugaaccccagauuccugaaggacaaccugaucgacgccaacggcggcagcagaccccccuggcccccccuggaguaccagcccuaccagagcaucuacgugggcggcaugauggagggcgagggcaagggcccccugcugagaagccagagcaccagcgagcaggagaagagacugaccuggcccagaagaagcuacagccccagaagcuucgaggacugcggcggcggcuacacccccgacugcagcagcaacgagaaccugaccagcagcgaggaggacuucagcagcggccagagcagcagagugagccccagccccaccaccuacagaauguucagagacaagagcagaagccccagccagaacagccagcagagcuucgacagcagcagcccccccaccccccagugccacaagagacacagacacugccccgugguggugagcgaggccaccaucgugggcgugagaaagaccggccagaucuggcccaacgacggcgagggcgccuuccacggcgagcaccccggcgccgccgaggagguguuccagaagcugcugcccgacaucagaggcgccgccgacgccgaccagcuggugugcgagacccccgacugcccccagcacagcgccgaccaccaguga

SEQ ID NO: 593 - RNA, 1398 nt, Artificial Sequence
  derived and/or modified sequence opt5 from bcr/abl__Homo_sapiens__ABX82707
augguggaccccgucggcuucgccgaggcuuggaaggcccaguuuccugauagcgaaccgcccagaauggagcugcgguccguuggggacaucgaacaagagcucgaacgcugcaaagcgucuauuagacggcuggagcaggaggugaaccaggaacgcuucagaaugaucuaccuucagacccugcucgcuaaggagaaaaagagcuaugaucggcaacgcuggggauuuagacgggccgcccaggcuccugacggcgccuccgaaccccgcgcuucugccagcagaccucagcccgcgccugccgauggggcugacccgcccccugccgaggagcccgaagcucggccugauggagagggcucccccgggaaagcccgcccgggaacagcgagacggccuggcgccgcugccucuggcgaacgcgacgauagagggcccccugcuagcguggccgcccugcgguccaauuucgagcgcauuagaaagggacacggccagcccggggcugacgcggaaaagcccuuuuacgucaacguggaguuccaucacgagcggggacuuguuaaagugaaugauaaggaagucagcgacagaaucucuucccugggcagccaagccaugcagauggagcgcaaaaagucucagcauggggcuggauccagcgugggcgaugccucucggccuccguauagaggccgcuccagcgaauccucuugugggguugacggagacuacgaggaugccgaacucaacccccgguuucugaaagacaaucugauugaugcuaacggcgggagcagaccucccuggccuccccucgaguaucagccguaccaauccaucuaugugggaggcaugauggagggggaaggaaagggcccucugcuucgcagccagucuacguccgagcaggaaaagcggcugaccuggcccagacgcagcuacucuccucggagcuucgaggacugcggcgggggauacacacccgauuguuccucuaaugaaaaccucaccagcuccgaggaggacuuuagcucuggccaauccagcagagucucuccuucccccacaaccuaucggauguuccgcgauaaaagcagauccccgucucagaauagccagcaguccuuugacucuagcuccccucccacaccccaaugccacaagcggcauagacacuguccugugguggucagcgaagccaccaucguuggggugcgcaaaacgggacagauuuggccgaacgauggcgagggggcguuccacggcgaacaucccggagcugccgaggagguguuucagaagcugcuuccugacauccggggcgccgcugaugccgaccagcuggucugcgaaacccccgacuguccucaacacucugcugaucaucaguga

SEQ ID NO: 594 - protein, 458 aa, Artificial Sequence
  bcr/abl__Homo_sapiens__A9UF03
MVDPVGFAEAWKAQFPDSEPPRMELRSVGDIEQELERCKASIRRLEQEVNQERFRMIYLQTLLAKEKKSYDRQRWGFRRAAQAPDGASEPRASASRPQPAPADGADPPPAEEPEARPDGEGSPGKARPGTARRPGAAASGERDDRGPPASVAALRSNFERIRKGHGQPGADAEKPFYVNVEFHHERGLVKVNDKEVSDRISSLGSQAMQMERKKSQHGAGSSVGDASRPPYRGRSSESSCGVDGDYEDAELNPRFLKDNLIDANGGSRPPWPPLEYQPYQSIYVGGMMEGEGKGPLLRSQSTSEQEKRLTWPRRSYSPRSFEDCGGGYTPDCSSNENLTSSEEDFSSGQSSRVSPSPTTYRMFRDKSRSPSQNSQQSFDSSSPPTPQCHKRHRHCPVVVSEATIVGVRKTGQIWPNDGEGAFHGDADGSFGTPPGYCCLCLPAWPSGCTAATARVTRS

SEQ ID NO: 595 - RNA, 1377 nt, Artificial Sequence
  bcr/abl__Homo_sapiens__ABX82709
augguggacccggugggcuucgcggaggcguggaaggcgcaguucccggacucagagcccccgcgcauggagcugcgcucagugggcgacaucgagcaggagcuggagcgcugcaaggccuccauucggcgccuggagcaggaggugaaccaggagcgcuuccgcaugaucuaccugcagacguugcuggccaaggaaaagaagagcuaugaccggcagcgauggggcuuccggcgcgcggcgcaggcccccgacggcgccuccgagccccgagcguccgcgucgcgcccgcagccagcgcccgccgacggagccgacccgccgcccgccgaggagcccgaggcccggcccgacggcgaggguucuccggguaaggccaggcccgggaccgcccgcaggcccggggcagccgcgucgggggaacgggacgaccggggaccccccgccagcguggcggcgcucagguccaacuucgagcggauccgcaagggccauggccagcccggggcggacgccgagaagcccuucuacgugaacgucgaguuucaccacgagcgcggccuggugaaggucaacgacaaagaggugucggaccgcaucagcucccugggcagccaggccaugcagauggagcgcaaaaagucccagcacggcgcgggcucgagcgugggggaugcauccaggcccccuuaccggggacgcuccucggagagcagcugcggcgucgacggcgacuacgaggacgccgaguugaacccccgcuuccugaaggacaaccugaucgacgccaauggcgguagcaggcccccuuggccgccccuggaguaccagcccuaccagagcaucuacgucgggggcaugauggaaggggagggcaagggcccgcuccugcgcagccagagcaccucugagcaggagaagcgccuuaccuggccccgcagguccuacuccccccggaguuuugaggauugcggaggcggcuauaccccggacugcagcuccaaugagaaccucaccuccagcgaggaggacuucuccucuggccaguccagccgcguguccccaagccccaccaccuaccgcauguuccgggacaaaagccgcucucccucgcagaacucgcaacaguccuucgacagcagcaguccccccacgccgcagugccauaagcggcaccggcacugcccgguugucguguccgaggccaccaucgugggcguccgcaagaccgggcagaucuggcccaacgauggcgagggcgccuuccauggagacgcagauggcucguucggaacaccaccuggauacugcugcuuaugucucccagcauggccuucagggugcacagccgcaacggcaagaguuacacguuccuga

SEQ ID NO: 596 - RNA, 1377 nt, Artificial Sequence
  derived and/or modified sequence opt1 from bcr/abl__Homo_sapiens__ABX82709
augguggaccccgucggcuucgccgaggccuggaaggcgcaguucccggacagcgagccgccccgcauggagcugcgguccgugggggacaucgagcaggagcucgagcgcugcaaggccagcauccggcgccuggagcaggaggugaaccaggagcgguuccgcaugaucuaccugcagacccuccuggccaaggagaagaaguccuacgaccggcagcgcuggggcuuccggcgcgccgcccaggcgcccgacggggccagcgagccccgggccuccgccagccgcccccagcccgcgcccgccgacggcgccgacccgccgcccgccgaggagcccgaggcccggcccgacggggagggcucccccggcaaggcgcgccccgggaccgcccggcgccccggcgccgccgccagcggggagcgggacgaccgcggcccgcccgcguccgucgccgcccugcggagcaacuucgagcgcauccggaaggggcacggccagcccggcgccgacgccgagaagcccuucuacgugaacguggaguuccaccacgagcgcgggcucgucaaggugaacgacaaggagguguccgaccgcaucagcucccugggcagccaggcgaugcagauggagcggaagaagucccagcacggggccggcagcuccgucggcgacgccagccgcccgcccuaccgggggcgcuccagcgagagcuccugcggcguggacggggacuacgaggacgccgagcugaacccccgguuccucaaggacaaccugaucgacgccaacggcgggagccggcccccguggccgccccuggaguaccagcccuaccaguccaucuacgugggcggcaugauggagggggagggcaaggggccccuccugcgcagccaguccacgagcgagcaggagaagcgccugaccuggccccggcgcuccuacagcccccgguccuucgaggacugcggcgggggcuacaccccggacugcagcuccaacgagaaccucaccagcuccgaggaggacuucagcuccggccagagcucccgcgucagccccucccccacgaccuaccggauguuccgcgacaagagccggagccccucccagaacagccagcaguccuucgacagcuccagcccgcccacgccccagugccacaagcgccaccggcacugccccgugguggucuccgaggcgaccaucgugggggugcgcaagaccggccagaucuggccgaacgacggggagggcgccuuccacggggacgccgacggcagcuucggcaccccgcccggguacugcugccugugccugcccgccuggcccuccggcugcaccgcggccaccgcccgggucacgcgcagcuga

SEQ ID NO: 597 - RNA, 1377 nt, Artificial Sequence
  derived and/or modified sequence opt2 from bcr/abl__Homo_sapiens__ABX82709
auggucgaccccgucggcuucgccgaggccuggaaggcccaguuccccgacuccgagcccccccgcauggagcuccgcuccgucggcgacaucgagcaggagcucgagcgcugcaaggccuccauccgccgccucgagcaggaggucaaccaggagcgcuuccgcaugaucuaccuccagacccuccucgccaaggagaagaaguccuacgaccgccagcgcuggggcuuccgccgcgccgcccaggcccccgacggcgccuccgagccccgcgccuccgccucccgcccccagcccgcccccgccgacggcgccgaccccccccccgccgaggagcccgaggcccgccccgacggcgagggcucccccggcaaggcccgccccggcaccgcccgccgccccggcgccgccgccuccggcgagcgcgacgaccgcggcccccccgccuccgucgccgcccuccgcuccaacuucgagcgcauccgcaagggccacggccagcccggcgccgacgccgagaagcccuucuacgucaacgucgaguuccaccacgagcgcggccucgucaaggucaacgacaaggaggucuccgaccgcaucuccucccucggcucccaggccaugcagauggagcgcaagaagucccagcacggcgccggcuccuccgucggcgacgccucccgcccccccuaccgcggccgcuccuccgaguccuccugcggcgucgacggcgacuacgaggacgccgagcucaacccccgcuuccucaaggacaaccucaucgacgccaacggcggcucccgcccccccuggcccccccucgaguaccagcccuaccaguccaucuacgucggcggcaugauggagggcgagggcaagggcccccuccuccgcucccaguccaccuccgagcaggagaagcgccucaccuggccccgccgcuccuacuccccccgcuccuucgaggacugcggcggcggcuacacccccgacugcuccuccaacgagaaccucaccuccuccgaggaggacuucuccuccggccaguccucccgcgucucccccucccccaccaccuaccgcauguuccgcgacaagucccgcucccccucccagaacucccagcaguccuucgacuccuccuccccccccaccccccagugccacaagcgccaccgccacugccccgucgucgucuccgaggccaccaucgucggcguccgcaagaccggccagaucuggcccaacgacggcgagggcgccuuccacggcgacgccgacggcuccuucggcaccccccccggcuacugcugccucugccuccccgccuggcccuccggcugcaccgccgccaccgcccgcgucacccgcuccuga

SEQ ID NO: 598 - RNA, 1377 nt, Artificial Sequence
  derived and/or modified sequence opt3 from bcr/abl__Homo_sapiens__ABX82709
augguggaccccgucggcuucgccgaggcuuggaaggcacaguuuccugauagcgaaccaccgagaauggagcugagguccguuggggacaucgaacaagagcucgaacggugcaaagccucuauucgccgacuugagcaggaggugaaccaggaacguuucagaaugauauaccugcagaccuuguuagcgaaggagaaaaagucauaugauaggcaacgguggggauuucgcagagcugcccaggcacccgacggugccagugaaccuagggcuagcgcaucccggccacagcccgccccugcugauggcgccgacccacccccugcggaggagccagaagcacgcccggauggggagggaucucccggcaaagcccgaccugguacagcuagaaggccaggggccgcagcuucgggagaacgggacgaucgugggcccccugccucaguagcggcccugcgcagcaauuucgagagaaucaggaagggccacggccagccaggagcagacgcugaaaagcccuuuuacgugaacgucgaguuccaucacgagcggggucuagugaaaguuaaugauaaggaagugagugaccgaauuuccucucucggcagccaagccaugcagauggagcgcaaaaagucccagcauggggcuggaucaagugucggcgaugccagcagaccgccuuauaggggucggucuuccgaaucaagcugugggguggacggagacuacgaggaugcagaacugaacccccgcuuucuuaaagacaaucugaucgaugccaacggcggcaguagaccaccuuggcccccauuggaguaucagcccuaccaaucuauuuauguagggggaaugauggagggugaaggcaaggggccucuccugaggucccagagcacuucggagcaggaaaagcgucugacguggccacggcgaucuuacuccccgagaucauucgaggacugcggaggcgguuacacccccgauuguaguagcaaugaaaaccucacauccucugaggaggacuuuagcucagggcaaaguuccaggguuagcccuucuccaacuaccuaucgcauguuccgggauaaaucaagaagucccagccaaaauucccagcagucuuuugacucgagcuccccuccaacaccccagugccacaagaggcaucgccacuguccgguggucgugucagaagcuaccaucgugggcguccgaaaaacuggacagauauggccuaacgauggcgagggggcguuccacggagacgcagaugguaguuuuggcacaccacccggguacugcuguuuaugccugccugccuggcccucuggauguaccgcugccacggcacggguuacucguagcuga

SEQ ID NO: 599 - RNA, 1377 nt, Artificial Sequence
  derived and/or modified sequence opt4 from bcr/abl__Homo_sapiens__ABX82709
augguggaccccgugggcuucgccgaggccuggaaggcccaguuccccgacagcgagccccccagaauggagcugagaagcgugggcgacaucgagcaggagcuggagagaugcaaggccagcaucagaagacuggagcaggaggugaaccaggagagauucagaaugaucuaccugcagacccugcuggccaaggagaagaagagcuacgacagacagagauggggcuucagaagagccgcccaggcccccgacggcgccagcgagcccagagccagcgccagcagaccccagcccgcccccgccgacggcgccgaccccccccccgccgaggagcccgaggccagacccgacggcgagggcagccccggcaaggccagacccggcaccgccagaagacccggcgccgccgccagcggcgagagagacgacagaggcccccccgccagcguggccgcccugagaagcaacuucgagagaaucagaaagggccacggccagcccggcgccgacgccgagaagcccuucuacgugaacguggaguuccaccacgagagaggccuggugaaggugaacgacaaggaggugagcgacagaaucagcagccugggcagccaggccaugcagauggagagaaagaagagccagcacggcgccggcagcagcgugggcgacgccagcagaccccccuacagaggcagaagcagcgagagcagcugcggcguggacggcgacuacgaggacgccgagcugaaccccagauuccugaaggacaaccugaucgacgccaacggcggcagcagaccccccuggcccccccuggaguaccagcccuaccagagcaucuacgugggcggcaugauggagggcgagggcaagggcccccugcugagaagccagagcaccagcgagcaggagaagagacugaccuggcccagaagaagcuacagccccagaagcuucgaggacugcggcggcggcuacacccccgacugcagcagcaacgagaaccugaccagcagcgaggaggacuucagcagcggccagagcagcagagugagccccagccccaccaccuacagaauguucagagacaagagcagaagccccagccagaacagccagcagagcuucgacagcagcagcccccccaccccccagugccacaagagacacagacacugccccgugguggugagcgaggccaccaucgugggcgugagaaagaccggccagaucuggcccaacgacggcgagggcgccuuccacggcgacgccgacggcagcuucggcaccccccccggcuacugcugccugugccugcccgccuggcccagcggcugcaccgccgccaccgccagagugaccagaagcuga

SEQ ID NO: 600 - RNA, 1377 nt, Artificial Sequence
  derived and/or modified sequence opt5 from bcr/abl__Homo_sapiens__ABX82709
augguggaccccgucggcuucgccgaggcuuggaaggcccaguuuccugauagcgaaccgcccagaauggagcugcgguccguuggggacaucgaacaagagcucgaacgcugcaaagcgucuauuagacggcuggagcaggaggugaaccaggaacgcuucagaaugaucuaccuucagacccugcucgcuaaggagaaaaagagcuaugaucggcaacgcuggggauuuagacgggccgcccaggcuccugacggcgccuccgaaccccgcgcuucugccagcagaccucagcccgcgccugccgauggggcugacccgcccccugccgaggagcccgaagcucggccugauggagagggcucccccgggaaagcccgcccgggaacagcgagacggccuggcgccgcugccucuggcgaacgcgacgauagagggcccccugcuagcguggccgcccugcgguccaauuucgagcgcauuagaaagggacacggccagcccggggcugacgcggaaaagcccuuuuacgucaacguggaguuccaucacgagcggggacuuguuaaagugaaugauaaggaagucagcgacagaaucucuucccugggcagccaagccaugcagauggagcgcaaaaagucucagcauggggcuggauccagcgugggcgaugccucucggccuccguauagaggccgcuccagcgaauccucuugugggguugacggagacuacgaggaugccgaacucaacccccgguuucugaaagacaaucugauugaugcuaacggcgggagcagaccucccuggccuccccucgaguaucagccguaccaauccaucuaugugggaggcaugauggagggggaaggaaagggcccucugcuucgcagccagucuacguccgagcaggaaaagcggcugaccuggcccagacgcagcuacucuccucggagcuucgaggacugcggcgggggauacacacccgauuguuccucuaaugaaaaccucaccagcuccgaggaggacuuuagcucuggccaauccagcagagucucuccuucccccacaaccuaucggauguuccgcgauaaaagcagauccccgucucagaauagccagcaguccuuugacucuagcuccccucccacaccccaaugccacaagcggcauagacacuguccugugguggucagcgaagccaccaucguuggggugcgcaaaacgggacagauuuggccgaacgauggcgagggggcguuccacggcgacgcugauggaucuuuuggcacacccccuggguacugcugucugugccuucccgccuggccuuccggauguaccgccgcuaccgcccgggugacaagaagcuga

SEQ ID NO: 601 - protein, 454 aa, Artificial Sequence
  bcr/abl__Homo_sapiens__A9UF04
MVDPVGFAEAWKAQFPDSEPPRMELRSVGDIEQELERCKASIRRLEQEVNQERFRMIYLQTLLAKEKKSYDRQRWGFRRAAQAPDGASEPRASASRPQPAPADGADPPPAEEPEARPDGEGSPGKARPGTARRPGAAASGERDDRGPPASVAALRSNFERIRKGHGQPGADAEKPFYVNVEFHHERGLVKVNDKEVSDRISSLGSQAMQMERKKSQHGAGSSVGDASRPPYRGRSSESSCGVDGDYEDAELNPRFLKDNLIDANGGSRPPWPPLEYQPYQSIYVGGMMEGEGKGPLLRSQSTSEQEKRLTWPRRSYSPRSFEDCGGGYTPDCSSNENLTSSEEDFSSGQSSRVSPSPTTYRMFRDKSRSPSQNSQQSFDSSSPPTPQCHKRHRHCPVVVSEATIVGVRKTGQIWPNDGEGAFHGDADGSFGTPPGYGCAAGRPPHLTELPVQHQ

SEQ ID NO: 602 - RNA, 1365 nt, Artificial Sequence
  bcr/abl__Homo_sapiens__ABX82710
augguggacccggugggcuucgcggaggcguggaaggcgcaguucccggacucagagcccccgcgcauggagcugcgcucagugggcgacaucgagcaggagcuggagcgcugcaaggccuccauucggcgccuggagcaggaggugaaccaggagcgcuuccgcaugaucuaccugcagacguugcuggccaaggaaaagaagagcuaugaccggcagcgauggggcuuccggcgcgcggcgcaggcccccgacggcgccuccgagccccgagcguccgcgucgcgcccgcagccagcgcccgccgacggagccgacccgccgcccgccgaggagcccgaggcccggcccgacggcgaggguucuccggguaaggccaggcccgggaccgcccgcaggcccggggcagccgcgucgggggaacgggacgaccggggaccccccgccagcguggcggcgcucagguccaacuucgagcggauccgcaagggccauggccagcccggggcggacgccgagaagcccuucuacgugaacgucgaguuucaccacgagcgcggccuggugaaggucaacgacaaagaggugucggaccgcaucagcucccugggcagccaggccaugcagauggagcgcaaaaagucccagcacggcgcgggcucgagcgugggggaugcauccaggcccccuuaccggggacgcuccucggagagcagcugcggcgucgacggcgacuacgaggacgccgaguugaacccccgcuuccugaaggacaaccugaucgacgccaauggcgguagcaggcccccuuggccgccccuggaguaccagcccuaccagagcaucuacgucgggggcaugauggaaggggagggcaagggcccgcuccugcgcagccagagcaccucugagcaggagaagcgccuuaccuggccccgcagguccuacuccccccggaguuuugaggauugcggaggcggcuauaccccggacugcagcuccaaugagaaccucaccuccagcgaggaggacuucuccucuggccaguccagccgcguguccccaagccccaccaccuaccgcauguuccgggacaaaagccgcucucccucgcagaacucgcaacaguccuucgacagcagcaguccccccacgccgcagugccauaagcggcaccggcacugcccgguugucguguccgaggccaccaucgugggcguccgcaagaccgggcagaucuggcccaacgauggcgagggcgccuuccauggagacgcagauggcucguucggaacaccaccuggauacggcugcgcugcaggacgcccuccgcaucucacagaacuuccuguccagcaucaauga

SEQ ID NO: 603 - RNA, 1365 nt, Artificial Sequence
  derived and/or modified sequence opt1 from bcr/abl__Homo_sapiens__ABX82710
augguggaccccgucggcuucgccgaggccuggaaggcgcaguuccccgacagcgagccgccccgcauggagcugcgguccgugggggacaucgagcaggagcucgagcgcugcaaggccagcauccggcgccuggagcaggaggugaaccaggagcgguuccgcaugaucuaccugcagacccuccuggccaaggagaagaaguccuacgaccggcagcgcuggggcuuccggcgcgccgcccaggcgcccgacggggccagcgagccccgggccuccgccagccgcccccagcccgcgcccgccgacggcgccgacccgccgcccgccgaggagcccgaggcccggcccgacggggagggcucccccggcaaggcgcgccccgggaccgcccggcgccccggcgccgccgccagcggggagcgggacgaccgcggcccgcccgcguccgucgccgcccugcggagcaacuucgagcgcauccggaaggggcacggccagcccggcgccgacgccgagaagcccuucuacgugaacguggaguuccaccacgagcgcgggcucgucaaggugaacgacaaggagguguccgaccgcaucagcucccugggcagccaggcgaugcagauggagcggaagaagucccagcacggggccggcagcuccgucggcgacgccagccgcccgcccuaccgggggcgcuccagcgagagcuccugcggcguggacggggacuacgaggacgccgagcugaacccccgguuccucaaggacaaccugaucgacgccaacggcgggagccggcccccguggccgccccuggaguaccagcccuaccaguccaucuacgugggcggcaugauggagggggagggcaaggggccccuccugcgcagccaguccacgagcgagcaggagaagcgccugaccuggccccggcgcuccuacagcccccgguccuucgaggacugcggcgggggcuacaccccggacugcagcuccaacgagaaccucaccagcuccgaggaggacuucagcuccggccagagcucccgcgucagccccucccccacgaccuaccggauguuccgcgacaagagccggagccccucccagaacagccagcaguccuucgacagcuccagcccgcccacgccccagugccacaagcgccaccggcacugccccgugguggucuccgaggcgaccaucgugggggugcgcaagaccggccagaucuggccgaacgacggggagggcgccuuccacggggacgccgacggcagcuucggcaccccgcccggguacggcugcgccgcggggcggccgccccaccugaccgagcugcccguccagcaccaguga

SEQ ID NO: 604 - RNA, 1365 nt, Artificial Sequence
  derived and/or modified sequence opt2 from bcr/abl__Homo_sapiens__ABX82710
auggucgaccccgucggcuucgccgaggccuggaaggcccaguuccccgacuccgagcccccccgcauggagcuccgcuccgucggcgacaucgagcaggagcucgagcgcugcaaggccuccauccgccgccucgagcaggaggucaaccaggagcgcuuccgcaugaucuaccuccagacccuccucgccaaggagaagaaguccuacgaccgccagcgcuggggcuuccgccgcgccgcccaggcccccgacggcgccuccgagccccgcgccuccgccucccgcccccagcccgcccccgccgacggcgccgaccccccccccgccgaggagcccgaggcccgccccgacggcgagggcucccccggcaaggcccgccccggcaccgcccgccgccccggcgccgccgccuccggcgagcgcgacgaccgcggcccccccgccuccgucgccgcccuccgcuccaacuucgagcgcauccgcaagggccacggccagcccggcgccgacgccgagaagcccuucuacgucaacgucgaguuccaccacgagcgcggccucgucaaggucaacgacaaggaggucuccgaccgcaucuccucccucggcucccaggccaugcagauggagcgcaagaagucccagcacggcgccggcuccuccgucggcgacgccucccgcccccccuaccgcggccgcuccuccgaguccuccugcggcgucgacggcgacuacgaggacgccgagcucaacccccgcuuccucaaggacaaccucaucgacgccaacggcggcucccgcccccccuggcccccccucgaguaccagcccuaccaguccaucuacgucggcggcaugauggagggcgagggcaagggcccccuccuccgcucccaguccaccuccgagcaggagaagcgccucaccuggccccgccgcuccuacuccccccgcuccuucgaggacugcggcggcggcuacacccccgacugcuccuccaacgagaaccucaccuccuccgaggaggacuucuccuccggccaguccucccgcgucucccccucccccaccaccuaccgcauguuccgcgacaagucccgcucccccucccagaacucccagcaguccuucgacuccuccuccccccccaccccccagugccacaagcgccaccgccacugccccgucgucgucuccgaggccaccaucgucggcguccgcaagaccggccagaucuggcccaacgacggcgagggcgccuuccacggcgacgccgacggcuccuucggcaccccccccggcuacggcugcgccgccggccgccccccccaccucaccgagcuccccguccagcaccaguga

SEQ ID NO: 605 - RNA, 1365 nt, Artificial Sequence
  derived and/or modified sequence opt3 from bcr/abl__Homo_sapiens__ABX82710
augguggaccccgucggcuucgccgaggcuuggaaggcacaguuuccugauagcgaaccaccgagaauggagcugagguccguuggggacaucgaacaagagcucgaacggugcaaagccucuauucgccgacuugagcaggaggugaaccaggaacguuucagaaugauauaccugcagaccuuguuagcgaaggagaaaaagucauaugauaggcaacgguggggauuucgcagagcugcccaggcacccgacggugccagugaaccuagggcuagcgcaucccggccacagcccgccccugcugauggcgccgacccacccccugcggaggagccagaagcacgcccggauggggagggaucucccggcaaagcccgaccugguacagcuagaaggccaggggccgcagcuucgggagaacgggacgaucgugggcccccugccucaguagcggcccugcgcagcaauuucgagagaaucaggaagggccacggccagccaggagcagacgcugaaaagcccuuuuacgugaacgucgaguuccaucacgagcggggucuagugaaaguuaaugauaaggaagugagugaccgaauuuccucucucggcagccaagccaugcagauggagcgcaaaaagucccagcauggggcuggaucaagugucggcgaugccagcagaccgccuuauaggggucggucuuccgaaucaagcugugggguggacggagacuacgaggaugcagaacugaacccccgcuuucuuaaagacaaucugaucgaugccaacggcggcaguagaccaccuuggcccccauuggaguaucagcccuaccaaucuauuuauguagggggaaugauggagggugaaggcaaggggccucuccugaggucccagagcacuucggagcaggaaaagcgucugacguggccacggcgaucuuacuccccgagaucauucgaggacugcggaggcgguuacacccccgauuguaguagcaaugaaaaccucacauccucugaggaggacuuuagcucagggcaaaguuccaggguuagcccuucuccaacuaccuaucgcauguuccgggauaaaucaagaagucccagccaaaauucccagcagucuuuugacucgagcuccccuccaacaccccagugccacaagaggcaucgccacuguccgguggucgugucagaagcuaccaucgugggcguccgaaaaacuggacagauauggccuaacgauggcgagggggcguuccacggagacgcagaugguaguuuuggcacaccacccggguacggaugcgccgcuggccggccuccccauuuaaccgaacugccaguucagcaccaguga

SEQ ID NO: 606 - RNA, 1365 nt, Artificial Sequence
  derived and/or modified sequence opt4 from bcr/abl__Homo_sapiens__ABX82710
augguggaccccgugggcuucgccgaggccuggaaggcccaguuccccgacagcgagccccccagaauggagcugagaagcgugggcgacaucgagcaggagcuggagagaugcaaggccagcaucagaagacuggagcaggaggugaaccaggagagauucagaaugaucuaccugcagacccugcuggccaaggagaagaagagcuacgacagacagagauggggcuucagaagagccgcccaggcccccgacggcgccagcgagcccagagccagcgccagcagaccccagcccgcccccgccgacggcgccgaccccccccccgccgaggagcccgaggccagacccgacggcgagggcagccccggcaaggccagacccggcaccgccagaagacccggcgccgccgccagcggcgagagagacgacagaggcccccccgccagcguggccgcccugagaagcaacuucgagagaaucagaaagggccacggccagcccggcgccgacgccgagaagcccuucuacgugaacguggaguuccaccacgagagaggccuggugaaggugaacgacaaggaggugagcgacagaaucagcagccugggcagccaggccaugcagauggagagaaagaagagccagcacggcgccggcagcagcgugggcgacgccagcagaccccccuacagaggcagaagcagcgagagcagcugcggcguggacggcgacuacgaggacgccgagcugaaccccagauuccugaaggacaaccugaucgacgccaacggcggcagcagaccccccuggcccccccuggaguaccagcccuaccagagcaucuacgugggcggcaugauggagggcgagggcaagggcccccugcugagaagccagagcaccagcgagcaggagaagagacugaccuggcccagaagaagcuacagccccagaagcuucgaggacugcggcggcggcuacacccccgacugcagcagcaacgagaaccugaccagcagcgaggaggacuucagcagcggccagagcagcagagugagccccagccccaccaccuacagaauguucagagacaagagcagaagccccagccagaacagccagcagagcuucgacagcagcagcccccccaccccccagugccacaagagacacagacacugccccgugguggugagcgaggccaccaucgugggcgugagaaagaccggccagaucuggcccaacgacggcgagggcgccuuccacggcgacgccgacggcagcuucggcaccccccccggcuacggcugcgccgccggcagacccccccaccugaccgagcugcccgugcagcaccaguga

SEQ ID NO: 607 - RNA, 1365 nt, Artificial Sequence
  derived and/or modified sequence opt5 from bcr/abl__Homo_sapiens__ABX82710
augguggaccccgucggcuucgccgaggcuuggaaggcccaguuuccugauagcgaaccgcccagaauggagcugcgguccguuggggacaucgaacaagagcucgaacgcugcaaagcgucuauuagacggcuggagcaggaggugaaccaggaacgcuucagaaugaucuaccuucagacccugcucgcuaaggagaaaaagagcuaugaucggcaacgcuggggauuuagacgggccgcccaggcuccugacggcgccuccgaaccccgcgcuucugccagcagaccucagcccgcgccugccgauggggcugacccgcccccugccgaggagcccgaagcucggccugauggagagggcucccccgggaaagcccgcccgggaacagcgagacggccuggcgccgcugccucuggcgaacgcgacgauagagggcccccugcuagcguggccgcccugcgguccaauuucgagcgcauuagaaagggacacggccagcccggggcugacgcggaaaagcccuuuuacgucaacguggaguuccaucacgagcggggacuuguuaaagugaaugauaaggaagucagcgacagaaucucuucccugggcagccaagccaugcagauggagcgcaaaaagucucagcauggggcuggauccagcgugggcgaugccucucggccuccguauagaggccgcuccagcgaauccucuugugggguugacggagacuacgaggaugccgaacucaacccccgguuucugaaagacaaucugauugaugcuaacggcgggagcagaccucccuggccuccccucgaguaucagccguaccaauccaucuaugugggaggcaugauggagggggaaggaaagggcccucugcuucgcagccagucuacguccgagcaggaaaagcggcugaccuggcccagacgcagcuacucuccucggagcuucgaggacugcggcgggggauacacacccgauuguuccucuaaugaaaaccucaccagcuccgaggaggacuuuagcucuggccaauccagcagagucucuccuucccccacaaccuaucggauguuccgcgauaaaagcagauccccgucucagaauagccagcaguccuuugacucuagcuccccucccacaccccaaugccacaagcggcauagacacuguccugugguggucagcgaagccaccaucguuggggugcgcaaaacgggacagauuuggccgaacgauggcgagggggcguuccacggcgacgcugauggaucuuuuggcacacccccuggguacggaugcgccgccggccggcccccucaucugaccgaacuucccgugcagcaccaguga

SEQ ID NO: 608 - protein, 467 aa, Artificial Sequence
  bcr/abl__Homo_sapiens__A9UF05
MVDPVGFAEAWKAQFPDSEPPRMELRSVGDIEQELERCKASIRRLEQEVNQERFRMIYLQTLLAKEKKSYDRQRWGFRRAAQAPDGASEPRASASRPQPAPADGADPPPAEEPEARPDGEGSPGKARPGTARRPGAAASGERDDRGPPASVAALRSNFERIRKGHGQPGADAEKPFYVNVEFHHERGLVKVNDKEVSDRISSLGSQAMQMERKKSQHGAGSSVGDASRPPYRGRSSESSCGVDGDYEDAELNPRFLKDNLIDANGGSRPPWPPLEYQPYQSIYVGGMMEGEGKGPLLRSQSTSEQEKRLTWPRRSYSPRSFEDCGGGYTPDCSSNENLTSSEEDFSSGQSSRVSPSPTTYRMFRDKSRSPSQNSQQSFDSSSPPTPQCHKRHRHCPVVVSEATIVGVRKTGQIWPNDGEGAFHGDAVLKTEVPHQGVRRARLSLEALGEDPSFLFPASDGPRHSSTW

SEQ ID NO: 609 - RNA, 1404 nt, Artificial Sequence
  bcr/abl__Homo_sapiens__ABX82711
augguggacccggugggcuucgcggaggcguggaaggcgcaguucccggacucagagcccccgcgcauggagcugcgcucagugggcgacaucgagcaggagcuggagcgcugcaaggccuccauucggcgccuggagcaggaggugaaccaggagcgcuuccgcaugaucuaccugcagacguugcuggccaaggaaaagaagagcuaugaccggcagcgauggggcuuccggcgcgcggcgcaggcccccgacggcgccuccgagccccgagcguccgcgucgcgcccgcagccagcgcccgccgacggagccgacccgccgcccgccgaggagcccgaggcccggcccgacggcgaggguucuccggguaaggccaggcccgggaccgcccgcaggcccggggcagccgcgucgggggaacgggacgaccggggaccccccgccagcguggcggcgcucagguccaacuucgagcggauccgcaagggccauggccagcccggggcggacgccgagaagcccuucuacgugaacgucgaguuucaccacgagcgcggccuggugaaggucaacgacaaagaggugucggaccgcaucagcucccugggcagccaggccaugcagauggagcgcaaaaagucccagcacggcgcgggcucgagcgugggggaugcauccaggcccccuuaccggggacgcuccucggagagcagcugcggcgucgacggcgacuacgaggacgccgaguugaacccccgcuuccugaaggacaaccugaucgacgccaauggcgguagcaggcccccuuggccgccccuggaguaccagcccuaccagagcaucuacgucgggggcaugauggaaggggagggcaagggcccgcuccugcgcagccagagcaccucugagcaggagaagcgccuuaccuggccccgcagguccuacuccccccggaguuuugaggauugcggaggcggcuauaccccggacugcagcuccaaugagaaccucaccuccagcgaggaggacuucuccucuggccaguccagccgcguguccccaagccccaccaccuaccgcauguuccgggacaaaagccgcucucccucgcagaacucgcaacaguccuucgacagcagcaguccccccacgccgcagugccauaagcggcaccggcacugcccgguugucguguccgaggccaccaucgugggcguccgcaagaccgggcagaucuggcccaacgauggcgagggcgccuuccauggagacgcaguucugaagacugaagucccacaucaagguguccgcagggccaggcugucucuggaggcucuaggggaggauccuuccuuucuguucccagcaucugauggcccacggcauuccucgaccugguga

SEQ ID NO: 610 - RNA, 1404 nt, Artificial Sequence
  derived and/or modified sequence opt1 from bcr/abl__Homo_sapiens__ABX82711
augguggaccccgucggcuucgccgaggccuggaaggcgcaguucccggacagcgagccgccccgcauggagcugcgguccgugggggacaucgagcaggagcucgagcgcugcaaggccagcauccggcgccuggagcaggaggugaaccaggagcgguuccgcaugaucuaccugcagacccuccuggccaaggagaagaaguccuacgaccggcagcgcuggggcuuccggcgcgccgcccaggcgcccgacggggccagcgagccccgggccuccgccagccgcccccagcccgcgcccgccgacggcgccgacccgccgcccgccgaggagcccgaggcccggcccgacggggagggcucccccggcaaggcgcgccccgggaccgcccggcgccccggcgccgccgccagcggggagcgggacgaccgcggcccgcccgcguccgucgccgcccugcggagcaacuucgagcgcauccggaaggggcacggccagcccggcgccgacgccgagaagcccuucuacgugaacguggaguuccaccacgagcgcgggcucgucaaggugaacgacaaggagguguccgaccgcaucagcucccugggcagccaggcgaugcagauggagcggaagaagucccagcacggggccggcagcuccgucggcgacgccagccgcccgcccuaccgggggcgcuccagcgagagcuccugcggcguggacggggacuacgaggacgccgagcugaacccccgguuccucaaggacaaccugaucgacgccaacggcgggagccggcccccguggccgccccuggaguaccagcccuaccaguccaucuacgugggcggcaugauggagggggagggcaaggggccccuccugcgcagccaguccacgagcgagcaggagaagcgccugaccuggccccggcgcuccuacagcccccgguccuucgaggacugcggcgggggcuacaccccggacugcagcuccaacgagaaccucaccagcuccgaggaggacuucagcuccggccagagcucccgcgucagccccucccccacgaccuaccggauguuccgcgacaagagccggagccccucccagaacagccagcaguccuucgacagcuccagcccgcccacgccccagugccacaagcgccaccggcacugccccgugguggucuccgaggcgaccaucgugggggugcgcaagaccggccagaucuggccgaacgacggggagggcgccuuccacggggacgccguccugaagaccgaggugccccaccagggcgugcggcgcgcccgccugagccucgaggcgcugggcgaggaccccuccuuccuguuccccgccagcgacgggccgcggcacuccagcaccugguga

SEQ ID NO: 611 - RNA, 1404 nt, Artificial Sequence
  derived and/or modified sequence opt2 from bcr/abl__Homo_sapiens__ABX82711
auggucgaccccgucggcuucgccgaggccuggaaggcccaguuccccgacuccgagcccccccgcauggagcuccgcuccgucggcgacaucgagcaggagcucgagcgcugcaaggccuccauccgccgccucgagcaggaggucaaccaggagcgcuuccgcaugaucuaccuccagacccuccucgccaaggagaagaaguccuacgaccgccagcgcuggggcuuccgccgcgccgcccaggcccccgacggcgccuccgagccccgcgccuccgccucccgcccccagcccgcccccgccgacggcgccgaccccccccccgccgaggagcccgaggcccgccccgacggcgagggcucccccggcaaggcccgccccggcaccgcccgccgccccggcgccgccgccuccggcgagcgcgacgaccgcggcccccccgccuccgucgccgcccuccgcuccaacuucgagcgcauccgcaagggccacggccagcccggcgccgacgccgagaagcccuucuacgucaacgucgaguuccaccacgagcgcggccucgucaaggucaacgacaaggaggucuccgaccgcaucuccucccucggcucccaggccaugcagauggagcgcaagaagucccagcacggcgccggcuccuccgucggcgacgccucccgcccccccuaccgcggccgcuccuccgaguccuccugcggcgucgacggcgacuacgaggacgccgagcucaacccccgcuuccucaaggacaaccucaucgacgccaacggcggcucccgcccccccuggcccccccucgaguaccagcccuaccaguccaucuacgucggcggcaugauggagggcgagggcaagggcccccuccuccgcucccaguccaccuccgagcaggagaagcgccucaccuggccccgccgcuccuacuccccccgcuccuucgaggacugcggcggcggcuacacccccgacugcuccuccaacgagaaccucaccuccuccgaggaggacuucuccuccggccaguccucccgcgucucccccucccccaccaccuaccgcauguuccgcgacaagucccgcucccccucccagaacucccagcaguccuucgacuccuccuccccccccaccccccagugccacaagcgccaccgccacugccccgucgucgucuccgaggccaccaucgucggcguccgcaagaccggccagaucuggcccaacgacggcgagggcgccuuccacggcgacgccguccucaagaccgaggucccccaccagggcguccgccgcgcccgccucucccucgaggcccucggcgaggaccccuccuuccucuuccccgccuccgacggcccccgccacuccuccaccugguga

SEQ ID NO: 612 - RNA, 1404 nt, Artificial Sequence
  derived and/or modified sequence opt3 from bcr/abl__Homo_sapiens__ABX82711
augguggaccccgucggcuucgccgaggcuuggaaggcacaguuuccugauagcgaaccaccgagaauggagcugagguccguuggggacaucgaacaagagcucgaacggugcaaagccucuauucgccgacuugagcaggaggugaaccaggaacguuucagaaugauauaccugcagaccuuguuagcgaaggagaaaaagucauaugauaggcaacgguggggauuucgcagagcugcccaggcacccgacggugccagugaaccuagggcuagcgcaucccggccacagcccgccccugcugauggcgccgacccacccccugcggaggagccagaagcacgcccggauggggagggaucucccggcaaagcccgaccugguacagcuagaaggccaggggccgcagcuucgggagaacgggacgaucgugggcccccugccucaguagcggcccugcgcagcaauuucgagagaaucaggaagggccacggccagccaggagcagacgcugaaaagcccuuuuacgugaacgucgaguuccaucacgagcggggucuagugaaaguuaaugauaaggaagugagugaccgaauuuccucucucggcagccaagccaugcagauggagcgcaaaaagucccagcauggggcuggaucaagugucggcgaugccagcagaccgccuuauaggggucggucuuccgaaucaagcugugggguggacggagacuacgaggaugcagaacugaacccccgcuuucuuaaagacaaucugaucgaugccaacggcggcaguagaccaccuuggcccccauuggaguaucagcccuaccaaucuauuuauguagggggaaugauggagggugaaggcaaggggccucuccugaggucccagagcacuucggagcaggaaaagcgucugacguggccacggcgaucuuacuccccgagaucauucgaggacugcggaggcgguuacacccccgauuguaguagcaaugaaaaccucacauccucugaggaggacuuuagcucagggcaaaguuccaggguuagcccuucuccaacuaccuaucgcauguuccgggauaaaucaagaagucccagccaaaauucccagcagucuuuugacucgagcuccccuccaacaccccagugccacaagaggcaucgccacuguccgguggucgugucagaagcuaccaucgugggcguccgaaaaacuggacagauauggccuaacgauggcgagggggcguuccacggagacgcaguuuuaaagacagaagugccacaucaggguguacggcgugccagacugagucuugaggcuuugggcgaggaucccucuuuucuguucccugccagcgacgggcccaggcacuccucaaccugguga

SEQ ID NO: 613 - RNA, 1404 nt, Artificial Sequence
  derived and/or modified sequence opt4 from bcr/abl__Homo_sapiens__ABX82711
augguggaccccgugggcuucgccgaggccuggaaggcccaguuccccgacagcgagccccccagaauggagcugagaagcgugggcgacaucgagcaggagcuggagagaugcaaggccagcaucagaagacuggagcaggaggugaaccaggagagauucagaaugaucuaccugcagacccugcuggccaaggagaagaagagcuacgacagacagagauggggcuucagaagagccgcccaggcccccgacggcgccagcgagcccagagccagcgccagcagaccccagcccgcccccgccgacggcgccgaccccccccccgccgaggagcccgaggccagacccgacggcgagggcagccccggcaaggccagacccggcaccgccagaagacccggcgccgccgccagcggcgagagagacgacagaggcccccccgccagcguggccgcccugagaagcaacuucgagagaaucagaaagggccacggccagcccggcgccgacgccgagaagcccuucuacgugaacguggaguuccaccacgagagaggccuggugaaggugaacgacaaggaggugagcgacagaaucagcagccugggcagccaggccaugcagauggagagaaagaagagccagcacggcgccggcagcagcgugggcgacgccagcagaccccccuacagaggcagaagcagcgagagcagcugcggcguggacggcgacuacgaggacgccgagcugaaccccagauuccugaaggacaaccugaucgacgccaacggcggcagcagaccccccuggcccccccuggaguaccagcccuaccagagcaucuacgugggcggcaugauggagggcgagggcaagggcccccugcugagaagccagagcaccagcgagcaggagaagagacugaccuggcccagaagaagcuacagccccagaagcuucgaggacugcggcggcggcuacacccccgacugcagcagcaacgagaaccugaccagcagcgaggaggacuucagcagcggccagagcagcagagugagccccagccccaccaccuacagaauguucagagacaagagcagaagccccagccagaacagccagcagagcuucgacagcagcagcccccccaccccccagugccacaagagacacagacacugccccgugguggugagcgaggccaccaucgugggcgugagaaagaccggccagaucuggcccaacgacggcgagggcgccuuccacggcgacgccgugcugaagaccgaggugccccaccagggcgugagaagagccagacugagccuggaggcccugggcgaggaccccagcuuccuguuccccgccagcgacggccccagacacagcagcaccugguga

SEQ ID NO: 614 - RNA, 1404 nt, Artificial Sequence
  derived and/or modified sequence opt5 from bcr/abl__Homo_sapiens__ABX82711
augguggaccccgucggcuucgccgaggcuuggaaggcccaguuuccugauagcgaaccgcccagaauggagcugcgguccguuggggacaucgaacaagagcucgaacgcugcaaagcgucuauuagacggcuggagcaggaggugaaccaggaacgcuucagaaugaucuaccuucagacccugcucgcuaaggagaaaaagagcuaugaucggcaacgcuggggauuuagacgggccgcccaggcuccugacggcgccuccgaaccccgcgcuucugccagcagaccucagcccgcgccugccgauggggcugacccgcccccugccgaggagcccgaagcucggccugauggagagggcucccccgggaaagcccgcccgggaacagcgagacggccuggcgccgcugccucuggcgaacgcgacgauagagggcccccugcuagcguggccgcccugcgguccaauuucgagcgcauuagaaagggacacggccagcccggggcugacgcggaaaagcccuuuuacgucaacguggaguuccaucacgagcggggacuuguuaaagugaaugauaaggaagucagcgacagaaucucuucccugggcagccaagccaugcagauggagcgcaaaaagucucagcauggggcuggauccagcgugggcgaugccucucggccuccguauagaggccgcuccagcgaauccucuugugggguugacggagacuacgaggaugccgaacucaacccccgguuucugaaagacaaucugauugaugcuaacggcgggagcagaccucccuggccuccccucgaguaucagccguaccaauccaucuaugugggaggcaugauggagggggaaggaaagggcccucugcuucgcagccagucuacguccgagcaggaaaagcggcugaccuggcccagacgcagcuacucuccucggagcuucgaggacugcggcgggggauacacacccgauuguuccucuaaugaaaaccucaccagcuccgaggaggacuuuagcucuggccaauccagcagagucucuccuucccccacaaccuaucggauguuccgcgauaaaagcagauccccgucucagaauagccagcaguccuuugacucuagcuccccucccacaccccaaugccacaagcggcauagacacuguccugugguggucagcgaagccaccaucguuggggugcgcaaaacgggacagauuuggccgaacgauggcgagggggcguuccacggcgacgcugugcugaagaccgaagucccccaucagggagugcggagagcccgccuuucucuggaggcccucggcgaggauccuuccuuucuguuccccgcuagcgacgggccuagacacucuuccacaugguga

SEQ ID NO: 615 - protein, 513 aa, Artificial Sequence
  bcr/abl__Homo_sapiens__A9UF06
MVDPVGFAEAWKAQFPDSEPPRMELRSVGDIEQELERCKASIRRLEQEVNQERFRMIYLQTLLAKEKKSYDRQRWGFRRAAQAPDGASEPRASASRPQPAPADGADPPPAEEPEARPDGEGSPGKARPGTARRPGAAASGERDDRGPPASVAALRSNFERIRKGHGQPGADAEKPFYVNVEFHHERGLVKVNDKEVSDRISSLGSQAMQMERKKSQHGAGSSVGDASRPPYRGRSSESSCGVDGDYEDAELNPRFLKDNLIDANGGSRPPWPPLEYQPYQSIYVGGMMEGEGKGPLLRSQSTSEQEKRLTWPRRSYSPRSFEDCGGGYTPDCSSNENLTSSEEDFSSGQSSRVSPSPTTYRMFRDKSRSPSQNSQQSFDSSSPPTPQCHKRHRHCPVVVSEATIVGVRKTGQIWPNDGEGAFHGDADGSFGTPPGYGCAADRAEEQRRHQDGLPYIDDSPSSSPHLSSKGRGSRDALVSGALESTKASELDPVKMTPTFSLHCMILWPVEITL

SEQ ID NO: 616 - RNA, 1542 nt, Artificial Sequence
  bcr/abl__Homo_sapiens__ABX82712
augguggacccggugggcuucgcggaggcguggaaggcgcaguucccggacucagagcccccgcgcauggagcugcgcucagugggcgacaucgagcaggagcuggagcgcugcaaggccuccauucggcgccuggagcaggaggugaaccaggagcgcuuccgcaugaucuaccugcagacguugcuggccaaggaaaagaagagcuaugaccggcagcgauggggcuuccggcgcgcggcgcaggcccccgacggcgccuccgagccccgagcguccgcgucgcgcccgcagccagcgcccgccgacggagccgacccgccgcccgccgaggagcccgaggcccggcccgacggcgaggguucuccggguaaggccaggcccgggaccgcccgcaggcccggggcagccgcgucgggggaacgggacgaccggggaccccccgccagcguggcggcgcucagguccaacuucgagcggauccgcaagggccauggccagcccggggcggacgccgagaagcccuucuacgugaacgucgaguuucaccacgagcgcggccuggugaaggucaacgacaaagaggugucggaccgcaucagcucccugggcagccaggccaugcagauggagcgcaaaaagucccagcacggcgcgggcucgagcgugggggaugcauccaggcccccuuaccggggacgcuccucggagagcagcugcggcgucgacggcgacuacgaggacgccgaguugaacccccgcuuccugaaggacaaccugaucgacgccaauggcgguagcaggcccccuuggccgccccuggaguaccagcccuaccagagcaucuacgucgggggcaugauggaaggggagggcaagggcccgcuccugcgcagccagagcaccucugagcaggagaagcgccuuaccuggccccgcagguccuacuccccccggaguuuugaggauugcggaggcggcuauaccccggacugcagcuccaaugagaaccucaccuccagcgaggaggacuucuccucuggccaguccagccgcguguccccaagccccaccaccuaccgcauguuccgggacaaaagccgcucucccucgcagaacucgcaacaguccuucgacagcagcaguccccccacgccgcagugccauaagcggcaccggcacugcccgguugucguguccgaggccaccaucgugggcguccgcaagaccgggcagaucuggcccaacgauggcgagggcgccuuccauggagacgcagauggcucguucggaacaccaccuggauacggcugcgcugcagaccgggcagaggagcagcgccggcaccaagaugggcugcccuacauugaugacucgcccuccucaucgccccaccucagcagcaagggcaggggcagccgggaugcgcuggucucgggagcccuggaguccacuaaagcgagugagcuggacccagugaaaaugaccccaaccuuuucguugcacuguaugauuuuguggccaguggagauaacacucuaa

SEQ ID NO: 617 - RNA, 1542 nt, Artificial Sequence
  derived and/or modified sequence opt1 from bcr/abl__Homo_sapiens__ABX82712
augguggaccccgucggcuucgccgaggccuggaaggcgcaguucccggacagcgagccgccccgcauggagcugcgguccgugggggacaucgagcaggagcucgagcgcugcaaggccagcauccggcgccuggagcaggaggugaaccaggagcgguuccgcaugaucuaccugcagacccuccuggccaaggagaagaaguccuacgaccggcagcgcuggggcuuccggcgcgccgcccaggcgcccgacggggccagcgagccccgggccuccgccagccgcccccagcccgcgcccgccgacggcgccgacccgccgcccgccgaggagcccgaggcccggcccgacggggagggcucccccggcaaggcgcgccccgggaccgcccggcgccccggcgccgccgccagcggggagcgggacgaccgcggcccgcccgcguccgucgccgcccugcggagcaacuucgagcgcauccggaaggggcacggccagcccggcgccgacgccgagaagcccuucuacgugaacguggaguuccaccacgagcgcgggcucgucaaggugaacgacaaggagguguccgaccgcaucagcucccugggcagccaggcgaugcagauggagcggaagaagucccagcacggggccggcagcuccgucggcgacgccagccgcccgcccuaccgggggcgcuccagcgagagcuccugcggcguggacggggacuacgaggacgccgagcugaacccccgguuccucaaggacaaccugaucgacgccaacggcgggagccggcccccguggccgccccuggaguaccagcccuaccaguccaucuacgugggcggcaugauggagggggagggcaaggggccccuccugcgcagccaguccacgagcgagcaggagaagcgccugaccuggccccggcgcuccuacagcccccgguccuucgaggacugcggcgggggcuacaccccggacugcagcuccaacgagaaccucaccagcuccgaggaggacuucagcuccggccagagcucccgcgucagccccucccccacgaccuaccggauguuccgcgacaagagccggagccccucccagaacagccagcaguccuucgacagcuccagcccgcccacgccccagugccacaagcgccaccggcacugccccgugguggucuccgaggcgaccaucgugggggugcgcaagaccggccagaucuggccgaacgacggggagggcgccuuccacggggacgccgacggcagcuucggcaccccgcccggguacggcugcgccgcggaccgggccgaggagcagcgccgccaccaggacgggcugcccuacaucgacgacucccccagcuccagcccccaccuguccagcaagggccggggcucccgcgacgcccucgucagcggggcccuggaguccaccaaggccagcgagcuggaccccgugaagaugacccccacguucagccuccacugcaugauccuguggccgguggagaucacccuguga

SEQ ID NO: 618 - RNA, 1542 nt, Artificial Sequence
  derived and/or modified sequence opt2 from bcr/abl__Homo_sapiens__ABX82712
auggucgaccccgucggcuucgccgaggccuggaaggcccaguuccccgacuccgagcccccccgcauggagcuccgcuccgucggcgacaucgagcaggagcucgagcgcugcaaggccuccauccgccgccucgagcaggaggucaaccaggagcgcuuccgcaugaucuaccuccagacccuccucgccaaggagaagaaguccuacgaccgccagcgcuggggcuuccgccgcgccgcccaggcccccgacggcgccuccgagccccgcgccuccgccucccgcccccagcccgcccccgccgacggcgccgaccccccccccgccgaggagcccgaggcccgccccgacggcgagggcucccccggcaaggcccgccccggcaccgcccgccgccccggcgccgccgccuccggcgagcgcgacgaccgcggcccccccgccuccgucgccgcccuccgcuccaacuucgagcgcauccgcaagggccacggccagcccggcgccgacgccgagaagcccuucuacgucaacgucgaguuccaccacgagcgcggccucgucaaggucaacgacaaggaggucuccgaccgcaucuccucccucggcucccaggccaugcagauggagcgcaagaagucccagcacggcgccggcuccuccgucggcgacgccucccgcccccccuaccgcggccgcuccuccgaguccuccugcggcgucgacggcgacuacgaggacgccgagcucaacccccgcuuccucaaggacaaccucaucgacgccaacggcggcucccgcccccccuggcccccccucgaguaccagcccuaccaguccaucuacgucggcggcaugauggagggcgagggcaagggcccccuccuccgcucccaguccaccuccgagcaggagaagcgccucaccuggccccgccgcuccuacuccccccgcuccuucgaggacugcggcggcggcuacacccccgacugcuccuccaacgagaaccucaccuccuccgaggaggacuucuccuccggccaguccucccgcgucucccccucccccaccaccuaccgcauguuccgcgacaagucccgcucccccucccagaacucccagcaguccuucgacuccuccuccccccccaccccccagugccacaagcgccaccgccacugccccgucgucgucuccgaggccaccaucgucggcguccgcaagaccggccagaucuggcccaacgacggcgagggcgccuuccacggcgacgccgacggcuccuucggcaccccccccggcuacggcugcgccgccgaccgcgccgaggagcagcgccgccaccaggacggccuccccuacaucgacgacucccccuccuccuccccccaccucuccuccaagggccgcggcucccgcgacgcccucgucuccggcgcccucgaguccaccaaggccuccgagcucgaccccgucaagaugacccccaccuucucccuccacugcaugauccucuggcccgucgagaucacccucuga

SEQ ID NO: 619 - RNA, 1542 nt, Artificial Sequence
  derived and/or modified sequence opt3 from bcr/abl__Homo_sapiens__ABX82712
augguggaccccgucggcuucgccgaggcuuggaaggcacaguuuccugauagcgaaccaccgagaauggagcugagguccguuggggacaucgaacaagagcucgaacggugcaaagccucuauucgccgacuugagcaggaggugaaccaggaacguuucagaaugauauaccugcagaccuuguuagcgaaggagaaaaagucauaugauaggcaacgguggggauuucgcagagcugcccaggcacccgacggugccagugaaccuagggcuagcgcaucccggccacagcccgccccugcugauggcgccgacccacccccugcggaggagccagaagcacgcccggauggggagggaucucccggcaaagcccgaccugguacagcuagaaggccaggggccgcagcuucgggagaacgggacgaucgugggcccccugccucaguagcggcccugcgcagcaauuucgagagaaucaggaagggccacggccagccaggagcagacgcugaaaagcccuuuuacgugaacgucgaguuccaucacgagcggggucuagugaaaguuaaugauaaggaagugagugaccgaauuuccucucucggcagccaagccaugcagauggagcgcaaaaagucccagcauggggcuggaucaagugucggcgaugccagcagaccgccuuauaggggucggucuuccgaaucaagcugugggguggacggagacuacgaggaugcagaacugaacccccgcuuucuuaaagacaaucugaucgaugccaacggcggcaguagaccaccuuggcccccauuggaguaucagcccuaccaaucuauuuauguagggggaaugauggagggugaaggcaaggggccucuccugaggucccagagcacuucggagcaggaaaagcgucugacguggccacggcgaucuuacuccccgagaucauucgaggacugcggaggcgguuacacccccgauuguaguagcaaugaaaaccucacauccucugaggaggacuuuagcucagggcaaaguuccaggguuagcccuucuccaacuaccuaucgcauguuccgggauaaaucaagaagucccagccaaaauucccagcagucuuuugacucgagcuccccuccaacaccccagugccacaagaggcaucgccacuguccgguggucgugucagaagcuaccaucgugggcguccgaaaaacuggacagauauggccuaacgauggcgagggggcguuccacggagacgcagaugguaguuuuggcacaccacccggguacggaugcgccgcugaccgggccgaggaacagcguagacaucaggacggcuuaccuuauaucgaugacucucccagcuccucaccacaccugagcucuaaggguagggggucccgcgaugcacuuguuaguggcgccuuggagagcaccaaggcuucugaacuggacccugugaaaaugacgcccacuuucucccuacauuguaugauucucuggccaguagagaucacccuguga

SEQ ID NO: 620 - RNA, 1542 nt, Artificial Sequence
  derived and/or modified sequence opt4 from bcr/abl__Homo_sapiens__ABX82712
augguggaccccgugggcuucgccgaggccuggaaggcccaguuccccgacagcgagccccccagaauggagcugagaagcgugggcgacaucgagcaggagcuggagagaugcaaggccagcaucagaagacuggagcaggaggugaaccaggagagauucagaaugaucuaccugcagacccugcuggccaaggagaagaagagcuacgacagacagagauggggcuucagaagagccgcccaggcccccgacggcgccagcgagcccagagccagcgccagcagaccccagcccgcccccgccgacggcgccgaccccccccccgccgaggagcccgaggccagacccgacggcgagggcagccccggcaaggccagacccggcaccgccagaagacccggcgccgccgccagcggcgagagagacgacagaggcccccccgccagcguggccgcccugagaagcaacuucgagagaaucagaaagggccacggccagcccggcgccgacgccgagaagcccuucuacgugaacguggaguuccaccacgagagaggccuggugaaggugaacgacaaggaggugagcgacagaaucagcagccugggcagccaggccaugcagauggagagaaagaagagccagcacggcgccggcagcagcgugggcgacgccagcagaccccccuacagaggcagaagcagcgagagcagcugcggcguggacggcgacuacgaggacgccgagcugaaccccagauuccugaaggacaaccugaucgacgccaacggcggcagcagaccccccuggcccccccuggaguaccagcccuaccagagcaucuacgugggcggcaugauggagggcgagggcaagggcccccugcugagaagccagagcaccagcgagcaggagaagagacugaccuggcccagaagaagcuacagccccagaagcuucgaggacugcggcggcggcuacacccccgacugcagcagcaacgagaaccugaccagcagcgaggaggacuucagcagcggccagagcagcagagugagccccagccccaccaccuacagaauguucagagacaagagcagaagccccagccagaacagccagcagagcuucgacagcagcagcccccccaccccccagugccacaagagacacagacacugccccgugguggugagcgaggccaccaucgugggcgugagaaagaccggccagaucuggcccaacgacggcgagggcgccuuccacggcgacgccgacggcagcuucggcaccccccccggcuacggcugcgccgccgacagagccgaggagcagagaagacaccaggacggccugcccuacaucgacgacagccccagcagcagcccccaccugagcagcaagggcagaggcagcagagacgcccuggugagcggcgcccuggagagcaccaaggccagcgagcuggaccccgugaagaugacccccaccuucagccugcacugcaugauccuguggcccguggagaucacccuguga

SEQ ID NO: 621 - RNA, 1542 nt, Artificial Sequence
  derived and/or modified sequence opt5 from bcr/abl__Homo_sapiens__ABX82712
augguggaccccgucggcuucgccgaggcuuggaaggcccaguuuccugauagcgaaccgcccagaauggagcugcgguccguuggggacaucgaacaagagcucgaacgcugcaaagcgucuauuagacggcuggagcaggaggugaaccaggaacgcuucagaaugaucuaccuucagacccugcucgcuaaggagaaaaagagcuaugaucggcaacgcuggggauuuagacgggccgcccaggcuccugacggcgccuccgaaccccgcgcuucugccagcagaccucagcccgcgccugccgauggggcugacccgcccccugccgaggagcccgaagcucggccugauggagagggcucccccgggaaagcccgcccgggaacagcgagacggccuggcgccgcugccucuggcgaacgcgacgauagagggcccccugcuagcguggccgcccugcgguccaauuucgagcgcauuagaaagggacacggccagcccggggcugacgcggaaaagcccuuuuacgucaacguggaguuccaucacgagcggggacuuguuaaagugaaugauaaggaagucagcgacagaaucucuucccugggcagccaagccaugcagauggagcgcaaaaagucucagcauggggcuggauccagcgugggcgaugccucucggccuccguauagaggccgcuccagcgaauccucuugugggguugacggagacuacgaggaugccgaacucaacccccgguuucugaaagacaaucugauugaugcuaacggcgggagcagaccucccuggccuccccucgaguaucagccguaccaauccaucuaugugggaggcaugauggagggggaaggaaagggcccucugcuucgcagccagucuacguccgagcaggaaaagcggcugaccuggcccagacgcagcuacucuccucggagcuucgaggacugcggcgggggauacacacccgauuguuccucuaaugaaaaccucaccagcuccgaggaggacuuuagcucuggccaauccagcagagucucuccuucccccacaaccuaucggauguuccgcgauaaaagcagauccccgucucagaauagccagcaguccuuugacucuagcuccccucccacaccccaaugccacaagcggcauagacacuguccugugguggucagcgaagccaccaucguuggggugcgcaaaacgggacagauuuggccgaacgauggcgagggggcguuccacggcgacgcugauggaucuuuuggcacacccccuggguacggaugcgccgccgaccgggcugaggaacagagacgccaucaggacggccugcccuauaucgaugacuccccuagcucuagcccccaccuuuccucuaaggggagaggaagccgggaugcccugguguccggcgcucucgagagcaccaaagccucugaacuggacccugucaagaugacccccacauucucccugcauuguaugauucucuggccgguggagaucacccuguga

SEQ ID NO: 622 - protein, 406 aa, Artificial Sequence [sequence omitted]

SEQ ID NO: 623 - RNA, 1221 nt, Artificial Sequence
  bcr/abl__Homo_sapiens__ABX82714
augguggacccggugggcuucgcggaggcguggaaggcgcaguucccggacucagagcccccgcgcauggagcugcgcucagugggcgacaucgagcaggagcuggagcgcugcaaggccuccauucggcgccuggagcaggaggugaaccaggagcgcuuccgcaugaucuaccugcagacguugcuggccaaggaaaagaagagcuaugaccggcagcgauggggcuuccggcgcgcggcgcaggcccccgacggcgccuccgagccccgagcguccgcgucgcgcccgcagccagcgcccgccgacggagccgacccgccgcccgccgaggagcccgaggcccggcccgacggcgaggguucuccggguaaggccaggcccgggaccgcccgcaggcccggggcagccgcgucgggggaacgggacgaccggggaccccccgccagcguggcggcgcucagguccaacuucgagcggauccgcaagggccauggccagcccggggcggacgccgagaagcccuucuacgugaacgucgaguuucaccacgagcgcggccuggugaaggucaacgacaaagaggugucggaccgcaucagcucccugggcagccaggccaugcagauggagcgcaaaaagucccagcacggcgcgggcucgagcgugggggaugcauccaggcccccuuaccggggacgcuccucggagagcagcugcggcgucgacggcgacuacgaggacgccgaguugaacccccgcuuccugaaggacaaccugaucgacgccaauggcgguagcaggcccccuuggccgccccuggaguaccagcccuaccagagcaucuacgucgggggcaugauggaaggggagggcaagggcccgcuccugcgcagccagagcaccucugagcaggagaagcgccuuaccuggccccgcagguccuacuccccccggaguuuugaggauugcggaggcggcuauaccccggacugcagcuccaaugagaaccucaccuccagcgaggaggacuucuccucuggccaguccagccgcguguccccaagccccaccaccuaccgcauguuccgggacaaaagccgcucucccucgcagaacucgcaacaguccuucgacagcagcaguccccccacgccgcagugccauaagcggcaccggcacugcccgguugucguguccgaggccaccagcggccaguag

SEQ ID NO: 624 - RNA, 1221 nt, Artificial Sequence
  derived and/or modified sequence opt1 from bcr/abl__Homo_sapiens__ABX82714
augguggaccccgucggcuucgccgaggccuggaaggcgcaguucccggacagcgagccgccccgcauggagcugcgguccgugggggacaucgagcaggagcucgagcgcugcaaggccagcauccggcgccuggagcaggaggugaaccaggagcgguuccgcaugaucuaccugcagacccuccuggccaaggagaagaaguccuacgaccggcagcgcuggggcuuccggcgcgccgcccaggcgcccgacggggccagcgagccccgggccuccgccagccgcccccagcccgcgcccgccgacggcgccgacccgccgcccgccgaggagcccgaggcccggcccgacggggagggcucccccggcaaggcgcgccccgggaccgcccggcgccccggcgccgccgccagcggggagcgggacgaccgcggcccgcccgcguccgucgccgcccugcggagcaacuucgagcgcauccggaaggggcacggccagcccggcgccgacgccgagaagcccuucuacgugaacguggaguuccaccacgagcgcgggcucgucaaggugaacgacaaggagguguccgaccgcaucagcucccugggcagccaggcgaugcagauggagcggaagaagucccagcacggggccggcagcuccgucggcgacgccagccgcccgcccuaccgggggcgcuccagcgagagcuccugcggcguggacggggacuacgaggacgccgagcugaacccccgguuccucaaggacaaccugaucgacgccaacggcgggagccggcccccguggccgccccuggaguaccagcccuaccaguccaucuacgugggcggcaugauggagggggagggcaaggggccccuccugcgcagccaguccaccagcgagcaggagaagcgccugaccuggccccggcgcuccuacagcccccgguccuucgaggacugcggcgggggcuacaccccggacugcagcuccaacgagaaccucaccagcuccgaggaggacuucagcuccggccagagcucccgcgucagccccucccccacgaccuaccggauguuccgcgacaagagccggagccccucccagaacagccagcaguccuucgacagcuccagcccgcccacgccccagugccacaagcgccaccggcacugccccgugguggucuccgaggcgaccagcgggcaguga

SEQ ID NO: 625 - RNA, 1221 nt, Artificial Sequence
  derived and/or modified sequence opt2 from bcr/abl__Homo_sapiens__ABX82714
auggucgaccccgucggcuucgccgaggccuggaaggcccaguuccccgacuccgagcccccccgcauggagcuccgcuccgucggcgacaucgagcaggagcucgagcgcugcaaggccuccauccgccgccucgagcaggaggucaaccaggagcgcuuccgcaugaucuaccuccagacccuccucgccaaggagaagaaguccuacgaccgccagcgcuggggcuuccgccgcgccgcccaggcccccgacggcgccuccgagccccgcgccuccgccucccgcccccagcccgcccccgccgacggcgccgaccccccccccgccgaggagcccgaggcccgccccgacggcgagggcucccccggcaaggcccgccccggcaccgcccgccgccccggcgccgccgccuccggcgagcgcgacgaccgcggcccccccgccuccgucgccgcccuccgcuccaacuucgagcgcauccgcaagggccacggccagcccggcgccgacgccgagaagcccuucuacgucaacgucgaguuccaccacgagcgcggccucgucaaggucaacgacaaggaggucuccgaccgcaucuccucccucggcucccaggccaugcagauggagcgcaagaagucccagcacggcgccggcuccuccgucggcgacgccucccgcccccccuaccgcggccgcuccuccgaguccuccugcggcgucgacggcgacuacgaggacgccgagcucaacccccgcuuccucaaggacaaccucaucgacgccaacggcggcucccgcccccccuggcccccccucgaguaccagcccuaccaguccaucuacgucggcggcaugauggagggcgagggcaagggcccccuccuccgcucccaguccaccuccgagcaggagaagcgccucaccuggccccgccgcuccuacuccccccgcuccuucgaggacugcggcggcggcuacacccccgacugcuccuccaacgagaaccucaccuccuccgaggaggacuucuccuccggccaguccucccgcgucucccccucccccaccaccuaccgcauguuccgcgacaagucccgcucccccucccagaacucccagcaguccuucgacuccuccuccccccccaccccccagugccacaagcgccaccgccacugccccgucgucgucuccgaggccaccuccggccaguga

SEQ ID NO: 626 - RNA, 1221 nt, Artificial Sequence
  derived and/or modified sequence opt3 from bcr/abl__Homo_sapiens__ABX82714
augguggaccccgucggcuucgccgaggcuuggaaggcacaguuuccugauagcgaaccaccgagaauggagcugagguccguuggggacaucgaacaagagcucgaacggugcaaagccucuauucgccgacuugagcaggaggugaaccaggaacguuucagaaugauauaccugcagaccuuguuagcgaaggagaaaaagucauaugauaggcaacgguggggauuucgcagagcugcccaggcacccgacggugccagugaaccuagggcuagcgcaucccggccacagcccgccccugcugauggcgccgacccacccccugcggaggagccagaagcacgcccggauggggagggaucucccggcaaagcccgaccugguacagcuagaaggccaggggccgcagcuucgggagaacgggacgaucgugggcccccugccucaguagcggcccugcgcagcaauuucgagagaaucaggaagggccacggccagccaggagcagacgcugaaaagcccuuuuacgugaacgucgaguuccaucacgagcggggucuagugaaaguuaaugauaaggaagugagugaccgaauuuccucucucggcagccaagccaugcagauggagcgcaaaaagucccagcauggggcuggaucaagugucggcgaugccagcagaccgccuuauaggggucggucuuccgaaucaagcugugggguggacggagacuacgaggaugcagaacugaacccccgcuuucuuaaagacaaucugaucgaugccaacggcggcaguagaccaccuuggcccccauuggaguaucagcccuaccaaucuauuuauguagggggaaugauggagggugaaggcaaggggccucuccugaggucccagagcacuucggagcaggaaaagcgucugacguggccacggcgaucuuacuccccgagaucauucgaggacugcggaggcgguuacacccccgauuguaguagcaaugaaaaccucacauccucugaggaggacuuuagcucagggcaaaguuccaggguuagcccuucuccaacuaccuaucgcauguuccgggauaaaucaagaagucccagccaaaauucccagcagucuuuugacucgagcuccccuccaacaccccagugccacaagaggcaucgccacuguccgguggucgugucagaagcuaccaguggccaguga

SEQ ID NO: 627 - RNA, 1221 nt, Artificial Sequence
  derived and/or modified sequence opt4 from bcr/abl__Homo_sapiens__ABX82714
augguggaccccgugggcuucgccgaggccuggaaggcccaguuccccgacagcgagccccccagaauggagcugagaagcgugggcgacaucgagcaggagcuggagagaugcaaggccagcaucagaagacuggagcaggaggugaaccaggagagauucagaaugaucuaccugcagacccugcuggccaaggagaagaagagcuacgacagacagagauggggcuucagaagagccgcccaggcccccgacggcgccagcgagcccagagccagcgccagcagaccccagcccgcccccgccgacggcgccgaccccccccccgccgaggagcccgaggccagacccgacggcgagggcagccccggcaaggccagacccggcaccgccagaagacccggcgccgccgccagcggcgagagagacgacagaggcccccccgccagcguggccgcccugagaagcaacuucgagagaaucagaaagggccacggccagcccggcgccgacgccgagaagcccuucuacgugaacguggaguuccaccacgagagaggccuggugaaggugaacgacaaggaggugagcgacagaaucagcagccugggcagccaggccaugcagauggagagaaagaagagccagcacggcgccggcagcagcgugggcgacgccagcagaccccccuacagaggcagaagcagcgagagcagcugcggcguggacggcgacuacgaggacgccgagcugaaccccagauuccugaaggacaaccugaucgacgccaacggcggcagcagaccccccuggcccccccuggaguaccagcccuaccagagcaucuacgugggcggcaugauggagggcgagggcaagggcccccugcugagaagccagagcaccagcgagcaggagaagagacugaccuggcccagaagaagcuacagccccagaagcuucgaggacugcggcggcggcuacacccccgacugcagcagcaacgagaaccugaccagcagcgaggaggacuucagcagcggccagagcagcagagugagccccagccccaccaccuacagaauguucagagacaagagcagaagccccagccagaacagccagcagagcuucgacagcagcagcccccccaccccccagugccacaagagacacagacacugccccgugguggugagcgaggccaccagcggccaguga

SEQ ID NO: 628 - RNA, 1221 nt, Artificial Sequence
  derived and/or modified sequence opt5 from bcr/abl__Homo_sapiens__ABX82714
augguggaccccgucggcuucgccgaggcuuggaaggcccaguuuccugauagcgaaccgcccagaauggagcugcgguccguuggggacaucgaacaagagcucgaacgcugcaaagcgucuauuagacggcuggagcaggaggugaaccaggaacgcuucagaaugaucuaccuucagacccugcucgcuaaggagaaaaagagcuaugaucggcaacgcuggggauuuagacgggccgcccaggcuccugacggcgccuccgaaccccgcgcuucugccagcagaccucagcccgcgccugccgauggggcugacccgcccccugccgaggagcccgaagcucggccugauggagagggcucccccgggaaagcccgcccgggaacagcgagacggccuggcgccgcugccucuggcgaacgcgacgauagagggcccccugcuagcguggccgcccugcgguccaauuucgagcgcauuagaaagggacacggccagcccggggcugacgcggaaaagcccuuuuacgucaacguggaguuccaucacgagcggggacuuguuaaagugaaugauaaggaagucagcgacagaaucucuucccugggcagccaagccaugcagauggagcgcaaaaagucucagcauggggcuggauccagcgugggcgaugccucucggccuccguauagaggccgcuccagcgaauccucuugugggguugacggagacuacgaggaugccgaacucaacccccgguuucugaaagacaaucugauugaugcuaacggcgggagcagaccucccuggccuccccucgaguaucagccguaccaauccaucuaugugggaggcaugauggagggggaaggaaagggcccucugcuucgcagccagucuacguccgagcaggaaaagcggcugaccuggcccagacgcagcuacucuccucggagcuucgaggacugcggcgggggauacacacccgauuguuccucuaaugaaaaccucaccagcuccgaggaggacuuuagcucuggccaauccagcagagucucuccuucccccacaaccuaucggauguuccgcgauaaaagcagauccccgucucagaauagccagcaguccuuugacucuagcuccccucccacaccccaaugccacaagcggcauagacacuguccugugguggucagcgaagccaccucugggcaguga

SEQ ID NO: 629 - protein, 781 aa, Artificial Sequence
  beta-catenin/m__Homo_sapiens__P35222
MATQADLMELDMAMEPDRKAAVSHWQQQSYLDSGIHSGATTTAPSLSGKGNPEEEDVDTSQVLYEWEQGFSQSFTQEQVADIDGQYAMTRAQRVRAAMFPETLDEGMQIPSTQFDAAHPTNVQRLAEPSQMLKHAVVNLINYQDDAELATRAIPELTKLLNDEDQVVVNKAAVMVHQLSKKEASRHAIMRSPQMVSAIVRTMQNTNDVETARCTAGTLHNLSHHREGLLAIFKSGGIPALVKMLGSPVDSVLFYAITTLHNLLLHQEGAKMAVRLAGGLQKMVALLNKTNVKFLAITTDCLQILAYGNQESKLIILASGGPQALVNIMRTYTYEKLLWTTSRVLKVLSVCSSNKPAIVEAGGMQALGLHLTDPSQRLVQNCLWTLRNLSDAATKQEGMEGLLGTLVQLLGSDDINVVTCAAGILSNLTCNNYKNKMMVCQVGGIEALVRTVLRAGDREDITEPAICALRHLTSRHQEAEMAQNAVRLHYGLPVVVKLLHPPSHWPLIKATVGLIRNLALCPANHAPLREQGAIPRLVQLLVRAHQDTQRRTSMGGTQQQFVEGVRMEEIVEGCTGALHILARDVHNRIVIRGLNTIPLFVQLLYSPIENIQRVAAGVLCELAQDKEAAEAIEAEGATAPLTELLHSRNEGVATYAAAVLFRMSEDKPQDYKKRLSVELTSSLFRTEPMAWNETADLGLDIGAQGEPLGYRQDDPSYRSFHSGGYGQDALGMDPMMEHEMGGHHPGADYPVDGLPDLGHAQDLMDGLPPGDSNQLAWFDTDL

SEQ ID NO: 630 - RNA, 2346 nt, Artificial Sequence
  beta-catenin/m__Homo_sapiens__AAH58926
auggcuacucaagcugauuugauggaguuggacauggccauggaaccagacagaaaagcggcuguuagucacuggcagcaacagucuuaccuggacucuggaauccauucuggugccacuaccacagcuccuucucugagugguaaaggcaauccugaggaagaggauguggauaccucccaaguccuguaugagugggaacagggauuuucucaguccuucacucaagaacaaguagcugauauugauggacaguaugcaaugacucgagcucagaggguacgagcugcuauguucccugagacauuagaugagggcaugcagaucccaucuacacaguuugaugcugcucaucccacuaauguccagcguuuggcugaaccaucacagaugcugaaacaugcaguuguaaacuugauuaacuaucaagaugaugcagaacuugccacacgugcaaucccugaacugacaaaacugcuaaaugacgaggaccagguggugguuaauaaggcugcaguuaugguccaucagcuuucuaaaaaggaagcuuccagacacgcuaucaugcguucuccucagauggugucugcuauuguacguaccaugcagaauacaaaugauguagaaacagcucguuguaccgcugggaccuugcauaaccuuucccaucaucgugagggcuuacuggccaucuuuaagucuggaggcauuccugcccuggugaaaaugcuugguucaccaguggauucuguguuguuuuaugccauuacaacucuccacaaccuuuuauuacaucaagaaggagcuaaaauggcagugcguuuagcuggugggcugcagaaaaugguugccuugcucaacaaaacaaauguuaaauucuuggcuauuacgacagacugccuucaaauuuuagcuuauggcaaccaagaaagcaagcucaucauacuggcuagugguggaccccaagcuuuaguaaauauaaugaggaccuauacuuacgaaaaacuacuguggaccacaagcagagugcugaaggugcuaucugucugcucuaguaauaagccggcuauuguagaagcugguggaaugcaagcuuuaggacuucaccugacagauccaagucaacgucuuguucagaacugucuuuggacucucaggaaucuuucagaugcugcaacuaaacaggaagggauggaaggucuccuugggacucuuguucagcuucuggguucagaugauauaaauguggucaccugugcagcuggaauucuuucuaaccucacuugcaauaauuauaagaacaagaugauggucugccaagugggugguauagaggcucuugugcguacuguccuucgggcuggugacagggaagacaucacugagccugccaucugugcucuucgucaucugaccagccgacaccaagaagcagagauggcccagaaugcaguucgccuucacuauggacuaccaguugugguuaagcucuuacacccaccaucccacuggccucugauaaaggcuacuguuggauugauucgaaaucuugcccuuugucccgcaaaucaugcaccuuugcgugagcagggugccauuccacgacuaguucaguugcuuguucgugcacaucaggauacccagcgccguacguccaugggugggacacagcagcaauuuguggaggggguccgcauggaagaaauaguugaagguuguaccggagcccuucacauccuagcucgggauguucacaaccgaauuguuaucagaggacuaaauaccauuccauuguuugugcagcugcuuuauucucccauugaaaacauccaaagaguagcugcagggguccucugugaacuugcucaggacaaggaagcugcagaagcuauugaagcugagggagccacagcuccucugacagaguuacuucacucuaggaaugaagguguggcgacauaugcagcugcuguuuuguuccgaaugucugaggacaagccacaagauuacaagaaacggcuuucaguugagcugaccagcucucucuucagaacagagccaauggcuuggaaugagacugcugaucuuggacuugauauuggugcccagggagaaccccuuggauaucgccaggaugauccuagcuaucguucuuuucacucugguggauauggccaggaugccuuggguauggaccccaugauggaacaugagauggguggccaccacccuggugcugacuauccaguugaugggcugccagaucuggggcaugcccaggaccucauggaugggcugccuccaggugacagcaaucagcuggccugguuugauacugaccuguaa

SEQ ID NO: 631 - RNA, 2346 nt, Artificial Sequence
  derived and/or modified sequence opt1 from beta-catenin/m__Homo_sapiens__AAH58926
auggccacccaggccgaccugauggagcucgacauggcgauggagcccgaccgcaaggccgccgugagccacuggcagcagcaguccuaccuggacagcggcauccacuccggggccaccacgaccgcccccagccuguccggcaaggggaaccccgaggaggaggacgucgacaccagccaggugcucuacgagugggagcagggcuucucccagagcuucacccaggagcaggucgcggacaucgacgggcaguacgccaugacgcgggcccagcgcgugcgggccgcgauguuccccgagacccuggacgagggcaugcagauccccuccacccaguucgacgccgcccacccgaccaacgugcagcgccuggccgagcccagccagaugcucaagcacgccguggucaaccugaucaacuaccaggacgacgcggagcuggccacgcgggccauccccgagcucaccaagcugcugaacgacgaggaccaggugguggucaacaaggccgccgugauggugcaccagcucuccaagaaggaggcgagccgccacgccaucaugcggagcccccagauggucuccgccaucgugcgcaccaugcagaacaccaacgacguggagacggcccggugcaccgccggcacccugcacaaccugucccaccaccgcgaggggcuccuggcgaucuucaagagcggcgggaucccggcccuggucaagaugcucggcucccccguggacagcgugcuguucuacgccaucaccacgcugcacaaccuccugcugcaccaggagggggccaagauggccguccggcucgcgggcggccugcagaagaugguggcccugcucaacaagaccaacgugaaguuccuggccaucaccaccgacugccugcagauccucgccuacgggaaccaggaguccaagcugaucauccuggcgagcggcgggccccaggcccucgucaacaucaugcgcacguacaccuacgagaagcugcuguggaccaccagccgggugcucaaggugcuguccgucugcagcuccaacaagcccgccaucguggaggccggcggcaugcaggcccuggggcuccaccugacggacccgagccagcgccugguccagaacugccucuggacccugcggaaccuguccgacgcggccaccaagcaggagggcauggaggggcuccugggcacccuggugcagcuccuggggagcgacgacaucaacguggucacgugcgccgccggcauccuguccaaccugaccugcaacaacuacaagaacaagaugauggugugccaggugggcgggaucgaggcccucguccgcaccgugcugcgggcgggcgaccgcgaggacaucaccgagcccgccaucugcgcccugcggcaccucacgagccgccaccaggaggccgagauggcccagaacgcggugcggcugcacuacgggcugcccgucguggugaagcuccugcacccgcccucccacuggccccugaucaaggccaccgucggccucauccgcaaccuggcccugugccccgccaaccacgcgccccuccgcgagcagggggccaucccgcggcuggugcagcugcucgugcgcgcccaccaggacacccagcggcgcaccagcaugggcggcacgcagcagcaguucgucgagggggugcggauggaggagaucguggagggcugcaccggggcccugcacauccuggcccgcgacguccacaaccggaucgugauccgcggccucaacaccaucccccuguucgugcagcugcucuacucccccaucgagaacauccagcgggucgcggccggggugcugugcgagcuggcccaggacaaggaggccgccgaggcgaucgaggccgagggcgccaccgcgccccucaccgagcugcugcacagccgcaacgagggcguggccacguacgccgccgccguccucuuccggauguccgaggacaagccgcaggacuacaagaagcgccugagcguggagcugaccuccagccucuuccggaccgagcccauggccuggaacgagaccgcggaccuggggcuggacaucggcgcccagggggagccccucggcuaccgccaggacgaccccuccuaccggagcuuccacuccggcggguacggccaggacgcccuggggauggacccgaugauggagcacgagaugggcgggcaccaccccggcgccgacuaccccguggacggccugccggaccucgggcacgcccaggaccugauggacggccugccgcccggggacagcaaccagcucgcgugguucgacacggaccuguga

SEQ ID NO: 632 - RNA, 2346 nt, Artificial Sequence
  derived and/or modified sequence opt2 from beta-catenin/m__Homo_sapiens__AAH58926
auggccacccaggccgaccucauggagcucgacauggccauggagcccgaccgcaaggccgccgucucccacuggcagcagcaguccuaccucgacuccggcauccacuccggcgccaccaccaccgcccccucccucuccggcaagggcaaccccgaggaggaggacgucgacaccucccagguccucuacgagugggagcagggcuucucccaguccuucacccaggagcaggucgccgacaucgacggccaguacgccaugacccgcgcccagcgcguccgcgccgccauguuccccgagacccucgacgagggcaugcagauccccuccacccaguucgacgccgcccaccccaccaacguccagcgccucgccgagcccucccagaugcucaagcacgccgucgucaaccucaucaacuaccaggacgacgccgagcucgccacccgcgccauccccgagcucaccaagcuccucaacgacgaggaccaggucgucgucaacaaggccgccgucaugguccaccagcucuccaagaaggaggccucccgccacgccaucaugcgcuccccccagauggucuccgccaucguccgcaccaugcagaacaccaacgacgucgagaccgcccgcugcaccgccggcacccuccacaaccucucccaccaccgcgagggccuccucgccaucuucaaguccggcggcauccccgcccucgucaagaugcucggcucccccgucgacuccguccucuucuacgccaucaccacccuccacaaccuccuccuccaccaggagggcgccaagauggccguccgccucgccggcggccuccagaagauggucgcccuccucaacaagaccaacgucaaguuccucgccaucaccaccgacugccuccagauccucgccuacggcaaccaggaguccaagcucaucauccucgccuccggcggcccccaggcccucgucaacaucaugcgcaccuacaccuacgagaagcuccucuggaccaccucccgcguccucaagguccucuccgucugcuccuccaacaagcccgccaucgucgaggccggcggcaugcaggcccucggccuccaccucaccgaccccucccagcgccucguccagaacugccucuggacccuccgcaaccucuccgacgccgccaccaagcaggagggcauggagggccuccucggcacccucguccagcuccucggcuccgacgacaucaacgucgucaccugcgccgccggcauccucuccaaccucaccugcaacaacuacaagaacaagaugauggucugccaggucggcggcaucgaggcccucguccgcaccguccuccgcgccggcgaccgcgaggacaucaccgagcccgccaucugcgcccuccgccaccucaccucccgccaccaggaggccgagauggcccagaacgccguccgccuccacuacggccuccccgucgucgucaagcuccuccacccccccucccacuggccccucaucaaggccaccgucggccucauccgcaaccucgcccucugccccgccaaccacgccccccuccgcgagcagggcgccaucccccgccucguccagcuccucguccgcgcccaccaggacacccagcgccgcaccuccaugggcggcacccagcagcaguucgucgagggcguccgcauggaggagaucgucgagggcugcaccggcgcccuccacauccucgcccgcgacguccacaaccgcaucgucauccgcggccucaacaccaucccccucuucguccagcuccucuacucccccaucgagaacauccagcgcgucgccgccggcguccucugcgagcucgcccaggacaaggaggccgccgaggccaucgaggccgagggcgccaccgccccccucaccgagcuccuccacucccgcaacgagggcgucgccaccuacgccgccgccguccucuuccgcauguccgaggacaagccccaggacuacaagaagcgccucuccgucgagcucaccuccucccucuuccgcaccgagcccauggccuggaacgagaccgccgaccucggccucgacaucggcgcccagggcgagccccucggcuaccgccaggacgaccccuccuaccgcuccuuccacuccggcggcuacggccaggacgcccucggcauggaccccaugauggagcacgagaugggcggccaccaccccggcgccgacuaccccgucgacggccuccccgaccucggccacgcccaggaccucauggacggccucccccccggcgacuccaaccagcucgccugguucgacaccgaccucuga

SEQ ID NO: 633 - RNA, 2346 nt, Artificial Sequence
  derived and/or modified sequence opt3 from beta-catenin/m__Homo_sapiens__AAH58926
auggccacccaggcugaccugauggagcucgauauggcaauggaacccgacagaaaggccgcggugagccacuggcaacagcaguccuaccuugauucuggcauccauucaggggcuacaacuacggccccuagucugagcggaaaagguaacccagaggaagaggacgucgauaccucccagguuuuguaugaaugggagcaaggcuucucucagucguuuacacaggaacagguggcagacauugaugggcaauacgccaugacuagggcucagcggguacgcgcagccauguucccggagaccuuagacgagggaaugcagauacccucaacacaguuugaugcugcccacccuaccaaugugcaacgacuggcggaaccaagccagaugcuaaagcaugcagucgugaaccucaucaauuaucaggacgaugccgagcuggcuacucgugccauucccgagcuuacaaaacuguugaacgacgaagaucaaguuguggucaauaaggcagcugugaugguacaccagcucaguaaaaaggaggccuccagacaugcgaucaugaggucuccucagaugguuagcgccauugugcggaccaugcagaacacgaaugacgucgaaacugcacgcugcaccgcuggcacacugcacaaccugucccaccauagagagggucucuuagccaucuucaagucagggggaauaccagcucuggugaaaaugcuuggcagucccguggacagcgucuuguuuuacgccaucacuacccugcacaaucuacuccugcaucaagaaggcgcaaagauggccguuaggcuugcugggggacugcagaaaaugguggcguugcucaacaagacaaauguaaaauuccuggcaauuaccacggauuguuuacagauccuggccuaugguaaccaggagucuaagcucauuauccuugcuuccggcgggccucaagcccuggugaauauaaugcggacuuacacauaugagaaguugcuauggaccacuucacgcguccugaaagugcucagcguuugcaguucuaacaagccagcaauuguggaagccggaggcaugcaggcucugggucuucaccugacagacccgucccagcgauugguccagaauugucucuggacccugagaaacuuaagcgaugccgcaacgaaacaagaggggauggaaggacugcuaggcacccucgugcagcugcuuggcucggacgauaucaacguaguuacaugcgcggcugggauuuugucuaaucugacuuguaacaauuacaagaacaaaaugauggugugccaggucggagguaucgaggcccucgugaggaccguccugcgggcaggcgaccgugaagauaucacagagcccgccauuugugcucuuagacaccugacuuccagacaucaggaggccgaaauggcacaaaaugcugugagguugcacuacgggcucccuguugugguaaagcuguuacauccacccucacacuggccucugauaaaagccaccgucggacuaauccggaaccucgcgcugugcccagccaaucaugcuccccuucgagagcagggcgcaauuccgcgcuuggugcagcugcucguuagagcccaccaagacacacagaggcggaccaguaugggugggacucagcagcaauuuguggaaggcguccgcauggaggaaaucguggagggauguacgggcgcucugcacauauuagccagagauguacauaacaggauugugauccgugggcugaauacaaucccucuuuucguucaguugcucuauagccccauugagaacauccagcgggucgcagcgggagugcugugcgaacuagcccaggacaaggaggcugccgaagcaauugaggcugagggugccaccgcaccacugacugaacuccugcacucccgaaaugagggcguggccaccuacgcugcggccguccuuuuuagaaugucugaagauaagccucaagacuauaaaaagagguugagcguugagcugacaucaaguuuauuccgcaccgaacccauggcauggaacgagacugcugaccucgggcuggauauaggagcccagggcgagccacuugguuaccggcaggacgaucccuccuaucgcagcuuucauucugggggcuacggacaggacgcccugggcauggauccuaugauggaacacgagaugggagggcaccauccaggugcugacuauccgguggauggcuugcccgaccucgggcacgcacaagaucugauggacggacuaccuccaggcgauucaaaucagcuggccugguucgacacagaucucuga

SEQ ID NO: 634 - RNA, 2346 nt, Artificial Sequence
  derived and/or modified sequence opt4 from beta-catenin/m__Homo_sapiens__AAH58926
auggccacccaggccgaccugauggagcuggacauggccauggagcccgacagaaaggccgccgugagccacuggcagcagcagagcuaccuggacagcggcauccacagcggcgccaccaccaccgcccccagccugagcggcaagggcaaccccgaggaggaggacguggacaccagccaggugcuguacgagugggagcagggcuucagccagagcuucacccaggagcagguggccgacaucgacggccaguacgccaugaccagagcccagagagugagagccgccauguuccccgagacccuggacgagggcaugcagauccccagcacccaguucgacgccgcccaccccaccaacgugcagagacuggccgagcccagccagaugcugaagcacgccguggugaaccugaucaacuaccaggacgacgccgagcuggccaccagagccauccccgagcugaccaagcugcugaacgacgaggaccaggugguggugaacaaggccgccgugauggugcaccagcugagcaagaaggaggccagcagacacgccaucaugagaagcccccagauggugagcgccaucgugagaaccaugcagaacaccaacgacguggagaccgccagaugcaccgccggcacccugcacaaccugagccaccacagagagggccugcuggccaucuucaagagcggcggcauccccgcccuggugaagaugcugggcagccccguggacagcgugcuguucuacgccaucaccacccugcacaaccugcugcugcaccaggagggcgccaagauggccgugagacuggccggcggccugcagaagaugguggcccugcugaacaagaccaacgugaaguuccuggccaucaccaccgacugccugcagauccuggccuacggcaaccaggagagcaagcugaucauccuggccagcggcggcccccaggcccuggugaacaucaugagaaccuacaccuacgagaagcugcuguggaccaccagcagagugcugaaggugcugagcgugugcagcagcaacaagcccgccaucguggaggccggcggcaugcaggcccugggccugcaccugaccgaccccagccagagacuggugcagaacugccuguggacccugagaaaccugagcgacgccgccaccaagcaggagggcauggagggccugcugggcacccuggugcagcugcugggcagcgacgacaucaacguggugaccugcgccgccggcauccugagcaaccugaccugcaacaacuacaagaacaagaugauggugugccaggugggcggcaucgaggcccuggugagaaccgugcugagagccggcgacagagaggacaucaccgagcccgccaucugcgcccugagacaccugaccagcagacaccaggaggccgagauggcccagaacgccgugagacugcacuacggccugcccgugguggugaagcugcugcacccccccagccacuggccccugaucaaggccaccgugggccugaucagaaaccuggcccugugccccgccaaccacgccccccugagagagcagggcgccauccccagacuggugcagcugcuggugagagcccaccaggacacccagagaagaaccagcaugggcggcacccagcagcaguucguggagggcgugagaauggaggagaucguggagggcugcaccggcgcccugcacauccuggccagagacgugcacaacagaaucgugaucagaggccugaacaccaucccccuguucgugcagcugcuguacagccccaucgagaacauccagagaguggccgccggcgugcugugcgagcuggcccaggacaaggaggccgccgaggccaucgaggccgagggcgccaccgccccccugaccgagcugcugcacagcagaaacgagggcguggccaccuacgccgccgccgugcuguucagaaugagcgaggacaagccccaggacuacaagaagagacugagcguggagcugaccagcagccuguucagaaccgagcccauggccuggaacgagaccgccgaccugggccuggacaucggcgcccagggcgagccccugggcuacagacaggacgaccccagcuacagaagcuuccacagcggcggcuacggccaggacgcccugggcauggaccccaugauggagcacgagaugggcggccaccaccccggcgccgacuaccccguggacggccugcccgaccugggccacgcccaggaccugauggacggccugccccccggcgacagcaaccagcuggccugguucgacaccgaccuguga

SEQ ID NO: 635 - RNA, 2346 nt, Artificial Sequence
  derived and/or modified sequence opt5 from beta-catenin/m__Homo_sapiens__AAH58926
auggccacccaggcugaccugauggagcucgauauggccauggaacccgacagaaaggcggcugugagccacuggcaacagcaguccuaccuggauucuggcauccauagcggggccacaacgaccgccccuucccuuucuggaaaaggcaacccggaggaagaggacgucgauacaagccagguucuguaugaaugggagcaaggguucucccagucuuuuacccaggaacagguggcugacauugauggacaauacgccaugacacgggcucagcgcgugagagccgcgauguuccccgagacccucgacgagggcaugcagaucccuagcacacaguuugaugccgcucaccccaccaauguccaacggcuggccgaaccuucccagaugcuuaagcaugcugugguuaaccugauuaauuaucaggacgaugccgagcucgcgacgcgcgccauccccgagcugaccaaacugcucaacgacgaagaucaaguggucgugaauaaggcugccguuauggugcaccagcugagcaaaaaggaggcuucuagacaugccauuaugcgguccccucagauggucagcgccaucgugcgcacaaugcagaacaccaaugacguggaaacagcuagaugcaccgcggggacgcuucacaaccugucucaccaucgggagggacuccuggccaucuucaaguccggcggcauuccggcucuugucaaaaugcuggggagccccguugacucugugcucuuuuacgccaucacaacccugcacaaucugcuccugcaucaagaaggagccaagauggcugugcgccuugccggcgggcugcagaaaauggucgcgcuccugaacaagacaaaugugaaauuccuugcuauuaccaccgauugucugcagauccucgccuauggaaaccaggaguccaagcugauuauccuggccagcggcgggccucaagcucucguuaauauuaugagaacauacacguaugagaagcugcuuuggaccacaucccgggugcugaaaguccucucugugugcagcuccaacaagcccgccaucguugaagcuggaggcaugcaggcccugggccuucaccugaccgacccuagccagcgccucgugcagaauugucuguggacacugagaaaccucucugaugcggccaccaaacaagaggggauggaaggacugcuuggcacgcugguccagcuccugggguccgacgauaucaacguggucacaugcgcugccggcauucugagcaaucuuaccuguaacaauuacaagaacaaaaugauggugugccagguuggagggaucgaggcucucgugcggaccguccugcgcgccggagacagagaagauauuacagagcccgcgaucugugcccugcggcaccucaccucuagacaucaggaggcugaaauggcccaaaaugcugugcgccugcacuacggccuuccgguuguggucaagcugcuccauccucccagccacuggccucugauuaaagccacagugggccugauccggaaccuugcccucugccccgcuaaucaugcgccccugagagagcagggggccaucccucgccuggugcagcuccugguucgggcucaccaagacacgcagagacgcaccuccaugggaggcacacagcagcaauuugucgaaggggugcggauggaggaaauuguggagggauguaccggcgcccuucacauccuggccagagauguccauaaccgcauugugauccgggggcucaauacaauuccgcuguucguucagcugcuuuauucucccaucgagaacauccagagaguggcugccggcguccucugcgaacuggcgcaggacaaggaggcugccgaagccauugaggcugagggagccaccgcgccucugacggaacuccugcacagccgcaaugagggcguggcuaccuacgccgccgcuguucuuuuucggauguccgaagauaagccccaagacuauaaaaagagacugagcguggagcucacaucuucccuguuccggaccgaaccuauggccuggaacgagacagcugaccuggggcuugauaucggagcccagggcgagccccucggguaccgccaggacgauccgagcuauagaucuuuucauuccggaggcuacgggcaggacgcgcugggcauggauccuaugauggaacacgagaugggaggccaccaucccggggccgacuauccugucgauggacugcccgaccucggccacgcucaagaucugauggacgggcuuccucccggagauagcaaucagcuggccugguucgacaccgaucucuga

SEQ ID NO: 636 - protein, 563 aa, Artificial Sequence
  beta-catenin/m__Homo_sapiens__Q8WYA6
MDVGELLSYQPNRGTKRPRDDEEEEQKMRRKQTGTRERGRYREEEMTVVEEADDDKKRLLQIIDRDGEEEEEEEEPLDESSVKKMILTFEKRSYKNQELRIKFPDNPEKFMESELDLNDIIQEMHVVATMPDLYHLLVELNAVQSLLGLLGHDNTDVSIAVVDLLQELTDIDTLHESEEGAEVLIDALVDGQVVALLVQNLERLDESVKEEADGVHNTLAIVENMAEFRPEMCTEGAQQGLLQWLLKRLKAKMPFDANKLYCSEVLAILLQDNDENRELLGELDGIDVLLQQLSVFKRHNPSTAEEQEMMENLFDSLCSCLMLSSNRERFLKGEGLQLMNLMLREKKISRSSALKVLDHAMIGPEGTDNCHKFVDILGLRTIFPLFMKSPRKIKKVGTTEKEHEEHVCSILASLLRNLRGQQRTRLLNKFTENDSEKVDRLMELHFKYLGAMQVADKKIEGEKHDMVRRGEIIDNDTEEEFYLRRLDAGLFVLQHICYIMAEICNANVPQIRQRVHQILNMRGSSIKIVRHIIKEYAENIGDGRSPEFRENEQKRILGLLENF

SEQ ID NO: 637 - RNA, 1692 nt, Artificial Sequence
  beta-catenin/m__Homo_sapiens__AAI21007
auggacgugggcgaacuucugagcuaccagcccaauaggggcacaaaacguccccgggaugaugaagaggaggagcagaagaugcgucggaaacaaacugguacucgagaacgcggccgcuaucgggaagaagaaaugacugugguggaggaagcggaugaugacaaaaaaaggcugcugcagauuauugacagagauggggaagaggaagaggaagaggaggagccauuggaugaaagcucagugaagaaaaugauccucacauuugaaaagagaucauauaaaaaccaagaauugcggauuaaguuuccagacaauccagagaaguucauggaauccgagcuggaccuaaaugacaucauucaggagaugcacgugguggccaccaugccagaccuguaccaccuucugguggagcugaaugcuguacagucgcuucucggcuugcucggacacgauaauacagauguguccauagcuguggucgauuugcuucaggaauuaacagauauagacacccuccaugagagugaagagggagcagaagugcucaucgaugcucugguggaugggcaggugguagcacugcugguacagaaucuggagcgccuggaugagucugugaaagaggaggcagauggcguccacaacacucuggcuauuguggaaaacauggcugaguuccggccugagauguguacagagggugcccagcagggucuucuacaguggcuguugaagaggcugaaggcaaagaugccuuuugaugccaacaaacuguauugcagugaagugcuggccauauugcuccaggacaaugaugaaaacagggaauugcuuggggagcuggauggaaucgaugugcuucuucagcaguuauccguguuuaaaagacacaaucccagcacggcugaggagcaggagaugauggagaaucuguuugauucccucugcuccugucuaaugcuuaguuccaaucgugagcgcuuccugaagggcgagggucuucagcugaugaaucucaugcucagggaaaagaagaucucccggagcagugcccugaaagugcuggaccaugccaugauuggccccgaaggcacagacaacugccauaaguuuguugacauucuuggcuuacgaaccaucuuuccccucuuuaugaaaucucccaggaagaucaagaaagugggaaccacugagaaggaacaugaagagcaugucuguucgauccuggcuucccuccugcggaaccugagagggcagcagcggacccggcuucugaauaaauucacugaaaaugacagugagaagguugacagacuaauggaguugcauuuuaaauaucugggugcaaugcagguggcggacaagaagauugaaggggaaaaacacgacaugguccggcgaggagagaucaucgacaaugacaccgaggaggaguucuaccuccggcgccuggaugcggggcucuuuguucuccagcacaucugcuacaucauggccgagaucugcaaugccaaugucccccagauucgccagaggguucaccagauccuaaacaugcgaggaagcuccaucaaaauugucaggcauaucaucaaggaguaugcagagaacaucggggacggccggagcccggaguuccgggagaacgagcaaaagcgcauccugggcuugcuggagaacuucuag

SEQ ID NO: 638 - RNA, 1692 nt, Artificial Sequence
  derived and/or modified sequence opt1 from beta-catenin/m__Homo_sapiens__AAI21007
auggacgugggcgagcugcucagcuaccagcccaaccgcgggaccaagcggccgcgcgacgacgaggaggaggagcagaagaugcggcgcaagcagaccggcacgcgggagcgcgggcgguaccgcgaggaggagaugaccgucguggaggaggccgacgacgacaagaagcggcugcugcagaucaucgaccgcgacggcgaggaggaggaggaggaggaggagccccucgacgaguccagcgugaagaagaugauccugaccuucgagaagcgguccuacaagaaccaggagcugcgcaucaaguuccccgacaaccccgagaaguucauggagagcgagcucgaccugaacgacaucauccaggagaugcacgucguggccaccaugccggaccuguaccaccuccugguggagcugaacgcgguccagucccuccuggggcugcucggccacgacaacacggacgugagcaucgccguggucgaccugcugcaggagcucaccgacaucgacacccugcacgaguccgaggagggcgccgaggugcugaucgacgcccucguggacgggcaggucguggcccugcuggugcagaaccucgagcggcuggacgagagcgucaaggaggaggcggacggcgugcacaacacccuggccaucguggagaacauggccgaguuccgccccgagaugugcacggagggggcccagcagggccuccugcaguggcugcucaagcggcugaaggcgaagaugcccuucgacgccaacaagcuguacugcuccgagguccucgccauccugcugcaggacaacgacgagaaccgcgagcuccugggggagcuggacggcaucgacgugcuccugcagcagcugagcguguucaagcggcacaaccccuccaccgccgaggagcaggagaugauggagaaccucuucgacagccugugcuccugccugaugcucagcuccaaccgcgagcgguuccugaagggcgaggggcugcagcucaugaaccugaugcugcgcgagaagaagaucagccgguccagcgcccugaagguccucgaccacgcgaugaucggcccggaggggaccgacaacugccacaaguucguggacauccugggccugcgcaccaucuucccccucuucaugaaguccccgcgcaagaucaagaaggugggcacgaccgagaaggagcacgaggagcacgucugcagcauccuggccagccugcuccggaaccugcgcgggcagcagcggacccgccugcucaacaaguucaccgagaacgacuccgagaagguggaccggcugauggagcugcacuucaaguaccucggcgccaugcaggucgccgacaagaagaucgagggggagaagcacgacauggugcgccggggcgagaucaucgacaacgacacggaggaggaguucuaccugcgccggcuggacgccggccucuucgugcugcagcacaucugcuacaucauggcggagaucugcaacgccaacgucccccagauccgccagcgggugcaccagauccugaacaugcgcgggagcuccaucaagaucgugcggcacaucaucaaggaguacgccgagaacaucggcgacgggcgcagccccgaguuccgggagaacgagcagaagcgcauccucggccugcuggagaacuucuga

SEQ ID NO: 639 - RNA, 1692 nt, Artificial Sequence
  derived and/or modified sequence opt2 from beta-catenin/m__Homo_sapiens__AAI21007
auggacgucggcgagcuccucuccuaccagcccaaccgcggcaccaagcgcccccgcgacgacgaggaggaggagcagaagaugcgccgcaagcagaccggcacccgcgagcgcggccgcuaccgcgaggaggagaugaccgucgucgaggaggccgacgacgacaagaagcgccuccuccagaucaucgaccgcgacggcgaggaggaggaggaggaggaggagccccucgacgaguccuccgucaagaagaugauccucaccuucgagaagcgcuccuacaagaaccaggagcuccgcaucaaguuccccgacaaccccgagaaguucauggaguccgagcucgaccucaacgacaucauccaggagaugcacgucgucgccaccaugcccgaccucuaccaccuccucgucgagcucaacgccguccagucccuccucggccuccucggccacgacaacaccgacgucuccaucgccgucgucgaccuccuccaggagcucaccgacaucgacacccuccacgaguccgaggagggcgccgagguccucaucgacgcccucgucgacggccaggucgucgcccuccucguccagaaccucgagcgccucgacgaguccgucaaggaggaggccgacggcguccacaacacccucgccaucgucgagaacauggccgaguuccgccccgagaugugcaccgagggcgcccagcagggccuccuccaguggcuccucaagcgccucaaggccaagaugcccuucgacgccaacaagcucuacugcuccgagguccucgccauccuccuccaggacaacgacgagaaccgcgagcuccucggcgagcucgacggcaucgacguccuccuccagcagcucuccgucuucaagcgccacaaccccuccaccgccgaggagcaggagaugauggagaaccucuucgacucccucugcuccugccucaugcucuccuccaaccgcgagcgcuuccucaagggcgagggccuccagcucaugaaccucaugcuccgcgagaagaagaucucccgcuccuccgcccucaagguccucgaccacgccaugaucggccccgagggcaccgacaacugccacaaguucgucgacauccucggccuccgcaccaucuucccccucuucaugaaguccccccgcaagaucaagaaggucggcaccaccgagaaggagcacgaggagcacgucugcuccauccucgccucccuccuccgcaaccuccgcggccagcagcgcacccgccuccucaacaaguucaccgagaacgacuccgagaaggucgaccgccucauggagcuccacuucaaguaccucggcgccaugcaggucgccgacaagaagaucgagggcgagaagcacgacaugguccgccgcggcgagaucaucgacaacgacaccgaggaggaguucuaccuccgccgccucgacgccggccucuucguccuccagcacaucugcuacaucauggccgagaucugcaacgccaacgucccccagauccgccagcgcguccaccagauccucaacaugcgcggcuccuccaucaagaucguccgccacaucaucaaggaguacgccgagaacaucggcgacggccgcucccccgaguuccgcgagaacgagcagaagcgcauccucggccuccucgagaacuucuga

SEQ ID NO: 640 - RNA, 1692 nt, Artificial Sequence
  derived and/or modified sequence opt3 from beta-catenin/m__Homo_sapiens__AAI21007
auggacgugggcgagcugcucagcuaccagcccaacagagggaccaagaggccucgggaugacgaagaggaagaacagaaaaugcgccgaaagcaaacaggaacucgugaaagagguagguaucgggaggaggaaaugacggucguugaggaagccgaugacgauaaaaagcgccuucugcagaucauugacagagauggcgaggaggaagaggaagaggaggagccauuggacgaguccucugugaaaaagaugauauuaaccuucgaaaagaggucauacaaaaaucaggagcugcggaucaaguuuccggauaaccccgaaaaauucauggagagugaacuagaccucaaugauauuauccaagagaugcacguaguggcuacaaugccugaccuguaucaucuucuggucgaguugaacgcagugcagagccuccuggggcugcucggacacgauaauacugacguuuccauugccguggucgacuuacugcaggaacuuaccgauaucgacacauugcaugagucugaagagggcgcggaagugcugauagaugcucuaguagacggucagguuguggcccuccugguccaaaaccuugagcgccuggaugagucggugaaggaagaggcagacggggugcacaauaccuuggccaucgucgaaaacauggcugaguuucgaccagagaugugcacugaaggagcacagcagggccuccugcagugguuacugaaaagacucaaggccaagaugcccuucgaugcuaauaaacuuuacuguucagagguucuggccauuuugcuacaagacaacgaugaaaauagggagcugcucggcgaacuggacgggaucgaugugcuucugcagcaguugagcguauuuaagcggcauaacccuaguacagcggaggagcaagaaaugauggagaaucucuucgacucccugugcucuuguuuaaugcugagcuccaaccgugaacgcuuucuaaaaggagagggucuccagcugaugaaucuuauguugagagaaaagaaaauuucaaggaguagcgcacugaaggugcucgaccacgccaugaucggcccagaggggaccgauaacugccacaaauucgucgacauacugggacuucggacgauuuuuccccuguucaugaagucuccucgaaagaucaaaaaggugggcacuaccgagaaagaacaugaggaacacguuuguuccauuuuggcuucacuccugcgcaacuuaagaggucagcagaggacacggcugcuaaauaaguuuacugagaacgauagcgaaaaaguggaccgccucauggagcugcauuucaaguaucuuggggccaugcaagucgcagauaagaaaaucgagggagaaaagcacgacauggugagaaggggcgagaucauugauaaugacaccgaagaggaguuuuacuugcgucggcuggaugcuggccucuucguacugcagcacauaugcuauaucauggccgaaauuuguaacgcgaauguuccacagauccgacagagagugcaucaaauauuaaacaugagggggaguucuauuaaaaucguccgccacaucauuaaggaguacgccgaaaauaucggagacggucgguccccggaguucagagaaaacgagcagaaaaggauucugggccuuuuggagaauuuuuga

SEQ ID NO: 641 - RNA, 1692 nt, Artificial Sequence
  derived and/or modified sequence opt4 from beta-catenin/m__Homo_sapiens__AAI21007
auggacgugggcgagcugcugagcuaccagcccaacagaggcaccaagagacccagagacgacgaggaggaggagcagaagaugagaagaaagcagaccggcaccagagagagaggcagauacagagaggaggagaugaccgugguggaggaggccgacgacgacaagaagagacugcugcagaucaucgacagagacggcgaggaggaggaggaggaggaggagccccuggacgagagcagcgugaagaagaugauccugaccuucgagaagagaagcuacaagaaccaggagcugagaaucaaguuccccgacaaccccgagaaguucauggagagcgagcuggaccugaacgacaucauccaggagaugcacgugguggccaccaugcccgaccuguaccaccugcugguggagcugaacgccgugcagagccugcugggccugcugggccacgacaacaccgacgugagcaucgccgugguggaccugcugcaggagcugaccgacaucgacacccugcacgagagcgaggagggcgccgaggugcugaucgacgcccugguggacggccaggugguggcccugcuggugcagaaccuggagagacuggacgagagcgugaaggaggaggccgacggcgugcacaacacccuggccaucguggagaacauggccgaguucagacccgagaugugcaccgagggcgcccagcagggccugcugcaguggcugcugaagagacugaaggccaagaugcccuucgacgccaacaagcuguacugcagcgaggugcuggccauccugcugcaggacaacgacgagaacagagagcugcugggcgagcuggacggcaucgacgugcugcugcagcagcugagcguguucaagagacacaaccccagcaccgccgaggagcaggagaugauggagaaccuguucgacagccugugcagcugccugaugcugagcagcaacagagagagauuccugaagggcgagggccugcagcugaugaaccugaugcugagagagaagaagaucagcagaagcagcgcccugaaggugcuggaccacgccaugaucggccccgagggcaccgacaacugccacaaguucguggacauccugggccugagaaccaucuucccccuguucaugaagagccccagaaagaucaagaaggugggcaccaccgagaaggagcacgaggagcacgugugcagcauccuggccagccugcugagaaaccugagaggccagcagagaaccagacugcugaacaaguucaccgagaacgacagcgagaagguggacagacugauggagcugcacuucaaguaccugggcgccaugcagguggccgacaagaagaucgagggcgagaagcacgacauggugagaagaggcgagaucaucgacaacgacaccgaggaggaguucuaccugagaagacuggacgccggccuguucgugcugcagcacaucugcuacaucauggccgagaucugcaacgccaacgugccccagaucagacagagagugcaccagauccugaacaugagaggcagcagcaucaagaucgugagacacaucaucaaggaguacgccgagaacaucggcgacggcagaagccccgaguucagagagaacgagcagaagagaauccugggccugcuggagaacuucuga

SEQ ID NO: 642 - RNA, 1692 nt, Artificial Sequence
  derived and/or modified sequence opt5 from beta-catenin/m__Homo_sapiens__AAI21007
auggacgugggcgagcugcucagcuaccagcccaacagagggaccaagcggccucgcgaugacgaagaggaagaacagaaaaugagacggaagcaaacaggaacgcgcgaaagaggccgguaucgcgaggaggaaaugaccgucguugaggaagccgaugacgauaaaaagagacugcuucagaucauugaccgggauggggaggaggaagaggaagaggaggagccgcuggacgaguccucugugaaaaagaugauccucacauucgaaaagcgcagcuacaaaaaucaggagcugagaauuaaguuucccgauaacccugaaaaauucauggaguccgaacuugaccugaaugauaucauucaagagaugcacguggucgcuaccaugcccgaccucuaucaucugcugguggagcucaacgccguucagucucugcuuggacugcucggccacgauaauacagacgugagcaucgcggucguggaccugcuucaggaacugaccgauaucgacacacuccaugaguccgaagagggggcugaaguucugauugaugcccugguggacggacaggucguggcccuccuggugcaaaaccuugagcggcuggaugagucugucaaggaagaggcugacggcguucacaauacccucgccaucguggaaaacauggcugaguuucgcccugagaugugcacggaaggcgcccagcaggggcugcuucaguggcugcucaaaagacugaaggcgaagaugcccuucgaugccaauaaacuguacuguagcgaggugcucgcuauucugcuucaagacaacgaugaaaaucgggagcugcucggagaacuggacggcaucgauguccuucugcagcagcucuccguguuuaagcgccauaacccuagcaccgccgaggagcaagaaaugauggagaaucuguucgacucucugugcuccugucucaugcugagcucuaacagagaacgguuucuuaaaggggagggacugcagcucaugaaucugaugcugagagaaaagaaaauuucccgcagcucugcucuuaagguucucgaccacgccaugaucggcccggaggggacagauaacugccacaaauucguggacauucugggacugcggaccaucuuuccccucuucaugaaguccccuagaaagaucaaaaaggucggcacaaccgagaaagaacaugaggaacacguguguagcauucuggcgucccuucugcgcaaccuccggggccagcagagaacgcgccugcugaauaaguuuacagagaacgauucugaaaaaguugaccggcuuauggagcuccauuucaaguaucugggggccaugcaaguggcugauaagaaaaucgagggagaaaagcacgacauggucagacgcggcgagauuaucgauaaugacaccgaagaggaguuuuaccugcggagacucgaugccgggcuguucgugcuucagcacauuugcuauaucauggcugaaaucuguaacgccaaugucccccagauucgccagcgggugcaucaaauccugaacaugagaggaagcuccauuaaaaucguucggcacauuaucaaggaguacgccgaaaauaucggcgacgggcgcagcccugaguucagagaaaacgagcagaaacggauucucggacugcuggagaauuuuuga

SEQ ID NO: 643 - protein, 610 aa, Artificial Sequence
  BING-4__Homo_sapiens__O15213
METAPKPGKDVPPKKDKLQTKRKKPRRYWEEETVPTTAGASPGPPRNKKNRELRPQRPKNAYILKKSRISKKPQVPKKPREWKNPESQRGLSGTQDPFPGPAPVPVEVVQKFCRIDKSRKLPHSKAKTRSRLEVAEAEEEETSIKAARSELLLAEEPGFLEGEDGEDTAKICQADIVEAVDIASAAKHFDLNLRQFGPYRLNYSRTGRHLAFGGRRGHVAALDWVTKKLMCEINVMEAVRDIRFLHSEALLAVAQNRWLHIYDNQGIELHCIRRCDRVTRLEFLPFHFLLATASETGFLTYLDVSVGKIVAALNARAGRLDVMSQNPYNAVIHLGHSNGTVSLWSPAMKEPLAKILCHRGGVRAVAVDSTGTYMATSGLDHQLKIFDLRGTYQPLSTRTLPHGAGHLAFSQRGLLVAGMGDVVNIWAGQGKASPPSLEQPYLTHRLSGPVHGLQFCPFEDVLGVGHTGGITSMLVPGAGEPNFDGLESNPYRSRKQRQEWEVKALLEKVPAELICLDPRALAEVDVISLEQGKKEQIERLGYDPQAKAPFQPKPKQKGRSSTASLVKRKRKVMDEEHRDKVRQSLQQQHHKEAKAKPTGARPSALDRFVR

SEQ ID NO: 644 - RNA, 1833 nt, Artificial Sequence
  BING-4__Homo_sapiens__CCDS4772.1
auggagacagcccccaagccgggcaaggaugucccgcccaagaaagacaaacuucagaccaagagaaagaaaccgcggcgauacugggaggaagagaccguuccgaccacagccggagccucuccagggccuccucguaacaagaagaaucgggagcuccguccucagagaccaaaaaaugcuuacaucuuaaagaagucucggaucucuaagaagccucaggucccgaagaaaccccgagaauggaagaacccggagucccagcgcggcuuguccgggacccaagauccauucccaggccccgcccccgucccuguggaagugguccagaaguucugucgcauugacaaaucccgaaagcuaccacauucuaaagccaaaacucgaagccgacuugagguggcugaagcugaggaagaggaaacaaguaucaaagcugcucguucugagcugcugcuugcugaagaaccuggguuucuggaaggggaggauggggaagacacagcaaagauaugccaggcugacauuguggaggcuguggacauugcaagugcagccaagcacuuugacuugaaucugcggcaguuuggacccuacagacuaaacuacucucgaacuggaagacaccuggcuuuuggagggcgccgaggucauguggcugcccuugauuggguaacaaagaagcuuaugugcgagaucaacgucauggaggcggugcgggacauccgguuucuccauucugaggcacugcuugcuguugcucagaaccgcuggcuccacaucuaugacaaucagggcauugagcuccacuguauccgccgcugugaccgaguaacacggcuugaguuccugcccuuccacuuccuccuggcuacagcuucagaaacaggguuucuaaccuaccuggaugugucaguggggaagauuguggcagcucugaaugcucgagcugggcggcucgauguuaugagucagaacccuuacaaugccgucauccaucucggacacagcaaugguacugugucuuuauggaguccagcuaugaaggagccacuggcaaagauucucugucaucguggugggguccgggcuguggcaguagauucuacaggcacguacauggccaccucuggccuagaccaccagcugaagaucuuugacuugcgagggacguaccagccucugagcacucggacccugccccauggagcagggcaccuggccuucucccagaggggacugcugguggcgggaaugggugacguugucaacaucugggcagggcagggcaaggccagcccacccucccuugaacagcccuaccucacccaccggcucucaggcccugugcauggccuucaguucugccccuuugaagaugugcuggggguggggcacacugggggcaucaccagcaugcuggucccuggggccggugagcccaacuucgauggccuggagaguaauccauacagaagccggaagcagcgccaggagugggaggugaaggcccugcuagagaagguaccugcagagcuuauuugucuggacccacgagcccuggccgagguggaugucaucucccuggagcagggaaagaaggagcagauagagaggcugggcuaugacccgcaggcuaaggcucccuuccagccaaagccaaagcagaagggccgcagcuccacggcaagccuggugaagaggaagaggaaggucauggaugaggaacacagggacaagguccggcagagccuucagcagcagcaucauaaggaggcgaaggccaagcccacgggggcccggccaucugcccuggacagauuugugcgcuga

SEQ ID NO: 645 - RNA, 1833 nt, Artificial Sequence
  derived and/or modified sequence opt1 from BING-4__Homo_sapiens__CCDS4772.1
auggagaccgcccccaagccgggcaaggacgugccgcccaagaaggacaagcugcagaccaagcgcaagaagccccggcgcuacugggaggaggagacgguccccaccaccgccggggcgagccccggcccgccccggaacaagaagaaccgcgagcuccggccccagcgccccaagaacgccuacauccugaagaagucccggaucagcaagaagccccaggugcccaagaagccgcgcgaguggaagaaccccgagucccagcgggggcugagcggcacccaggaccccuuccccgggccggcccccgugcccgucgagguggugcagaaguucugccgcaucgacaagucccggaagcucccccacagcaaggccaagacgcgcucccggcuggaggucgccgaggcggaggaggaggagaccagcaucaaggccgcccgcuccgagcugcuccuggccgaggagccgggcuuccuggagggcgaggacggggaggacaccgcgaagaucugccaggccgacaucguggaggccguggacaucgccagcgccgcgaagcacuucgaccucaaccugcggcaguucggccccuaccgccugaacuacucccggaccgggcgccaccucgccuucggcgggcggcgcggccacgucgccgcccuggacugggugacgaagaagcugaugugcgagaucaacgugauggaggccguccgggacauccgcuuccuccacagcgaggcgcugcuggccguggcccagaaccgcuggcuccacaucuacgacaaccagggcaucgagcugcacugcauccggcgcugcgaccgggugacccgccuggaguuccuccccuuccacuuccugcuggccaccgccuccgagaccggguuccucacguaccuggacgucagcgugggcaagaucguggcggcccugaacgcccgggccgggcgccucgacgucaugucccagaaccccuacaacgccgugauccaccugggccacagcaacggcaccgugucccuguggagcccggcgaugaaggagccccucgccaagauccugugccaccgcgggggcguccgggccguggccguggacuccaccgggaccuacauggcgacgagcggccuggaccaccagcucaagaucuucgaccugcgggggaccuaccagccccugagcacccgcacccucccccacggcgccggccaccuggccuucucccagcgggggcugcucgucgccggcaugggggacguggucaacaucugggccggccaggggaaggcgagcccgcccucccuggagcagcccuaccugacgcaccgccucagcggcccggugcacggccugcaguucugccccuucgaggacgugcugggggucggccacaccgggggcaucaccuccaugcucgugcccggggccggcgagcccaacuucgacggccuggagagcaacccguaccggucccgcaagcagcggcaggagugggaggugaaggcccugcucgagaagguccccgccgagcugaucugccuggacccccgcgcccuggcggagguggacgugaucagccucgagcaggggaagaaggagcagaucgagcggcugggcuacgacccccaggccaaggccccguuccagcccaagcccaagcagaaggggcgcuccagcaccgccucccuggucaagcggaagcgcaaggugauggacgaggagcaccgcgacaaggugcggcagagccuccagcagcagcaccacaaggaggccaaggcgaagcccacgggcgcccgcccguccgcccuggaccgguucguccgcuga

SEQ ID NO: 646 - RNA, 1833 nt, Artificial Sequence
  derived and/or modified sequence opt2 from BING-4__Homo_sapiens__CCDS4772.1
auggagaccgcccccaagcccggcaaggacgucccccccaagaaggacaagcuccagaccaagcgcaagaagccccgccgcuacugggaggaggagaccguccccaccaccgccggcgccucccccggccccccccgcaacaagaagaaccgcgagcuccgcccccagcgccccaagaacgccuacauccucaagaagucccgcaucuccaagaagccccagguccccaagaagccccgcgaguggaagaaccccgagucccagcgcggccucuccggcacccaggaccccuuccccggccccgcccccguccccgucgaggucguccagaaguucugccgcaucgacaagucccgcaagcucccccacuccaaggccaagacccgcucccgccucgaggucgccgaggccgaggaggaggagaccuccaucaaggccgcccgcuccgagcuccuccucgccgaggagcccggcuuccucgagggcgaggacggcgaggacaccgccaagaucugccaggccgacaucgucgaggccgucgacaucgccuccgccgccaagcacuucgaccucaaccuccgccaguucggccccuaccgccucaacuacucccgcaccggccgccaccucgccuucggcggccgccgcggccacgucgccgcccucgacugggucaccaagaagcucaugugcgagaucaacgucauggaggccguccgcgacauccgcuuccuccacuccgaggcccuccucgccgucgcccagaaccgcuggcuccacaucuacgacaaccagggcaucgagcuccacugcauccgccgcugcgaccgcgucacccgccucgaguuccuccccuuccacuuccuccucgccaccgccuccgagaccggcuuccucaccuaccucgacgucuccgucggcaagaucgucgccgcccucaacgcccgcgccggccgccucgacgucaugucccagaaccccuacaacgccgucauccaccucggccacuccaacggcaccgucucccucuggucccccgccaugaaggagccccucgccaagauccucugccaccgcggcggcguccgcgccgucgccgucgacuccaccggcaccuacauggccaccuccggccucgaccaccagcucaagaucuucgaccuccgcggcaccuaccagccccucuccacccgcacccucccccacggcgccggccaccucgccuucucccagcgcggccuccucgucgccggcaugggcgacgucgucaacaucugggccggccagggcaaggccuccccccccucccucgagcagcccuaccucacccaccgccucuccggccccguccacggccuccaguucugccccuucgaggacguccucggcgucggccacaccggcggcaucaccuccaugcucguccccggcgccggcgagcccaacuucgacggccucgaguccaaccccuaccgcucccgcaagcagcgccaggagugggaggucaaggcccuccucgagaagguccccgccgagcucaucugccucgacccccgcgcccucgccgaggucgacgucaucucccucgagcagggcaagaaggagcagaucgagcgccucggcuacgacccccaggccaaggcccccuuccagcccaagcccaagcagaagggccgcuccuccaccgccucccucgucaagcgcaagcgcaaggucauggacgaggagcaccgcgacaagguccgccagucccuccagcagcagcaccacaaggaggccaaggccaagcccaccggcgcccgccccuccgcccucgaccgcuucguccgcuga

SEQ ID NO: 647 - RNA, 1833 nt, Artificial Sequence
  derived and/or modified sequence opt3 from BING-4__Homo_sapiens__CCDS4772.1
auggagaccgcccccaagccuggcaaagacgugccaccgaagaaagauaagcugcagacaaaaagaaagaagcccaggcgguacugggaagaggaaacugucccuacgaccgcuggggcaagcccaggacccccucgcaacaaaaagaaucgagagcuccguccacaaagacccaaaaacgccuauauccuuaagaaauccaggauuucuaagaagccucagguuccgaaaaagccacgggaauggaaaaaucccgagucacagcgcggucugaguggcacacaggacccuuucccagggcccgcgccugugccaguagaggugguccaaaaguuuugcagaauagauaaaagcaggaaguugccccacuccaaagcuaagacucggucucgcuuagaaguggccgaggcagaagaggaggaaaccucgaucaaggccgcucgaucagagcugcuacucgcagaggaaccgggauuccuggaaggcgaggacggugaggauacagccaaaauuugucaggcugacaucguugaagccguggauauugcgagcgcagccaagcauuuugaccuuaaccugagacaguucgggccuuacagguugaauuauagucggaccggacgucaccucgcuuuuggcggccgcagagggcaugucgccgcacuggauugggugacuaaaaagcugaugugcgagaucaacguaauggaagcuguuagggacauacgguuccuccacuccgaggccuuacuggcgguggcccagaaucgauggcuucauaucuacgauaaccaaggaauugaauugcacuguauccgcagaugcgacagggucacacggcuggaguuucuacccuuccacuuucuccuggcaaccgcuucugagacggguuuccuuacuuaucuggaugugagcgugggcaaaauugucgccgcuuugaaugcccgcgcagggagacucgacguuaugucccagaacccauacaaugccgugauccaucugggacacucaaacggcaccguaaguuuauggagcccugcuaugaaggaaccccuggcgaagauacucugucauagggguggggugcgugcagucgccguggacucuacaggaacuuauauggcuaccuccggccuugaucaccagcugaaaauuuuugacuugcggggcacauaccagccacuaucaacccgaacgcugccccacggggccggacaucucgcauucagccaaagaggucugcuuguugccggcaugggggauguggucaauaucugggcuggacagggcaaggccaguccuccaucucuggagcagccguacuugacucacaggcucuccggucccgugcaugggcugcaauuuugcccuuucgaagacguauuaggcguuggacacacaggcgggauuaccagcaugcuggugccaggagcgggugagcccaacuucgauggccuagaaucgaauccuuaucgcucucggaaacagagacaggagugggaggucaaggcacuccuggaaaaagugccagcugagcuuaucuguuuggaccccagggcccuggcagaagucgaugugaucucccucgagcaggggaagaaggagcaaauugaacgccugggauacgacccgcaggccaaagcuccuuuucagccaaagcccaaacagaagggccgaucaaguacugccagccuuguuaaacggaagcguaaggugauggaugaggaacauagagacaaaguaaggcaaucccugcagcagcagcaccacaaggaggcaaaagcuaagccuacaggugcccgccccucugcguuggaucgguucgucagauga

SEQ ID NO: 648 - RNA, 1833 nt, Artificial Sequence
  derived and/or modified sequence opt4 from BING-4__Homo_sapiens__CCDS4772.1
auggagaccgcccccaagcccggcaaggacgugccccccaagaaggacaagcugcagaccaagagaaagaagcccagaagauacugggaggaggagaccgugcccaccaccgccggcgccagccccggcccccccagaaacaagaagaacagagagcugagaccccagagacccaagaacgccuacauccugaagaagagcagaaucagcaagaagccccaggugcccaagaagcccagagaguggaagaaccccgagagccagagaggccugagcggcacccaggaccccuuccccggccccgcccccgugcccguggagguggugcagaaguucugcagaaucgacaagagcagaaagcugccccacagcaaggccaagaccagaagcagacuggagguggccgaggccgaggaggaggagaccagcaucaaggccgccagaagcgagcugcugcuggccgaggagcccggcuuccuggagggcgaggacggcgaggacaccgccaagaucugccaggccgacaucguggaggccguggacaucgccagcgccgccaagcacuucgaccugaaccugagacaguucggccccuacagacugaacuacagcagaaccggcagacaccuggccuucggcggcagaagaggccacguggccgcccuggacugggugaccaagaagcugaugugcgagaucaacgugauggaggccgugagagacaucagauuccugcacagcgaggcccugcuggccguggcccagaacagauggcugcacaucuacgacaaccagggcaucgagcugcacugcaucagaagaugcgacagagugaccagacuggaguuccugcccuuccacuuccugcuggccaccgccagcgagaccggcuuccugaccuaccuggacgugagcgugggcaagaucguggccgcccugaacgccagagccggcagacuggacgugaugagccagaaccccuacaacgccgugauccaccugggccacagcaacggcaccgugagccuguggagccccgccaugaaggagccccuggccaagauccugugccacagaggcggcgugagagccguggccguggacagcaccggcaccuacauggccaccagcggccuggaccaccagcugaagaucuucgaccugagaggcaccuaccagccccugagcaccagaacccugccccacggcgccggccaccuggccuucagccagagaggccugcugguggccggcaugggcgacguggugaacaucugggccggccagggcaaggccagcccccccagccuggagcagcccuaccugacccacagacugagcggccccgugcacggccugcaguucugccccuucgaggacgugcugggcgugggccacaccggcggcaucaccagcaugcuggugcccggcgccggcgagcccaacuucgacggccuggagagcaaccccuacagaagcagaaagcagagacaggagugggaggugaaggcccugcuggagaaggugcccgccgagcugaucugccuggaccccagagcccuggccgagguggacgugaucagccuggagcagggcaagaaggagcagaucgagagacugggcuacgacccccaggccaaggcccccuuccagcccaagcccaagcagaagggcagaagcagcaccgccagccuggugaagagaaagagaaaggugauggacgaggagcacagagacaaggugagacagagccugcagcagcagcaccacaaggaggccaaggccaagcccaccggcgccagacccagcgcccuggacagauucgugagauga

SEQ ID NO: 649 - RNA, 1833 nt, Artificial Sequence
  derived and/or modified sequence opt5 from BING-4__Homo_sapiens__CCDS4772.1
auggagaccgcccccaagccuggcaaagacgugccgcccaagaaagauaagcugcagacaaaaagaaagaagccucggcgcuacugggaagaggaaacgguccccaccacagcuggggccagcccuggacccccuagaaacaaaaagaaucgggagcuccgcccgcaaagacccaaaaacgcguauauccugaagaaaucccggauuucuaagaagccucagguucccaaaaagccucgcgaauggaaaaaucccgagagccagagaggccuuuccgggacccaggacccguucccuggacccgcuccugugcccguggaggucgugcaaaaguuuugccggaucgauaaaucucgcaagcugccccacagcaaagccaagacaagaucccggcucgaaguugccgaggcugaagaggaggaaaccucuauuaaggccgcucgcagcgagcugcuucuggccgaggaaccuggcuuccucgaaggggaggacggagaggauacagcgaaaaucugucaggccgacauuguggaagcugucgauaucgccuccgcugccaagcauuuugaccugaaccugagacaguucggcccguaccggcucaauuauagccgcaccggcagacaccuggcguuugggggacggagaggccauguggccgcucuugauuggguuacgaaaaagcugaugugcgagaucaacgugauggaagccguccgcgacauucgguuccuccacucugaggcucugcuugccguggcccagaauagauggcugcauaucuacgauaaccaagggauugaacuccacuguauccgccggugcgacagagugacccgccuggaguuucugcccuuccacuuucuccuggcuacagcguccgagaccggauuccuuacauaucuggaugucagcguuggcaaaauuguggccgcucucaaugcccgggccgggagacuggacgugaugucucagaacccuuacaaugcugucauccaucuuggacacuccaacggcaccgugagccuguggucucccgccaugaaggaaccucucgcgaagauucugugucaucgcggcgggguucgggcuguggccgucgacuccacgggaacauauauggccaccagcggccuggaucaccagcucaaaaucuuugaccugagagggacauaccagccccuuuccacccgcacccugccgcacggagcuggccaucucgccuucucucaacgggggcugcuuguggcuggaaugggcgauguugugaauaucugggccggccaggggaaggcgagcccucccucccuggagcagccuuaccucacacacagacugagcggacccguccauggccugcaauuuugcccuuucgaagacgugcucggggucggacacacgggcgggauuaccucuaugcuggugcccggcgccggagagccgaacuucgauggccuugaauccaauccuuaucggagccgcaaacagagacaggagugggagguuaaggcucugcucgaaaaagugcccgccgagcugaucugucuggacccccgggcucuugccgaagucgaugugauuucucucgagcaggggaagaaggagcaaaucgaaagacugggauacgacccucaggcgaaagccccguuucagcccaagccuaaacagaagggccgcagcuccacagcuucucugguuaaacggaagagaaaggugauggaugaggaacaucgcgacaaagucagacaaagccuccagcagcagcaccacaaggaggccaaagcuaagcccaccggggcccggccuuccgcccuggaucgcuucgugagauga

SEQ ID NO: 650 - protein, 298 aa, Artificial Sequence
  BIRC7__Homo_sapiens__Q96CA5
MGPKDSAKCLHRGPQPSHWAAGDGPTQERCGPRSLGSPVLGLDTCRAWDHVDGQILGQLRPLTEEEEEEGAGATLSRGPAFPGMGSEELRLASFYDWPLTAEVPPELLAAAGFFHTGHQDKVRCFFCYGGLQSWKRGDDPWTEHAKWFPSCQFLLRSKGRDFVHSVQETHSQLLGSWDPWEEPEDAAPVAPSVPASGYPELPTPRREVQSESAQEPGGVSPAEAQRAWWVLEPPGARDVEAQLRRLQEERTCKVCLDRAVSIVFVPCGHLVCAECAPGLQLCPICRAPVRSRVRTFLS

SEQ ID NO: 651 - RNA, 897 nt, Artificial Sequence
  BIRC7__Homo_sapiens__AAG37878
augggaccuaaagacagugccaagugccugcaccguggaccacagccgagccacugggcagccggugauggucccacgcaggagcgcuguggaccccgcucucugggcagcccuguccuaggccuggacaccugcagagccugggaccacguggaugggcagauccugggccagcugcggccccugacagaggaggaagaggaggagggcgccggggccaccuuguccagggggccugccuuccccggcaugggcucugaggaguugcgucuggccuccuucuaugacuggccgcugacugcugaggugccacccgagcugcuggcugcugccggcuucuuccacacaggccaucaggacaaggugaggugcuucuucugcuaugggggccugcagagcuggaagcgcggggacgaccccuggacggagcaugccaagugguuccccagcugucaguuccugcuccggucaaaaggaagagacuuuguccacagugugcaggagacucacucccagcugcugggcucuugggacccgugggaagaaccggaagacgcagccccuguggcccccuccgucccugccucuggguacccugagcugcccacacccaggagagagguccagucugaaagugcccaggagccaggaggggucaguccagccgaggcccagagggcgugguggguucuugagcccccaggagccagggauguggaggcgcagcugcggcggcugcaggaggagaggacgugcaaggugugccuggaccgcgccguguccaucgucuuugugccgugcggccaccuggucugugcugagugugcccccggccugcagcugugccccaucugcagagcccccguccgcagccgcgugcgcaccuuccuguccuag

SEQ ID NO: 652 - RNA, 897 nt, Artificial Sequence
  derived and/or modified sequence opt1 from BIRC7__Homo_sapiens__AAG37878
augggccccaaggacagcgccaagugccugcaccgcgggccgcagcccucccacugggccgcgggcgacgggcccacccaggagcggugcggcccccgcagccucggguccccggugcugggccuggacacgugccgggccugggaccacgucgacggccagauccucgggcagcugcgcccccugaccgaggaggaggaggaggagggcgccggggccacccucagccggggccccgccuuccccgggaugggcuccgaggagcugcgccuggcgagcuucuacgacuggccgcucaccgccgaggugccgcccgagcugcuggccgccgcgggcuucuuccacaccgggcaccaggacaaggugcggugcuucuucugcuacggcgggcuccaguccuggaagcgcggcgacgaccccuggacggagcacgccaagugguuccccagcugccaguuccugcugcgguccaagggccgcgacuucguccacagcgugcaggagacccacucccagcuccuggggagcugggaccccugggaggagcccgaggacgccgcccccguggccccguccguccccgcgagcggcuaccccgagcugcccaccccgcggcgcgaggugcaguccgagagcgcccaggagcccgggggcgugucccccgccgaggcccagcgggccugguggguccucgagcccccgggggcgcgcgacguggaggcccagcugcggcgccugcaggaggagcggaccugcaaggugugccucgaccgcgccgucagcaucguguucgugcccugcggccaccuggucugcgccgagugcgcccccggccugcagcucugccccaucugccgggcgccggugcgcucccgggugcgcacguuccugagcuga

SEQ ID NO: 653 - RNA, 897 nt, Artificial Sequence
  derived and/or modified sequence opt2 from BIRC7__Homo_sapiens__AAG37878
augggccccaaggacuccgccaagugccuccaccgcggcccccagcccucccacugggccgccggcgacggccccacccaggagcgcugcggcccccgcucccucggcucccccguccucggccucgacaccugccgcgccugggaccacgucgacggccagauccucggccagcuccgcccccucaccgaggaggaggaggaggagggcgccggcgccacccucucccgcggccccgccuuccccggcaugggcuccgaggagcuccgccucgccuccuucuacgacuggccccucaccgccgaggucccccccgagcuccucgccgccgccggcuucuuccacaccggccaccaggacaagguccgcugcuucuucugcuacggcggccuccaguccuggaagcgcggcgacgaccccuggaccgagcacgccaagugguuccccuccugccaguuccuccuccgcuccaagggccgcgacuucguccacuccguccaggagacccacucccagcuccucggcuccugggaccccugggaggagcccgaggacgccgcccccgucgcccccuccguccccgccuccggcuaccccgagcuccccaccccccgccgcgagguccaguccgaguccgcccaggagcccggcggcgucucccccgccgaggcccagcgcgccugguggguccucgagccccccggcgcccgcgacgucgaggcccagcuccgccgccuccaggaggagcgcaccugcaaggucugccucgaccgcgccgucuccaucgucuucguccccugcggccaccucgucugcgccgagugcgcccccggccuccagcucugccccaucugccgcgcccccguccgcucccgcguccgcaccuuccucuccuga

SEQ ID NO: 654 - RNA, 897 nt, Artificial Sequence
  derived and/or modified sequence opt3 from BIRC7__Homo_sapiens__AAG37878
augggccccaaggacagcgccaaaugccugcacagagggccucagccaucccauugggcugcaggagaugguccgacccaagagagguguggcccccggucucucgggucaccugugcuuggacuggacacaugccgcgccugggaucacgucgacggccagaucuugggucaguuacgaccacugacugaagaggaagaggaagagggggcgggagcuacgcuaagucguggccccgccuucccuggcauggggagcgaggaacucagacuggcauccuuuuacgauuggccacuuaccgccgagguucccccugaacuguuggcugcagccggauucuuucauacaggucaccaggacaaggugagguguuucuuuugcuauggcgggcuccaaucuuggaaacggggagaugacccauggacugagcaugcuaagugguucccgucgugucaguuucugcugcgcucaaaaggcagagauuucguacacagcgugcaggagacccacagucagcucuuagguuccugggaccccugggaggaaccugaagaugccgcgccagucgcacccucugugccugccagcggguacccagagcugcccacaccgaggcgggaaguucaauccgagucagcucaggagccuggaggcgugagucccgccgaagcacagcgcgcuugguggguccuugagccaccuggcgcccgagacguggaagcgcaguugagaaggcugcaagaggaacggaccugcaagguaugucuagaucgugccguuagcauuguguuuguccccugcgggcaucucgugugugcagagugcgcuccaggacugcagcuuugucccauaugccgcgccccugugagaucuaggguccggacuuuccuguccuga

SEQ ID NO: 655 - RNA, 897 nt, Artificial Sequence
  derived and/or modified sequence opt4 from BIRC7__Homo_sapiens__AAG37878
augggccccaaggacagcgccaagugccugcacagaggcccccagcccagccacugggccgccggcgacggccccacccaggagagaugcggccccagaagccugggcagccccgugcugggccuggacaccugcagagccugggaccacguggacggccagauccugggccagcugagaccccugaccgaggaggaggaggaggagggcgccggcgccacccugagcagaggccccgccuuccccggcaugggcagcgaggagcugagacuggccagcuucuacgacuggccccugaccgccgaggugccccccgagcugcuggccgccgccggcuucuuccacaccggccaccaggacaaggugagaugcuucuucugcuacggcggccugcagagcuggaagagaggcgacgaccccuggaccgagcacgccaagugguuccccagcugccaguuccugcugagaagcaagggcagagacuucgugcacagcgugcaggagacccacagccagcugcugggcagcugggaccccugggaggagcccgaggacgccgcccccguggcccccagcgugcccgccagcggcuaccccgagcugcccacccccagaagagaggugcagagcgagagcgcccaggagcccggcggcgugagccccgccgaggcccagagagccuggugggugcuggagccccccggcgccagagacguggaggcccagcugagaagacugcaggaggagagaaccugcaaggugugccuggacagagccgugagcaucguguucgugcccugcggccaccuggugugcgccgagugcgcccccggccugcagcugugccccaucugcagagcccccgugagaagcagagugagaaccuuccugagcuga

SEQ ID NO: 656 - RNA, 897 nt, Artificial Sequence
  derived and/or modified sequence opt5 from BIRC7__Homo_sapiens__AAG37878
augggccccaaggacagcgccaaaugccugcacagagggccucagccgucccauugggcugccggagauggccccacccaagagcggugugggccucgcucucucggaagccccgugcugggccuugacacaugcagagcgugggaucacgucgacgggcagauccugggacagcuccggccucugacggaagaggaagaggaagagggcgcuggcgccacccuuucccgcgggcccgccuucccuggaaugggcucugaggaacugagacucgcuagcuuuuacgauuggccgcugacagccgagguucccccugaacugcucgcugccgcgggguucuuucauaccggacaccaggacaaggugcgguguuucuuuugcuauggcgggcugcaauccuggaaacgcggagaugaccccuggacagagcaugccaagugguucccuucuugucaguuucuucugagaagcaaaggccgggauuucgugcacuccguccaggagacccacagccagcuccugggcucuugggaccccugggaggaaccggaagaugcugccccuguggcucccuccguuccugccagcggguaccccgagcuucccacaccucgcagagaagugcaaucugaguccgcgcaggagccgggaggcgucagccccgccgaagcucagcgggccuggugggugcuggagccucccggggcucgcgacguugaagcccagcucagacggcugcaagaggaaagaaccugcaaggugugucuggaucgcgccgucucuauuguguuugugccuugcggacaucucgucugugcugagugcgcgcccggccugcagcuuuguccgaucugccgggccccuguuagaucccgcgugcggacguuccugagcuga

SEQ ID NO: 657 - protein, 759 aa, Artificial Sequence
  BRCA1/m__Homo_sapiens__A0A024R1V0
MDLSALRVEEVQNVINAMQKILECPICLELIKEPVSTKCDHIFCKFCMLKLLNQKKGPSQCPLCKNDITKRSLQESTRFSQLVEELLKIICAFQLDTGLEYANSYNFAKKENNSPEHLKDEVSIIQSMGYRNRAKRLLQSEPENPSLQETSLSVQLSNLGTVRTLRTKQRIQPQKTSVYIELGSDSSEDTVNKATYCSVGDQELLQITPQGTRDEISLDSAKKAACEFSETDVTNTEHHQPSNNDLNTTEKRAAERHPEKYQGEAASGCESETSVSEDCSGLSSQSDILTTQQRDTMQHNLIKLQQEMAELEAVLEQHGSQPSNSYPSIISDSSALEDLRNPEQSTSEKVLTSQKSSEYPISQNPEGLSADKFEVSADSSTSKNKEPGVERSSPSKCPSLDDRWYMHSCSGSLQNRNYPSQEELIKVVDVEEQQLEESGPHDLTETSYLPRQDLEGTPYLESGISLFSDDPESDPSEDRAPESARVGNIPSSTSALKVPQLKVAESAQSPAAAHTTDTAGYNAMEESVSREKPELTASTERVNKRMSMVVSGLTPEEFMLVYKFARKHHITLTNLITEETTHVVMKTDAEFVCERTLKYFLGIAGGKWVVSYFWVTQSIKERKMLNEHDFEVRGDVVNGRNHQGPKRARESQDRKIFRGLEICCYGPFTNMPTDQLEWMVQLCGASVVKELSSFTLGTGVHPIVVVQPDAWTEDNGFHAIGQMCEAPVVTREWVLDSVALYQCQELDTYLIPQIPHSHY

SEQ ID NO: 658 - RNA, 2280 nt, Artificial Sequence
  BRCA1/m__Homo_sapiens__EAW60925
auggauuuaucugcucuucgcguugaagaaguacaaaaugucauuaaugcuaugcagaaaaucuuagagugucccaucugucuggaguugaucaaggaaccugucuccacaaagugugaccacauauuuugcaaauuuugcaugcugaaacuucucaaccagaagaaagggccuucacaguguccuuuauguaagaaugauauaaccaaaaggagccuacaagaaaguacgagauuuagucaacuuguugaagagcuauugaaaaucauuugugcuuuucagcuugacacagguuuggaguaugcaaacagcuauaauuuugcaaaaaaggaaaauaacucuccugaacaucuaaaagaugaaguuucuaucauccaaaguaugggcuacagaaaccgugccaaaagacuucuacagagugaacccgaaaauccuuccuugcaggaaaccagucucaguguccaacucucuaaccuuggaacugugagaacucugaggacaaagcagcggauacaaccucaaaagacgucugucuacauugaauugggaucugauucuucugaagauaccguuaauaaggcaacuuauugcagugugggagaucaagaauuguuacaaaucaccccucaaggaaccagggaugaaaucaguuuggauucugcaaaaaaggcugcuugugaauuuucugagacggauguaacaaauacugaacaucaucaacccaguaauaaugauuugaacaccacugagaagcgugcagcugagaggcauccagaaaaguaucagggugaagcagcaucugggugugagagugaaacaagcgucucugaagacugcucagggcuauccucucagagugacauuuuaaccacucagcagagggauaccaugcaacauaaccugauaaagcuccagcaggaaauggcugaacuagaagcuguguuagaacagcaugggagccagccuucuaacagcuacccuuccaucauaagugacucuucugcccuugaggaccugcgaaauccagaacaaagcacaucagaaaaaguauuaacuucacagaaaaguagugaauacccuauaagccagaauccagaaggccuuucugcugacaaguuugaggugucugcagauaguucuaccaguaaaaauaaagaaccaggaguggaaaggucauccccuucuaaaugcccaucauuagaugauaggugguacaugcacaguugcucugggagucuucagaauagaaacuacccaucucaagaggagcucauuaagguuguugauguggaggagcaacagcuggaagagucugggccacacgauuugacggaaacaucuuacuugccaaggcaagaucuagagggaaccccuuaccuggaaucuggaaucagccucuucucugaugacccugaaucugauccuucugaagacagagccccagagucagcucguguuggcaacauaccaucuucaaccucugcauugaaaguuccccaauugaaaguugcagaaucugcccagaguccagcugcugcucauacuacugauacugcuggguauaaugcaauggaagaaagugugagcagggagaagccagaauugacagcuucaacagaaagggucaacaaaagaauguccaugguggugucuggccugaccccagaagaauuuaugcucguguacaaguuugccagaaaacaccacaucacuuuaacuaaucuaauuacugaagagacuacucauguuguuaugaaaacagaugcugaguuugugugugaacggacacugaaauauuuucuaggaauugcgggaggaaaauggguaguuagcuauuucugggugacccagucuauuaaagaaagaaaaaugcugaaugagcaugauuuugaagucagaggagauguggucaauggaagaaaccaccaagguccaaagcgagcaagagaaucccaggacagaaagaucuucagggggcuagaaaucuguugcuaugggcccuucaccaacaugcccacagaucaacuggaauggaugguacagcuguguggugcuucuguggugaaggagcuuucaucauucacccuuggcacagguguccacccaauugugguugugcagccagaugccuggacagaggacaauggcuuccaugcaauugggcagaugugugaggcaccuguggugacccgagaguggguguuggacaguguagcacucuaccagugccaggagcuggacaccuaccugauaccccagaucccccacagccacuacuga

SEQ ID NO: 659 - RNA, 2280 nt, Artificial Sequence
  derived and/or modified sequence opt1 from BRCA1/m__Homo_sapiens__EAW60925
auggaccugagcgcccuccgcguggaggagguccagaacgugaucaacgccaugcagaagauccuggagugccccaucugccuggagcucaucaaggagccgguguccaccaagugcgaccacaucuucugcaaguucugcaugcugaagcugcucaaccagaagaagggccccagccagugcccccugugcaagaacgacaucaccaagcggucccugcaggagagcacgcgcuucucccagcucgucgaggagcugcugaagaucaucugcgcguuccagcucgacaccgggcuggaguacgccaacagcuacaacuucgccaagaaggagaacaacucccccgagcaccugaaggacgaggugagcaucauccaguccaugggcuaccggaaccgcgccaagcggcuccugcagagcgagccggagaaccccucccugcaggagaccagccucuccgugcagcugagcaaccuggggaccguccgcacgcuccggaccaagcagcgcauccagccccagaagaccuccguguacaucgagcugggcagcgacuccagcgaggacaccgugaacaaggccacguacugcuccgucggggaccaggagcugcuccagaucacgccccagggcacccgggacgagaucagccuggacagcgcgaagaaggccgccugcgaguucuccgagaccgacgugaccaacaccgagcaccaccagccgagcaacaacgaccugaacaccaccgagaagcgcgccgcggagcggcaccccgagaaguaccagggcgaggccgccuccgggugcgagagcgagacguccgugagcgaggacugcuccggccucagcucccagagcgacauccugaccacccagcagcgcgacaccaugcagcacaaccugaucaagcuccagcaggagauggccgagcuggaggccguccuggagcagcacgggucccagcccagcaacuccuaccccagcaucaucuccgacagcuccgcgcucgaggaccugcggaacccggagcagagcacguccgagaaggugcugaccagccagaaguccagcgaguaccccaucagccagaaccccgagggccucuccgccgacaaguucgaggugagcgccgacuccagcaccuccaagaacaaggagcccggggucgagcgcagcuccccgagcaagugccccucccuggacgaccggugguacaugcacagcugcuccggcagccugcagaaccgcaacuaccccucccaggaggagcucaucaaggugguggacgucgaggagcagcagcuggaggagagcggcccccacgaccugaccgagacguccuaccucccgcggcaggaccuggaggggacccccuaccuggagagcggcaucagccucuucuccgacgaccccgagagcgaccccuccgaggaccgcgccccggagagcgcccggguggggaacauccccuccagcaccuccgcgcugaaggugccccagcugaaggucgccgagagcgcccagucccccgccgccgcgcacaccacggacaccgccggcuacaacgccauggaggagagcgugucccgcgagaagccggagcucaccgccagcaccgagcgggugaacaagcgcauguccauggucgugagcggccugacgcccgaggaguucaugcuggucuacaaguucgcccgcaagcaccacaucacccugaccaaccucaucaccgaggagacgacccacguggugaugaagaccgacgcggaguucgucugcgagcggacccugaaguacuuccuggggaucgccggcgggaagugggugguguccuacuucugggucacccagagcaucaaggagcgcaagaugcucaacgagcacgacuucgaggugcggggcgacguggucaacgggcgcaaccaccagggccccaagcgggcccgcgagucccaggaccggaagaucuuccgcggccuggagaucugcugcuacgggccguucacgaacaugcccaccgaccagcuggaguggauggugcagcucugcggcgccagcguggucaaggagcuguccagcuucacccuggggaccggcgugcaccccaucguggucgugcagcccgacgcguggacggaggacaacggguuccacgccaucggccagaugugcgaggccccgguggucacccgggagugggugcucgacagcguggcccuguaccagugccaggagcuggacaccuaccucaucccccagaucccccacucccacuacuga

SEQ ID NO: 660 - RNA, 2280 nt, Artificial Sequence
  derived and/or modified sequence opt2 from BRCA1/m__Homo_sapiens__EAW60925
auggaccucuccgcccuccgcgucgaggagguccagaacgucaucaacgccaugcagaagauccucgagugccccaucugccucgagcucaucaaggagcccgucuccaccaagugcgaccacaucuucugcaaguucugcaugcucaagcuccucaaccagaagaagggccccucccagugcccccucugcaagaacgacaucaccaagcgcucccuccaggaguccacccgcuucucccagcucgucgaggagcuccucaagaucaucugcgccuuccagcucgacaccggccucgaguacgccaacuccuacaacuucgccaagaaggagaacaacucccccgagcaccucaaggacgaggucuccaucauccaguccaugggcuaccgcaaccgcgccaagcgccuccuccaguccgagcccgagaaccccucccuccaggagaccucccucuccguccagcucuccaaccucggcaccguccgcacccuccgcaccaagcagcgcauccagccccagaagaccuccgucuacaucgagcucggcuccgacuccuccgaggacaccgucaacaaggccaccuacugcuccgucggcgaccaggagcuccuccagaucaccccccagggcacccgcgacgagaucucccucgacuccgccaagaaggccgccugcgaguucuccgagaccgacgucaccaacaccgagcaccaccagcccuccaacaacgaccucaacaccaccgagaagcgcgccgccgagcgccaccccgagaaguaccagggcgaggccgccuccggcugcgaguccgagaccuccgucuccgaggacugcuccggccucuccucccaguccgacauccucaccacccagcagcgcgacaccaugcagcacaaccucaucaagcuccagcaggagauggccgagcucgaggccguccucgagcagcacggcucccagcccuccaacuccuaccccuccaucaucuccgacuccuccgcccucgaggaccuccgcaaccccgagcaguccaccuccgagaagguccucaccucccagaaguccuccgaguaccccaucucccagaaccccgagggccucuccgccgacaaguucgaggucuccgccgacuccuccaccuccaagaacaaggagcccggcgucgagcgcuccucccccuccaagugccccucccucgacgaccgcugguacaugcacuccugcuccggcucccuccagaaccgcaacuaccccucccaggaggagcucaucaaggucgucgacgucgaggagcagcagcucgaggaguccggcccccacgaccucaccgagaccuccuaccucccccgccaggaccucgagggcacccccuaccucgaguccggcaucucccucuucuccgacgaccccgaguccgaccccuccgaggaccgcgcccccgaguccgcccgcgucggcaacauccccuccuccaccuccgcccucaaggucccccagcucaaggucgccgaguccgcccagucccccgccgccgcccacaccaccgacaccgccggcuacaacgccauggaggaguccgucucccgcgagaagcccgagcucaccgccuccaccgagcgcgucaacaagcgcauguccauggucgucuccggccucacccccgaggaguucaugcucgucuacaaguucgcccgcaagcaccacaucacccucaccaaccucaucaccgaggagaccacccacgucgucaugaagaccgacgccgaguucgucugcgagcgcacccucaaguacuuccucggcaucgccggcggcaagugggucgucuccuacuucugggucacccaguccaucaaggagcgcaagaugcucaacgagcacgacuucgagguccgcggcgacgucgucaacggccgcaaccaccagggccccaagcgcgcccgcgagucccaggaccgcaagaucuuccgcggccucgagaucugcugcuacggccccuucaccaacaugcccaccgaccagcucgaguggaugguccagcucugcggcgccuccgucgucaaggagcucuccuccuucacccucggcaccggcguccaccccaucgucgucguccagcccgacgccuggaccgaggacaacggcuuccacgccaucggccagaugugcgaggcccccgucgucacccgcgaguggguccucgacuccgucgcccucuaccagugccaggagcucgacaccuaccucaucccccagaucccccacucccacuacuga

SEQ ID NO: 661 - RNA, 2280 nt, Artificial Sequence
  derived and/or modified sequence opt3 from BRCA1/m__Homo_sapiens__EAW60925
auggaccugagcgcccucagaguggaggaaguccagaacguuaucaaugcuaugcaaaagauucuugagugccccauaugucuggaauugaucaaagagccuguguccaccaagugcgaucacauuuucuguaaauuuugcauguuaaagcugcuaaaccagaaaaagggcccaucucaguguccgcucugcaagaaugacaucacaaaaaggucacugcaggaaaguacucgguucagccaacuuguagaggagcuguugaagauuaucugugcauuucagcucgauacggggcuggaauacgccaacuccuauaauuucgcgaaaaaggagaacaauucucccgaacaucugaaagacgaggugucgauaauccagucaaugggauaccgcaaccgagcuaagcgucucuuacagagcgagccugaaaauccaagucugcaagagaccucccuuucuguccaguugagcaaccuggguacagugagaacucuaaggaccaagcagcggauucagccccagaaaacauccguuuauaucgaacucggcucagauaguagcgaggacaccgugaauaaggccacuuacugcucugucggggaucaagaacugcuucagauuacaccucaaggaacccgcgacgagaucucccuggauucagcgaaaaaggccgcuugugaguuuagcgaaacggacgugacuaacaccgagcaccaucagccaaguaauaacgauuugaauacaacugagaaaagagcagccgagaggcaccccgaaaaguaucagggcgaggcugccucugguugcgaguccgaaaccagcguaucggaggacuguucugggcucuccucacagagugauauacugacaacccaacagcgggacacgaugcagcauaacuuaauuaaacugcagcaagaaauggcggagcucgaagcaguucuugagcagcacggaagccagccuuccaacucuuacccaagcaucauuucagacaguuccgcccuggaggauuugcgcaauccggaacagagcacuucugagaaggugcuaacaucacaaaagaguagcgaauaucccaucucccagaacccugagggccugucugcugacaaauucgaggucucggccgauagcuccaccucaaagaauaaagaaccaggcguggagcgaaguucucccagcaagugcccuucccucgacgauagaugguacaugcacucaugcagcgggucucugcagaacaggaauuacccaucccaggaagaacuuaucaaaguggucgacguugaagaacaacagcuggaggaaaguggaccccaugauuugacugagacaagcuaucucccgcggcaggaccuggaagguaccccuuacuuagagucuggcauuucccuguuuucagaugaccccgaaagugauccaagcgaggaccgugcaccugagucggcucgcguggggaacauacccuccucuacgagcgcccuaaagguaccacaacucaagguggcggaaucagcccagagucccgcagcugcccacaccacagacacugcuggauauaaugccauggaggaauccgucucuagagagaaaccugaacugaccgcaagcacagagagggugaacaagcggauguccaugguugugucaggccuuacuccagaggaguucauguuggucuacaaauuugcccgaaagcaucacaucacccugacaaaucucauuaccgaggaaacuacgcacgugguaaugaaaacagaugcugaguucguuugugagcgcacccugaaguauuuucuugguaucgcagggggaaaguggguggucagcuacuucugggugacucagaguauaaaagaaagaaagaugcugaacgagcaugacuuugaagucaggggcgaugugguuaauggccggaaccaccaggggccgaaacgcgcaagagagucucaagacaggaagauuuuccguggauuggaaaucugcuguuauggucccuucaccaauaugccuacagaucagcucgaguggauggugcagcugugcggcgccuccguagucaaagaguuaagcucguuuacccuggggacuggagugcauccaaucguugugguccagcccgacgcuuggacagaagauaacggcuuccacgccauuggucaaaugugugaggcaccugugguaacgcgggaaugggugcuagacucaguugcccucuaccagugccaggagcuggauaccuaccuuaucccacagauuccccauucucacuauuga

SEQ ID NO: 662 - RNA, 2280 nt, Artificial Sequence
  derived and/or modified sequence opt4 from BRCA1/m__Homo_sapiens__EAW60925
auggaccugagcgcccugagaguggaggaggugcagaacgugaucaacgccaugcagaagauccuggagugccccaucugccuggagcugaucaaggagcccgugagcaccaagugcgaccacaucuucugcaaguucugcaugcugaagcugcugaaccagaagaagggccccagccagugcccccugugcaagaacgacaucaccaagagaagccugcaggagagcaccagauucagccagcugguggaggagcugcugaagaucaucugcgccuuccagcuggacaccggccuggaguacgccaacagcuacaacuucgccaagaaggagaacaacagccccgagcaccugaaggacgaggugagcaucauccagagcaugggcuacagaaacagagccaagagacugcugcagagcgagcccgagaaccccagccugcaggagaccagccugagcgugcagcugagcaaccugggcaccgugagaacccugagaaccaagcagagaauccagccccagaagaccagcguguacaucgagcugggcagcgacagcagcgaggacaccgugaacaaggccaccuacugcagcgugggcgaccaggagcugcugcagaucaccccccagggcaccagagacgagaucagccuggacagcgccaagaaggccgccugcgaguucagcgagaccgacgugaccaacaccgagcaccaccagcccagcaacaacgaccugaacaccaccgagaagagagccgccgagagacaccccgagaaguaccagggcgaggccgccagcggcugcgagagcgagaccagcgugagcgaggacugcagcggccugagcagccagagcgacauccugaccacccagcagagagacaccaugcagcacaaccugaucaagcugcagcaggagauggccgagcuggaggccgugcuggagcagcacggcagccagcccagcaacagcuaccccagcaucaucagcgacagcagcgcccuggaggaccugagaaaccccgagcagagcaccagcgagaaggugcugaccagccagaagagcagcgaguaccccaucagccagaaccccgagggccugagcgccgacaaguucgaggugagcgccgacagcagcaccagcaagaacaaggagcccggcguggagagaagcagccccagcaagugccccagccuggacgacagaugguacaugcacagcugcagcggcagccugcagaacagaaacuaccccagccaggaggagcugaucaaggugguggacguggaggagcagcagcuggaggagagcggcccccacgaccugaccgagaccagcuaccugcccagacaggaccuggagggcacccccuaccuggagagcggcaucagccuguucagcgacgaccccgagagcgaccccagcgaggacagagcccccgagagcgccagagugggcaacauccccagcagcaccagcgcccugaaggugccccagcugaagguggccgagagcgcccagagccccgccgccgcccacaccaccgacaccgccggcuacaacgccauggaggagagcgugagcagagagaagcccgagcugaccgccagcaccgagagagugaacaagagaaugagcaugguggugagcggccugacccccgaggaguucaugcugguguacaaguucgccagaaagcaccacaucacccugaccaaccugaucaccgaggagaccacccacguggugaugaagaccgacgccgaguucgugugcgagagaacccugaaguacuuccugggcaucgccggcggcaaguggguggugagcuacuucugggugacccagagcaucaaggagagaaagaugcugaacgagcacgacuucgaggugagaggcgacguggugaacggcagaaaccaccagggccccaagagagccagagagagccaggacagaaagaucuucagaggccuggagaucugcugcuacggccccuucaccaacaugcccaccgaccagcuggaguggauggugcagcugugcggcgccagcguggugaaggagcugagcagcuucacccugggcaccggcgugcaccccaucgugguggugcagcccgacgccuggaccgaggacaacggcuuccacgccaucggccagaugugcgaggcccccguggugaccagagagugggugcuggacagcguggcccuguaccagugccaggagcuggacaccuaccugaucccccagaucccccacagccacuacuga

SEQ ID NO: 663 - RNA, 2280 nt, Artificial Sequence
  derived and/or modified sequence opt5 from BRCA1/m__Homo_sapiens__EAW60925
auggaccugagcgcccucagaguggaggaaguccagaacguuaucaaugcuaugcaaaagauucuggagugccccaucugucuugaacugauuaaagagccuguguccaccaagugcgaucacaucuucuguaaauuuugcaugcucaagcugcuuaaccagaaaaagggcccgucucaguguccccugugcaagaaugacauuacaaaacggagccuccaggaauccacgcgcuucucucaacugguggaggagcugcucaagaucaucugugccuuucagcuggauaccgggcuugaauacgcgaacagcuauaauuucgcuaaaaaggagaacaauuccccugaacaucugaaagacgaggucucuauuauccagagcaugggauacagaaaccgggccaagcgccuccugcaguccgagcccgaaaauccuagccuucaagagacaucucuguccgugcagcucagcaaccugggcaccguuagaacacugcggaccaagcagcgcauucagccccagaaaacaucuguguauaucgaacucggguccgauagcucugaggacaccgucaauaaggccacguacugcuccgugggagaucaagaacugcuucagauuaccccucaaggcacaagagacgagaucagccuggauuccgcuaaaaaggccgcuugugaguuuucugaaaccgacguuacaaacaccgagcaccaucagccgagcaauaacgaucucaauacgacagaaaaacgggccgcggagcgccaccccgaaaaguaucagggggaggccgcuuccggaugcgagagcgaaaccucuguguccgaggacuguagcggccugucuagccaguccgauauucuuacaacccaacagagagacaccaugcagcauaaccugaucaaacuccagcaagaaauggccgagcuggaagcuguccuggagcagcacggcucucagccuagcaacuccuaccccagcaucauuucugacuccagcgcccucgaggaucugcggaauccugaacagucuacauccgagaaggugcuuacgagccaaaaguccucugaauaucccaucagccagaacccggaggggcuguccgcggacaaauucgaggugucugccgauagcuccaccagcaagaauaaagaaccuggagucgagagaucuucccccagcaagugcccuucucucgacgaucgcugguacaugcacuccugcagcggcucucugcagaaccggaauuaccccagccaggaagaacuuauuaaaguuguggacguggaggagcaacagcuggaggaauccgggccccaugaucucacagagaccagcuaucugccucgccaggaccuggaaggaacaccguaccucgagucuggcaucucccuguuuagcgaugaccccgaauccgauccuucugaggacagagcucccgagagcgcccgggucgggaacauuccuuccucuaccagcgcucuuaaggugccccaacugaagguugccgaauccgcccagucuccggcugcggcccacacgacagacaccgcuggauauaaugccauggaggaaagcguguccagagagaaaccugaacucaccgccagcacagagcgcgucaacaagcggaugucuauggugguuuccggccugacccccgaggaguucaugcugguguacaaauuugcuagaaagcaucacaucacacuuacgaaucucaucaccgaagaaacaacccacgucgugaugaaaacagaugccgaguucgucugugagcgcacccugaaguauuuucugggcauugcugggggaaagugggugguuagcuacuucugggugacgcagucuaucaaagaacggaagaugcucaacgagcaugacuuugaagucagaggcgaugugguuaaugggcgcaaccaccagggaccuaaacgggcgagagagucccaagaccgcaagauuuuccggggccuggaaaucugcuguuaugggcccuucaccaauaugccuacagaucagcuugaguggauggugcagcugugcggagccagcgucgugaaagagcucucuuccuuuacccugggcacaggcgugcaucccauuguugucgugcagccggacgccuggaccgaagauaacggguuccacgcuaucggacaaaugugugaggccccuguggucacgagagaaugggugcuggacagcguugcucuuuaccagugccaggagcucgauacauaccugaucccccagauuccccauucccacuauuga

SEQ ID NO: 664 - protein, 719 aa, Artificial Sequence
  BRCA1/m__Homo_sapiens__A0A024R1V7
MDLSALRVEEVQNVINAMQKILECPICLELIKEPVSTKCDHIFCKFCMLKLLNQKKGPSQCPLCKNDITKRSLQESTRFSQLVEELLKIICAFQLDTGLEYANSYNFAKKENNSPEHLKDEVSIIQSMGYRNRAKRLLQSEPENPSLQETSLSVQLSNLGTVRTLRTKQRIQPQKTSVYIELAACEFSETDVTNTEHHQPSNNDLNTTEKRAAERHPEKYQGEAASGCESETSVSEDCSGLSSQSDILTTQQRDTMQHNLIKLQQEMAELEAVLEQHGSQPSNSYPSIISDSSALEDLRNPEQSTSEKAVLTSQKSSEYPISQNPEGLSADKFEVSADSSTSKNKEPGVERSSPSKCPSLDDRWYMHSCSGSLQNRNYPSQEELIKVVDVEEQQLEESGPHDLTETSYLPRQDLEGTPYLESGISLFSDDPESDPSEDRAPESARVGNIPSSTSALKVPQLKVAESAQSPAAAHTTDTAGYNAMEESVSREKPELTASTERVNKRMSMVVSGLTPEEFMLVYKFARKHHITLTNLITEETTHVVMKTDAEFVCERTLKYFLGIAGGKWVVSYFWVTQSIKERKMLNEHDFEVRGDVVNGRNHQGPKRARESQDRKIFRGLEICCYGPFTNMPTDQLEWMVQLCGASVVKELSSFTLGTGVHPIVVVQPDAWTEDNGFHAIGQMCEAPVVTREWVLDSVALYQCQELDTYLIPQIPHSHY

SEQ ID NO: 665 - RNA, 2160 nt, Artificial Sequence
  BRCA1/m__Homo_sapiens__EAW60922
auggauuuaucugcucuucgcguugaagaaguacaaaaugucauuaaugcuaugcagaaaaucuuagagugucccaucugucuggaguugaucaaggaaccugucuccacaaagugugaccacauauuuugcaaauuuugcaugcugaaacuucucaaccagaagaaagggccuucacaguguccuuuauguaagaaugauauaaccaaaaggagccuacaagaaaguacgagauuuagucaacuuguugaagagcuauugaaaaucauuugugcuuuucagcuugacacagguuuggaguaugcaaacagcuauaauuuugcaaaaaaggaaaauaacucuccugaacaucuaaaagaugaaguuucuaucauccaaaguaugggcuacagaaaccgugccaaaagacuucuacagagugaacccgaaaauccuuccuugcaggaaaccagucucaguguccaacucucuaaccuuggaacugugagaacucugaggacaaagcagcggauacaaccucaaaagacgucugucuacauugaauuggcugcuugugaauuuucugagacggauguaacaaauacugaacaucaucaacccaguaauaaugauuugaacaccacugagaagcgugcagcugagaggcauccagaaaaguaucagggugaagcagcaucugggugugagagugaaacaagcgucucugaagacugcucagggcuauccucucagagugacauuuuaaccacucagcagagggauaccaugcaacauaaccugauaaagcuccagcaggaaauggcugaacuagaagcuguguuagaacagcaugggagccagccuucuaacagcuacccuuccaucauaagugacucuucugcccuugaggaccugcgaaauccagaacaaagcacaucagaaaaagcaguauuaacuucacagaaaaguagugaauacccuauaagccagaauccagaaggccuuucugcugacaaguuugaggugucugcagauaguucuaccaguaaaaauaaagaaccaggaguggaaaggucauccccuucuaaaugcccaucauuagaugauaggugguacaugcacaguugcucugggagucuucagaauagaaacuacccaucucaagaggagcucauuaagguuguugauguggaggagcaacagcuggaagagucugggccacacgauuugacggaaacaucuuacuugccaaggcaagaucuagagggaaccccuuaccuggaaucuggaaucagccucuucucugaugacccugaaucugauccuucugaagacagagccccagagucagcucguguuggcaacauaccaucuucaaccucugcauugaaaguuccccaauugaaaguugcagaaucugcccagaguccagcugcugcucauacuacugauacugcuggguauaaugcaauggaagaaagugugagcagggagaagccagaauugacagcuucaacagaaagggucaacaaaagaauguccaugguggugucuggccugaccccagaagaauuuaugcucguguacaaguuugccagaaaacaccacaucacuuuaacuaaucuaauuacugaagagacuacucauguuguuaugaaaacagaugcugaguuugugugugaacggacacugaaauauuuucuaggaauugcgggaggaaaauggguaguuagcuauuucugggugacccagucuauuaaagaaagaaaaaugcugaaugagcaugauuuugaagucagaggagauguggucaauggaagaaaccaccaagguccaaagcgagcaagagaaucccaggacagaaagaucuucagggggcuagaaaucuguugcuaugggcccuucaccaacaugcccacagaucaacuggaauggaugguacagcuguguggugcuucuguggugaaggagcuuucaucauucacccuuggcacagguguccacccaauugugguugugcagccagaugccuggacagaggacaauggcuuccaugcaauugggcagaugugugaggcaccuguggugacccgagaguggguguuggacaguguagcacucuaccagugccaggagcuggacaccuaccugauaccccagaucccccacagccacuacuga

SEQ ID NO: 666 - RNA, 2160 nt, Artificial Sequence
  derived and/or modified sequence opt1 from BRCA1/m__Homo_sapiens__EAW60922
auggaccugagcgcccuccgcguggaggagguccagaacgugaucaacgccaugcagaagauccuggagugccccaucugccuggagcucaucaaggagccgguguccaccaagugcgaccacaucuucugcaaguucugcaugcugaagcugcucaaccagaagaagggccccagccagugcccccugugcaagaacgacaucaccaagcggucccugcaggagagcacgcgcuucucccagcucgucgaggagcugcugaagaucaucugcgcguuccagcucgacaccgggcuggaguacgccaacagcuacaacuucgccaagaaggagaacaacucccccgagcaccugaaggacgaggugagcaucauccaguccaugggcuaccggaaccgcgccaagcggcuccugcagagcgagccggagaaccccucccugcaggagaccagccucuccgugcagcugagcaaccuggggaccguccgcacgcuccggaccaagcagcgcauccagccccagaagaccuccguguacaucgagcuggccgcgugcgaguucagcgagaccgacgugacgaacaccgagcaccaccagcccuccaacaacgaccugaacaccaccgagaagcgggccgccgagcgccacccggagaaguaccagggcgaggccgcgagcgggugcgaguccgagacgagcgucagcgaggacugcuccggccucagcucccagagcgacauccugaccacccagcagcgggacaccaugcagcacaaccugaucaagcuccagcaggagauggccgagcuggaggccgugcuggagcagcacggcucccagcccagcaacuccuaccccagcaucaucuccgacagcuccgcccucgaggaccugcgcaaccccgagcagagcacguccgagaaggccgugcugaccagccagaaguccagcgaguacccgaucucccagaaccccgaggggcucagcgcggacaaguucgaggucuccgccgacagcagcaccuccaagaacaaggagcccggcguggagcggagcucccccagcaagugcccgucccuggacgaccgcugguacaugcacagcugcuccgggagccugcagaaccggaacuaccccucccaggaggagcucaucaagguggucgacguggaggagcagcagcuggaggagagcggcccccacgaccugaccgagacguccuaccucccccgccaggaccuggaggggaccccguaccuggagagcggcaucucccucuucagcgacgaccccgaguccgaccccagcgaggaccgggcccccgaguccgcccgcgugggcaacaucccgagcagcaccuccgcccugaaggucccccagcugaagguggcggagagcgcccagucccccgccgccgcccacaccacggacaccgcgggguacaacgccauggaggagagcgugucccgggagaagcccgagcucaccgccagcaccgagcgcgucaacaagcggauguccaugguggugagcggccugacgccggaggaguucaugcuggucuacaaguucgcccgcaagcaccacaucacccucaccaaccugaucaccgaggagacgacccacguggucaugaagaccgacgccgaguucgugugcgagcgcacccugaaguacuuccuggggaucgcgggcggcaaguggguggucuccuacuucugggugacgcagagcaucaaggagcggaagaugcucaacgagcacgacuucgaggugcgcggggacgucgugaacggccggaaccaccaggggcccaagcgcgcccgggagucccaggaccgcaagaucuuccggggccuggagaucugcugcuacgggcccuucaccaacaugccgaccgaccagcuggaguggauggugcagcucugcggcgccagcgucgugaaggagcuguccagcuucacccugggcaccggggugcaccccaucgucguggugcagcccgacgccuggacggaggacaacggcuuccacgcgaucgggcagaugugcgaggcccccgucgugacccgcgagugggugcucgacuccgucgcccuguaccagugccaggagcuggacaccuaccucaucccgcagaucccccacagccacuacuga

SEQ ID NO: 667 - RNA, 2160 nt, Artificial Sequence
  derived and/or modified sequence opt2 from BRCA1/m__Homo_sapiens__EAW60922
auggaccucuccgcccuccgcgucgaggagguccagaacgucaucaacgccaugcagaagauccucgagugccccaucugccucgagcucaucaaggagcccgucuccaccaagugcgaccacaucuucugcaaguucugcaugcucaagcuccucaaccagaagaagggccccucccagugcccccucugcaagaacgacaucaccaagcgcucccuccaggaguccacccgcuucucccagcucgucgaggagcuccucaagaucaucugcgccuuccagcucgacaccggccucgaguacgccaacuccuacaacuucgccaagaaggagaacaacucccccgagcaccucaaggacgaggucuccaucauccaguccaugggcuaccgcaaccgcgccaagcgccuccuccaguccgagcccgagaaccccucccuccaggagaccucccucuccguccagcucuccaaccucggcaccguccgcacccuccgcaccaagcagcgcauccagccccagaagaccuccgucuacaucgagcucgccgccugcgaguucuccgagaccgacgucaccaacaccgagcaccaccagcccuccaacaacgaccucaacaccaccgagaagcgcgccgccgagcgccaccccgagaaguaccagggcgaggccgccuccggcugcgaguccgagaccuccgucuccgaggacugcuccggccucuccucccaguccgacauccucaccacccagcagcgcgacaccaugcagcacaaccucaucaagcuccagcaggagauggccgagcucgaggccguccucgagcagcacggcucccagcccuccaacuccuaccccuccaucaucuccgacuccuccgcccucgaggaccuccgcaaccccgagcaguccaccuccgagaaggccguccucaccucccagaaguccuccgaguaccccaucucccagaaccccgagggccucuccgccgacaaguucgaggucuccgccgacuccuccaccuccaagaacaaggagcccggcgucgagcgcuccucccccuccaagugccccucccucgacgaccgcugguacaugcacuccugcuccggcucccuccagaaccgcaacuaccccucccaggaggagcucaucaaggucgucgacgucgaggagcagcagcucgaggaguccggcccccacgaccucaccgagaccuccuaccucccccgccaggaccucgagggcacccccuaccucgaguccggcaucucccucuucuccgacgaccccgaguccgaccccuccgaggaccgcgcccccgaguccgcccgcgucggcaacauccccuccuccaccuccgcccucaaggucccccagcucaaggucgccgaguccgcccagucccccgccgccgcccacaccaccgacaccgccggcuacaacgccauggaggaguccgucucccgcgagaagcccgagcucaccgccuccaccgagcgcgucaacaagcgcauguccauggucgucuccggccucacccccgaggaguucaugcucgucuacaaguucgcccgcaagcaccacaucacccucaccaaccucaucaccgaggagaccacccacgucgucaugaagaccgacgccgaguucgucugcgagcgcacccucaaguacuuccucggcaucgccggcggcaagugggucgucuccuacuucugggucacccaguccaucaaggagcgcaagaugcucaacgagcacgacuucgagguccgcggcgacgucgucaacggccgcaaccaccagggccccaagcgcgcccgcgagucccaggaccgcaagaucuuccgcggccucgagaucugcugcuacggccccuucaccaacaugcccaccgaccagcucgaguggaugguccagcucugcggcgccuccgucgucaaggagcucuccuccuucacccucggcaccggcguccaccccaucgucgucguccagcccgacgccuggaccgaggacaacggcuuccacgccaucggccagaugugcgaggcccccgucgucacccgcgaguggguccucgacuccgucgcccucuaccagugccaggagcucgacaccuaccucaucccccagaucccccacucccacuacuga

SEQ ID NO: 668 - RNA, 2160 nt, Artificial Sequence
  derived and/or modified sequence opt3 from BRCA1/m__Homo_sapiens__EAW60922
auggaccugagcgcccucagaguggaggaaguccagaacguuaucaaugcuaugcaaaagauucuugagugccccauaugucuggaauugaucaaagagccuguguccaccaagugcgaucacauuuucuguaaauuuugcauguuaaagcugcuaaaccagaaaaagggcccaucucaguguccgcucugcaagaaugacaucacaaaaaggucacugcaggaaaguacucgguucagccaacuuguagaggagcuguugaagauuaucugugcauuucagcucgauacggggcuggaauacgccaacuccuauaauuucgcgaaaaaggagaacaauucucccgaacaucugaaagacgaggugucgauaauccagucaaugggauaccgcaaccgagcuaagcgucucuuacagagcgagccugaaaauccaagucugcaagagaccucccuuucuguccaguugagcaaccuggguacagugagaacucuaaggaccaagcagcggauucagccccagaaaacauccguuuauaucgaacucgccgcaugcgaguuuucagaaaccgaugugacuaauacagagcaccaucaaccuaguaacaaugaccugaacaccacggagaagcgcgccgcugaaagacacccagagaaauaccagggcgaagcagccagcgggugugagucugaaacuuccgucucagaggauugcagcggacuuaguucucaauccgacauucugaccacacagcagagggauacuaugcagcauaauuugaucaagcuccaacaggagauggcugaacuggaggccguguuagaacagcacggcagccagcccucgaacucuuauccuuccauaauuucagacaguagcgcgcuggaggaucuccggaacccagaacaauccaccucugagaaagcaguacuuacaagccagaagucaagugaguacccgaucucccagaaucccgaaggucugagcgccgacaaauucgagguuucugcugauucaaguaccagcaagaacaaggaaccugggguggagcgcuccucuccaucgaaaugucccagcuuggacgaccgaugguauaugcacuccugcucaggaagucuacagaauagaaacuacccuucucaagaggaacugauuaaggucguggauguggaggaacagcagcucgaggaaagcggcccacaugaccugacggagacuuccuaccuucccaggcaggaucuggagggcacaccguauuuggaaucagggaucagccucuuuucugacgauccugaguccgaccccagugaagaucgggccccagagagcgcacgugucggaaauaucccuucuuccaccucagcucugaaaguuccccaauuaaagguggccgaaagugcgcagagcccagccgcagcucacacuacagacaccgccgguuacaacgcuauggaggagucgguaucccgcgaaaaacccgagcugacggccucuaccgaaagagugaauaagaggaugagcauggucgugucaggccuaacaccugaggaguucaugcucguuuauaaguuugcacggaaacaucacauuacucugaccaaccuuauaacagaagagacuacccacguggucaugaagacagaugccgaguucgugugcgaacgaaccuugaaauacuuucuggggaucgcuggaggcaaguggguaguuaguuauuucugggugacucaguccauuaaagaacgcaagaugcucaaugagcaugacuuugaggucagaggugauguggucaacgggaggaaucaccaaggaccaaagcgggcgcgcgaaucucaggacagaaaaaucuucaggggccuggagauauguugcuacggcccguucacgaacaugcccacagaccagcuugaauggauggugcagcuguguggggcaagcguugugaaggaguuguccucauuuacccucggaacugguguacauccuauugucgugguucaaccagaugccuggaccgaagacaauggcuuccacgcuaucgggcagaugugcgaggcccccguggucacacgugagugggugcuggauagcguagcauuauaucagugucaggaacuggacaccuaccuaaucccucaaauuccacauagucacuacuga

SEQ ID NO: 669 - RNA, 2160 nt, Artificial Sequence
  derived and/or modified sequence opt4 from BRCA1/m__Homo_sapiens__EAW60922
auggaccugagcgcccugagaguggaggaggugcagaacgugaucaacgccaugcagaagauccuggagugccccaucugccuggagcugaucaaggagcccgugagcaccaagugcgaccacaucuucugcaaguucugcaugcugaagcugcugaaccagaagaagggccccagccagugcccccugugcaagaacgacaucaccaagagaagccugcaggagagcaccagauucagccagcugguggaggagcugcugaagaucaucugcgccuuccagcuggacaccggccuggaguacgccaacagcuacaacuucgccaagaaggagaacaacagccccgagcaccugaaggacgaggugagcaucauccagagcaugggcuacagaaacagagccaagagacugcugcagagcgagcccgagaaccccagccugcaggagaccagccugagcgugcagcugagcaaccugggcaccgugagaacccugagaaccaagcagagaauccagccccagaagaccagcguguacaucgagcuggccgccugcgaguucagcgagaccgacgugaccaacaccgagcaccaccagcccagcaacaacgaccugaacaccaccgagaagagagccgccgagagacaccccgagaaguaccagggcgaggccgccagcggcugcgagagcgagaccagcgugagcgaggacugcagcggccugagcagccagagcgacauccugaccacccagcagagagacaccaugcagcacaaccugaucaagcugcagcaggagauggccgagcuggaggccgugcuggagcagcacggcagccagcccagcaacagcuaccccagcaucaucagcgacagcagcgcccuggaggaccugagaaaccccgagcagagcaccagcgagaaggccgugcugaccagccagaagagcagcgaguaccccaucagccagaaccccgagggccugagcgccgacaaguucgaggugagcgccgacagcagcaccagcaagaacaaggagcccggcguggagagaagcagccccagcaagugccccagccuggacgacagaugguacaugcacagcugcagcggcagccugcagaacagaaacuaccccagccaggaggagcugaucaaggugguggacguggaggagcagcagcuggaggagagcggcccccacgaccugaccgagaccagcuaccugcccagacaggaccuggagggcacccccuaccuggagagcggcaucagccuguucagcgacgaccccgagagcgaccccagcgaggacagagcccccgagagcgccagagugggcaacauccccagcagcaccagcgcccugaaggugccccagcugaagguggccgagagcgcccagagccccgccgccgcccacaccaccgacaccgccggcuacaacgccauggaggagagcgugagcagagagaagcccgagcugaccgccagcaccgagagagugaacaagagaaugagcaugguggugagcggccugacccccgaggaguucaugcugguguacaaguucgccagaaagcaccacaucacccugaccaaccugaucaccgaggagaccacccacguggugaugaagaccgacgccgaguucgugugcgagagaacccugaaguacuuccugggcaucgccggcggcaaguggguggugagcuacuucugggugacccagagcaucaaggagagaaagaugcugaacgagcacgacuucgaggugagaggcgacguggugaacggcagaaaccaccagggccccaagagagccagagagagccaggacagaaagaucuucagaggccuggagaucugcugcuacggccccuucaccaacaugcccaccgaccagcuggaguggauggugcagcugugcggcgccagcguggugaaggagcugagcagcuucacccugggcaccggcgugcaccccaucgugguggugcagcccgacgccuggaccgaggacaacggcuuccacgccaucggccagaugugcgaggcccccguggugaccagagagugggugcuggacagcguggcccuguaccagugccaggagcuggacaccuaccugaucccccagaucccccacagccacuacuga

SEQ ID NO: 670 - RNA, 2160 nt, Artificial Sequence
  derived and/or modified sequence opt5 from BRCA1/m__Homo_sapiens__EAW60922
auggaccugagcgcccucagaguggaggaaguccagaacguuaucaaugcuaugcaaaagauucuggagugccccaucugucuugaacugauuaaagagccuguguccaccaagugcgaucacaucuucuguaaauuuugcaugcucaagcugcuuaaccagaaaaagggcccgucucaguguccccugugcaagaaugacauuacaaaacggagccuccaggaauccacgcgcuucucucaacugguggaggagcugcucaagaucaucugugccuuucagcuggauaccgggcuugaauacgcgaacagcuauaauuucgcuaaaaaggagaacaauuccccugaacaucugaaagacgaggucucuauuauccagagcaugggauacagaaaccgggccaagcgccuccugcaguccgagcccgaaaauccuagccuucaagagacaucucuguccgugcagcucagcaaccugggcaccguuagaacacugcggaccaagcagcgcauucagccccagaaaacaucuguguauaucgaacucgccgcuugcgaguuuuccgaaaccgaugucacgaauaccgagcaccaucaaccuagcaacaaugaccugaacacaaccgagaagagagccgcugaacggcacccggagaaauaccagggggaagccgcgucuggaugugaguccgaaacaagcguguccgaggauugcucuggccuuagcucccaaagcgacauucugaccacgcagcagcgcgauacaaugcagcauaaucucaucaagcugcaacaggagauggccgaacuugaggcuguucuggaacagcacgggucucagcccuccaacagcuauccuucuauuaucagcgacuccucugcccucgaggaucugagaaaccccgaacaaagcaccuccgagaaagcugugcugacaagccagaagucuuccgaguacccuaucagccagaaucccgaaggacucucugccgacaaauucgaggucuccgcggauagcuccaccucuaagaacaaggaaccgggcguggagcggagcuccccuucuaaaugucccagccuggacgaccgcugguauaugcacuccugcagcggcucucuucagaauagaaacuacccuucccaagaggaacugauuaagguggucgauguugaggaacagcagcucgaggaaagcgggccccaugaccugaccgagacaucuuaccuuccccggcaggaucuggagggaacgccuuaucucgaauccggcaucagccuguuuucugacgauccggagagcgaccccuccgaagaucgcgccccugagagcgcuagaguggggaauauucccucuuccaccagcgcccugaaagugccucaacucaaggucgcugaauccgcccagucucccgccgcugcgcacacaaccgacacagccggauacaacgcuauggaggagagcgugucccgggaaaaaccggagcugaccgccucuacggaaagaguuaauaagcgcaugagcaugguggucuccggccuuacaccugaggaguucaugcugguguauaaguuugcccggaaacaucacaucacccucaccaaccugauuacagaagagaccacacacguugugaugaagacggaugcugaguucgucugcgaaagaacccugaaauacuuucuugggaucgccggaggcaaguggguggucucuuauuucugggugacacagagcaucaaagaacgcaagaugcucaaugagcaugacuuugagguucggggcgauguggucaacgggagaaaucaccaaggacccaagcgcgcgcgggaaucccaggacagaaaaauuuuccgcggccuggagaucuguugcuacgggccuuucaccaacaugcccacagaccagcuggaauggauggugcagcucuguggagcuagcguugugaaggagcugucuuccuuuacccuuggcacggggguccauccuauuguggugguucaacccgaugccuggaccgaagacaauggauuccacgccaucggccagaugugcgaggcuccggucgugacacgggagugggugcuggauagcgucgcccucuaucagugucaggaacuggacaccuaccugauuccucaaaucccccauucucacuacuga

SEQ ID NO: 671 - protein, 721 aa, Artificial Sequence
  BRCA1/m__Homo_sapiens__A0A024R1Z8
MDLSALRVEEVQNVINAMQKILECPICLELIKEPVSTKCDHIFCKFCMLKLLNQKKGPSQCPLCKNDITKRSLQESTRFSQLVEELLKIICAFQLDTGLEYANSYNFAKKENNSPEHLKDEVSIIQSMGYRNRAKRLLQSEPENPSLQETSLSVQLSNLGTVRTLRTKQRIQPQKTSVYIELGSDSSEDTVNKATYCSVGDQELLQITPQGTRDEISLDSAKKGEAASGCESETSVSEDCSGLSSQSDILTTQQRDTMQHNLIKLQQEMAELEAVLEQHGSQPSNSYPSIISDSSALEDLRNPEQSTSEKAVLTSQKSSEYPISQNPEGLSADKFEVSADSSTSKNKEPGVERSSPSKCPSLDDRWYMHSCSGSLQNRNYPSQEELIKVVDVEEQQLEESGPHDLTETSYLPRQDLEGTPYLESGISLFSDDPESDPSEDRAPESARVGNIPSSTSALKVPQLKVAESAQSPAAAHTTDTAGYNAMEESVSREKPELTASTERVNKRMSMVVSGLTPEEFMLVYKFARKHHITLTNLITEETTHVVMKTDAEFVCERTLKYFLGIAGGKWVVSYFWVTQSIKERKMLNEHDFEVRGDVVNGRNHQGPKRARESQDRKIFRGLEICCYGPFTNMPTDQLEWMVQLCGASVVKELSSFTLGTGVHPIVVVQPDAWTEDNGFHAIGQMCEAPVVTREWVLDSVALYQCQELDTYLIPQIPHSHY

SEQ ID NO: 672 - RNA, 2166 nt, Artificial Sequence
  BRCA1/m__Homo_sapiens__EAW60923
auggauuuaucugcucuucgcguugaagaaguacaaaaugucauuaaugcuaugcagaaaaucuuagagugucccaucugucuggaguugaucaaggaaccugucuccacaaagugugaccacauauuuugcaaauuuugcaugcugaaacuucucaaccagaagaaagggccuucacaguguccuuuauguaagaaugauauaaccaaaaggagccuacaagaaaguacgagauuuagucaacuuguugaagagcuauugaaaaucauuugugcuuuucagcuugacacagguuuggaguaugcaaacagcuauaauuuugcaaaaaaggaaaauaacucuccugaacaucuaaaagaugaaguuucuaucauccaaaguaugggcuacagaaaccgugccaaaagacuucuacagagugaacccgaaaauccuuccuugcaggaaaccagucucaguguccaacucucuaaccuuggaacugugagaacucugaggacaaagcagcggauacaaccucaaaagacgucugucuacauugaauugggaucugauucuucugaagauaccguuaauaaggcaacuuauugcagugugggagaucaagaauuguuacaaaucaccccucaaggaaccagggaugaaaucaguuuggauucugcaaaaaagggugaagcagcaucugggugugagagugaaacaagcgucucugaagacugcucagggcuauccucucagagugacauuuuaaccacucagcagagggauaccaugcaacauaaccugauaaagcuccagcaggaaauggcugaacuagaagcuguguuagaacagcaugggagccagccuucuaacagcuacccuuccaucauaagugacucuucugcccuugaggaccugcgaaauccagaacaaagcacaucagaaaaagcaguauuaacuucacagaaaaguagugaauacccuauaagccagaauccagaaggccuuucugcugacaaguuugaggugucugcagauaguucuaccaguaaaaauaaagaaccaggaguggaaaggucauccccuucuaaaugcccaucauuagaugauaggugguacaugcacaguugcucugggagucuucagaauagaaacuacccaucucaagaggagcucauuaagguuguugauguggaggagcaacagcuggaagagucugggccacacgauuugacggaaacaucuuacuugccaaggcaagaucuagagggaaccccuuaccuggaaucuggaaucagccucuucucugaugacccugaaucugauccuucugaagacagagccccagagucagcucguguuggcaacauaccaucuucaaccucugcauugaaaguuccccaauugaaaguugcagaaucugcccagaguccagcugcugcucauacuacugauacugcuggguauaaugcaauggaagaaagugugagcagggagaagccagaauugacagcuucaacagaaagggucaacaaaagaauguccaugguggugucuggccugaccccagaagaauuuaugcucguguacaaguuugccagaaaacaccacaucacuuuaacuaaucuaauuacugaagagacuacucauguuguuaugaaaacagaugcugaguuugugugugaacggacacugaaauauuuucuaggaauugcgggaggaaaauggguaguuagcuauuucugggugacccagucuauuaaagaaagaaaaaugcugaaugagcaugauuuugaagucagaggagauguggucaauggaagaaaccaccaagguccaaagcgagcaagagaaucccaggacagaaagaucuucagggggcuagaaaucuguugcuaugggcccuucaccaacaugcccacagaucaacuggaauggaugguacagcuguguggugcuucuguggugaaggagcuuucaucauucacccuuggcacagguguccacccaauugugguugugcagccagaugccuggacagaggacaauggcuuccaugcaauugggcagaugugugaggcaccuguggugacccgagaguggguguuggacaguguagcacucuaccagugccaggagcuggacaccuaccugauaccccagaucccccacagccacuacuga

SEQ ID NO: 673 - RNA, 2166 nt, Artificial Sequence
  derived and/or modified sequence opt1 from BRCA1/m__Homo_sapiens__EAW60923
auggaccugagcgcccuccgcguggaggagguccagaacgugaucaacgccaugcagaagauccuggagugccccaucugccuggagcucaucaaggagccgguguccaccaagugcgaccacaucuucugcaaguucugcaugcugaagcugcucaaccagaagaagggccccagccagugcccccugugcaagaacgacaucaccaagcggucccugcaggagagcacgcgcuucucccagcucgucgaggagcugcugaagaucaucugcgcguuccagcucgacaccgggcuggaguacgccaacagcuacaacuucgccaagaaggagaacaacucccccgagcaccugaaggacgaggugagcaucauccaguccaugggcuaccggaaccgcgccaagcggcuccugcagagcgagccggagaaccccucccugcaggagaccagccucuccgugcagcugagcaaccuggggaccguccgcacgcuccggaccaagcagcgcauccagccccagaagaccuccguguacaucgagcugggcagcgacuccagcgaggacaccgugaacaaggccacguacugcuccgucggggaccaggagcugcuccagaucacgccccagggcacccgggacgagaucagccuggacagcgcgaagaagggcgaggccgccuccgggugcgagagcgagaccuccgugagcgaggacugcuccggccugagcucccagagcgacauccucaccacccagcagcgcgacaccaugcagcacaaccugaucaagcugcagcaggagauggccgagcucgaggcggugcuggagcagcacgggucccagccgagcaacuccuaccccagcaucaucuccgacagcuccgcccuggaggaccuccggaaccccgagcagagcaccuccgagaaggccguccugacgagccagaaguccagcgaguaccccaucagccagaacccggagggccuguccgccgacaaguucgaggugagcgccgacuccagcaccuccaagaacaaggagcccgggguggagcgcagcucccccagcaagugccccucccucgacgaccggugguacaugcacagcugcuccggcagccugcagaaccgcaacuacccgucccaggaggagcugaucaaggucguggacguggaggagcagcagcucgaggagagcggcccccacgaccugaccgagaccuccuaccugccccggcaggaccucgaggggacgcccuaccuggagagcggcaucucccuguucagcgacgacccggagagcgaccccuccgaggaccgcgcgcccgagagcgcccgggucgggaacauccccuccagcaccuccgcccucaaggugccgcagcugaagguggccgagagcgcccagucccccgcggccgcccacaccaccgacacggccggcuacaacgccauggaggagagcgucucccgcgagaagcccgagcugaccgcgagcaccgagcgggugaacaagcgcauguccaugguggucagcggccucacccccgaggaguucaugcugguguacaaguucgcccggaagcaccacaucacgcugaccaaccugaucaccgaggagaccacgcacgucgugaugaagaccgacgccgaguucgugugcgagcgcacccucaaguacuuccuggggaucgccggcgggaagugggucguguccuacuucugggugacccagagcaucaaggagcgcaagaugcugaacgagcacgacuucgagguccggggcgacguggugaacgggcgcaaccaccagggcccgaagcgggcccgcgagucccaggaccggaagaucuuccgcggccucgagaucugcugcuacgggcccuucacgaacaugcccaccgaccagcuggaguggaugguccagcugugcggcgcgagcguggugaaggagcucuccagcuucacccuggggaccggcguccacccgaucguggugguccagcccgacgccuggaccgaggacaacggguuccacgccaucggccagaugugcgaggcccccguggugacgcgggaguggguccuggacuccguggcgcucuaccagugccaggagcuggacaccuaccugaucccccagaucccgcacagccacuacuga

SEQ ID NO: 674 - RNA, 2166 nt, Artificial Sequence
  derived and/or modified sequence opt2 from BRCA1/m__Homo_sapiens__EAW60923
auggaccucuccgcccuccgcgucgaggagguccagaacgucaucaacgccaugcagaagauccucgagugccccaucugccucgagcucaucaaggagcccgucuccaccaagugcgaccacaucuucugcaaguucugcaugcucaagcuccucaaccagaagaagggccccucccagugcccccucugcaagaacgacaucaccaagcgcucccuccaggaguccacccgcuucucccagcucgucgaggagcuccucaagaucaucugcgccuuccagcucgacaccggccucgaguacgccaacuccuacaacuucgccaagaaggagaacaacucccccgagcaccucaaggacgaggucuccaucauccaguccaugggcuaccgcaaccgcgccaagcgccuccuccaguccgagcccgagaaccccucccuccaggagaccucccucuccguccagcucuccaaccucggcaccguccgcacccuccgcaccaagcagcgcauccagccccagaagaccuccgucuacaucgagcucggcuccgacuccuccgaggacaccgucaacaaggccaccuacugcuccgucggcgaccaggagcuccuccagaucaccccccagggcacccgcgacgagaucucccucgacuccgccaagaagggcgaggccgccuccggcugcgaguccgagaccuccgucuccgaggacugcuccggccucuccucccaguccgacauccucaccacccagcagcgcgacaccaugcagcacaaccucaucaagcuccagcaggagauggccgagcucgaggccguccucgagcagcacggcucccagcccuccaacuccuaccccuccaucaucuccgacuccuccgcccucgaggaccuccgcaaccccgagcaguccaccuccgagaaggccguccucaccucccagaaguccuccgaguaccccaucucccagaaccccgagggccucuccgccgacaaguucgaggucuccgccgacuccuccaccuccaagaacaaggagcccggcgucgagcgcuccucccccuccaagugccccucccucgacgaccgcugguacaugcacuccugcuccggcucccuccagaaccgcaacuaccccucccaggaggagcucaucaaggucgucgacgucgaggagcagcagcucgaggaguccggcccccacgaccucaccgagaccuccuaccucccccgccaggaccucgagggcacccccuaccucgaguccggcaucucccucuucuccgacgaccccgaguccgaccccuccgaggaccgcgcccccgaguccgcccgcgucggcaacauccccuccuccaccuccgcccucaaggucccccagcucaaggucgccgaguccgcccagucccccgccgccgcccacaccaccgacaccgccggcuacaacgccauggaggaguccgucucccgcgagaagcccgagcucaccgccuccaccgagcgcgucaacaagcgcauguccauggucgucuccggccucacccccgaggaguucaugcucgucuacaaguucgcccgcaagcaccacaucacccucaccaaccucaucaccgaggagaccacccacgucgucaugaagaccgacgccgaguucgucugcgagcgcacccucaaguacuuccucggcaucgccggcggcaagugggucgucuccuacuucugggucacccaguccaucaaggagcgcaagaugcucaacgagcacgacuucgagguccgcggcgacgucgucaacggccgcaaccaccagggccccaagcgcgcccgcgagucccaggaccgcaagaucuuccgcggccucgagaucugcugcuacggccccuucaccaacaugcccaccgaccagcucgaguggaugguccagcucugcggcgccuccgucgucaaggagcucuccuccuucacccucggcaccggcguccaccccaucgucgucguccagcccgacgccuggaccgaggacaacggcuuccacgccaucggccagaugugcgaggcccccgucgucacccgcgaguggguccucgacuccgucgcccucuaccagugccaggagcucgacaccuaccucaucccccagaucccccacucccacuacuga

SEQ ID NO: 675 - RNA, 2166 nt, Artificial Sequence
  derived and/or modified sequence opt3 from BRCA1/m__Homo_sapiens__EAW60923
auggaccugagcgcccucagaguggaggaaguccagaacguuaucaaugcuaugcaaaagauucuugagugccccauaugucuggaauugaucaaagagccuguguccaccaagugcgaucacauuuucuguaaauuuugcauguuaaagcugcuaaaccagaaaaagggcccaucucaguguccgcucugcaagaaugacaucacaaaaaggucacugcaggaaaguacucgguucagccaacuuguagaggagcuguugaagauuaucugugcauuucagcucgauacggggcuggaauacgccaacuccuauaauuucgcgaaaaaggagaacaauucucccgaacaucugaaagacgaggugucgauaauccagucaaugggauaccgcaaccgagcuaagcgucucuuacagagcgagccugaaaauccaagucugcaagagaccucccuuucuguccaguugagcaaccuggguacagugagaacucuaaggaccaagcagcggauucagccccagaaaacauccguuuauaucgaacucggcucagauaguagcgaggacaccgugaauaaggccacuuacugcucugucggggaucaagaacugcuucagauuacaccucaaggaacccgcgacgagaucucccuggauucagccaaaaagggcgaggcagcuagcgguugugaaagugagacgucuguguccgaagacugcagcggguugucgucucaguccgauauacucacuacccagcagagagacacaaugcaacacaaccugauuaaauuacagcaggagauggcagaacuggaggccguacucgagcagcauggaucacaaccaaguaauagcuaucccuccaucauuucugauagcucagcucuugaagaccugaggaacccugagcagaguacuuccgaaaaggccguuuugaccagccagaaaucuucagaguacccaaucagucagaauccggaaggccuaagcgcggacaaguuugagguguccgcagauucuucgacaagcaagaacaaagagcccggcgucgaacgguccucaccuaguaaguguccaucucuggacgaucgcugguauaugcacagcugcuccgggucacuccaaaaccgaaauuaccccagccaggaggaacugaucaaagugguggacgucgaggagcagcagcuugaagagucuggaccucaugaucugaccgaaacguccuacuugccaagacaagaccucgaggguacucccuaucuggaaaguggcauuagcuuauucucugaugacccggaguccgauccuucagaggacagggcccccgaaagugcucggguugggaacauaccaagcucgacauccgcccugaaggugccucagcuaaaaguagcagagucugcucagagccccgccgcggcccacaccacugauacagcaggauacaaugcuauggaagagucagugagucgugaaaagccagagcucaccgccuccacggagcgcgucaacaagagaaugucuauggugguuagcggccugacccccgaagaguuuaugcuuguguauaaauucgcuaggaagcaccauaucacauugacuaaucugauuaccgaagagacaacucacgucgugaugaaaaccgacgccgaauuuguaugcgagcggacacucaaguacuuccuggguaucgcagggggaaaauggguuguguccuauuuuugggucacccaaucaauaaaggagcgaaagaugcuuaacgaacaugacuucgaggugcgcggcgaugucgugaauggcagaaaccaccaggggccuaaaagggcccgggaaagccaggaccgcaagauuuuuagaggacuggagaucuguugcuacgguccauucacuaauaugccgacggaucaguuggaguggaugguucaacucuguggcgcuagugugguaaaagaacugucuuccuucacauuagggaccggaguccaccccaucgugguugugcagccugacgcguggacugaggauaacggcuuucaugcaauuggucagaugugcgaagccccagucgugaccagggaguggguacuggacagcguggcucuauaucagugucaagaacucgauacauaccugaucccccagauuccucacucgcauuacuga

SEQ ID NO: 676 - RNA, 2166 nt, Artificial Sequence
  derived and/or modified sequence opt4 from BRCA1/m__Homo_sapiens__EAW60923
auggaccugagcgcccugagaguggaggaggugcagaacgugaucaacgccaugcagaagauccuggagugccccaucugccuggagcugaucaaggagcccgugagcaccaagugcgaccacaucuucugcaaguucugcaugcugaagcugcugaaccagaagaagggccccagccagugcccccugugcaagaacgacaucaccaagagaagccugcaggagagcaccagauucagccagcugguggaggagcugcugaagaucaucugcgccuuccagcuggacaccggccuggaguacgccaacagcuacaacuucgccaagaaggagaacaacagccccgagcaccugaaggacgaggugagcaucauccagagcaugggcuacagaaacagagccaagagacugcugcagagcgagcccgagaaccccagccugcaggagaccagccugagcgugcagcugagcaaccugggcaccgugagaacccugagaaccaagcagagaauccagccccagaagaccagcguguacaucgagcugggcagcgacagcagcgaggacaccgugaacaaggccaccuacugcagcgugggcgaccaggagcugcugcagaucaccccccagggcaccagagacgagaucagccuggacagcgccaagaagggcgaggccgccagcggcugcgagagcgagaccagcgugagcgaggacugcagcggccugagcagccagagcgacauccugaccacccagcagagagacaccaugcagcacaaccugaucaagcugcagcaggagauggccgagcuggaggccgugcuggagcagcacggcagccagcccagcaacagcuaccccagcaucaucagcgacagcagcgcccuggaggaccugagaaaccccgagcagagcaccagcgagaaggccgugcugaccagccagaagagcagcgaguaccccaucagccagaaccccgagggccugagcgccgacaaguucgaggugagcgccgacagcagcaccagcaagaacaaggagcccggcguggagagaagcagccccagcaagugccccagccuggacgacagaugguacaugcacagcugcagcggcagccugcagaacagaaacuaccccagccaggaggagcugaucaaggugguggacguggaggagcagcagcuggaggagagcggcccccacgaccugaccgagaccagcuaccugcccagacaggaccuggagggcacccccuaccuggagagcggcaucagccuguucagcgacgaccccgagagcgaccccagcgaggacagagcccccgagagcgccagagugggcaacauccccagcagcaccagcgcccugaaggugccccagcugaagguggccgagagcgcccagagccccgccgccgcccacaccaccgacaccgccggcuacaacgccauggaggagagcgugagcagagagaagcccgagcugaccgccagcaccgagagagugaacaagagaaugagcaugguggugagcggccugacccccgaggaguucaugcugguguacaaguucgccagaaagcaccacaucacccugaccaaccugaucaccgaggagaccacccacguggugaugaagaccgacgccgaguucgugugcgagagaacccugaaguacuuccugggcaucgccggcggcaaguggguggugagcuacuucugggugacccagagcaucaaggagagaaagaugcugaacgagcacgacuucgaggugagaggcgacguggugaacggcagaaaccaccagggccccaagagagccagagagagccaggacagaaagaucuucagaggccuggagaucugcugcuacggccccuucaccaacaugcccaccgaccagcuggaguggauggugcagcugugcggcgccagcguggugaaggagcugagcagcuucacccugggcaccggcgugcaccccaucgugguggugcagcccgacgccuggaccgaggacaacggcuuccacgccaucggccagaugugcgaggcccccguggugaccagagagugggugcuggacagcguggcccuguaccagugccaggagcuggacaccuaccugaucccccagaucccccacagccacuacuga

SEQ ID NO: 677 - RNA, 2166 nt, Artificial Sequence
  derived and/or modified sequence opt5 from BRCA1/m__Homo_sapiens__EAW60923
auggaccugagcgcccucagaguggaggaaguccagaacguuaucaaugcuaugcaaaagauucuggagugccccaucugucuugaacugauuaaagagccuguguccaccaagugcgaucacaucuucuguaaauuuugcaugcucaagcugcuuaaccagaaaaagggcccgucucaguguccccugugcaagaaugacauuacaaaacggagccuccaggaauccacgcgcuucucucaacugguggaggagcugcucaagaucaucugugccuuucagcuggauaccgggcuugaauacgcgaacagcuauaauuucgcuaaaaaggagaacaauuccccugaacaucugaaagacgaggucucuauuauccagagcaugggauacagaaaccgggccaagcgccuccugcaguccgagcccgaaaauccuagccuucaagagacaucucuguccgugcagcucagcaaccugggcaccguuagaacacugcggaccaagcagcgcauucagccccagaaaacaucuguguauaucgaacucggguccgauagcucugaggacaccgucaauaaggccacguacugcuccgugggagaucaagaacugcuucagauuaccccucaaggcacaagagacgagaucagccuggauuccgcuaaaaagggggaggccgcuucuggaugugaaagcgagaccuccguuagcgaagacugcucuggccucuccagccagucugauauucugacaacccagcagcgggacacgaugcaacacaaccuuaucaaacugcagcaggagauggccgaacucgaggcggugcuggagcagcauggcagccaaccguccaauucuuaucccagcaucauuuccgauagcucugcccuggaagaccuccgcaacccugagcaguccacaagcgaaaaggcuguccugaccucucagaaauccagcgaguaccccaucucccagaauccugaagggcuuucugccgacaaguuugaggugagcgcugauuccucuacaagcaagaacaaagagcccggaguggaaagauccagcccgucuaaguguccuucccuggacgaucggugguauaugcacagcugcucuggcucccuccaaaaccgcaauuaccccagccaggaggaacugauuaaagucguugacguggaggagcagcagcuugaagagucugggccucaugaucugaccgaaaccagcuaccuccccagacaagaccuggagggaacacccuaucuggaauccggcaucagccucuucucugaugacccugaguccgauccgagcgaggaccgggcccccgaauccgcgcgcguggggaacauuccuucuagcacguccgcccugaaggucccccagcuuaaaguggcugagucugcccagagcccugcugccgcccacaccacagauaccgcuggauacaaugcgauggaagaguccguuucuagagaaaagcccgagcugacagccagcaccgagcgggugaacaagagaauguccauggucgugagcggccucacgccggaagaguuuaugcugguuuauaaauucgcucgcaagcaccauaucacacugaccaaucuuaucaccgaagagacaacccacguggucaugaaaacagacgccgaauuugugugcgagcggacgcucaaguacuuccugggcauugccgggggaaaaugggucgugucuuauuuuuggguuacccaauccaucaaggagagaaagaugcugaacgaacaugacuucgaggugcgcggcgaugucgugaaugggcggaaccaccagggaccuaaaagagcucgcgaaagccaggaccggaagauuuuuagaggccucgagaucuguugcuacgggcccuucacaaauaugccuaccgaucagcuggaguggaugguucaacuuuguggagccucuguggucaaagaacuguccagcuucacacucggcaccggcgugcaccccauugugguuguccagccugacgcguggacggaggauaacggguuucaugcuaucggacagaugugcgaagcccccguggugacccgcgaguggguccuggacucuguggcccuguaucagugucaagaacuugauacauaccucaucccgcagauuccucacucccauuacuga

SEQ ID NO: 678 - protein, 11 aa, Artificial Sequence
  BRCA1/m__Homo_sapiens__A0A068BFX7
MDLSALRVEEV

SEQ ID NO: 679 - RNA, 36 nt, Artificial Sequence
  BRCA1/m__Homo_sapiens__AIC83575
auggauuuaucugcucuucgcguugaagaaguauaa

SEQ ID NO: 680 - RNA, 36 nt, Artificial Sequence
  derived and/or modified sequence opt1 from BRCA1/m__Homo_sapiens__AIC83575
auggaccugagcgcccuccgcguggaggaggucuga

SEQ ID NO: 681 - RNA, 36 nt, Artificial Sequence
  derived and/or modified sequence opt2 from BRCA1/m__Homo_sapiens__AIC83575
auggaccucuccgcccuccgcgucgaggaggucuga

SEQ ID NO: 682 - RNA, 36 nt, Artificial Sequence
  derived and/or modified sequence opt3 from BRCA1/m__Homo_sapiens__AIC83575
auggaccugagcgcccucagaguggaggaagucuga

SEQ ID NO: 683 - RNA, 36 nt, Artificial Sequence
  derived and/or modified sequence opt4 from BRCA1/m__Homo_sapiens__AIC83575
auggaccugagcgcccugagaguggaggagguguga

SEQ ID NO: 684 - RNA, 36 nt, Artificial Sequence; identical to SEQ ID NO: 682
  derived and/or modified sequence opt5 from BRCA1/m__Homo_sapiens__AIC83575

SEQ ID NO: 685 - protein, 173 aa, Artificial Sequence
  BRCA1/m__Homo_sapiens__C6YB45
MDAEFVCERTLKYFLGIAGGKWVVSYFWVTQSIKERKMLNEHDFEVRGDVVNGRNHQGPKRARESQDRKIFRGLEICCYGPFTNMPTDQLEWMVQLCGASVVKELSSFTLGTGVHPIVVVQPDAWTEDNGFHAIGQMCEAPVVTREWVLDSVALYQCQELDTYLIPQIPHSHY

SEQ ID NO: 686 - RNA, 522 nt, Artificial Sequence
  BRCA1/m__Homo_sapiens__ABC59810
auggaugcugaguuugugugugaacggacacugaaauauuuucuaggaauugcgggaggaaaauggguaguuagcuauuucugggugacccagucuauuaaagaaagaaaaaugcugaaugagcaugauuuugaagucagaggagauguggucaauggaagaaaccaccaagguccaaagcgagcaagagaaucccaggacagaaagaucuucagggggcuagaaaucuguugcuaugggcccuucaccaacaugcccacagaucaacuggaauggaugguacagcuguguggugcuucuguggugaaggagcuuucaucauucacccuuggcacagguguccacccaauugugguugugcagccagaugccuggacagaggacaauggcuuccaugcaauugggcagaugugugaggcaccuguggugacccgagaguggguguuggacaguguagcacucuaccagugccaggagcuggacaccuaccugauaccccagaucccccacagccacuacuga

SEQ ID NO: 687 - RNA, 522 nt, Artificial Sequence
  derived and/or modified sequence opt1 from BRCA1/m__Homo_sapiens__ABC59810
auggacgccgaguucgugugcgagcgcacccugaaguacuuccucggcaucgccgggggcaagugggucgugagcuacuucugggugacccaguccaucaaggagcggaagaugcugaacgagcacgacuucgagguccgcggggacguggugaacggccggaaccaccaggggcccaagcgcgcgcgggagagccaggaccgcaagaucuuccggggccuggagaucugcugcuacggcccguucacgaacaugcccaccgaccagcucgaguggaugguccagcugugcggggccuccguggugaaggagcugagcuccuucacccucggcaccgggguccaccccaucguggugguccagcccgacgccuggacggaggacaacggcuuccacgccaucgggcagaugugcgaggccccgguggugacccgcgaguggguccuggacagcguggcgcuguaccagugccaggagcucgacaccuaccugaucccccagaucccccacucccacuacuga

SEQ ID NO: 688 - RNA, 522 nt, Artificial Sequence
  derived and/or modified sequence opt2 from BRCA1/m__Homo_sapiens__ABC59810
auggacgccgaguucgucugcgagcgcacccucaaguacuuccucggcaucgccggcggcaagugggucgucuccuacuucugggucacccaguccaucaaggagcgcaagaugcucaacgagcacgacuucgagguccgcggcgacgucgucaacggccgcaaccaccagggccccaagcgcgcccgcgagucccaggaccgcaagaucuuccgcggccucgagaucugcugcuacggccccuucaccaacaugcccaccgaccagcucgaguggaugguccagcucugcggcgccuccgucgucaaggagcucuccuccuucacccucggcaccggcguccaccccaucgucgucguccagcccgacgccuggaccgaggacaacggcuuccacgccaucggccagaugugcgaggcccccgucgucacccgcgaguggguccucgacuccgucgcccucuaccagugccaggagcucgacaccuaccucaucccccagaucccccacucccacuacuga

SEQ ID NO: 689 - RNA, 522 nt, Artificial Sequence
  derived and/or modified sequence opt3 from BRCA1/m__Homo_sapiens__ABC59810
auggacgccgaguucgugugcgaaagaacccugaaguacuuucucggcaucgcugggggaaaaugggucguuagcuauuucugggugacacaguccauuaaggagaggaaaaugcuuaacgaacacgauuuugagguacggggugacguggucaauggccgcaaccaucaagggcccaagcgagcacgugaaucucaggauagaaaaauauucaggggacuggagaucuguugcuacggcccuuuuacuaauaugccaacggaccaguuggaguggauggugcaguuauguggugccucaguugugaaggaacugaguagcuucacccuagggacaggaguccacccgauugugguaguucaacccgaugcguggacugaggacaacggcuuucaugcuaucggccagaugugcgaagccccuguggucacccgggagugggugcucgauuccguggcacuguaucagugucaggagcuugacacauaccugauuccacaaaucccccacucucauuauuga

SEQ ID NO: 690 - RNA, 522 nt, Artificial Sequence
  derived and/or modified sequence opt4 from BRCA1/m__Homo_sapiens__ABC59810
auggacgccgaguucgugugcgagagaacccugaaguacuuccugggcaucgccggcggcaaguggguggugagcuacuucugggugacccagagcaucaaggagagaaagaugcugaacgagcacgacuucgaggugagaggcgacguggugaacggcagaaaccaccagggccccaagagagccagagagagccaggacagaaagaucuucagaggccuggagaucugcugcuacggccccuucaccaacaugcccaccgaccagcuggaguggauggugcagcugugcggcgccagcguggugaaggagcugagcagcuucacccugggcaccggcgugcaccccaucgugguggugcagcccgacgccuggaccgaggacaacggcuuccacgccaucggccagaugugcgaggcccccguggugaccagagagugggugcuggacagcguggcccuguaccagugccaggagcuggacaccuaccugaucccccagaucccccacagccacuacuga

SEQ ID NO: 691 - RNA, 522 nt, Artificial Sequence
  derived and/or modified sequence opt5 from BRCA1/m__Homo_sapiens__ABC59810
auggacgccgaguucgugugcgaaagaacccugaaguacuuucucggcaucgcugggggaaaaugggucguuagcuauuucugggugacacaguccauuaaggagcggaaaaugcugaacgaacacgauuuugaggugcgcggcgacgucgugaaugggagaaaccaucaaggacccaagcgggcccgcgaaucucaggauagaaaaaucuuccggggccuugagauuuguugcuacgggccuuuuacgaauaugccgaccgaccagcuggaguggaugguucagcucuguggagcgagcguggucaaggaacuguccucuuucacacuuggcaccggcgugcaccccaucguugugguccaaccugaugcuuggacagaggacaacggguuucaugccauuggacagaugugcgaagcccccguggugacccgcgaguggguccuggauagcguugcucucuaucagugucaggagcuggacacauaccugaucccucaaaucccccacucccauuauuga

SEQ ID NO: 692 - protein, 354 aa, Artificial Sequence [sequence omitted]

SEQ ID NO: 693 - RNA, 1065 nt, Artificial Sequence
  BRCA1/m__Homo_sapiens__ABC88652
augcacaguugcucugggagucuucagaauagaaacuacccaucucaagaggagcucauuaagguuguugauguggaggagcaacagcuggaagagucugggccacacgauuugacggaaacaucuuacuugccaaggcaagaucuagagggaaccccuuaccuggaaucuggaaucagccucuucucugaugacccugaaucugauccuucugaagacagagccccagagucagcucguguuggcaacauaccaucuucaaccucugcauugaagguuccccaauugaaaguugcagaaucugcccaggguccagcugcugcucacacuacugauacugcuggguauaaugcaauggaagaaagugugagcagggagaagccagaauugacagcuucaacagaaagggucaacaaaagaauguccaugguggugucuggccugaccccagaagaauuuaugcucguguacaaguuugccagaaaacaccacaucacuuuaacuaaucuaauuacugaagagacuacucauguuguuaugaaaacagaugcugaguuugugugugaacggacacugaaauauuuucuaggaauugcgggaggaaaauggguaguuagcuauuucugggugacccagucuauuaaagaaagaaaaaugcugaaugagcaugauuuugaagucagaggagauguggucaauggaagaaaccaccaagguccaaagcgagcaagagaaucccaggacagaaagaucuucagggggcuagaaaucuguugcuaugggcccuucaccaacaugcccacagaucaacuggaauggaugguacagcuguguggugcuucuguggugaaggagcuuucaucauucacccuuggcacagguguccacccaauugugguugugcagccagaugccuggacagaggacaauggcuuccaugcaauugggcagaugugugagacaccuguggugacccgagaguggguguuggacaguguagcacucuaccagugccaggagcuggacaccuaccugauaccccagaucccccacagucacuacuga

SEQ ID NO: 694 - RNA, 1065 nt, Artificial Sequence
  derived and/or modified sequence opt1 from BRCA1/m__Homo_sapiens__ABC88652
augcacagcugcuccggcagccugcagaaccgcaacuaccccucccaggaggagcucaucaagguggucgacguggaggagcagcagcuggaggagagcgggccgcacgaccugaccgagaccuccuaccucccccggcaggaccuggagggcacgcccuaccuggagagcgggaucucccucuucagcgacgaccccgaguccgacccgagcgaggaccgcgcccccgaguccgcccgggugggcaacauccccagcuccaccagcgcgcugaaggucccccagcugaagguggccgaguccgcccaggggccggccgccgcgcacaccaccgacacggccggcuacaacgccauggaggagagcgugucccgcgagaagcccgagcucaccgccagcaccgagcgggucaacaagcgcauguccaugguggugagcggccugacccccgaggaguucaugcuggucuacaaguucgcgcggaagcaccacaucacgcucaccaaccugaucaccgaggagaccacgcacguggugaugaagaccgacgccgaguucgucugcgagcgcacccugaaguacuuccucgggaucgccggcgggaaguggguggugagcuacuucugggucacccaguccaucaaggagcggaagaugcugaacgagcacgacuucgaggugcgcggcgacguggucaacgggcggaaccaccagggccccaagcgcgcccgggagagccaggaccgcaagaucuuccggggccuggagaucugcugcuacgggccguucacgaacaugcccaccgaccagcucgaguggauggugcagcugugcggcgccuccguggucaaggagcugagcuccuucacccucgggaccggcgugcaccccaucguggucgugcagcccgacgcguggacggaggacaacggcuuccacgccaucgggcagaugugcgagaccccggucgugacccgcgagugggugcuggacagcgucgcccuguaccagugccaggagcucgacaccuaccugaucccccagaucccccacucccacuacuga

SEQ ID NO: 695 - RNA, 1065 nt, Artificial Sequence
  derived and/or modified sequence opt2 from BRCA1/m__Homo_sapiens__ABC88652
augcacuccugcuccggcucccuccagaaccgcaacuaccccucccaggaggagcucaucaaggucgucgacgucgaggagcagcagcucgaggaguccggcccccacgaccucaccgagaccuccuaccucccccgccaggaccucgagggcacccccuaccucgaguccggcaucucccucuucuccgacgaccccgaguccgaccccuccgaggaccgcgcccccgaguccgcccgcgucggcaacauccccuccuccaccuccgcccucaaggucccccagcucaaggucgccgaguccgcccagggccccgccgccgcccacaccaccgacaccgccggcuacaacgccauggaggaguccgucucccgcgagaagcccgagcucaccgccuccaccgagcgcgucaacaagcgcauguccauggucgucuccggccucacccccgaggaguucaugcucgucuacaaguucgcccgcaagcaccacaucacccucaccaaccucaucaccgaggagaccacccacgucgucaugaagaccgacgccgaguucgucugcgagcgcacccucaaguacuuccucggcaucgccggcggcaagugggucgucuccuacuucugggucacccaguccaucaaggagcgcaagaugcucaacgagcacgacuucgagguccgcggcgacgucgucaacggccgcaaccaccagggccccaagcgcgcccgcgagucccaggaccgcaagaucuuccgcggccucgagaucugcugcuacggccccuucaccaacaugcccaccgaccagcucgaguggaugguccagcucugcggcgccuccgucgucaaggagcucuccuccuucacccucggcaccggcguccaccccaucgucgucguccagcccgacgccuggaccgaggacaacggcuuccacgccaucggccagaugugcgagacccccgucgucacccgcgaguggguccucgacuccgucgcccucuaccagugccaggagcucgacaccuaccucaucccccagaucccccacucccacuacuga

SEQ ID NO: 696 - RNA, 1065 nt, Artificial Sequence
  derived and/or modified sequence opt3 from BRCA1/m__Homo_sapiens__ABC88652
augcacagcugcuccggcucucugcagaacagaaauuaccccucacaagaggaacucaucaagguggucgacguugaggaacagcagcuugaggaaagugggccucaugaucugaccgagacaagcuauuugccaaggcaggacuuagagggaacuccguaccuggaauccgguauuucucuauucucggaugaccccgagucagauccuagcgaagaccgggccccagagagugcucgcgugggcaacauacccuccucuacgagcgcacucaaaguaccucaacugaagguggccgaguccgcgcaggggccagcugccgcacacaccacagauacugccggauauaaugcuauggaagagucagucagucgagaaaaacccgagcuuaccgcaagcacagaacgugugaacaagagaaugucuaugguuguguccggccugaccccugaggaguuuauguuggucuacaaauucgccaggaagcaucacaucacucucacaaaucugauuaccgaagagacgacucaugugguaaugaagaccgacgcugaauuuguuugugagcggacacugaaauauuuccucgguaucgccgggggaaaguggguggucucauacuuuugggugacucagagcauuaaagaacgcaagauguuaaacgagcacgauuucgaggugagaggcgacgucguuaauggcaggaaccaccaggggccaaaacgggcgcgcgaaagucaagaucgaaagaucuuuagaggacuggagauaugcuguuaugguccguucaccaauaugcccacagaccagcuugaauggauggugcaguugugcggcgcaucuguagugaaggagcuguccagcuuuacccuagggacgggaguccauccuaucgugguugugcagccagaugccuggacugaagacaacggcuuccacgcuauuggucaaaugugugagacacccgucgugaccagggaguggguacucgacucgguugcccuguaccagugccaggaacuugauacuuaccugaucccucaaauuccacauucucacuauuga

SEQ ID NO: 697 - RNA, 1065 nt, Artificial Sequence
  derived and/or modified sequence opt4 from BRCA1/m__Homo_sapiens__ABC88652
augcacagcugcagcggcagccugcagaacagaaacuaccccagccaggaggagcugaucaaggugguggacguggaggagcagcagcuggaggagagcggcccccacgaccugaccgagaccagcuaccugcccagacaggaccuggagggcacccccuaccuggagagcggcaucagccuguucagcgacgaccccgagagcgaccccagcgaggacagagcccccgagagcgccagagugggcaacauccccagcagcaccagcgcccugaaggugccccagcugaagguggccgagagcgcccagggccccgccgccgcccacaccaccgacaccgccggcuacaacgccauggaggagagcgugagcagagagaagcccgagcugaccgccagcaccgagagagugaacaagagaaugagcaugguggugagcggccugacccccgaggaguucaugcugguguacaaguucgccagaaagcaccacaucacccugaccaaccugaucaccgaggagaccacccacguggugaugaagaccgacgccgaguucgugugcgagagaacccugaaguacuuccugggcaucgccggcggcaaguggguggugagcuacuucugggugacccagagcaucaaggagagaaagaugcugaacgagcacgacuucgaggugagaggcgacguggugaacggcagaaaccaccagggccccaagagagccagagagagccaggacagaaagaucuucagaggccuggagaucugcugcuacggccccuucaccaacaugcccaccgaccagcuggaguggauggugcagcugugcggcgccagcguggugaaggagcugagcagcuucacccugggcaccggcgugcaccccaucgugguggugcagcccgacgccuggaccgaggacaacggcuuccacgccaucggccagaugugcgagacccccguggugaccagagagugggugcuggacagcguggcccuguaccagugccaggagcuggacaccuaccugaucccccagaucccccacagccacuacuga

SEQ ID NO: 698 - RNA, 1065 nt, Artificial Sequence
  derived and/or modified sequence opt5 from BRCA1/m__Homo_sapiens__ABC88652
augcacagcugcuccggcucucugcagaacagaaauuaccccagccaagaggaacucaucaagguggucgacguugaggaacagcagcuggaggaauccgggccucaugaucuuaccgagacaucuuaucugccgcggcaggaccucgagggaacgcccuaccuggaaagcggcauuucccuuuucucugaugacccugagagcgaucccuccgaagaccgcgccccugagagcgcuagaguggggaacauccccucuuccaccagcgcccugaaagugccucaacucaaggucgcggagucugcucagggaccggccgccgcucacacaaccgauacagccggcuauaaugcuauggaagaguccgugagccgggaaaaacccgagcugaccgccucuacagaacgcguuaacaagagaauguccaugguggucagcgggcugaccccugaggaguuuaugcucguguacaaauucgcgcggaagcaucacauuacgcugaccaaucuuaucacagaagagaccacacauguugugaugaagaccgacgccgaauuugucugugagcgcacgcugaaauauuuccucggaauugcuggcggcaagugggugguguccuacuuuugggucacacagucuaucaaagaaagaaagaugcugaacgagcacgauuucgagguucgcggggacguggugaauggacggaaccaccagggccccaaaagagcccgggaaagccaagaucgcaagaucuuuagagggcuugagauuugcuguuauggaccuuucaccaauaugcccacagaccagcuggaauggaugguccagcucugcggcgcuuccgugguuaaggagcugagcucuuuuacccuggggaccggagugcauccgaucgucgugguucagccugaugccuggacagaagacaacggcuuccacgcgauuggccaaaugugugagacgcccguggucacccgggagugggugcucgacuccgucgcccuguaccagugccaggaacuugauacauaccugaucccucaaauuccccauagccacuauuga

SEQ ID NO: 699 - protein, 680 aa, Artificial Sequence
  BRCA1/m__Homo_sapiens__G3XAC3
MDLSALRVEEVQNVINAMQKILECPICLELIKEPVSTKCDHIFCKFCMLKLLNQKKGPSQCPLCKNDITKRSLQESTRFSQLVEELLKIICAFQLDTGLEYANSYNFAKKENNSPEHLKDEVSIIQSMGYRNRAKRLLQSEPENPSLQETSLSVQLSNLGTVRTLRTKQRIQPQKTSVYIELGEAASGCESETSVSEDCSGLSSQSDILTTQQRDTMQHNLIKLQQEMAELEAVLEQHGSQPSNSYPSIISDSSALEDLRNPEQSTSEKAVLTSQKSSEYPISQNPEGLSADKFEVSADSSTSKNKEPGVERSSPSKCPSLDDRWYMHSCSGSLQNRNYPSQEELIKVVDVEEQQLEESGPHDLTETSYLPRQDLEGTPYLESGISLFSDDPESDPSEDRAPESARVGNIPSSTSALKVPQLKVAESAQSPAAAHTTDTAGYNAMEESVSREKPELTASTERVNKRMSMVVSGLTPEEFMLVYKFARKHHITLTNLITEETTHVVMKTDAEFVCERTLKYFLGIAGGKWVVSYFWVTQSIKERKMLNEHDFEVRGDVVNGRNHQGPKRARESQDRKIFRGLEICCYGPFTNMPTDQLEWMVQLCGASVVKELSSFTLGTGVHPIVVVQPDAWTEDNGFHAIGQMCEAPVVTREWVLDSVALYQCQELDTYLIPQIPHSHY

SEQ ID NO: 700 - RNA, 2043 nt, Artificial Sequence
  BRCA1/m__Homo_sapiens__EAW60939
auggauuuaucugcucuucgcguugaagaaguacaaaaugucauuaaugcuaugcagaaaaucuuagagugucccaucugucuggaguugaucaaggaaccugucuccacaaagugugaccacauauuuugcaaauuuugcaugcugaaacuucucaaccagaagaaagggccuucacaguguccuuuauguaagaaugauauaaccaaaaggagccuacaagaaaguacgagauuuagucaacuuguugaagagcuauugaaaaucauuugugcuuuucagcuugacacagguuuggaguaugcaaacagcuauaauuuugcaaaaaaggaaaauaacucuccugaacaucuaaaagaugaaguuucuaucauccaaaguaugggcuacagaaaccgugccaaaagacuucuacagagugaacccgaaaauccuuccuugcaggaaaccagucucaguguccaacucucuaaccuuggaacugugagaacucugaggacaaagcagcggauacaaccucaaaagacgucugucuacauugaauugggugaagcagcaucugggugugagagugaaacaagcgucucugaagacugcucagggcuauccucucagagugacauuuuaaccacucagcagagggauaccaugcaacauaaccugauaaagcuccagcaggaaauggcugaacuagaagcuguguuagaacagcaugggagccagccuucuaacagcuacccuuccaucauaagugacucuucugcccuugaggaccugcgaaauccagaacaaagcacaucagaaaaagcaguauuaacuucacagaaaaguagugaauacccuauaagccagaauccagaaggccuuucugcugacaaguuugaggugucugcagauaguucuaccaguaaaaauaaagaaccaggaguggaaaggucauccccuucuaaaugcccaucauuagaugauaggugguacaugcacaguugcucugggagucuucagaauagaaacuacccaucucaagaggagcucauuaagguuguugauguggaggagcaacagcuggaagagucugggccacacgauuugacggaaacaucuuacuugccaaggcaagaucuagagggaaccccuuaccuggaaucuggaaucagccucuucucugaugacccugaaucugauccuucugaagacagagccccagagucagcucguguuggcaacauaccaucuucaaccucugcauugaaaguuccccaauugaaaguugcagaaucugcccagaguccagcugcugcucauacuacugauacugcuggguauaaugcaauggaagaaagugugagcagggagaagccagaauugacagcuucaacagaaagggucaacaaaagaauguccaugguggugucuggccugaccccagaagaauuuaugcucguguacaaguuugccagaaaacaccacaucacuuuaacuaaucuaauuacugaagagacuacucauguuguuaugaaaacagaugcugaguuugugugugaacggacacugaaauauuuucuaggaauugcgggaggaaaauggguaguuagcuauuucugggugacccagucuauuaaagaaagaaaaaugcugaaugagcaugauuuugaagucagaggagauguggucaauggaagaaaccaccaagguccaaagcgagcaagagaaucccaggacagaaagaucuucagggggcuagaaaucuguugcuaugggcccuucaccaacaugcccacagaucaacuggaauggaugguacagcuguguggugcuucuguggugaaggagcuuucaucauucacccuuggcacagguguccacccaauugugguugugcagccagaugccuggacagaggacaauggcuuccaugcaauugggcagaugugugaggcaccuguggugacccgagaguggguguuggacaguguagcacucuaccagugccaggagcuggacaccuaccugauaccccagaucccccacagccacuacuga

SEQ ID NO: 701 - RNA, 2043 nt, Artificial Sequence
  derived and/or modified sequence opt1 from BRCA1/m__Homo_sapiens__EAW60939
auggaccugagcgcccuccgcguggaggagguccagaacgugaucaacgccaugcagaagauccuggagugccccaucugccuggagcucaucaaggagccgguguccaccaagugcgaccacaucuucugcaaguucugcaugcugaagcugcucaaccagaagaagggccccagccagugcccccugugcaagaacgacaucaccaagcggucccugcaggagagcacgcgcuucucccagcucgucgaggagcugcugaagaucaucugcgcguuccagcucgacaccgggcuggaguacgccaacagcuacaacuucgccaagaaggagaacaacucccccgagcaccugaaggacgaggugagcaucauccaguccaugggcuaccggaaccgcgccaagcggcuccugcagagcgagccggagaaccccucccugcaggagaccagccucuccgugcagcugagcaaccuggggaccguccgcacgcuccggaccaagcagcgcauccagccccagaagaccuccguguacaucgagcugggcgaggccgcgagcgggugcgaguccgagaccagcguguccgaggacugcagcggccugagcucccagagcgacauccucacgacccagcagcgggacaccaugcagcacaaccugaucaagcugcagcaggagauggccgagcucgaggccguccuggagcagcacggcucccagcccagcaacuccuacccgagcaucaucuccgacagcuccgcccuggaggaccuccgcaaccccgagcagagcaccuccgagaaggcggugcugacgagccagaaguccagcgaguaccccaucucccagaaccccgaggggcugagcgccgacaaguucgagguguccgccgacagcuccaccagcaagaacaaggagccgggcgucgagcggagcucccccagcaagugccccucccucgacgaccgcugguacaugcacagcugcuccgggagccugcagaaccggaacuaccccucccaggaggagcugaucaaggugguggacgucgaggagcagcagcucgaggagagcggcccgcacgaccugaccgagaccuccuaccugccccgccaggaccucgaggggacgcccuaccuggagagcggcaucucccuguucagcgacgaccccgaguccgacccgagcgaggaccgggcccccgaguccgcccgcgugggcaacauccccagcuccaccagcgcgcucaaggugccccagcugaaggucgccgagagcgcccaguccccggccgccgcgcacaccaccgacacggccggguacaacgccauggaggagagcgugucccgggagaagcccgagcugaccgccagcaccgagcgcgugaacaagcggauguccauggucgugagcggccucacccccgaggaguucaugcugguguacaaguucgcccgcaagcaccacaucacgcugaccaaccucaucaccgaggagaccacgcacgucgugaugaagaccgacgcggaguucgucugcgagcggacccugaaguacuuccuggggaucgccggcggcaagugggugguguccuacuucugggucacccagagcaucaaggagcgcaagaugcugaacgagcacgacuucgaggugcgcggggacguggucaacggccggaaccaccaggggcccaagcgcgcccgggagucccaggaccgcaagaucuuccggggccucgagaucugcugcuacgggccguucacgaacaugcccaccgaccagcuggaguggauggugcagcugugcggcgccagcguggucaaggagcucuccagcuucacccugggcaccggggugcaccccaucguggucgugcagccggacgccuggacggaggacaacggcuuccacgcgaucgggcagaugugcgaggcccccguggucacccgcgagugggugcuggacuccguggcccucuaccagugccaggagcuggacaccuaccugaucccccagaucccccacagccacuacuga

SEQ ID NO: 702 - RNA, 2043 nt, Artificial Sequence
  derived and/or modified sequence opt2 from BRCA1/m__Homo_sapiens__EAW60939
auggaccucuccgcccuccgcgucgaggagguccagaacgucaucaacgccaugcagaagauccucgagugccccaucugccucgagcucaucaaggagcccgucuccaccaagugcgaccacaucuucugcaaguucugcaugcucaagcuccucaaccagaagaagggccccucccagugcccccucugcaagaacgacaucaccaagcgcucccuccaggaguccacccgcuucucccagcucgucgaggagcuccucaagaucaucugcgccuuccagcucgacaccggccucgaguacgccaacuccuacaacuucgccaagaaggagaacaacucccccgagcaccucaaggacgaggucuccaucauccaguccaugggcuaccgcaaccgcgccaagcgccuccuccaguccgagcccgagaaccccucccuccaggagaccucccucuccguccagcucuccaaccucggcaccguccgcacccuccgcaccaagcagcgcauccagccccagaagaccuccgucuacaucgagcucggcgaggccgccuccggcugcgaguccgagaccuccgucuccgaggacugcuccggccucuccucccaguccgacauccucaccacccagcagcgcgacaccaugcagcacaaccucaucaagcuccagcaggagauggccgagcucgaggccguccucgagcagcacggcucccagcccuccaacuccuaccccuccaucaucuccgacuccuccgcccucgaggaccuccgcaaccccgagcaguccaccuccgagaaggccguccucaccucccagaaguccuccgaguaccccaucucccagaaccccgagggccucuccgccgacaaguucgaggucuccgccgacuccuccaccuccaagaacaaggagcccggcgucgagcgcuccucccccuccaagugccccucccucgacgaccgcugguacaugcacuccugcuccggcucccuccagaaccgcaacuaccccucccaggaggagcucaucaaggucgucgacgucgaggagcagcagcucgaggaguccggcccccacgaccucaccgagaccuccuaccucccccgccaggaccucgagggcacccccuaccucgaguccggcaucucccucuucuccgacgaccccgaguccgaccccuccgaggaccgcgcccccgaguccgcccgcgucggcaacauccccuccuccaccuccgcccucaaggucccccagcucaaggucgccgaguccgcccagucccccgccgccgcccacaccaccgacaccgccggcuacaacgccauggaggaguccgucucccgcgagaagcccgagcucaccgccuccaccgagcgcgucaacaagcgcauguccauggucgucuccggccucacccccgaggaguucaugcucgucuacaaguucgcccgcaagcaccacaucacccucaccaaccucaucaccgaggagaccacccacgucgucaugaagaccgacgccgaguucgucugcgagcgcacccucaaguacuuccucggcaucgccggcggcaagugggucgucuccuacuucugggucacccaguccaucaaggagcgcaagaugcucaacgagcacgacuucgagguccgcggcgacgucgucaacggccgcaaccaccagggccccaagcgcgcccgcgagucccaggaccgcaagaucuuccgcggccucgagaucugcugcuacggccccuucaccaacaugcccaccgaccagcucgaguggaugguccagcucugcggcgccuccgucgucaaggagcucuccuccuucacccucggcaccggcguccaccccaucgucgucguccagcccgacgccuggaccgaggacaacggcuuccacgccaucggccagaugugcgaggcccccgucgucacccgcgaguggguccucgacuccgucgcccucuaccagugccaggagcucgacaccuaccucaucccccagaucccccacucccacuacuga

SEQ ID NO: 703 - RNA, 2043 nt, Artificial Sequence
  derived and/or modified sequence opt3 from BRCA1/m__Homo_sapiens__EAW60939
auggaccugagcgcccucagaguggaggaaguccagaacguuaucaaugcuaugcaaaagauucuugagugccccauaugucuggaauugaucaaagagccuguguccaccaagugcgaucacauuuucuguaaauuuugcauguuaaagcugcuaaaccagaaaaagggcccaucucaguguccgcucugcaagaaugacaucacaaaaaggucacugcaggaaaguacucgguucagccaacuuguagaggagcuguugaagauuaucugugcauuucagcucgauacggggcuggaauacgccaacuccuauaauuucgcgaaaaaggagaacaauucucccgaacaucugaaagacgaggugucgauaauccagucaaugggauaccgcaaccgagcuaagcgucucuuacagagcgagccugaaaauccaagucugcaagagaccucccuuucuguccaguugagcaaccuggguacagugagaacucuaaggaccaagcagcggauucagccccagaaaacauccguuuauaucgaacucggcgaggccgcaucagggugcgaaagugagaccagcgugucugaggauuguuccggacugucaagccaaagugacauucuuacuacacagcaacgcgauaccaugcagcacaaucugaucaaguugcagcaggaaauggccgagcucgaagcuguccuggagcaacauggcucucagccuuccaacagcuacccaucgauaauuucugacuccucagcauuagaagaucugagaaaucccgagcagaguacgagcgagaaagccgugcucacuucccagaagucuagcgaauauccuaucucacaaaacccagagggucuuagugcugacaaauuugaaguauccgccgauagcucuaccucaaagaauaaagagccggggguugaaaggaguagccccuccaagugcccuucucuggacgaucggugguacaugcacucguguagcggauccuugcagaaccgcaacuauccaucacaggaggagcuaauuaagguggucgacguggaggaacagcaacuggaagagaguggcccccaugaccucacagagacuucuuaccugccucgacaggaucuugaaggcaccccauaccuggagagcgggaucuccuuguucucagacgaucccgaaagcgacccgucugaggauagagcgccugaauccgcaagggugggaaauauccccaguagcacaucugcccucaaagucccacagcugaagguugcugaguccgcccagaguccugcagcugcccacaccacggacacugcggguuauaacgccauggaggaaucagugagccgggagaaacccgaauuaacagcaucgaccgagcguguaaauaagcgcauguccaugguggucucuggccugacuccagaagaguuuaugcuaguguacaaauucgcuagaaagcaccauauuacacucaccaaccugauaacggaggaaaccacacacguugugaugaagacugaugccgaguuugucugcgaaaggacccuuaaauauuucuuggggaucgcuggaggcaagugggugguaagcuacuuuuggguuacacaaucaauuaaagagcggaagaugcugaaugaacaugacuucgaggugcgaggugaugucgugaacgggcgcaaucaccagggacccaaaagagccagggagagucaggaccggaagaucuuucgcggccucgaaauaugcuguuauggcccuuucacuaacaugccaaccgaucaacuggaguggaugguccagcuuugcggggcauccgugguuaaggaacugucuagcuucacauugggaaccggugugcacccgauuguagucgugcagcccgacgccuggacugaggacaauggcuuucaugcuaucgggcagaugugugaggcgccuguugugacgagagaauggguccucgauuccguggcacuguaccaaugccaggaguuagacacauaucugaucccacagauuccccacucacauuacuga

SEQ ID NO: 704 - RNA, 2043 nt, Artificial Sequence
  derived and/or modified sequence opt4 from BRCA1/m__Homo_sapiens__EAW60939
auggaccugagcgcccugagaguggaggaggugcagaacgugaucaacgccaugcagaagauccuggagugccccaucugccuggagcugaucaaggagcccgugagcaccaagugcgaccacaucuucugcaaguucugcaugcugaagcugcugaaccagaagaagggccccagccagugcccccugugcaagaacgacaucaccaagagaagccugcaggagagcaccagauucagccagcugguggaggagcugcugaagaucaucugcgccuuccagcuggacaccggccuggaguacgccaacagcuacaacuucgccaagaaggagaacaacagccccgagcaccugaaggacgaggugagcaucauccagagcaugggcuacagaaacagagccaagagacugcugcagagcgagcccgagaaccccagccugcaggagaccagccugagcgugcagcugagcaaccugggcaccgugagaacccugagaaccaagcagagaauccagccccagaagaccagcguguacaucgagcugggcgaggccgccagcggcugcgagagcgagaccagcgugagcgaggacugcagcggccugagcagccagagcgacauccugaccacccagcagagagacaccaugcagcacaaccugaucaagcugcagcaggagauggccgagcuggaggccgugcuggagcagcacggcagccagcccagcaacagcuaccccagcaucaucagcgacagcagcgcccuggaggaccugagaaaccccgagcagagcaccagcgagaaggccgugcugaccagccagaagagcagcgaguaccccaucagccagaaccccgagggccugagcgccgacaaguucgaggugagcgccgacagcagcaccagcaagaacaaggagcccggcguggagagaagcagccccagcaagugccccagccuggacgacagaugguacaugcacagcugcagcggcagccugcagaacagaaacuaccccagccaggaggagcugaucaaggugguggacguggaggagcagcagcuggaggagagcggcccccacgaccugaccgagaccagcuaccugcccagacaggaccuggagggcacccccuaccuggagagcggcaucagccuguucagcgacgaccccgagagcgaccccagcgaggacagagcccccgagagcgccagagugggcaacauccccagcagcaccagcgcccugaaggugccccagcugaagguggccgagagcgcccagagccccgccgccgcccacaccaccgacaccgccggcuacaacgccauggaggagagcgugagcagagagaagcccgagcugaccgccagcaccgagagagugaacaagagaaugagcaugguggugagcggccugacccccgaggaguucaugcugguguacaaguucgccagaaagcaccacaucacccugaccaaccugaucaccgaggagaccacccacguggugaugaagaccgacgccgaguucgugugcgagagaacccugaaguacuuccugggcaucgccggcggcaaguggguggugagcuacuucugggugacccagagcaucaaggagagaaagaugcugaacgagcacgacuucgaggugagaggcgacguggugaacggcagaaaccaccagggccccaagagagccagagagagccaggacagaaagaucuucagaggccuggagaucugcugcuacggccccuucaccaacaugcccaccgaccagcuggaguggauggugcagcugugcggcgccagcguggugaaggagcugagcagcuucacccugggcaccggcgugcaccccaucgugguggugcagcccgacgccuggaccgaggacaacggcuuccacgccaucggccagaugugcgaggcccccguggugaccagagagugggugcuggacagcguggcccuguaccagugccaggagcuggacaccuaccugaucccccagaucccccacagccacuacuga

SEQ ID NO: 705 - RNA, 2043 nt, Artificial Sequence
  derived and/or modified sequence opt5 from BRCA1/m__Homo_sapiens__EAW60939
auggaccugagcgcccucagaguggaggaaguccagaacguuaucaaugcuaugcaaaagauucuggagugccccaucugucuugaacugauuaaagagccuguguccaccaagugcgaucacaucuucuguaaauuuugcaugcucaagcugcuuaaccagaaaaagggcccgucucaguguccccugugcaagaaugacauuacaaaacggagccuccaggaauccacgcgcuucucucaacugguggaggagcugcucaagaucaucugugccuuucagcuggauaccgggcuugaauacgcgaacagcuauaauuucgcuaaaaaggagaacaauuccccugaacaucugaaagacgaggucucuauuauccagagcaugggauacagaaaccgggccaagcgccuccugcaguccgagcccgaaaauccuagccuucaagagacaucucuguccgugcagcucagcaaccugggcaccguuagaacacugcggaccaagcagcgcauucagccccagaaaacaucuguguauaucgaacucggggaggccgcuuccggaugcgaaagcgagaccucugucuccgaggauuguagcggccuguccucucaaagcgacauucuuacgacccagcaaagagauacaaugcagcacaaucugaucaagcuccagcaggaaauggccgagcuggaagcugugcuugagcaacaugggucccagccuagcaacucuuacccguccauuaucagcgacucuagcgcccuggaagaucuccggaaucccgagcaguccaccucugagaaagcgguucugacaagccagaaguccagcgaauauccuaucucucaaaaccccgagggacuguccgccgacaaauuugaagugagcgcugauucuuccaccagcaagaauaaagagccuggcgucgaacgcuccucucccagcaagugcccgucccucgacgauagaugguacaugcacucuuguagcggcucccugcagaaccggaacuauccuagccaggaggagcuuauuaaggugguggacgucgaggaacagcaacuggaagagucugggccccaugaccucacggagacauccuaccugccucgccaggaucuugaaggaacccccuaccuggagagcggcaucucucucuucuccgacgaucccgaaagcgacccuucugaggauagagccccggaaagcgcucggguugggaauauucccuccagcacaucugcccugaaagugccucagcugaagguggcggaguccgcccagagccccgcugccgcucacaccaccgacacagccggauauaacgccauggaggaauccgucucucgcgagaaaccugaacucacggcuagcaccgagagagugaauaagcggauguccaugguugugucuggccugacacccgaagaguuuaugcuugucuacaaauucgcgagaaagcaccauaucacccugacaaaccucauuaccgaggaaacgacacacgugguuaugaagaccgaugccgaguuugugugcgaacgcacccugaaauauuuccuggggaucgcuggaggcaagugggucgugagcuacuuuugggucacacaauccaucaaagagcggaagaugcuuaaugaacaugacuucgaggugagaggcgauguugugaacgggcgcaaucaccagggaccgaaacgggccagagagucucaggaccgcaagauuuuucggggccucgaaaucugcuguuaugggccuuucaccaacaugcccacagaucaacuggaguggaugguccagcugugcggagccagcgugguuaaggaacucuccagcuucacgcugggcaccggggugcacccuauugucguggugcagcccgacgcuuggacagaggacaauggauuucaugccaucggccagaugugugaggcgccuguugucaccagagaaugggugcuugauucuguggcucuguaccaaugccaggagcucgacacauaucugauuccccagaucccgcacucccauuacuga

SEQ ID NO: 706 - protein, 181 aa, Artificial Sequence
  BY55__Homo_sapiens__O95971
MLLEPGRGCCALAILLAIVDIQSGGCINITSSASQEGTRLNLICTVWHKKEEAEGFVVFLCKDRSGDCSPETSLKQLRLKRDPGIDGVGEISSQLMFTISQVTPLHSGTYQCCARSQKSGIRLQGHFFSILFTETGNYTVTGLKQRQHLEFSHNEGTLSSGFLQEKVWVMLVTSLVALQAL

SEQ ID NO: 707 - RNA, 546 nt, Artificial Sequence
  BY55__Homo_sapiens__AAC72302
augcuguuggaacccggcagaggcugcugugcccuggccauccugcuggcaauuguggacauccagucugguggaugcauuaacaucaccagcucagcuucccaggaaggaacgcgacuaaacuuaaucuguacuguauggcauaagaaagaagaggcugagggguuuguaguguuuuugugcaaggacaggucuggagacuguucuccugagaccaguuuaaaacagcugagacuuaaaagggauccugggauagaugguguuggugaaauaucaucucaguugauguucaccauaagccaagucacaccguugcacagugggaccuaccaguguugugccagaagccagaagucagguauccgccuucagggccauuuuuucuccauucuauucacagagacagggaacuacacagugacgggauugaaacaaagacaacaccuugaguucagccauaaugaaggcacucucaguucaggcuuccuacaagaaaaggucuggguaaugcuggucaccagccuuguggcccuucaagcuuuguaa

SEQ ID NO: 708 - RNA, 546 nt, Artificial Sequence
  derived and/or modified sequence opt1 from BY55__Homo_sapiens__AAC72302
augcugcucgagcccggccgcgggugcugcgcccuggccauccugcucgcgaucguggacauccagagcggcgggugcaucaacaucaccuccagcgccucccaggagggcacccggcugaaccugaucugcacggucuggcacaagaaggaggaggccgagggguucgugguguuccucugcaaggaccgcagcggcgacugcuccccggagaccagccugaagcagcugcggcucaagcgcgaccccggcaucgacggggucggcgagaucuccagccagcugauguucaccaucucccaggugacgccccugcacagcgggaccuaccagugcugcgcccggucccagaaguccggcauccgccuccaggggcacuucuucagcauccuguucaccgagaccggcaacuacaccgugacgggccugaagcagcggcagcaccucgaguucagccacaacgaggggacccuguccagcggcuuccugcaggagaaggucugggugaugcucgugaccucccuggucgcccugcaggcgcucuga

SEQ ID NO: 709 - RNA, 546 nt, Artificial Sequence
  derived and/or modified sequence opt2 from BY55__Homo_sapiens__AAC72302
augcuccucgagcccggccgcggcugcugcgcccucgccauccuccucgccaucgucgacauccaguccggcggcugcaucaacaucaccuccuccgccucccaggagggcacccgccucaaccucaucugcaccgucuggcacaagaaggaggaggccgagggcuucgucgucuuccucugcaaggaccgcuccggcgacugcucccccgagaccucccucaagcagcuccgccucaagcgcgaccccggcaucgacggcgucggcgagaucuccucccagcucauguucaccaucucccaggucaccccccuccacuccggcaccuaccagugcugcgcccgcucccagaaguccggcauccgccuccagggccacuucuucuccauccucuucaccgagaccggcaacuacaccgucaccggccucaagcagcgccagcaccucgaguucucccacaacgagggcacccucuccuccggcuuccuccaggagaaggucugggucaugcucgucaccucccucgucgcccuccaggcccucuga

SEQ ID NO: 710 - RNA, 546 nt, Artificial Sequence
  derived and/or modified sequence opt3 from BY55__Homo_sapiens__AAC72302
augcugcucgagcccggcagagggugcugugcccuugcuauccuguuggcaauuguggacauacagagcggagguugcaucaacauuaccuccucugccucacaagaaggcacaagguuaaaucugaucuguacugucuggcacaagaaagaggaagcggagggguucguuguguuucuaugcaaggaucggaguggagacuguagcccugaaacgucccucaaacagcugcgccuuaagcgagauccaggcauugacgguguaggggagaucucuucgcagcugauguucaccauaucacaggugacaccguugcauagcggaacuuaccaaugcugugcucguagucagaaauccggcaucagacuccagggccacuuuuucucuauucuguuuaccgagacagggaacuauaccgucacuggacugaagcagaggcaacaucucgaguucagccacaaugaagguacauuauccucaggcuuucugcaggaaaagguguggguuaugcuugugaccaguuuggucgcccugcaggcacuauga

SEQ ID NO: 711 - RNA, 546 nt, Artificial Sequence
  derived and/or modified sequence opt4 from BY55__Homo_sapiens__AAC72302
augcugcuggagcccggcagaggcugcugcgcccuggccauccugcuggccaucguggacauccagagcggcggcugcaucaacaucaccagcagcgccagccaggagggcaccagacugaaccugaucugcaccguguggcacaagaaggaggaggccgagggcuucgugguguuccugugcaaggacagaagcggcgacugcagccccgagaccagccugaagcagcugagacugaagagagaccccggcaucgacggcgugggcgagaucagcagccagcugauguucaccaucagccaggugaccccccugcacagcggcaccuaccagugcugcgccagaagccagaagagcggcaucagacugcagggccacuucuucagcauccuguucaccgagaccggcaacuacaccgugaccggccugaagcagagacagcaccuggaguucagccacaacgagggcacccugagcagcggcuuccugcaggagaaggugugggugaugcuggugaccagccugguggcccugcaggcccuguga

SEQ ID NO: 712 - RNA, 546 nt, Artificial Sequence
  derived and/or modified sequence opt5 from BY55__Homo_sapiens__AAC72302
augcugcucgagcccggcagagggugcugugcccuggcuauccuucuggccauuguggacauccagagcggaggcugcauuaacaucaccuccucugcgagccaagaagggacacggcucaaucugauuuguacggucuggcacaagaaagaggaagcugagggauucguuguguuucuuugcaaggaucgcuccggcgacuguucuccugaaaccagccugaaacagcucagacugaagcgggauccggggaucgacggagugggcgagaucuccucucagcugauguucacaauuagccaggucacaccccuccauuccggcaccuaccaaugcugugcccgcagccagaaaucugggaucagacugcagggacacuuuuucuccauucuuuuuaccgagacaggcaacuauaccgugacggggcugaagcagcggcaacaucucgaguucagccacaaugaaggaacccugucuuccggcuuucuucaggaaaagguuugggugaugcuggucacaagccucguggcccugcaggcucuguga

SEQ ID NO: 713 - protein, 109 aa, Artificial Sequence [sequence omitted]

SEQ ID NO: 714 - RNA, 330 nt, Artificial Sequence
  CAMEL__Homo_sapiens__CAA10193
augcugauggcccaggaggcccuggcauuccugauggcccagggggcaaugcuggcggcccaggagaggcgggugccacgggcggcagagguccccggggcgcaggggcagcaagggccucggggccgagaggaggcgccccgcgggguccgcauggcggugccgcuucugcgcaggauggaaggugccccugcggggccaggaggccggacagccgccugcuucaguugcacaucacgaugccuuucucgucgcccauggaagcggagcugguccgcaggauccugucccgggaugccgcaccucucccccgaccaggggcgguucuga

SEQ ID NO: 715 - RNA, 330 nt, Artificial Sequence
  derived and/or modified sequence opt1 from CAMEL__Homo_sapiens__CAA10193
augcugauggcccaggaggcccucgcguuccugauggcccagggcgccaugcuggccgcccaggagcgccgggugccccgcgcggccgaggucccgggggcccagggccagcaggggccccggggccgcgaggaggcgccccgcggggugcggauggccgugccccuccugcggcgcauggagggcgccccggccggccccgggggccggaccgccgccugcuucagcugcaccucccgcugccugagccggcgccccuggaagcgguccuggagcgcgggguccugccccggcaugccgcaccucagccccgaccaggggcgcuucuga

SEQ ID NO: 716 - RNA, 330 nt, Artificial Sequence
  derived and/or modified sequence opt2 from CAMEL__Homo_sapiens__CAA10193
augcucauggcccaggaggcccucgccuuccucauggcccagggcgccaugcucgccgcccaggagcgccgcgucccccgcgccgccgagguccccggcgcccagggccagcagggcccccgcggccgcgaggaggccccccgcggcguccgcauggccgucccccuccuccgccgcauggagggcgcccccgccggccccggcggccgcaccgccgccugcuucuccugcaccucccgcugccucucccgccgccccuggaagcgcuccugguccgccggcuccugccccggcaugccccaccucucccccgaccagggccgcuucuga

SEQ ID NO: 717 - RNA, 330 nt, Artificial Sequence
  derived and/or modified sequence opt3 from CAMEL__Homo_sapiens__CAA10193
augcugauggcccaggaggcucucgcauuccuuauggcccaaggcgcgaugcuggcugcccaggaaagaagggugccccgggcagccgaggucccuggggcucagggacagcaagguccacgcggccgagaagaggcaccgcgugggguuagaauggccgugcccuuguuaaggcggauggaaggagcuccugccggcccaggugggcgcaccgcggcaugcuuuagcuguacauccagaugccugucuaggcggcccuggaagcgcucauggagugccggaagcuguccuggcaugccacaccuaucccccgaccagggccgauucuga

SEQ ID NO: 718 - RNA, 330 nt, Artificial Sequence
  derived and/or modified sequence opt4 from CAMEL__Homo_sapiens__CAA10193
augcugauggcccaggaggcccuggccuuccugauggcccagggcgccaugcuggccgcccaggagagaagagugcccagagccgccgaggugcccggcgcccagggccagcagggccccagaggcagagaggaggcccccagaggcgugagaauggccgugccccugcugagaagaauggagggcgcccccgccggccccggcggcagaaccgccgccugcuucagcugcaccagcagaugccugagcagaagacccuggaagagaagcuggagcgccggcagcugccccggcaugccccaccugagccccgaccagggcagauucuga

SEQ ID NO: 719 - RNA, 330 nt, Artificial Sequence
  derived and/or modified sequence opt5 from CAMEL__Homo_sapiens__CAA10193
augcugauggcccaggaggcucucgccuuccugauggcgcaaggcgcuaugcuugccgcccaggaaagacgggugccccgcgcugccgaggucccuggggcucagggacagcaaggcccgagagggcgggaagaggcgccccgcggaguuagaauggccgugccucugcuccggcgcauggaaggcgcccccgcugggccuggaggcagaaccgccgcuugcuuuagcuguacaucccggugccugucucgcagacccuggaagcggagcugguccgccggcucuuguccugggaugccgcaccuuagccccgaccagggacgcuucuga

SEQ ID NO: 720 - protein, 522 aa, Artificial Sequence
  CASPA__Homo_sapiens__Q92851-4
MKSQGQHWYSSSDKNCKVSFREKLLIIDSNLGVQDVENLKFLCIGLVPNKKLEKSSSASDVFEHLLAEDLLSEEDPFFLAELLYIIRQKKLLQHLNCTKEEVERLLPTRQRVSLFRNLLYELSEGIDSENLKDMIFLLKDSLPKTEMTSLSFLAFLEKQGKIDEDNLTCLEDLCKTVVPKLLRNIEKYKREKAIQIVTPPVDKEAESYQGEEELVSQTDVKTFLEALPQESWQNKHAGSNGNRATNGAPSLVSRGMQGASANTLNSETSTKRAAVYRMNRNHRGLCVIVNNHSFTSLKDRQGTHKDAEILSHVFQWLGFTVHIHNNVTKVEMEMVLQKQKCNPAHADGDCFVFCILTHGRFGAVYSSDEALIPIREIMSHFTALQCPRLAEKPKLFFIQACQGEEIQPSVSIEADALNPEQAPTSLQDSIPAEADFLLGLATVPGYVSFRHVEEGSWYIQSLCNHLKKLVPRHEDILSILTAVNDDVSRRVDKQGTKKQMPQPAFTLRKKLVFPVPLDALSL

SEQ ID NO: 721 - RNA, 1569 nt, Artificial Sequence
  CASPA__Homo_sapiens__CCDS2340.1
augaaaucucaaggucaacauugguauuccaguucagauaaaaacuguaaagugagcuuucgugagaagcuucugauuauugauucaaaccuggggguccaagauguggagaaccucaaguuucucugcauaggauugguccccaacaagaagcuggagaaguccagcucagccucagauguuuuugaacaucucuuggcagaggaucugcugagugaggaagacccuuucuuccuggcagaacuccucuauaucauacggcagaagaagcugcugcagcaccucaacuguaccaaagaggaaguggagcgacugcugcccacccgacaaaggguuucucuguuuagaaaccugcucuacgaacugucagaaggcauugacucagagaacuuaaaggacaugaucuuccuucugaaagacucgcuucccaaaacugaaaugaccucccuaaguuuccuggcauuucuagagaaacaagguaaaauagaugaagauaaucugacaugccuggaggaccucugcaaaacaguuguaccuaaacuuuugagaaacauagagaaauacaaaagagagaaagcuauccagauagugacaccuccuguagacaaggaagccgagucguaucaaggagaggaagaacuaguuucccaaacagauguuaagacauucuuggaagccuuaccgcaggaguccuggcaaaauaagcaugcagguaguaaugguaacagagccacaaauggugcaccaagccuggucuccagggggaugcaaggagcaucugcuaacacucuaaacucugaaaccagcacaaagagggcagcuguguacaggaugaaucggaaccacagaggccucugugucauugucaacaaccacagcuuuaccucccugaaggacagacaaggaacccauaaagaugcugagauccugagucauguguuccaguggcuuggguucacagugcauauacacaauaaugugacgaaaguggaaauggagaugguccugcagaagcagaagugcaauccagcccaugccgacggggacugcuucguguucuguauucugacccaugggagauuuggagcugucuacucuucggaugaggcccucauucccauucgggagaucaugucucacuucacagcccugcagugcccuagacuggcugaaaaaccuaaacucuuuuucauccaggccugccaaggugaagagauacagccuuccguauccaucgaagcagaugcucugaacccugagcaggcacccacuucccugcaggacaguauuccugccgaggcugacuuccuacuuggucuggccacugucccaggcuauguauccuuucggcauguggaggaaggcagcugguauauucagucucuguguaaucaucugaagaaauuggucccaagacaugaagacaucuuauccauccucacugcugucaacgaugaugugagucgaagaguggacaaacagggaacaaagaaacagaugccccagccugcuuucacacuaaggaaaaaacuaguauucccugugccccuggaugcacuuucauuauag

SEQ ID NO: 722 - RNA, 1569 nt, Artificial Sequence
  derived and/or modified sequence opt1 from CASPA__Homo_sapiens__CCDS2340.1
augaagucccagggccagcacugguacagcagcuccgacaagaacugcaaggugagcuuccgcgagaagcugcucaucaucgacuccaaccuggggguccaggacguggagaaccugaaguuccucugcaucggccuggugcccaacaagaagcuggagaaguccagcagcgccuccgacgucuucgagcaccuccuggccgaggaccugcucagcgaggaggacccguucuuccuggcggagcugcucuacaucauccggcagaagaagcugcugcagcaccucaacugcaccaaggaggagguggagcgccugcugcccacccggcagcgcgugucccucuuccggaaccugcuguacgagcucagcgaggggaucgacuccgagaaccugaaggacaugaucuuccugcucaaggacagccugcccaagacggagaugaccucccugagcuuccucgccuuccuggagaagcagggcaagaucgacgaggacaaccugaccugccucgaggaccugugcaagaccgucgugcccaagcugcuccgcaacaucgagaaguacaagcgggagaaggccauccagaucgugacgccgcccgucgacaaggaggccgaguccuaccagggggaggaggagcuggugagccagaccgacgugaagaccuuccuggaggcccucccccaggaguccuggcagaacaagcacgcgggcagcaacggcaaccgcgccaccaacggggcccccagccuggucucccggggcaugcagggggccagcgcgaacacgcugaacuccgagaccagcaccaagcgcgccgccguguaccggaugaaccgcaaccaccggggccucugcgugaucgucaacaaccacuccuucaccagccugaaggaccgccaggggacgcacaaggacgccgagauccugucccacguguuccaguggcucggcuucaccgugcacauccacaacaacgucaccaagguggagauggagauggugcugcagaagcagaagugcaacccggcccacgcggacggcgacugcuucgucuucugcauccugacccacgggcgguucggcgccguguacagcuccgacgaggcccucauccccauccgcgagaucaugagccacuucacggcccugcagugcccccggcuggccgagaagcccaagcuguucuucauccaggcgugccagggggaggagauccagccguccgugagcaucgaggccgacgcccucaaccccgagcaggcccccaccucccugcaggacagcauccccgccgaggcggacuuccugcucggccuggccaccgucccgggcuacguguccuuccgccacgucgaggaggggagcugguacauccagucccugugcaaccaccucaagaagcuggugccccggcacgaggacauccugagcauccucaccgccgugaacgacgacgucucccgccggguggacaagcagggcacgaagaagcagaugccccagcccgccuucacccugcgcaagaagcugguguucccggucccccucgacgcccugagccuguga

SEQ ID NO: 723 - RNA, 1569 nt, Artificial Sequence
  derived and/or modified sequence opt2 from CASPA__Homo_sapiens__CCDS2340.1
augaagucccagggccagcacugguacuccuccuccgacaagaacugcaaggucuccuuccgcgagaagcuccucaucaucgacuccaaccucggcguccaggacgucgagaaccucaaguuccucugcaucggccucguccccaacaagaagcucgagaaguccuccuccgccuccgacgucuucgagcaccuccucgccgaggaccuccucuccgaggaggaccccuucuuccucgccgagcuccucuacaucauccgccagaagaagcuccuccagcaccucaacugcaccaaggaggaggucgagcgccuccuccccacccgccagcgcgucucccucuuccgcaaccuccucuacgagcucuccgagggcaucgacuccgagaaccucaaggacaugaucuuccuccucaaggacucccuccccaagaccgagaugaccucccucuccuuccucgccuuccucgagaagcagggcaagaucgacgaggacaaccucaccugccucgaggaccucugcaagaccgucguccccaagcuccuccgcaacaucgagaaguacaagcgcgagaaggccauccagaucgucaccccccccgucgacaaggaggccgaguccuaccagggcgaggaggagcucgucucccagaccgacgucaagaccuuccucgaggcccucccccaggaguccuggcagaacaagcacgccggcuccaacggcaaccgcgccaccaacggcgcccccucccucgucucccgcggcaugcagggcgccuccgccaacacccucaacuccgagaccuccaccaagcgcgccgccgucuaccgcaugaaccgcaaccaccgcggccucugcgucaucgucaacaaccacuccuucaccucccucaaggaccgccagggcacccacaaggacgccgagauccucucccacgucuuccaguggcucggcuucaccguccacauccacaacaacgucaccaaggucgagauggagaugguccuccagaagcagaagugcaaccccgcccacgccgacggcgacugcuucgucuucugcauccucacccacggccgcuucggcgccgucuacuccuccgacgaggcccucauccccauccgcgagaucaugucccacuucaccgcccuccagugcccccgccucgccgagaagcccaagcucuucuucauccaggccugccagggcgaggagauccagcccuccgucuccaucgaggccgacgcccucaaccccgagcaggcccccaccucccuccaggacuccauccccgccgaggccgacuuccuccucggccucgccaccguccccggcuacgucuccuuccgccacgucgaggagggcuccugguacauccagucccucugcaaccaccucaagaagcucgucccccgccacgaggacauccucuccauccucaccgccgucaacgacgacgucucccgccgcgucgacaagcagggcaccaagaagcagaugccccagcccgccuucacccuccgcaagaagcucgucuuccccgucccccucgacgcccucucccucuga

SEQ ID NO: 724 - RNA, 1569 nt, Artificial Sequence
  derived and/or modified sequence opt3 from CASPA__Homo_sapiens__CCDS2340.1
augaaaagccagggccaacacugguacuccucuucagacaagaacugcaaggugaguuucagagagaaacugcucaucauugauagcaaucuugggguccaggacguugaaaaccugaaguuuuuguguauaggauuagugcccaauaaaaagcuggagaaguccucuucggccucagauguauucgaacaucuacucgcugaggaccugcuuagcgaagaggauccauuuuuccuggcagaguugcucuauaucauuaggcagaaaaagcugcugcagcaccucaacugcaccaaagaagagguggaacgguuacugccuacacgccaacgagucagucuuuuucguaauuugcuguacgagcuauccgaggguaucgacucugaaaaccucaaggauaugauuuuccugcuuaaagacagccugccgaagacugagaugacguccuugucauuucucgccuuccuggaaaagcagggcaaaaucgaugaggacaauuuaaccugucuggaagaucucugcaagacagugguucccaaacuucugagaaacauagagaaguauaaaagggagaaggcgauccagauugugacuccuccagucgacaaagaagcugagaguuaccagggggaagaggaauuggugagccaaaccgauguaaagacauuucuagaggcccugccccaggagucuuggcagaauaagcaugcaggauccaacggcaaucgggccaccaacggugcuccuucacucguuagccgcgggaugcagggagcaagugccaauacucugaacucugaaacauccaccaaaagagcugccguguauaggaugaaucggaaccaccgcggccuuugugucaucgugaacaaucauagcuucacgucgcugaaggaccgacaaggcacucacaaagacgcggagauuuugucucacguguuucaguggcucggguucaccguccauauccacaacaauguuacaaagguggaaauggagaugguacugcagaaacaaaagugcaacccagcacaugccgauggagacuguuuuguguucugcauauuaacucacgguagauucggcgcugucuacuccucagaugaagcccugauucccaucagggagauuaugagucacuuuaccgcacuacaguguccucggcucgcugagaagccaaaacuguucuuuauccaggccugccagggggaagagauccaaccgagcguguccauugaagcggacgcccuuaaucccgagcaggcaccuacaucuuugcaggauagcauaccagcugaggccgacuuccugcucggacuggcuaccguucccggcuaugugucauuucgucaugucgaagaggguaguugguacauccagucccuuuguaaccaccugaagaaauuggugccucgccaugaagauauucucagcauccugacggccguaaaugacgauguuucuagaaggguggacaagcaagggacuaaaaagcagaugccacagcccgcauucacauuacggaagaaacuggucuuuccggugccucuagaugcccucucacuguga

SEQ ID NO: 725 - RNA, 1569 nt, Artificial Sequence
  derived and/or modified sequence opt4 from CASPA__Homo_sapiens__CCDS2340.1
augaagagccagggccagcacugguacagcagcagcgacaagaacugcaaggugagcuucagagagaagcugcugaucaucgacagcaaccugggcgugcaggacguggagaaccugaaguuccugugcaucggccuggugcccaacaagaagcuggagaagagcagcagcgccagcgacguguucgagcaccugcuggccgaggaccugcugagcgaggaggaccccuucuuccuggccgagcugcuguacaucaucagacagaagaagcugcugcagcaccugaacugcaccaaggaggagguggagagacugcugcccaccagacagagagugagccuguucagaaaccugcuguacgagcugagcgagggcaucgacagcgagaaccugaaggacaugaucuuccugcugaaggacagccugcccaagaccgagaugaccagccugagcuuccuggccuuccuggagaagcagggcaagaucgacgaggacaaccugaccugccuggaggaccugugcaagaccguggugcccaagcugcugagaaacaucgagaaguacaagagagagaaggccauccagaucgugaccccccccguggacaaggaggccgagagcuaccagggcgaggaggagcuggugagccagaccgacgugaagaccuuccuggaggcccugccccaggagagcuggcagaacaagcacgccggcagcaacggcaacagagccaccaacggcgcccccagccuggugagcagaggcaugcagggcgccagcgccaacacccugaacagcgagaccagcaccaagagagccgccguguacagaaugaacagaaaccacagaggccugugcgugaucgugaacaaccacagcuucaccagccugaaggacagacagggcacccacaaggacgccgagauccugagccacguguuccaguggcugggcuucaccgugcacauccacaacaacgugaccaagguggagauggagauggugcugcagaagcagaagugcaaccccgcccacgccgacggcgacugcuucguguucugcauccugacccacggcagauucggcgccguguacagcagcgacgaggcccugauccccaucagagagaucaugagccacuucaccgcccugcagugccccagacuggccgagaagcccaagcuguucuucauccaggccugccagggcgaggagauccagcccagcgugagcaucgaggccgacgcccugaaccccgagcaggcccccaccagccugcaggacagcauccccgccgaggccgacuuccugcugggccuggccaccgugcccggcuacgugagcuucagacacguggaggagggcagcugguacauccagagccugugcaaccaccugaagaagcuggugcccagacacgaggacauccugagcauccugaccgccgugaacgacgacgugagcagaagaguggacaagcagggcaccaagaagcagaugccccagcccgccuucacccugagaaagaagcugguguuccccgugccccuggacgcccugagccuguga

SEQ ID NO: 726 - RNA, 1569 nt, Artificial Sequence
  derived and/or modified sequence opt5 from CASPA__Homo_sapiens__CCDS2340.1
augaaaagccagggccaacacugguacuccucuagcgacaaaaacugcaagguguccuucagagagaaacugcucaucauugauucuaaucuggggguccaggacguugaaaaccuuaaguuucuguguaucggacucgugcccaauaaaaagcuggaaaagagcuccucugccagcgauguguucgagcaucuucuggcugaggaccuccuguccgaagaggauccguuuuuccuggccgagcuccuguauauuauccggcagaaaaagcugcuucagcaccucaacugcaccaaagaagaggucgaacgccugcuuccuacaagacaacgggugagccuguuucgcaaucuccuguacgagcugucugagggcauugacuccgaaaaccucaaggauaugaucuuccugcuuaaagacagccugcccaagacggagaugaccucucucuccuuucuggcguuccuugaaaagcaggggaaaaucgaugaggacaaucugacaugucucgaagaucugugcaagaccguugugccuaaacugcucagaaacauugagaaguauaaacgggagaaggcuauccagauugucacacccccuguggacaaagaagccgagagcuaccagggagaagaggaacugguuucucaaaccgaugugaagacauuucuugaggcccugccccaggaguccuggcagaauaagcaugcuggcagcaacgggaaucgcgccaccaacggagcuccuucccucgucucuagaggcaugcagggcgccagcgcgaauacgcugaacuccgaaaccagcacaaaacgggccgcuguguaucgcaugaauagaaaccaccgggggcuuugugugaucgucaacaaucauucuuucaccucccugaaggaccgccaaggaacacacaaagacgccgagauucucagccacguuuuucaguggcugggcuucaccgugcauauccacaacaaugugacgaaggucgaaauggagauggugcugcagaaacaaaagugcaacccggcucaugccgauggggacuguuuuguuuucugcauucucacacacggaagauucggcgcgguguacucuagcgaugaagcccugauccccauccgggagauuaugucccacuuuaccgcccuucaguguccucgccuggcugagaagcccaaacucuucuuuauccaggcuugccagggggaagagauucaaccuucugucagcaucgaagccgacgcccugaaucccgagcaggcuccgacaucccugcaggauagcauuccugcggaggccgacuuccuucucggacuggcuaccgugcccggcuauguuucuuuuagacauguggaagagggcuccugguacauccagagccuguguaaccaccucaagaaacuggucccucggcaugaagauauccuuucuauucugaccgccgugaaugacgaugucuccagacgcguggacaagcaagggacaaagaagcagaugccccagcccgccuucacgcuccggaagaaacugguuuuuccugugccgcuggaugcucuuagccucuga

SEQ ID NO: 727 - protein, 339 aa, Artificial Sequence
  cathepsin_B__Homo_sapiens__A0A024R374
MWQLWASLCCLLVLANARSRPSFHPLSDELVNYVNKRNTTWQAGHNFYNVDMSYLKRLCGTFLGGPKPPQRVMFTEDLKLPASFDAREQWPQCPTIKEIRDQGSCGSCWAFGAVEAISDRICIHTNAHVSVEVSAEDLLTCCGSMCGDGCNGGYPAEAWNFWTRKGLVSGGLYESHVGCRPYSIPPCEHHVNGSRPPCTGEGDTPKCSKICEPGYSPTYKQDKHYGYNSYSVSNSEKDIMAEIYKNGPVEGAFSVYSDFLLYKSGVYQHVTGEMMGGHAIRILGWGVENGTPYWLVANSWNTDWGDNGFFKILRGQDHCGIESEVVAGIPRTDQYWEKI

SEQ ID NO: 728 - RNA, 1020 nt, Artificial Sequence
  cathepsin_B__Homo_sapiens__EAW65632
auguggcagcucugggccucccucugcugccugcugguguuggccaaugcccggagcaggcccucuuuccauccccugucggaugagcuggucaacuaugucaacaaacggaauaccacguggcaggccgggcacaacuucuacaacguggacaugagcuacuugaagaggcuaugugguaccuuccugggugggcccaagccaccccagagaguuauguuuaccgaggaccugaagcugccugcaagcuucgaugcacgggaacaauggccacagugucccaccaucaaagagaucagagaccagggcuccuguggcuccugcugggccuucggggcuguggaagccaucucugaccggaucugcauccacaccaaugcgcacgucagcguggaggugucggcggaggaccugcucaccugcuguggcagcauguguggggacggcuguaaugguggcuauccugcugaagcuuggaacuucuggacaagaaaaggccugguuucugguggccucuaugaaucccauguagggugcagaccguacuccaucccucccugugagcaccacgucaacggcucccggcccccaugcacgggggagggagauacccccaaguguagcaagaucugugagccuggcuacagcccgaccuacaaacaggacaagcacuacggauacaauuccuacagcgucuccaauagcgagaaggacaucauggccgagaucuacaaaaacggccccguggagggagcuuucucuguguauucggacuuccugcucuacaagucaggaguguaccaacacgucaccggagagaugauggguggccaugccauccgcauccugggcuggggaguggagaauggcacacccuacuggcugguugccaacuccuggaacacugacuggggugacaauggcuucuuuaaaauacucagaggacaggaucacuguggaaucgaaucagaagugguggcuggaauuccacgcaccgaucaguacugggaaaagaucuaa

SEQ ID NO: 729 - RNA, 1020 nt, Artificial Sequence
  derived and/or modified sequence opt1 from cathepsin_B__Homo_sapiens__EAW65632
auguggcagcugugggccagccucugcugccugcuggugcucgccaacgcgcgcucccggcccagcuuccacccgcuguccgacgagcuggucaacuacgugaacaagcgcaacaccaccuggcaggccggccacaacuucuacaacguggacaugagcuaccucaagcggcugugcgggacguuccugggcgggcccaagccgccccagcgcgucauguucaccgaggaccucaagcugcccgccuccuucgacgcccgggagcaguggccccagugccccaccaucaaggagauccgcgaccagggcagcugcggguccugcugggccuucggcgcgguggaggccaucagcgaccggaucugcauccacaccaacgcccacguguccgucgaggugagcgccgaggaccugcucacgugcugcggcuccaugugcggggacggcugcaacgggggcuaccccgcggaggccuggaacuucuggacccgcaaggggcuggugagcggcggccuguacgagucccacgucgggugccggccguacagcaucccgcccugcgagcaccacgugaacggcucccgcccgcccugcaccggggagggcgacacccccaagugcagcaagaucugcgagcccggcuacucccccacguacaagcaggacaagcacuacggguacaacagcuacuccgugagcaacagcgagaaggacaucauggccgagaucuacaagaacggccccgucgagggggccuucuccguguacagcgacuuccuccuguacaaguccggcguguaccagcacgucaccggggagaugaugggcggccacgccauccggauccugggguggggcguggagaacgggacccccuacuggcucguggcgaacagcuggaacaccgacuggggcgacaacggguucuucaagauccugcgcggccaggaccacugcggcaucgaguccgaggucguggccgggaucccccggacggaccaguacugggagaagaucuga

SEQ ID NO: 730 - RNA, 1020 nt, Artificial Sequence
  derived and/or modified sequence opt2 from cathepsin_B__Homo_sapiens__EAW65632
auguggcagcucugggccucccucugcugccuccucguccucgccaacgcccgcucccgccccuccuuccacccccucuccgacgagcucgucaacuacgucaacaagcgcaacaccaccuggcaggccggccacaacuucuacaacgucgacauguccuaccucaagcgccucugcggcaccuuccucggcggccccaagcccccccagcgcgucauguucaccgaggaccucaagcuccccgccuccuucgacgcccgcgagcaguggccccagugccccaccaucaaggagauccgcgaccagggcuccugcggcuccugcugggccuucggcgccgucgaggccaucuccgaccgcaucugcauccacaccaacgcccacgucuccgucgaggucuccgccgaggaccuccucaccugcugcggcuccaugugcggcgacggcugcaacggcggcuaccccgccgaggccuggaacuucuggacccgcaagggccucgucuccggcggccucuacgagucccacgucggcugccgccccuacuccaucccccccugcgagcaccacgucaacggcucccgcccccccugcaccggcgagggcgacacccccaagugcuccaagaucugcgagcccggcuacucccccaccuacaagcaggacaagcacuacggcuacaacuccuacuccgucuccaacuccgagaaggacaucauggccgagaucuacaagaacggccccgucgagggcgccuucuccgucuacuccgacuuccuccucuacaaguccggcgucuaccagcacgucaccggcgagaugaugggcggccacgccauccgcauccucggcuggggcgucgagaacggcacccccuacuggcucgucgccaacuccuggaacaccgacuggggcgacaacggcuucuucaagauccuccgcggccaggaccacugcggcaucgaguccgaggucgucgccggcaucccccgcaccgaccaguacugggagaagaucuga

SEQ ID NO: 731 - RNA, 1020 nt, Artificial Sequence
  derived and/or modified sequence opt3 from cathepsin_B__Homo_sapiens__EAW65632
auguggcagcugugggccagccucugcugucuucugguguuggcuaacgcaagauccaggcccucuuuccacccuuuaucagacgagcuggucaauuacguuaacaagcggaauaccacauggcaagccggccauaacuuuuauaauguggauaugaguuaccuaaaacgccucugcgggacuuuccugggagguccaaagccgccccagcgaguaauguuuacggaagaccuuaaacugccugcgagcuucgaugcucgugagcaguggccacagugucccaccaucaaggaaauuagagaccaaggcuccugcgggucuuguugggccuuuggagcaguggaggccauaucggauaggaucugcauucacacaaacgcucaugucucaguggaaguuagcgcagaggacuugcucacuuguugcggcaguauguguggugaugggugcaauggaggcuauccugccgaggcuuggaacuucuggacccggaaaggccugguguccgggggacuguacgaaucucacgucgguugucgcccauauagcauucccccuugcgagcaucacgugaauggcuccagaccaccgugcacaggggaaggagacacccccaaguguucaaagaucugcgagccuggcuacaguccaacuuauaaacaggauaagcacuacgguuacaacagcuauucuguauccaauucagagaaagacaucauggccgaaauauacaagaacgggcccguugagggagcguuuagcguguauagugauuuccucuuauacaaaucuggcgucuaucagcaugugacaggcgaaaugaugggagggcacgcaaucaggauucuggguuggggcguggagaaugggaccccuuacuggcuugucgccaacuccuggaauacggacuggggagauaacggcuuuuucaagaucuugcggggucaggaccauugugggauugaaagcgagguuguggcuggcaucccacgcacugaccaauauugggagaagauauga

SEQ ID NO: 732 - RNA, 1020 nt, Artificial Sequence
  derived and/or modified sequence opt4 from cathepsin_B__Homo_sapiens__EAW65632
auguggcagcugugggccagccugugcugccugcuggugcuggccaacgccagaagcagacccagcuuccacccccugagcgacgagcuggugaacuacgugaacaagagaaacaccaccuggcaggccggccacaacuucuacaacguggacaugagcuaccugaagagacugugcggcaccuuccugggcggccccaagcccccccagagagugauguucaccgaggaccugaagcugcccgccagcuucgacgccagagagcaguggccccagugccccaccaucaaggagaucagagaccagggcagcugcggcagcugcugggccuucggcgccguggaggccaucagcgacagaaucugcauccacaccaacgcccacgugagcguggaggugagcgccgaggaccugcugaccugcugcggcagcaugugcggcgacggcugcaacggcggcuaccccgccgaggccuggaacuucuggaccagaaagggccuggugagcggcggccuguacgagagccacgugggcugcagacccuacagcaucccccccugcgagcaccacgugaacggcagcagaccccccugcaccggcgagggcgacacccccaagugcagcaagaucugcgagcccggcuacagccccaccuacaagcaggacaagcacuacggcuacaacagcuacagcgugagcaacagcgagaaggacaucauggccgagaucuacaagaacggccccguggagggcgccuucagcguguacagcgacuuccugcuguacaagagcggcguguaccagcacgugaccggcgagaugaugggcggccacgccaucagaauccugggcuggggcguggagaacggcacccccuacuggcugguggccaacagcuggaacaccgacuggggcgacaacggcuucuucaagauccugagaggccaggaccacugcggcaucgagagcgaggugguggccggcauccccagaaccgaccaguacugggagaagaucuga

SEQ ID NO: 733 - RNA, 1020 nt, Artificial Sequence
  derived and/or modified sequence opt5 from cathepsin_B__Homo_sapiens__EAW65632
auguggcagcugugggccagccucugcugucugcuugugcuggcuaacgccagaucccggcccucuuuccacccucucagcgacgagcuggucaauuacguuaacaagcgcaauaccacauggcaagcgggccauaacuuuuauaauguggauauguccuaccuuaaaagacugugcgggacguuccucggaggcccgaagcccccucagcgggugauguuuaccgaagaccugaaacugcccgcuucuuucgaugcccgcgagcaguggccucagugucccacaaucaaggaaauuagagaccaagggagcugcggauccuguugggccuuuggcgcugucgaggccaucucugaucggauuugcauccacaccaacgcucaugugagcguugaaguguccgccgaggaccuccugacauguugcgggagcauguguggagauggcugcaauggcggguauccugcggaggccuggaacuucuggacccgcaaaggacuugucucuggcgggcuguacgaaucccacgugggauguagaccguauagcauucccccuugcgagcaucacguuaauggcucucggcccccuugcacaggggaaggagacacccccaaguguuccaagaucugcgagccgggcuacagcccuacguauaaacaggauaagcacuacggcuacaacucuuauuccgugagcaauuccgagaaagacaucauggcugaaauuuacaagaacgggcccgucgagggagccuuuucuguguauagcgauuuccuccuguacaaauccggcguguaucagcaugucaccggggaaaugaugggaggccacgcuauccgcauucuuggguggggaguugagaauggcacaccuuacuggcugguggccaacagcuggaauaccgacuggggcgauaacggguuuuucaagauccucagaggacaggaccauuguggcauugaaucugagguggucgcggggaucccccggacagaccaauauugggagaagauuuga

SEQ ID NO: 734 - protein, 339 aa, Artificial Sequence; identical to SEQ ID NO: 727
  cathepsin_B__Homo_sapiens__P07858

SEQ ID NO: 735 - RNA, 1020 nt, Artificial Sequence
  cathepsin_B__Homo_sapiens__AAC37547
auguggcagcucugggccucccucugcugccugcugguguuggccaaugcccggagcaggcccucuuuccauccccugucggaugagcuggucaacuaugucaacaaacggaauaccacguggcaggccgggcacaacuucuacaacguggacaugagcuacuugaagaggcuaugugguaccuuccugggugggcccaagccaccccagagaguuauguuuaccgaggaccugaagcugccugcaagcuucgaugcacgggaacaauggccacagugucccaccaucaaagagaucagagaccagggcuccuguggcuccugcugggccuucggggcuguggaagccaucucugaccggaucugcauccacaccaaugcgcacgucagcguggaggugucggcggaggaccugcucacaugcuguggcagcauguguggggacggcuguaaugguggcuauccugcugaagcuuggaacuucuggacaagaaaaggccugguuucugguggccucuaugaaucccauguagggugcagaccguacuccaucccucccugugagcaccacgucaacggcucccggcccccaugcacgggggagggagauacccccaaguguagcaagaucugugagccuggcuacagcccgaccuacaaacaggacaagcacuacggauacaauuccuacagcgucuccaauagcgagaaggacaucauggccgagaucuacaaaaacggccccguggagggagcuuucucuguguauucggacuuccugcucuacaagucaggaguguaccaacacgucaccggagagaugauggguggccaugccauccgcauccugggcuggggaguggagaauggcacacccuacuggcugguugccaacuccuggaacacugacuggggugacaauggcuucuuuaaaauacucagaggacaggaucacuguggaaucgaaucagaagugguggcuggaauuccacgcaccgaucaguacugggaaaagaucuaa

SEQ ID NO: 736 - RNA, 1020 nt, Artificial Sequence; identical to SEQ ID NO: 729
  derived and/or modified sequence opt1 from cathepsin_B__Homo_sapiens__AAC37547

SEQ ID NO: 737 - RNA, 1020 nt, Artificial Sequence; identical to SEQ ID NO: 730
  derived and/or modified sequence opt2 from cathepsin_B__Homo_sapiens__AAC37547

SEQ ID NO: 738 - RNA, 1020 nt, Artificial Sequence; identical to SEQ ID NO: 731
  derived and/or modified sequence opt3 from cathepsin_B__Homo_sapiens__AAC37547

SEQ ID NO: 739 - RNA, 1020 nt, Artificial Sequence; identical to SEQ ID NO: 732
  derived and/or modified sequence opt4 from cathepsin_B__Homo_sapiens__AAC37547

SEQ ID NO: 740 - RNA, 1020 nt, Artificial Sequence; identical to SEQ ID NO: 733
  derived and/or modified sequence opt5 from cathepsin_B__Homo_sapiens__AAC37547

SEQ ID NO: 741 - protein, 333 aa, Artificial Sequence [sequence omitted]

SEQ ID NO: 742 - RNA, 1002 nt, Artificial Sequence
  cathepsin_L__Homo_sapiens__EAW62731
augaauccuacacucauccuugcugccuuuugccugggaauugccucagcuacucuaacauuugaucacaguuuagaggcacaguggaccaaguggaaggcgaugcacaacagauuauacggcaugaaugaagaaggauggaggagagcagugugggagaagaacaugaagaugauugaacugcacaaucaggaauacagggaagggaaacacagcuucacaauggccaugaacgccuuuggagacaugaccagugaagaauucaggcaggugaugaauggcuuucaaaaccguaagcccaggaaggggaaaguguuccaggaaccucuguuuuaugaggcccccagaucuguggauuggagagagaaaggcuacgugacuccugugaagaaucagggucagugugguucuuguugggcuuuuagugcuacuggugcucuugaaggacagauguuccggaaaacugggaggcuuaucucacugagugagcagaaucugguagacugcucugggccucaaggcaaugaaggcugcaaugguggccuaauggauuaugcuuuccaguauguucaggauaauggaggccuggacucugaggaauccuauccauaugaggcaacagaagaauccuguaaguacaaucccaaguauucuguugcuaaugacaccggcuuuguggacaucccuaagcaggagaaggcccugaugaaggcaguugcaacuguggggcccauuucuguugcuauugaugcaggucaugaguccuuccuguucuauaaagaaggcauuuauuuugagccagacuguagcagugaagacauggaucauggugugcuggugguuggcuacggauuugaaagcacagaaucagauaacaauaaauauuggcuggugaagaacagcuggggugaagaauggggcauggguggcuacguaaagauggccaaagaccggagaaaccauuguggaauugccucagcagccagcuaccccacuguguga

SEQ ID NO: 743 - RNA, 1002 nt, Artificial Sequence
  derived and/or modified sequence opt1 from cathepsin_L__Homo_sapiens__EAW62731
augaaccccacccugauccucgccgccuucugccugggcaucgcgagcgccacccugacguucgaccacucccucgaggcccaguggaccaaguggaaggccaugcacaaccgccuguacgggaugaacgaggagggcuggcggcgcgccgugugggagaagaacaugaagaugaucgagcugcacaaccaggaguaccgggaggggaagcacagcuucaccauggcgaugaacgccuucggcgacaugaccuccgaggaguuccgccaggucaugaacggguuccagaaccggaagccgcgcaagggcaagguguuccaggagccccucuucuacgaggcgccccggagcguggacuggcgcgagaagggcuacgucacgcccgugaagaaccaggggcagugcggcuccugcugggccuucagcgccaccggggcccuggagggccagauguuccggaagaccgggcgccugaucucccucagcgagcagaaccugguggacugcuccggcccgcagggcaacgaggggugcaacggcgggcugauggacuacgccuuccaguacguccaggacaacggcggccucgacagcgaggaguccuaccccuacgaggccaccgaggagagcugcaaguacaaccccaaguacuccguggccaacgacacgggguucguggacauccccaagcaggagaaggcgcugaugaaggccgucgccaccgugggcccgaucagcguggccaucgacgccgggcacgaguccuuccuguucuacaaggagggcaucuacuucgagcccgacugcagcuccgaggacauggaccacgggguccucguggugggcuacggcuucgagagcaccgaguccgacaacaacaaguacuggcuggucaagaacagcuggggcgaggagugggggaugggcggguacgugaagauggcgaaggaccggcgcaaccacugcgggaucgccagcgccgccuccuaccccaccguguga

SEQ ID NO: 744 - RNA, 1002 nt, Artificial Sequence
  derived and/or modified sequence opt2 from cathepsin_L__Homo_sapiens__EAW62731
augaaccccacccucauccucgccgccuucugccucggcaucgccuccgccacccucaccuucgaccacucccucgaggcccaguggaccaaguggaaggccaugcacaaccgccucuacggcaugaacgaggagggcuggcgccgcgccgucugggagaagaacaugaagaugaucgagcuccacaaccaggaguaccgcgagggcaagcacuccuucaccauggccaugaacgccuucggcgacaugaccuccgaggaguuccgccaggucaugaacggcuuccagaaccgcaagccccgcaagggcaaggucuuccaggagccccucuucuacgaggccccccgcuccgucgacuggcgcgagaagggcuacgucacccccgucaagaaccagggccagugcggcuccugcugggccuucuccgccaccggcgcccucgagggccagauguuccgcaagaccggccgccucaucucccucuccgagcagaaccucgucgacugcuccggcccccagggcaacgagggcugcaacggcggccucauggacuacgccuuccaguacguccaggacaacggcggccucgacuccgaggaguccuaccccuacgaggccaccgaggaguccugcaaguacaaccccaaguacuccgucgccaacgacaccggcuucgucgacauccccaagcaggagaaggcccucaugaaggccgucgccaccgucggccccaucuccgucgccaucgacgccggccacgaguccuuccucuucuacaaggagggcaucuacuucgagcccgacugcuccuccgaggacauggaccacggcguccucgucgucggcuacggcuucgaguccaccgaguccgacaacaacaaguacuggcucgucaagaacuccuggggcgaggaguggggcaugggcggcuacgucaagauggccaaggaccgccgcaaccacugcggcaucgccuccgccgccuccuaccccaccgucuga

SEQ ID NO: 745 - RNA, 1002 nt, Artificial Sequence
  derived and/or modified sequence opt3 from cathepsin_L__Homo_sapiens__EAW62731
augaaccccacccugauccucgccgcuuucugccuuggcauugcaagcgccacacugacuuuugaccacuccuuggaggcgcaguggacgaaguggaaagcuaugcauaauagauuauacgggaugaacgaagagggauggaggcgggccgugugggaaaagaauaugaaaaugauagagcugcacaaccaagaauaucgcgaggguaagcauucuuucaccauggcaaugaaugccuuuggcgauaugacaucagaggaguuccgacaggucaugaacggguuucagaaucguaaaccuagaaagggaaagguuuuccaggaaccacuauuuuacgaagcuccgaggaguguggacuggcgggagaaaggcuauguaacucccgugaagaaccaaggucagugugggagcugcugggcauucuccgccaccggagcucucgagggccagauguuucgcaaaacaggcagacugaucucucuuucggaacagaaucuggucgauuguucagggccucaaggaaacgaggguugcaauggcggguugauggacuacgccuuccaguaugugcaggauaacggaggccucgacagcgaagagaguuacccauaugaagcgaccgaggaguccuguaaguacaaucccaaauacucuguugcaaacgauacugguuuuguggacauuccuaagcaggaaaaggcccugaugaaagcugucgccacaguggggccaaucagcguagcaauugaugcuggacacgaguccuuccuguuuuauaaggaaggcaucuacuucgagcccgacugcucaagugaagauauggaccauggcguucucguggucggguauggauucgagagcaccgagucugauaauaacaaauacugguuagugaagaacuccuggggugaagaguggggcaugggaggguaugugaaaauggccaaggacaggcggaaucacuguggcauagcgucagccgcaagcuacccuacggucuga

SEQ ID NO: 746 - RNA, 1002 nt, Artificial Sequence
  derived and/or modified sequence opt4 from cathepsin_L__Homo_sapiens__EAW62731
augaaccccacccugauccuggccgccuucugccugggcaucgccagcgccacccugaccuucgaccacagccuggaggcccaguggaccaaguggaaggccaugcacaacagacuguacggcaugaacgaggagggcuggagaagagccgugugggagaagaacaugaagaugaucgagcugcacaaccaggaguacagagagggcaagcacagcuucaccauggccaugaacgccuucggcgacaugaccagcgaggaguucagacaggugaugaacggcuuccagaacagaaagcccagaaagggcaagguguuccaggagccccuguucuacgaggcccccagaagcguggacuggagagagaagggcuacgugacccccgugaagaaccagggccagugcggcagcugcugggccuucagcgccaccggcgcccuggagggccagauguucagaaagaccggcagacugaucagccugagcgagcagaaccugguggacugcagcggcccccagggcaacgagggcugcaacggcggccugauggacuacgccuuccaguacgugcaggacaacggcggccuggacagcgaggagagcuaccccuacgaggccaccgaggagagcugcaaguacaaccccaaguacagcguggccaacgacaccggcuucguggacauccccaagcaggagaaggcccugaugaaggccguggccaccgugggccccaucagcguggccaucgacgccggccacgagagcuuccuguucuacaaggagggcaucuacuucgagcccgacugcagcagcgaggacauggaccacggcgugcugguggugggcuacggcuucgagagcaccgagagcgacaacaacaaguacuggcuggugaagaacagcuggggcgaggaguggggcaugggcggcuacgugaagauggccaaggacagaagaaaccacugcggcaucgccagcgccgccagcuaccccaccguguga

SEQ ID NO: 747 - RNA, 1002 nt, Artificial Sequence
  derived and/or modified sequence opt5 from cathepsin_L__Homo_sapiens__EAW62731
augaaccccacccugauccucgccgcuuucugccugggcauugccagcgcgacacuuacguuugaccacucccuggaggcucaguggaccaaguggaaagccaugcauaauagacucuacgggaugaacgaagagggauggcggcgcgccgugugggaaaagaauaugaaaaugaucgagcugcacaaccaagaauauagagagggcaagcauucuuucacaauggcuaugaaugccuuuggggauaugaccagcgaggaauuucggcaggucaugaacggauuucagaaucgcaaaccuagaaagggcaagguuuuccaggagccgcuuuucuacgaagcuccccgguccguggacuggcgcgagaaaggguaugugacaccugucaagaaccaaggacaguguggcucuugcugggccuucagcgcgaccggcgcccuggaggggcagauguuuagaaaaacaggacggcucauuucccugucugaacagaaucugguggauuguagcggcccccaagggaacgagggaugcaauggcgggcucauggacuacgcuuuccaguauguucaggauaacggaggccuggacuccgaagagagcuacccuuaugaagccaccgaggagucuuguaaguacaaucccaaauacuccguggcuaacgauacgggcuuugucgacaucccuaagcaggaaaaggcccuuaugaaagcgguggccaccguugggccgauuagcguggcuaucgaugccggacacgagucuuuccuguuuuauaaggaaggcaucuacuucgagcccgacugcuccagcgaagauauggaccaugggguccucguggugggauauggcuucgagucuacagaguccgauaauaacaaauacuggcuggucaagaacagcuggggagaagagugggggaugggcggcuauguuaaaauggcuaaggaccgcagaaaucacugugggauugccuccgccgcuucuuacccuaccguguga

SEQ ID NO: 748 - protein, 333 aa, Artificial Sequence [sequence omitted]

SEQ ID NO: 749 - RNA, 1002 nt, Artificial Sequence; identical to SEQ ID NO: 742
  cathepsin_L__Homo_sapiens__AAA66974

SEQ ID NO: 750 - RNA, 1002 nt, Artificial Sequence; identical to SEQ ID NO: 743
  derived and/or modified sequence opt1 from cathepsin_L__Homo_sapiens__AAA66974

SEQ ID NO: 751 - RNA, 1002 nt, Artificial Sequence; identical to SEQ ID NO: 744
  derived and/or modified sequence opt2 from cathepsin_L__Homo_sapiens__AAA66974

SEQ ID NO: 752 - RNA, 1002 nt, Artificial Sequence; identical to SEQ ID NO: 745
  derived and/or modified sequence opt3 from cathepsin_L__Homo_sapiens__AAA66974

SEQ ID NO: 753 - RNA, 1002 nt, Artificial Sequence; identical to SEQ ID NO: 746
  derived and/or modified sequence opt4 from cathepsin_L__Homo_sapiens__AAA66974

SEQ ID NO: 754 - RNA, 1002 nt, Artificial Sequence; identical to SEQ ID NO: 747
  derived and/or modified sequence opt5 from cathepsin_L__Homo_sapiens__AAA66974

SEQ ID NO: 755 - protein, 151 aa, Artificial Sequence
  cathepsin_L__Homo_sapiens__Q9HBQ7
MDYAFQYVQDNGGLDSEESYPYEATEESCKYNPKYSVANDTGFVDIPKQEKALMKAVATVGPISVAIDAGHESFLFYKEGIYFEPDCSSEDMDHGVLVVGYGFESTESDNNKYWLVKNSWGEEWGMGGYVKMAKDRRNHCGIASAASYPTV

SEQ ID NO: 756 - RNA, 456 nt, Artificial Sequence
  cathepsin_L__Homo_sapiens__AAG17239
auggauuaugcuuuccaguauguucaggauaauggaggccuggacucugaggaauccuauccauaugaggcaacagaagaauccuguaaguacaaucccaaguauucuguugcuaaugacaccggcuuuguggacaucccuaagcaggagaaggcccugaugaaggcaguugcaacuguggggcccauuucuguugcuauugaugcaggucaugaguccuuccuguucuauaaagaaggcauuuauuuugagccagacuguagcagugaagacauggaucauggugugcuggugguuggcuacggauuugaaagcacagaaucagauaacaauaaauauuggcuggugaagaacagcuggggugaagaauggggcauggguggcuacguaaagauggccaaagaccggagaaaccauuguggaauugccucagcagccagcuaccccacuguguga

SEQ ID NO: 757 - RNA, 456 nt, Artificial Sequence
  derived and/or modified sequence opt1 from cathepsin_L__Homo_sapiens__AAG17239
auggacuacgccuuccaguacgugcaggacaacggcgggcuggacagcgaggaguccuaccccuacgaggccaccgaggagagcugcaaguacaacccgaaguacuccgucgcgaacgacaccggcuucguggacauccccaagcaggagaaggcccucaugaaggccguggccacggucgggcccaucagcguggccaucgacgcgggccacgaguccuuccuguucuacaaggaggggaucuacuucgagcccgacugcagcuccgaggacauggaccacggcgugcuggucgugggcuacggguucgagagcaccgaguccgacaacaacaaguacuggcucgugaagaacagcuggggcgaggagugggggaugggcggguacgucaagauggccaaggaccgccggaaccacugcggcaucgccuccgccgcgagcuacccgaccguguga

SEQ ID NO: 758 - RNA, 456 nt, Artificial Sequence
  derived and/or modified sequence opt2 from cathepsin_L__Homo_sapiens__AAG17239
auggacuacgccuuccaguacguccaggacaacggcggccucgacuccgaggaguccuaccccuacgaggccaccgaggaguccugcaaguacaaccccaaguacuccgucgccaacgacaccggcuucgucgacauccccaagcaggagaaggcccucaugaaggccgucgccaccgucggccccaucuccgucgccaucgacgccggccacgaguccuuccucuucuacaaggagggcaucuacuucgagcccgacugcuccuccgaggacauggaccacggcguccucgucgucggcuacggcuucgaguccaccgaguccgacaacaacaaguacuggcucgucaagaacuccuggggcgaggaguggggcaugggcggcuacgucaagauggccaaggaccgccgcaaccacugcggcaucgccuccgccgccuccuaccccaccgucuga

SEQ ID NO: 759 - RNA, 456 nt, Artificial Sequence
  derived and/or modified sequence opt3 from cathepsin_L__Homo_sapiens__AAG17239
auggacuacgccuuccaguaugugcaagauaacggcgggcuggacagcgaggaauccuaccccuaugaggcuaccgaagagucuugcaaguacaauccuaaauauucagucgcaaacgauacaggauuuguugacaucccaaagcaggaaaaagcccucaugaaggcgguggcuacuguagguccgauuaguguggccauagaugcaggccacgagagcuuccuguuuuacaaagaggggaucuauuucgaacccgacuguuccucugaggauauggaccauggaguccuugugguuggcuacgguuuugaaucgacggagucagauaauaacaaguacugguuggugaagaauagcuggggagaggaaugggggaugggcggcuaugucaaaauggccaaggacagaaggaaccacugcgggauugcuagugcagccuccuacccuaccguguga

SEQ ID NO: 760 - RNA, 456 nt, Artificial Sequence
  derived and/or modified sequence opt4 from cathepsin_L__Homo_sapiens__AAG17239
auggacuacgccuuccaguacgugcaggacaacggcggccuggacagcgaggagagcuaccccuacgaggccaccgaggagagcugcaaguacaaccccaaguacagcguggccaacgacaccggcuucguggacauccccaagcaggagaaggcccugaugaaggccguggccaccgugggccccaucagcguggccaucgacgccggccacgagagcuuccuguucuacaaggagggcaucuacuucgagcccgacugcagcagcgaggacauggaccacggcgugcugguggugggcuacggcuucgagagcaccgagagcgacaacaacaaguacuggcuggugaagaacagcuggggcgaggaguggggcaugggcggcuacgugaagauggccaaggacagaagaaaccacugcggcaucgccagcgccgccagcuaccccaccguguga

SEQ ID NO: 761 - RNA, 456 nt, Artificial Sequence
  derived and/or modified sequence opt5 from cathepsin_L__Homo_sapiens__AAG17239
auggacuacgccuuccaguaugugcaagauaacggcgggcuggacagcgaggaauccuaccccuaugaggcuaccgaagagucuugcaaguacaauccuaaauauagcgucgccaacgauacaggauuuguugacaucccgaagcaggaaaaagcgcucaugaaggcuguggccacggugggccccauuuccgucgccaucgaugcugggcacgagucuuuccuguuuuacaaagagggaauuuauuucgaaccugacuguagcuccgaggauauggaccauggcgugcuuguugugggguacggauuugaaucuaccgagagcgauaauaacaaguacuggcuggucaaaaauuccuggggcgaggaauggggcaugggaggguaugugaagauggccaaggacagacggaaccacugcggcaucgcuagcgccgcgucuuaccccacaguuuga

SEQ ID NO: 762 - protein, 327 aa, Artificial Sequence
  CD1A__Homo_sapiens__P06126
MLFLLLPLLAVLPGDGNADGLKEPLSFHVTWIASFYNHSWKQNLVSGWLSDLQTHTWDSNSSTIVFLCPWSRGNFSNEEWKELETLFRIRTIRSFEGIRRYAHELQFEYPFEIQVTGGCELHSGKVSGSFLQLAYQGSDFVSFQNNSWLPYPVAGNMAKHFCKVLNQNQHENDITHNLLSDTCPRFILGLLDAGKAHLQRQVKPEAWLSHGPSPGPGHLQLVCHVSGFYPKPVWVMWMRGEQEQQGTQRGDILPSADGTWYLRATLEVAAGEAADLSCRVKHSSLEGQDIVLYWEHHSSVGFIILAVIVPLLLLIGLALWFRKRCFC

SEQ ID NO: 763 - RNA, 984 nt, Artificial Sequence
  CD1A__Homo_sapiens__AAA51932
augcuguuuuugcuacuuccauuguuagcuguucucccaggugauggcaaugcagacgggcucaaggagccucucuccuuccaugucaccuggaucgcauccuuuuacaaccauuccuggaaacaaaaucuggucucagguuggcugagugauuugcagacucauaccugggacagcaauuccagcaccaucguuuuccugugccccugguccaggggaaacuucagcaaugaggaguggaaggaacuggaaacauuauuccguauacgcaccauucggucauuugagggaauucguagauacgcccaugaauugcaguuugaauauccuuuugagauacaggugacaggaggcugugagcugcacucuggaaaggucucaggaagcuucuugcaguuagcuuaucaaggaucagacuuugugagcuuccagaacaauucaugguugccauauccaguggcugggaauauggccaagcauuucugcaaagugcucaaucagaaucagcaugaaaaugacauaacacacaaucuucucagugacaccugcccacguuucaucuugggucuucuugaugcaggaaaggcacaucuccagcggcaagugaagcccgaggccuggcugucccauggccccaguccuggcccuggccaucugcagcuugugugccaugucucaggauucuacccaaagcccgugugggugauguggaugcggggugagcaggagcagcagggcacucagcgaggggacaucuugcccagugcugaugggacaugguaucuccgcgcaacccuggagguggccgcuggggaggcagcugaccuguccugucgggugaagcacagcagucuagagggccaggacaucguccucuacugggagcaucacaguuccgugggcuucaucaucuuggcggugauagugccuuuacuucuucugauaggucuugcgcuuugguucaggaaacgcuguuucuguuaa

SEQ ID NO: 764 - RNA, 984 nt, Artificial Sequence
  derived and/or modified sequence opt1 from CD1A__Homo_sapiens__AAA51932
augcuguuccuccugcugccccuccuggccgugcugccgggcgacgggaacgccgacggccucaaggagccccugagcuuccacgucaccuggaucgcguccuucuacaaccacagcuggaagcagaaccugguguccggguggcucagcgaccugcagacccacacgugggacuccaacagcuccaccaucguguuccugugccccuggagccgcggcaacuucuccaacgaggaguggaaggagcucgagacccuguuccggauccgcaccauccggagcuucgaggggauccgccgguacgcccacgagcugcaguucgaguaccccuucgagauccaggucacgggcggcugcgagcuccacuccgggaaggugagcggcuccuuccugcagcuggccuaccaggggagcgacuucguguccuuccagaacaacagcuggcucccguaccccgucgccggcaacauggccaagcacuucugcaaggugcugaaccagaaccagcacgagaacgacaucacccacaaccugcucuccgacacgugcccccgcuucauccuggggcugcucgacgcgggcaaggcccaccuccagcgccaggugaagcccgaggccuggcugagccacggcccgucccccgggcccggccaccuccagcuggucugccacgugagcggguucuaccccaagccggugugggucauguggaugcggggcgagcaggagcagcagggcacccagcgcggggacauccugcccagcgccgacggcaccugguaccugcgggcgacccuggagguggccgccggggaggccgccgaccuguccugccgggugaagcacagcucccucgagggccaggacaucguccuguacugggagcaccacagcuccgugggguucaucauccuggcggugaucgucccccuccugcugcucaucggccuggcccugugguuccgcaagcggugcuucugcuga

SEQ ID NO: 765 - RNA, 984 nt, Artificial Sequence
  derived and/or modified sequence opt2 from CD1A__Homo_sapiens__AAA51932
augcucuuccuccuccucccccuccucgccguccuccccggcgacggcaacgccgacggccucaaggagccccucuccuuccacgucaccuggaucgccuccuucuacaaccacuccuggaagcagaaccucgucuccggcuggcucuccgaccuccagacccacaccugggacuccaacuccuccaccaucgucuuccucugccccuggucccgcggcaacuucuccaacgaggaguggaaggagcucgagacccucuuccgcauccgcaccauccgcuccuucgagggcauccgccgcuacgcccacgagcuccaguucgaguaccccuucgagauccaggucaccggcggcugcgagcuccacuccggcaaggucuccggcuccuuccuccagcucgccuaccagggcuccgacuucgucuccuuccagaacaacuccuggcuccccuaccccgucgccggcaacauggccaagcacuucugcaagguccucaaccagaaccagcacgagaacgacaucacccacaaccuccucuccgacaccugcccccgcuucauccucggccuccucgacgccggcaaggcccaccuccagcgccaggucaagcccgaggccuggcucucccacggccccucccccggccccggccaccuccagcucgucugccacgucuccggcuucuaccccaagcccgucugggucauguggaugcgcggcgagcaggagcagcagggcacccagcgcggcgacauccuccccuccgccgacggcaccugguaccuccgcgccacccucgaggucgccgccggcgaggccgccgaccucuccugccgcgucaagcacuccucccucgagggccaggacaucguccucuacugggagcaccacuccuccgucggcuucaucauccucgccgucaucgucccccuccuccuccucaucggccucgcccucugguuccgcaagcgcugcuucugcuga

SEQ ID NO: 766 - RNA, 984 nt, Artificial Sequence
  derived and/or modified sequence opt3 from CD1A__Homo_sapiens__AAA51932
augcuguuccuccuucugcccuuguuagccgugcugccuggcgacgggaacgcugauggacuaaaggagccacucagcuuucacgucaccuggaucgcauccuucuacaaucauucuuggaaacagaaccugguuucagguuggcuuagugaccugcaaacacacacuugggauagcaauuccucuacgauuguguuuuugugcccguggucgagaggcaacuucucaaaugaagaguggaaggaacucgagacccuguuuaggauacggacaauccgcagcuucgaagggauucgacguuaugcccaugagcugcaguuugaguaccccuucgaaauccagguaacuggaggcugugagcuccacagugguaaaguguccgggagcuuuuuacagcuggcguaucaaggaucugacuucgucuccuuucagaacaauucauggcuuccuuacccaguggcuggcaacauggccaagcauuucugcaaaguuuugaaucagaaccagcacgaaaaugauauuacccacaaccugcuaagugacacaugucccagauuuauccucggccugcuugaugcagggaaggcccaucugcaaaggcaagugaagccugaggcuugguugagccacggaccaucucccgguccuggccaucuccagcuggucugccacguguccggguucuauccaaaaccgguauggguuauguggaugcggggagagcaggaacagcagggcacccagcgcggugacauauuacccucagcagaugggacuugguaccugagagccacacucgagguggcugccggagaagcggcagaccuuagcuguagggucaagcacaguucucuggagggccaagauaucguguuguauugggaacaucacuccagcgugggcuucauuauccuagccgucauuguuccucugcuccugcuuaucgggcuggcuuugugguuucggaaacgcugcuucuguuga

SEQ ID NO: 767 - RNA, 984 nt, Artificial Sequence
  derived and/or modified sequence opt4 from CD1A__Homo_sapiens__AAA51932
augcuguuccugcugcugccccugcuggccgugcugcccggcgacggcaacgccgacggccugaaggagccccugagcuuccacgugaccuggaucgccagcuucuacaaccacagcuggaagcagaaccuggugagcggcuggcugagcgaccugcagacccacaccugggacagcaacagcagcaccaucguguuccugugccccuggagcagaggcaacuucagcaacgaggaguggaaggagcuggagacccuguucagaaucagaaccaucagaagcuucgagggcaucagaagauacgcccacgagcugcaguucgaguaccccuucgagauccaggugaccggcggcugcgagcugcacagcggcaaggugagcggcagcuuccugcagcuggccuaccagggcagcgacuucgugagcuuccagaacaacagcuggcugcccuaccccguggccggcaacauggccaagcacuucugcaaggugcugaaccagaaccagcacgagaacgacaucacccacaaccugcugagcgacaccugccccagauucauccugggccugcuggacgccggcaaggcccaccugcagagacaggugaagcccgaggccuggcugagccacggccccagccccggccccggccaccugcagcuggugugccacgugagcggcuucuaccccaagcccgugugggugauguggaugagaggcgagcaggagcagcagggcacccagagaggcgacauccugcccagcgccgacggcaccugguaccugagagccacccuggagguggccgccggcgaggccgccgaccugagcugcagagugaagcacagcagccuggagggccaggacaucgugcuguacugggagcaccacagcagcgugggcuucaucauccuggccgugaucgugccccugcugcugcugaucggccuggcccugugguucagaaagagaugcuucugcuga

SEQ ID NO: 768 - RNA, 984 nt, Artificial Sequence
  derived and/or modified sequence opt5 from CD1A__Homo_sapiens__AAA51932
augcuguuccuccugcuuccccugcucgccgugcugccuggcgacgggaacgcugauggacuuaaggagccgcugagcuuucacgucaccuggaucgccuccuucuacaaucauucuuggaaacagaaccucguuagcggcuggcuguccgaccugcaaacacacacgugggauucuaauagcuccaccauuguguuucucugccccuggucuagagggaacuucagcaaugaagaguggaaggaacuggagacacuuuuucggauccgcaccauuagauccuucgaaggaauccggcgcuaugcgcaugagcugcaguuugaguacccuuucgaaauucaggugacaggcgggugugagcuccacagcggaaaagucucuggcuccuuucugcagcuugcuuaucaaggcagcgacuucgugucuuuucagaacaauuccuggcugcccuacccuguugccgggaacauggccaagcauuucugcaaagugcucaaucagaaccagcacgaaaaugauaucacccacaaccugcugagcgacacaugucccagauuuauccucggacugcuugaugcuggcaaggcccaucugcaacggcaggucaagccugaggcuuggcucucucacgggccgucccccggaccuggccaucugcagcuugugugccacguuagcggguucuaucccaaaccugugugggucauguggaugcgcggagagcaggaacaacagggcacccagagaggcgacauucugcccuccgccgaugggacgugguaccuccgggcgacccuggagguggccgcuggagaagccgcugaccugucuugucgcgugaagcacagcucccucgagggccaagauaucguccuguauugggaacaucacagcucuguuggguucauuauccuugccgugauugugccgcugcuccugcuuaucggacuggcgcucugguuuagaaaacggugcuucuguuga

SEQ ID NO: 769 - protein, 333 aa, Artificial Sequence
  CD1B__Homo_sapiens__P29016
MLLLPFQLLAVLFPGGNSEHAFQGPTSFHVIQTSSFTNSTWAQTQGSGWLDDLQIHGWDSDSGTAIFLKPWSKGNFSDKEVAELEEIFRVYIFGFAREVQDFAGDFQMKYPFEIQGIAGCELHSGGAIVSFLRGALGGLDFLSVKNASCVPSPEGGSRAQKFCALIIQYQGIMETVRILLYETCPRYLLGVLNAGKADLQRQVKPEAWLSSGPSPGPGRLQLVCHVSGFYPKPVWVMWMRGEQEQQGTQLGDILPNANWTWYLRATLDVADGEAAGLSCRVKHSSLEGQDIILYWRNPTSIGSIVLAIIVPSLLLLLCLALWYMRRRSYQNIP

SEQ ID NO: 770 - RNA, 1002 nt, Artificial Sequence
  CD1B__Homo_sapiens__AAA51939
augcugcugcugccauuucaacuguuagcuguucucuuuccuggugguaacagugaacaugccuuccaggggccgaccuccuuucauguuauccagaccucguccuuuaccaauaguaccugggcacaaacucaaggcucaggcugguuggaugauuugcagauucauggcugggauagcgacucaggcacugccauauuccugaagccuuggucuaaagguaacuuuagugauaaggagguugcugaguuagaggagauauuccgagucuacaucuuuggauucgcucgagaaguacaagacuuugccggugauuuccagaugaaauaccccuuugagauccagggcauagcaggcugugagcuacauucuggaggugccauaguaagcuuccugaggggagcucuaggaggauuggauuuccugagugucaagaaugcuucaugugugccuuccccagaagguggcagcagggcacagaaauucugugcacuaaucauacaauaucaagguaucauggaaacugugagaauucuccucuaugaaaccugcccccgauaucucuugggcguccucaaugcaggaaaagcagaucugcaaagacaagugaagccugaggccuggcuguccaguggccccaguccuggaccuggccgucugcagcuugugugccaugucucaggauucuacccaaagcccgugugggugauguggaugcggggugagcaggagcagcagggcacucagcuaggggacauccugcccaaugcuaacuggacaugguaucuccgagcaacccuggauguggcagauggggaggcggcuggccuguccugucgggugaagcacagcaguuuagagggccaggacaucauccucuacuggagaaaccccaccuccauuggcucaauuguuuuggcaauaauagugccuuccuugcuccuuuugcuaugccuugcauuaugguauaugaggcgccggucauaucagaauaucccauga

SEQ ID NO: 771 - RNA, 1002 nt, Artificial Sequence
  derived and/or modified sequence opt1 from CD1B__Homo_sapiens__AAA51939
augcugcuccugcccuuccagcugcucgccgugcuguucccgggcgggaacagcgagcacgccuuccagggccccaccuccuuccacgucauccagaccagcuccuucacgaacagcaccugggcgcagacccagggguccggcuggcuggacgaccuccagauccacgggugggacagcgacuccggcaccgccaucuuccugaagcccuggagcaagggcaacuucuccgacaaggagguggccgagcuggaggagaucuuccgcguguacaucuucggguucgcccgggagguccaggacuucgccggcgacuuccagaugaaguaccccuucgagauccaggggaucgcgggcugcgagcuccacagcgggggcgccaucguguccuuccugcgcggcgcccucgggggccuggacuuccugagcgugaagaacgccuccugcgucccgagccccgagggcgggucccgggcgcagaaguucugcgcccugaucauccaguaccagggcaucauggagacggugcgcauccuccuguacgagaccugcccccgguaccugcucggggugcugaacgccggcaaggccgaccugcagcgccaggucaagcccgaggccuggcucagcuccgggccgagccccggccccgggcggcugcagcuggugugccacguguccggcuucuaccccaagccggucugggugauguggaugcgcggcgagcaggagcagcaggggacccagcucggcgacauccugcccaacgcgaacuggaccugguaccugcgggccacgcucgacguggccgacggggaggccgccggccugagcugccgcgucaagcacagcucccuggaggggcaggacaucauccucuacuggcggaaccccaccagcaucggcuccaucgugcuggcgaucaucgugcccagccugcuccugcugcucugccuggcccugugguacaugcgccggcgcuccuaccagaacaucccguga

SEQ ID NO: 772 - RNA, 1002 nt, Artificial Sequence
  derived and/or modified sequence opt2 from CD1B__Homo_sapiens__AAA51939
augcuccuccuccccuuccagcuccucgccguccucuuccccggcggcaacuccgagcacgccuuccagggccccaccuccuuccacgucauccagaccuccuccuucaccaacuccaccugggcccagacccagggcuccggcuggcucgacgaccuccagauccacggcugggacuccgacuccggcaccgccaucuuccucaagcccugguccaagggcaacuucuccgacaaggaggucgccgagcucgaggagaucuuccgcgucuacaucuucggcuucgcccgcgagguccaggacuucgccggcgacuuccagaugaaguaccccuucgagauccagggcaucgccggcugcgagcuccacuccggcggcgccaucgucuccuuccuccgcggcgcccucggcggccucgacuuccucuccgucaagaacgccuccugcguccccucccccgagggcggcucccgcgcccagaaguucugcgcccucaucauccaguaccagggcaucauggagaccguccgcauccuccucuacgagaccugcccccgcuaccuccucggcguccucaacgccggcaaggccgaccuccagcgccaggucaagcccgaggccuggcucuccuccggccccucccccggccccggccgccuccagcucgucugccacgucuccggcuucuaccccaagcccgucugggucauguggaugcgcggcgagcaggagcagcagggcacccagcucggcgacauccuccccaacgccaacuggaccugguaccuccgcgccacccucgacgucgccgacggcgaggccgccggccucuccugccgcgucaagcacuccucccucgagggccaggacaucauccucuacuggcgcaaccccaccuccaucggcuccaucguccucgccaucaucguccccucccuccuccuccuccucugccucgcccucugguacaugcgccgccgcuccuaccagaacauccccuga

SEQ ID NO: 773 - RNA, 1002 nt, Artificial Sequence
  derived and/or modified sequence opt3 from CD1B__Homo_sapiens__AAA51939
augcugcuccuucccuuccagcuguuggccguguuauuuccuggcgggaacagcgagcacgcuuuccaaggaccaaccuccuuucaugucauccagacaucuucauucacuaauaguacgugggcacagacccaggguagcggcuggcuggacgaucuacaaauucacgggugggacuccgauucuggaacagccauauuucucaagccguggucgaaaggcaacuucucagacaaggaaguugcggagcuggaagagaucuuuagaguguacauuuucgguuuugcuagggaaguacaggauuucgccggggacuuucagaugaaauaucccuucgagauccagggaauugcaggcugcgagcuucauagcggcggggccaucgugaguuuucugcggggagcuuuggguggccucgauuuccuguccgucaagaaugcaucuugugugccuagcccagaagggggaucccgcgcccaaaaauucugcgcucugauaauccaguaccagggcauuauggagacuguucgaauccucuuauaugaaaccuguccccguuaccugcuugguguguugaacgccgggaaggcggaccugcagagacaagucaagccugaggcauggcuaucaaguggaccaagccccggcccuggcaggcuccagcuggugugccacguaucuggguuuuauccaaaaccgguuugggugauguggaugcggggagagcaggaacaacaggguacacagcuuggcgauauucugcccaaugccaacuggaccugguacuugcgcgcuacucucgacgucgccgauggggaggcagcuggacuguccuguagagugaagcauagcucauuagaaggccaggacaucauacuguauuggaggaauccuacaaguauugguucuaucgugcucgccauuaucgucccaucccuucuguugcuacugugccucgcgcugugguacaugcggcgccgaagcuaccaaaacauccccuga

SEQ ID NO: 774 - RNA, 1002 nt, Artificial Sequence
  derived and/or modified sequence opt4 from CD1B__Homo_sapiens__AAA51939
augcugcugcugcccuuccagcugcuggccgugcuguuccccggcggcaacagcgagcacgccuuccagggccccaccagcuuccacgugauccagaccagcagcuucaccaacagcaccugggcccagacccagggcagcggcuggcuggacgaccugcagauccacggcugggacagcgacagcggcaccgccaucuuccugaagcccuggagcaagggcaacuucagcgacaaggagguggccgagcuggaggagaucuucagaguguacaucuucggcuucgccagagaggugcaggacuucgccggcgacuuccagaugaaguaccccuucgagauccagggcaucgccggcugcgagcugcacagcggcggcgccaucgugagcuuccugagaggcgcccugggcggccuggacuuccugagcgugaagaacgccagcugcgugcccagccccgagggcggcagcagagcccagaaguucugcgcccugaucauccaguaccagggcaucauggagaccgugagaauccugcuguacgagaccugccccagauaccugcugggcgugcugaacgccggcaaggccgaccugcagagacaggugaagcccgaggccuggcugagcagcggccccagccccggccccggcagacugcagcuggugugccacgugagcggcuucuaccccaagcccgugugggugauguggaugagaggcgagcaggagcagcagggcacccagcugggcgacauccugcccaacgccaacuggaccugguaccugagagccacccuggacguggccgacggcgaggccgccggccugagcugcagagugaagcacagcagccuggagggccaggacaucauccuguacuggagaaaccccaccagcaucggcagcaucgugcuggccaucaucgugcccagccugcugcugcugcugugccuggcccugugguacaugagaagaagaagcuaccagaacauccccuga

SEQ ID NO: 775 - RNA, 1002 nt, Artificial Sequence
  derived and/or modified sequence opt5 from CD1B__Homo_sapiens__AAA51939
augcugcuccugcccuuccagcuucuggccgugcucuuuccuggcgggaacagcgagcacgcuuuccaaggaccgaccuccuuucaugucauccagacaucuagcuucaccaauuccacgugggcccagacacagggcucuggguggcuggacgaucuucaaauucacggaugggacagcgauuccggcaccgcgaucuuucugaagcccuggucuaaagggaacuucagcgacaaggaaguugcugagcucgaagagauuuuuagaguguacaucuucggauuugcccgggaagugcaggauuucgccggcgacuuucagaugaaauauccuuucgagauucagggcaucgcugggugcgagcugcauuccggaggcgccaucgucagcuuucugcgcggggcucucggaggccuggauuuccuuucugugaagaaugccuccuguguucccagcccugaagggggaucuagagcgcaaaaauucugcgcccugauuauccaguaccagggcauuauggagacagugcggauccuccuguaugaaaccuguccccgcuaccuucugggcguccucaacgcugggaaggccgaccugcagagacaagugaagccugaggcuuggcuguccagcggaccgucucccggcccugggcggcuccagcugguuugccacguguccggauuuuaucccaaaccugucugggugauguggaugcgcggcgagcaggaacaacaggggacacagcuuggagauauucugcccaaugccaacuggaccugguaccucagagcgacgcuggacguggccgauggcgaggcugccggccuuagcugucgggucaagcauuccucucuggaagggcaggacaucauucucuauuggcgcaauccgaccagcaucggauccaucguucuggcuauuaucgugccuagccugcuccugcuucugugccucgcccugugguacaugagacggcgcucuuaccaaaacauucccuga

SEQ ID NO: 776 - protein, 333 aa, Artificial Sequence
  CD1C__Homo_sapiens__P29017
MLFLQFLLLALLLPGGDNADASQEHVSFHVIQIFSFVNQSWARGQGSGWLDELQTHGWDSESGTIIFLHNWSKGNFSNEELSDLELLFRFYLFGLTREIQDHASQDYSKYPFEVQVKAGCELHSGKSPEGFFQVAFNGLDLLSFQNTTWVPSPGCGSLAQSVCHLLNHQYEGVTETVYNLIRSTCPRFLLGLLDAGKMYVHRQVRPEAWLSSRPSLGSGQLLLVCHASGFYPKPVWVTWMRNEQEQLGTKHGDILPNADGTWYLQVILEVASEEPAGLSCRVRHSSLGGQDIILYWGHHFSMNWIALVVIVPLVILIVLVLWFKKHCSYQDIL

SEQ ID NO: 777 - RNA, 1002 nt, Artificial Sequence
  CD1C__Homo_sapiens__AAI26466
augcuguuucugcaguuucugcugcuagcucuucuucucccagguggugacaaugcagacgcaucccaggaacacgucuccuuccaugucauccagaucuucucauuugucaaccaauccugggcacgaggucagggcucaggauggcuggacgaguugcagacucauggcugggacagugaaucaggcacaauaauuuuccugcauaacugguccaagggcaacuucagcaaugaagaguugucagaccuagaguuguuauuucguuucuaccucuuuggauuaacucgggagauucaagaccaugcaagucaagauuacucgaaauaucccuuugaaguacaggugaaagcgggcugugagcugcauucuggaaagagcccagaaggcuucuuucagguagcuuucaacggauuagauuuacugaguuuccagaauacaacaugggugccaucuccaggcuguggaaguuuggcccaaagugucugucaucuacucaaucaucaguaugaaggcgucacagaaacaguguauaaucucauaagaagcacuugcccccgauuucucuugggucuccuggaugcagggaagauguauguacacaggcaagugaggccagaagccuggcuguccagucgccccagccuugggucuggccagcuguugcugguuugucaugccuccggcuucuacccaaagccuguuugggugacauggaugcggaaugaacaggagcaacugggcacuaaacauggugauauucuuccuaaugcugaugggacaugguaucuucaggugauccuggagguggcaucugaggagccugcuggccugucuugucgagugagacacagcagucuaggaggccaggacaucauccucuacuggggacaccacuuuuccaugaauuggauugccuugguagugauagugcccuuggugauucuaauaguccuuguguuaugguuuaagaagcacugcucauaucaggacauccuguga

SEQ ID NO: 778 - RNA, 1002 nt, Artificial Sequence
  derived and/or modified sequence opt1 from CD1C__Homo_sapiens__AAI26466
augcuguuccuccaguuccugcugcucgcccugcugcuccccggcggggacaacgccgacgcgagccaggagcacguguccuuccacgucauccagaucuucagcuucgugaaccaguccugggcccgcggccaggggagcggcuggcuggacgagcugcagacccacgggugggacuccgagagcggcaccaucaucuuccuccacaacugguccaagggcaacuucagcaacgaggagcuguccgaccuggagcuccuguuccgguucuaccuguucgggcucacgcgcgagauccaggaccacgccagccaggacuacuccaaguacccguucgaggugcaggucaaggccggcugcgagcugcacagcgggaagucccccgagggcuucuuccagguggccuucaacgggcuggaccuccugagcuuccagaacaccaccugggugcccucccccggcugcggcagccuggcgcaguccgucugccaccuccugaaccaccaguacgagggggugaccgagacgguguacaaccugauccggagcacgugcccgcgcuuccuccugggccugcucgacgccgggaagauguacguccaccgccaggugcggcccgaggccuggcuguccagccggcccagccugggcuccggccagcuccugcuggugugccacgccagcggguucuaccccaagccggucugggugaccuggaugcgcaacgagcaggagcagcucggcaccaagcacggggacauccugcccaacgcggacggcaccugguaccuccaggugauccuggaggucgccuccgaggagcccgccgggcugagcugccgggugcgccacuccagccugggcggccaggacaucauccucuacugggggcaccacuucuccaugaacuggaucgcccugguggucaucgugccccuggugauccucaucguccuggugcugugguucaagaagcacugcagcuaccaggacauccucuga

SEQ ID NO: 779 - RNA, 1002 nt, Artificial Sequence
  derived and/or modified sequence opt2 from CD1C__Homo_sapiens__AAI26466
augcucuuccuccaguuccuccuccucgcccuccuccuccccggcggcgacaacgccgacgccucccaggagcacgucuccuuccacgucauccagaucuucuccuucgucaaccaguccugggcccgcggccagggcuccggcuggcucgacgagcuccagacccacggcugggacuccgaguccggcaccaucaucuuccuccacaacugguccaagggcaacuucuccaacgaggagcucuccgaccucgagcuccucuuccgcuucuaccucuucggccucacccgcgagauccaggaccacgccucccaggacuacuccaaguaccccuucgagguccaggucaaggccggcugcgagcuccacuccggcaagucccccgagggcuucuuccaggucgccuucaacggccucgaccuccucuccuuccagaacaccaccuggguccccucccccggcugcggcucccucgcccaguccgucugccaccuccucaaccaccaguacgagggcgucaccgagaccgucuacaaccucauccgcuccaccugcccccgcuuccuccucggccuccucgacgccggcaagauguacguccaccgccagguccgccccgaggccuggcucuccucccgccccucccucggcuccggccagcuccuccucgucugccacgccuccggcuucuaccccaagcccgucugggucaccuggaugcgcaacgagcaggagcagcucggcaccaagcacggcgacauccuccccaacgccgacggcaccugguaccuccaggucauccucgaggucgccuccgaggagcccgccggccucuccugccgcguccgccacuccucccucggcggccaggacaucauccucuacuggggccaccacuucuccaugaacuggaucgcccucgucgucaucgucccccucgucauccucaucguccucguccucugguucaagaagcacugcuccuaccaggacauccucuga

SEQ ID NO: 780 - RNA, 1002 nt, Artificial Sequence
  derived and/or modified sequence opt3 from CD1C__Homo_sapiens__AAI26466
augcuguuccuccaguuucuucuguuggccuuacugcuacccggcggggacaacgcugaugcaagccaagagcacguguccuuccaugucauccagauauuuucuuucguuaaucagucaugggccagaggacaggguaguggcuggcucgacgaacugcaaacccacgggugggauagcgaguccggaacaauuaucuuucuucauaacuggucuaagggcaauuucucgaacgaggaacugucagacuuggaacuccuguuuagguucuaccuguuuggucucacucgggagauucaggaucacgcgagccaggacuauaguaaauacccuuucgaggugcagguaaaggcugggugcgaauuacauuccggaaaaucuccagagggcuuuuuccaaguggccuuuaauggccuggaucuuuugagcuuccagaacacgaccugggucccgucccccggguguggaucacuggcacagagugugugccaccuacucaaucaccaguaugaagguguuacagagacuguguacaaccugauccgcagcaccuguccucgauuccuucugggcuugcucgacgccgggaagauguauguccaucgucaagugagaccagaggcuuggcugucuuccaggcccucauuaggaagcggccagcugcuccuuguaugccacgcaagugguuuuuacccuaaaccaguuugggugacauggaugcggaaugaacaggagcaacuggggaccaagcauggagauauuuugcccaacgccgacggcacuugguaucuacaggucauccuggaaguggcuucugaggaaccugccggccucuccugucgcgugagacacagcucgcuugggggacaggauauaauccuguacuggggucaccauuucucuaugaauuggauugcgcuggucguuaucgugccauugguaauucucaucgugcuggucuuaugguuuaagaaacacugcuccuaccaggacauacuguga

SEQ ID NO: 781 - RNA, 1002 nt, Artificial Sequence
  derived and/or modified sequence opt4 from CD1C__Homo_sapiens__AAI26466
augcuguuccugcaguuccugcugcuggcccugcugcugcccggcggcgacaacgccgacgccagccaggagcacgugagcuuccacgugauccagaucuucagcuucgugaaccagagcugggccagaggccagggcagcggcuggcuggacgagcugcagacccacggcugggacagcgagagcggcaccaucaucuuccugcacaacuggagcaagggcaacuucagcaacgaggagcugagcgaccuggagcugcuguucagauucuaccuguucggccugaccagagagauccaggaccacgccagccaggacuacagcaaguaccccuucgaggugcaggugaaggccggcugcgagcugcacagcggcaagagccccgagggcuucuuccagguggccuucaacggccuggaccugcugagcuuccagaacaccaccugggugcccagccccggcugcggcagccuggcccagagcgugugccaccugcugaaccaccaguacgagggcgugaccgagaccguguacaaccugaucagaagcaccugccccagauuccugcugggccugcuggacgccggcaagauguacgugcacagacaggugagacccgaggccuggcugagcagcagacccagccugggcagcggccagcugcugcuggugugccacgccagcggcuucuaccccaagcccgugugggugaccuggaugagaaacgagcaggagcagcugggcaccaagcacggcgacauccugcccaacgccgacggcaccugguaccugcaggugauccuggagguggccagcgaggagcccgccggccugagcugcagagugagacacagcagccugggcggccaggacaucauccuguacuggggccaccacuucagcaugaacuggaucgcccugguggugaucgugccccuggugauccugaucgugcuggugcugugguucaagaagcacugcagcuaccaggacauccuguga

SEQ ID NO: 782 - RNA, 1002 nt, Artificial Sequence
  derived and/or modified sequence opt5 from CD1C__Homo_sapiens__AAI26466
augcuguuccuccaguuucugcuucuggcccuccugcuucccggcggggacaacgcugaugccagccaagagcacguguccuuccaugucauccagaucuuuucuuucguuaaucagagcugggcgagaggacagggcuccggguggcuggacgaacuccaaacccacggaugggauucugagagcggcacaauuauuuuucugcauaacugguccaaggggaauuucucuaacgaggaacugagcgaccucgaacugcuuuuucgguucuaccuguuuggacucacgcgcgagauccaggaucacgcuucccaggacuauagcaaauacccuuucgagguccaggugaaggccggcugcgaacugcauucuggcaaauccccggagggguuuuuccaaguggccuuuaauggacuugaucugcucagcuuccagaacaccacaugggugcccucuccuggcugugggucccuggcucagagcguuugccaucugcucaaucaccaguaugaaggagugaccgagacagucuacaaccugauuagaucuaccuguccccgguuccuucugggccuccuggacgccgggaagauguaugugcaccgccaaguuagaccugaggcuuggcuuuccagccggcccucccugggaucuggccagcuccugcuggugugccacgccagcggcuuuuacccuaaaccggucugggugacauggaugcgcaaugaacaggagcaacucgggaccaagcauggagauauccugcccaacgcggacggcacgugguaucuucaggugauccuggaagucgccuccgaggaaccugcugggcucagcuguagaguucggcacucuucccugggaggccaggauauuauccuuuacugggggcaccauuucagcaugaauuggauugcccugguggugaucgucccccucgugauucugaucguucuggugcucugguuuaagaaacacugcucuuaccaggacauucuguga

SEQ ID NO: 783 - protein, 335 aa, Artificial Sequence
  CD1D__Homo_sapiens__P15813
MGCLLFLLLWALLQAWGSAEVPQRLFPLRCLQISSFANSSWTRTDGLAWLGELQTHSWSNDSDTVRSLKPWSQGTFSDQQWETLQHIFRVYRSSFTRDVKEFAKMLRLSYPLELQVSAGCEVHPGNASNNFFHVAFQGKDILSFQGTSWEPTQEAPLWVNLAIQVLNQDKWTRETVQWLLNGTCPQFVSGLLESGKSELKKQVKPKAWLSRGPSPGPGRLLLVCHVSGFYPKPVWVKWMRGEQEQQGTQPGDILPNADETWYLRATLDVVAGEAAGLSCRVKHSSLEGQDIVLYWGGSYTSMGLIALAVLACLLFLLIVGFTSRFKRQTSYQGVL

SEQ ID NO: 784 - RNA, 1008 nt, Artificial Sequence
  CD1D__Homo_sapiens__AAA59672
auggggugccugcuguuucugcugcucugggcgcuccuccaggcuuggggaagcgcugaagucccgcaaaggcuuuucccccuccgcugccuccagaucucguccuucgccaauagcagcuggacgcgcaccgacggcuuggcguggcugggggagcugcagacgcacagcuggagcaacgacucggacaccguccgcucucugaagccuuggucccagggcacguucagcgaccagcagugggagacgcugcagcauauauuucggguuuaucgaagcagcuucaccagggacgugaaggaauucgccaaaaugcuacgcuuauccuaucccuuggagcuccagguguccgcuggcugugaggugcacccugggaacgccucaaauaacuucuuccauguagcauuucaaggaaaagauauccugaguuuccaaggaacuucuugggagccaacccaagaggccccacuuuggguaaacuuggccauucaagugcucaaccaggacaaguggacgagggaaacagugcaguggcuccuuaauggcaccugcccccaauuugucaguggccuccuugagucagggaagucggaacugaagaagcaagugaagcccaaggccuggcugucccguggccccaguccuggcccuggccgucugcugcuggugugccaugucucaggauucuacccaaagccuguaugggugaaguggaugcggggugagcaggagcagcagggcacucagccaggggacauccugcccaaugcugacgagacaugguaucuccgagcaacccuggaugugguggcuggggaggcagcuggccuguccugucgggugaagcacagcagucuagagggccaggacaucguccucuacuggggugggagcuacaccuccaugggcuugauugccuuggcaguccuggcgugcuugcuguuccuccucauugugggcuuuaccucccgguuuaagaggcaaacuuccuaucagggcguccuguga

SEQ ID NO: 785 - RNA, 1008 nt, Artificial Sequence
  derived and/or modified sequence opt1 from CD1D__Homo_sapiens__AAA59672
augggcugccuccuguuccugcugcucugggcccugcugcaggccugggggagcgcggaggugccccagcgccucuucccgcugcggugccugcagaucuccagcuucgccaacuccagcuggacccgcaccgacggccucgccuggcugggggagcugcagacgcacuccuggagcaacgacuccgacaccguccggagccucaagcccuggucccagggcaccuucagcgaccagcagugggagacccugcagcacaucuuccgcguguaccgguccagcuucacgcgcgacgugaaggaguucgccaagaugcugcggcucuccuacccccuggagcugcaggucagcgccgggugcgaggugcaccccggcaacgcguccaacaacuucuuccacguggccuuccagggcaaggacauccucagcuuccaggggaccuccugggagccgacccaggaggcgccccugugggucaaccuggccauccaggugcucaaccaggacaaguggacccgcgagacggugcaguggcugcugaacgggaccugcccccaguucgucagcgggcuccuggaguccggcaagagcgagcugaagaagcaggucaagcccaaggccuggcucagccgggggccgucccccggccccggccgccugcugcucgugugccacgugagcggguucuaccccaagccggugugggugaaguggaugcggggcgagcaggagcagcaggggacccagcccggcgacauccugcccaacgccgacgagaccugguaccugcgcgccacgcucgacgucguggccggcgaggccgcggggcuguccugccgggugaagcacagcucccuggagggccaggacaucguccucuacuggggcggcagcuacaccuccauggggcugaucgcccuggccgugcucgccugccugcuguuccuccugaucgugggcuucaccagccgcuucaagcggcagaccuccuaccagggcguccuguga

SEQ ID NO: 786 - RNA, 1008 nt, Artificial Sequence
  derived and/or modified sequence opt2 from CD1D__Homo_sapiens__AAA59672
augggcugccuccucuuccuccuccucugggcccuccuccaggccuggggcuccgccgaggucccccagcgccucuucccccuccgcugccuccagaucuccuccuucgccaacuccuccuggacccgcaccgacggccucgccuggcucggcgagcuccagacccacuccugguccaacgacuccgacaccguccgcucccucaagcccuggucccagggcaccuucuccgaccagcagugggagacccuccagcacaucuuccgcgucuaccgcuccuccuucacccgcgacgucaaggaguucgccaagaugcuccgccucuccuacccccucgagcuccaggucuccgccggcugcgagguccaccccggcaacgccuccaacaacuucuuccacgucgccuuccagggcaaggacauccucuccuuccagggcaccuccugggagcccacccaggaggccccccucugggucaaccucgccauccagguccucaaccaggacaaguggacccgcgagaccguccaguggcuccucaacggcaccugcccccaguucgucuccggccuccucgaguccggcaaguccgagcucaagaagcaggucaagcccaaggccuggcucucccgcggccccucccccggccccggccgccuccuccucgucugccacgucuccggcuucuaccccaagcccgucugggucaaguggaugcgcggcgagcaggagcagcagggcacccagcccggcgacauccuccccaacgccgacgagaccugguaccuccgcgccacccucgacgucgucgccggcgaggccgccggccucuccugccgcgucaagcacuccucccucgagggccaggacaucguccucuacuggggcggcuccuacaccuccaugggccucaucgcccucgccguccucgccugccuccucuuccuccucaucgucggcuucaccucccgcuucaagcgccagaccuccuaccagggcguccucuga

SEQ ID NO: 787 - RNA, 1008 nt, Artificial Sequence
  derived and/or modified sequence opt3 from CD1D__Homo_sapiens__AAA59672
augggcugccuccuguuccuucuguugugggccuuacugcaggcuugggggagcgcagaggugccccaaagacuauuuccucucaggugucugcagaucuccucuuucgccaacucaaguuggacccggacagacggacuugcguggcugggugaauugcagacucacagcugguccaaugauucugacacgguccgcucgcucaagccauggucacagggcaccuuuagcgaucaacagugggagacacugcagcauauuuuccgaguuuaccguaguuccuuuacuagagacgugaaagaguucgcuaagaugcugaggcucucuuauccguuagaacugcagguaagcgccgggugcgaagugcaccccggaaacgcauccaauaacuuuuuccaugucgccuuucaaggcaaagauauacuuucauuccaggguaccaguugggagccuacacaggaggcuccauugugggugaaucuggcaauccagguucuaaaccaagacaaguggacccgggaaacugugcaguggcuccugaaugggacauguccccaguuugucagcggacuucuggagucuggcaaauccgaauugaagaagcaagugaaaccuaaggccuggcucucacgcggcccaagccccgggccuggaagacuguuacugguaugccacguuagugguuucuacccaaaaccggugugggucaaguggaugaggggcgagcaggagcagcaggggacccaacccggagauauucucccuaacgcugacgaaacgugguaucuucgggccacucuggaugugguggcgggcgaggcagccgguuugucuugucgcgucaaacauuccagccuagaagggcaggacaucguucuguacuggggaggcucguauaccucuaugggccucauugcucuggccgugcuugcaugccuguuguuucuccugaucguaggguucacaucccgauucaagagacagacuucauaccagggaguguuauga

SEQ ID NO: 788 - RNA, 1008 nt, Artificial Sequence
  derived and/or modified sequence opt4 from CD1D__Homo_sapiens__AAA59672
augggcugccugcuguuccugcugcugugggcccugcugcaggccuggggcagcgccgaggugccccagagacuguucccccugagaugccugcagaucagcagcuucgccaacagcagcuggaccagaaccgacggccuggccuggcugggcgagcugcagacccacagcuggagcaacgacagcgacaccgugagaagccugaagcccuggagccagggcaccuucagcgaccagcagugggagacccugcagcacaucuucagaguguacagaagcagcuucaccagagacgugaaggaguucgccaagaugcugagacugagcuacccccuggagcugcaggugagcgccggcugcgaggugcaccccggcaacgccagcaacaacuucuuccacguggccuuccagggcaaggacauccugagcuuccagggcaccagcugggagcccacccaggaggccccccugugggugaaccuggccauccaggugcugaaccaggacaaguggaccagagagaccgugcaguggcugcugaacggcaccugcccccaguucgugagcggccugcuggagagcggcaagagcgagcugaagaagcaggugaagcccaaggccuggcugagcagaggccccagccccggccccggcagacugcugcuggugugccacgugagcggcuucuaccccaagcccgugugggugaaguggaugagaggcgagcaggagcagcagggcacccagcccggcgacauccugcccaacgccgacgagaccugguaccugagagccacccuggacgugguggccggcgaggccgccggccugagcugcagagugaagcacagcagccuggagggccaggacaucgugcuguacuggggcggcagcuacaccagcaugggccugaucgcccuggccgugcuggccugccugcuguuccugcugaucgugggcuucaccagcagauucaagagacagaccagcuaccagggcgugcuguga

SEQ ID NO: 789 - RNA, 1008 nt, Artificial Sequence
  derived and/or modified sequence opt5 from CD1D__Homo_sapiens__AAA59672
augggcugccuccuguuccugcuucugugggcccuccugcaggcuugggggagcgccgaggugccccaaagacuuuuuccucugcggugucuccagaucuccucuuucgcgaacagcuccuggacccgcacagacggacuggcuuggcugggcgaacuccagacgcacucuuggagcaaugauuccgacaccgucagaucucugaagccguggagccaggggacauuuuccgaucaacagugggagacccuucagcauauuuuccggguuuaccgcagcucuuuuacaagagacgugaaagaguucgccaagaugcugcggcucuccuauccccuggaacuucaggugagcgccggaugcgaaguccacccuggcaacgcuucuaauaacuuuuuccauguggccuuucaagggaaagauauccuguccuuccagggaaccagcugggagcccacacaggaggcuccucucuggguuaaucuggccauucaggugcugaaccaagacaaguggacccgcgaaacgguccaguggcuccugaauggcaccuguccccaguuugugucuggccuucuggaguccgggaaaagcgaacucaagaagcaaguuaaaccuaaggcguggcuguccagaggaccgucucccggcccugggcggcuucugcucgugugccacgucagcggauucuaccccaaaccugugugggugaaguggaugcgcggcgagcaggagcagcaggggacacaacccggagauauccugccgaacgccgacgaaaccugguaucugagagcuacacucgaugucguugccggcgaggcugccggccuguccugucgggugaaacauagcucucuugaagggcaggacauugugcuguacuggggaggcuccuauaccagcauggggcucaucgcgcuggccguccuugcuugccugcucuuucugcugaucgugggauucacgucucgcuucaagagacagacaagcuaccagggcguucucuga

SEQ ID NO: 790 - protein, 388 aa, Artificial Sequence
  CD1E__Homo_sapiens__P15812
MLLLFLLFEGLCCPGENTAAPQALQSYHLAAEEQLSFRMLQTSSFANHSWAHSEGSGWLGDLQTHGWDTVLGTIRFLKPWSHGNFSKQELKNLQSLFQLYFHSFIQIVQASAGQFQLEYPFEIQILAGCRMNAPQIFLNMAYQGSDFLSFQGISWEPSPGAGIRAQNICKVLNRYLDIKEILQSLLGHTCPRFLAGLMEAGESELKRKVKPEAWLSCGPSPGPGRLQLVCHVSGFYPKPVWVMWMRGEQEQRGTQRGDVLPNADETWYLRATLDVAAGEAAGLSCRVKHSSLGGHDLIIHWGGYSIFLILICLTVIVTLVILVVVDSRLKKQSSNKNILSPHTPSPVFLMGANTQDTKNSRHQFCLAQVSWIKNRVLKKWKTRLNQLW

SEQ ID NO: 791 - RNA, 1167 nt, Artificial Sequence
  CD1E__Homo_sapiens__EAW52830
augcugcuccuguuccuccucuucgagggucucugcuguccuggggaaaauacagcagcuccccaggcucuacaauccuaucaucuagcagcagaggagcagcuguccuuccgcaugcuccaaacuuccuccuuugccaaccacagcugggcacacagugagggcucaggauggcugggugaccugcagacucauggcugggacacugucuugggcaccauccgcuuucugaagcccuggucccauggaaacuucagcaagcaggagcugaaaaacuuacagucacuguuccaguuauacuuccauaguuuuauccagauagugcaagcuucugcuggucaauuucagcuugaauaccccuucgagauccagauauuagcuggcuguagaaugaaugccccacaaaucuucuuaaauauggcauaucaagggucagauuuccugaguuuccaaggaauuuccugggagccaucuccaggagcagggauccgggcccagaacaucuguaaagugcucaaucgcuaccuagauauuaaggaaauacugcaaagccuucuuggucacaccugcccucgauuucuagcggggcucauggaagcaggggagucagaacugaaacggaaagugaagccagaggccuggcuguccuguggccccaguccuggcccuggccgucugcagcuugugugccaugucucaggauucuacccaaagcccgugugggugauguggaugcggggugagcaggagcagcggggcacucagcgaggggacguccugccuaaugcugacgagacaugguaucuccgagcaacccuggauguggcggcuggggaggcagcuggccuguccugucgggugaaacacagcagucuagggggccaugaucuaaucauccauugggguggauauuccaucuuucucauccugaucuguuugacugugauaguuacccuggucauauugguuguaguugacucacgguuaaaaaaacagaguucaaauaagaacauucuuucuccccacacacccagcccugucuuucucaugggagccaacacucaggacaccaagaauucaagacaucaguucugcuuggcacaaguaucguggaucaaaaacagaguauugaagaaguggaagacacgccuaaaccaacucugguga

SEQ ID NO: 792 - RNA, 1167 nt, Artificial Sequence
  derived and/or modified sequence opt1 from CD1E__Homo_sapiens__EAW52830
augcugcuccuguuccuccuguucgagggccugugcugccccggggagaacaccgccgccccgcaggcgcugcagagcuaccaccucgccgccgaggagcagcuguccuuccgcaugcugcagaccagcuccuucgccaaccacagcugggcccacuccgagggcagcggguggcucggcgaccugcagacgcacgggugggacaccgugcugggcaccauccgguuccucaagcccuggucccacggcaacuucagcaagcaggagcugaagaaccugcagucccucuuccagcuguacuuccacagcuucauccagaucguccaggcguccgccgggcaguuccagcuggaguaccccuucgagauccagauccucgccggcugccgcaugaacgcgccccagaucuuccugaacauggccuaccaggggagcgacuuccuguccuuccagggcaucagcugggagccgucccccggggccggcauccgggcccagaacaucugcaaggugcucaaccgcuaccuggacaucaaggagauccugcagagccuccugggccacacgugcccccgguuccuggccgggcucauggaggccggcgaguccgagcugaagcgcaaggugaagcccgaggcguggcugagcugcgggccgucccccggccccggccggcuccagcuggucugccacgugagcggguucuaccccaagccggugugggucauguggaugcgcggcgagcaggagcagcgggggacccagcgcggcgacgugcugcccaacgccgacgagaccugguaccuccgggccacccuggacguggccgccggggaggcggccggccugagcugccgcgucaagcacuccagccucggcgggcacgaccugaucauccacuggggcggguacuccaucuuccugauccucaucugccugaccgugaucgugacgcuggucauccucgugguggucgacagccggcugaagaagcaguccagcaacaagaacauccugagcccccacacccccuccccgguguuccucaugggcgccaacacccaggacaccaagaacucccgccaccaguucugccuggcccaggugagcuggaucaagaaccggguccugaagaaguggaagacgcgccucaaccagcugugguga

SEQ ID NO: 793 - RNA, 1167 nt, Artificial Sequence
  derived and/or modified sequence opt2 from CD1E__Homo_sapiens__EAW52830
augcuccuccucuuccuccucuucgagggccucugcugccccggcgagaacaccgccgccccccaggcccuccaguccuaccaccucgccgccgaggagcagcucuccuuccgcaugcuccagaccuccuccuucgccaaccacuccugggcccacuccgagggcuccggcuggcucggcgaccuccagacccacggcugggacaccguccucggcaccauccgcuuccucaagcccuggucccacggcaacuucuccaagcaggagcucaagaaccuccagucccucuuccagcucuacuuccacuccuucauccagaucguccaggccuccgccggccaguuccagcucgaguaccccuucgagauccagauccucgccggcugccgcaugaacgccccccagaucuuccucaacauggccuaccagggcuccgacuuccucuccuuccagggcaucuccugggagcccucccccggcgccggcauccgcgcccagaacaucugcaagguccucaaccgcuaccucgacaucaaggagauccuccagucccuccucggccacaccugcccccgcuuccucgccggccucauggaggccggcgaguccgagcucaagcgcaaggucaagcccgaggccuggcucuccugcggccccucccccggccccggccgccuccagcucgucugccacgucuccggcuucuaccccaagcccgucugggucauguggaugcgcggcgagcaggagcagcgcggcacccagcgcggcgacguccuccccaacgccgacgagaccugguaccuccgcgccacccucgacgucgccgccggcgaggccgccggccucuccugccgcgucaagcacuccucccucggcggccacgaccucaucauccacuggggcggcuacuccaucuuccucauccucaucugccucaccgucaucgucacccucgucauccucgucgucgucgacucccgccucaagaagcaguccuccaacaagaacauccucuccccccacacccccucccccgucuuccucaugggcgccaacacccaggacaccaagaacucccgccaccaguucugccucgcccaggucuccuggaucaagaaccgcguccucaagaaguggaagacccgccucaaccagcucugguga

SEQ ID NO: 794 - RNA, 1167 nt, Artificial Sequence
  derived and/or modified sequence opt3 from CD1E__Homo_sapiens__EAW52830
augcugcuccuuuuccuguuguuugagggcuuaugcugucccggggaaaacaccgccgcuccucaggcacugcaaagcuaccaccuagccgcggaggaacagcucuccuucagaaugcugcagacaucuucauuugcuaaucauaguugggcccacagcgagggauccgguuggcuuggcgaccugcagacucaugggugggauacgguguugggaaccaucagguuccucaagccauggucucacggcaacuuuucgaaacaagaacugaagaaucugcagucacucuuccaguuauauuuucauagcuucauucagauaguccaagcaagugccggucaguuucagcuggaguacccguucgagauccagauucuugcugggugccggaugaacgcaccccaaaucuuuuugaauauggccuaucagggauccgacuuccugucuuuucagggcauuagcugggaaccuuccccaggcgcugggauccgcgcccaaaacauauguaaaguucuaaaucgauaccucgauaucaaggagauucugcagucacuucugggacacacaugcccccguuucuuggcgggucucauggaagcaggcgagagugagcugaaaagaaaggugaagccugaagccugguuaagcugugggccaucucccggaccuggcaggcugcagcucguaugccacguguccgguuucuauccaaaaccggucugggugauguggaugcgcggggagcaggaacaacggggaacucagagaggcgacguucuucccaacgcugaugagaccugguaccugagggccacauuggacguggcagcuggcgaagccgcggggcuaucaugucgggucaagcauagcagucugggaggucacgaucucaucauucauuggggcggguauucuaucuuucugauacuuauuugccugaccgugaucguaacuuugguuauucucguggucguggacucccgccugaaaaagcagagcucgaauaaaaacaucuuaucuccucacacaccaucccccguguuccugaugggagccaauacccaggauacgaagaacucacgacaccaauuuugucuagcacaggucaguuggaucaagaauagaguucucaaaaaguggaaaacuaggcugaaccagcuuugguga

SEQ ID NO: 795 - RNA, 1167 nt, Artificial Sequence
  derived and/or modified sequence opt4 from CD1E__Homo_sapiens__EAW52830
augcugcugcuguuccugcuguucgagggccugugcugccccggcgagaacaccgccgccccccaggcccugcagagcuaccaccuggccgccgaggagcagcugagcuucagaaugcugcagaccagcagcuucgccaaccacagcugggcccacagcgagggcagcggcuggcugggcgaccugcagacccacggcugggacaccgugcugggcaccaucagauuccugaagcccuggagccacggcaacuucagcaagcaggagcugaagaaccugcagagccuguuccagcuguacuuccacagcuucauccagaucgugcaggccagcgccggccaguuccagcuggaguaccccuucgagauccagauccuggccggcugcagaaugaacgccccccagaucuuccugaacauggccuaccagggcagcgacuuccugagcuuccagggcaucagcugggagcccagccccggcgccggcaucagagcccagaacaucugcaaggugcugaacagauaccuggacaucaaggagauccugcagagccugcugggccacaccugccccagauuccuggccggccugauggaggccggcgagagcgagcugaagagaaaggugaagcccgaggccuggcugagcugcggccccagccccggccccggcagacugcagcuggugugccacgugagcggcuucuaccccaagcccgugugggugauguggaugagaggcgagcaggagcagagaggcacccagagaggcgacgugcugcccaacgccgacgagaccugguaccugagagccacccuggacguggccgccggcgaggccgccggccugagcugcagagugaagcacagcagccugggcggccacgaccugaucauccacuggggcggcuacagcaucuuccugauccugaucugccugaccgugaucgugacccuggugauccugguggugguggacagcagacugaagaagcagagcagcaacaagaacauccugagcccccacacccccagccccguguuccugaugggcgccaacacccaggacaccaagaacagcagacaccaguucugccuggcccaggugagcuggaucaagaacagagugcugaagaaguggaagaccagacugaaccagcugugguga

SEQ ID NO: 796 - RNA, 1167 nt, Artificial Sequence
  derived and/or modified sequence opt5 from CD1E__Homo_sapiens__EAW52830
augcugcuccuguuccuucuguuugagggccucugcugucccggggaaaacaccgccgcuccucaggcccugcaaagcuaccaccuugcggcugaggaacagcuguccuucagaaugcuccagacaucuagcuuugccaaucauuccugggcccacucugagggaagcggcuggcugggggaccugcagacgcauggaugggauaccgugcucggcacaauccgguuccugaagccguggucccacgggaacuuuucuaaacaagaacuuaagaaucugcagagccucuuccagcuguauuuucauuccuucauucagaucguccaagcuagcgccggacaguuucagcuugaguaccccuucgagauucagauccuggcuggcugccgcaugaacgccccucaaauuuuucucaauauggcguaucagggcucugacuuccuguccuuucaggggaucagcugggaacccucuccuggagccggcaucagagcucaaaacauuuguaaaguucugaaucgguaccucgauaucaaggagauucugcagucccuucuggggcauaccugcccccgcuuccucgccggacugauggaagcuggcgagagcgagcuuaaaagaaaggugaagccugaagccuggcugucuugugggccgucccccggaccuggccggcuccagcuggugugccacgucagcggcuucuaucccaaaccuguguggguuauguggaugcgcggggagcaggaacaaagaggaacacagcggggcgacgugcugcccaacgcggaugagaccugguaccuccgcgccacacuggacgucgcugccggggaagcugccggacuuuccuguagagugaagcacucuagccugggcgggcacgaucucaucauucauuggggaggcuauuccaucuuucugauucuuaucugccugaccguuaucgugacgcucgucauucuggugguggucgacagccggcugaaaaagcagucuuccaauaaaaacauccucagcccgcacaccccuucucccguuuuccugaugggcgccaauacacaggauaccaagaacagccgccaccaauuuugucuugcucagguguccuggauuaagaauagagugcugaaaaaguggaaaacacggcucaaccagcugugguga

SEQ ID NO: 797 - protein, 297 aa, Artificial Sequence
  CD20__Homo_sapiens__P11836
MTTPRNSVNGTFPAEPMKGPIAMQSGPKPLFRRMSSLVGPTQSFFMRESKTLGAVQIMNGLFHIALGGLLMIPAGIYAPICVTVWYPLWGGIMYIISGSLLAATEKNSRKCLVKGKMIMNSLSLFAAISGMILSIMDILNIKISHFLKMESLNFIRAHTPYINIYNCEPANPSEKNSPSTQYCYSIQSLFLGILSVMLIFAFFQELVIAGIVENEWKRTCSRPKSNIVLLSAEEKKEQTIEIKEEVVGLTETSSQPKNEEDIEIIPIQEEEEEETETNFPEPPQDQESSPIENDSSP

SEQ ID NO: 798 - RNA, 894 nt, Artificial Sequence
  CD20__Homo_sapiens__AAA35581
augacaacacccagaaauucaguaaaugggacuuucccggcagagccaaugaaaggcccuauugcuaugcaaucugguccaaaaccacucuucaggaggaugucuucacuggugggccccacgcaaagcuucuucaugagggaaucuaagacuuugggggcuguccagauuaugaaugggcucuuccacauugcccuggggggucuucugaugaucccagcagggaucuaugcacccaucugugugacugugugguacccucucuggggaggcauuauguauauuauuuccggaucacucuuggcagcaacggagaaaaacucuaggaaguguuuggucaaaggaaaaaugauaaugaauucauugagccucuuugcugccauuucuggaaugauucuuucaaucauggacauacuuaauauuaaaauuucccauuuuuuaaaaauggagagucugaauuuuauuagagcucacacaccauauauuaacauauacaacugugaaccagcuaaucccucugagaaaaacuccccaucuacccaauacuguuacagcauacaaucucuguucuugggcauuuugucagugaugcugaucuuugccuucuuccaggaacuuguaauagcuggcaucguugagaaugaauggaaaagaacgugcuccagacccaaaucuaacauaguucuccugucagcagaagaaaaaaaagaacagacuauugaaauaaaagaagaagugguugggcuaacugaaacaucuucccaaccaaagaaugaagaagacauugaaauuauuccaauccaagaagaggaagaagaagaaacagagacgaacuuuccagaaccuccccaagaucaggaauccucaccaauagaaaaugacagcucuccuuaa

SEQ ID NO: 799 - RNA, 894 nt, Artificial Sequence
  derived and/or modified sequence opt1 from CD20__Homo_sapiens__AAA35581
augaccacgccccgcaacagcgugaacggcaccuucccggccgagcccaugaaggggcccaucgccaugcaguccggccccaagccgcuguuccggcgcaugagcucccucgucgggcccacccagagcuucuucaugcgggaguccaagacccugggcgcggugcagaucaugaacgggcuguuccacaucgcccucggcggccugcugaugauccccgccgggaucuacgcccccaucugcgugaccgucugguacccgcucuggggcgggaucauguacaucaucagcggcucccugcuggccgcgacggagaagaacagccgcaagugccucgugaaggggaagaugaucaugaacucccugagccuguucgccgccaucuccggcaugauccucagcaucauggacauccugaacaucaagaucucccacuuccugaagauggagagccucaacuucauccgggcccacacccccuacaucaacaucuacaacugcgagcccgcgaaccccuccgagaagaacagcccguccacccaguacugcuacagcauccagucccuguuccugggcauccucagcgugaugcugaucuucgccuucuuccaggagcuggucaucgccgggaucguggagaacgaguggaagcggaccugcagccgccccaaguccaacaucgugcuccugagcgccgaggagaagaaggagcagacgaucgagaucaaggaggaggucgugggccugaccgagaccuccagccagcccaagaacgaggaggacaucgagaucauccccauccaggaggaggaggaggaggagaccgagacgaacuucccggagccgccccaggaccaggaguccagccccaucgagaacgacuccagccccuga

SEQ ID NO: 800 - RNA, 894 nt, Artificial Sequence
  derived and/or modified sequence opt2 from CD20__Homo_sapiens__AAA35581
augaccaccccccgcaacuccgucaacggcaccuuccccgccgagcccaugaagggccccaucgccaugcaguccggccccaagccccucuuccgccgcauguccucccucgucggccccacccaguccuucuucaugcgcgaguccaagacccucggcgccguccagaucaugaacggccucuuccacaucgcccucggcggccuccucaugauccccgccggcaucuacgcccccaucugcgucaccgucugguacccccucuggggcggcaucauguacaucaucuccggcucccuccucgccgccaccgagaagaacucccgcaagugccucgucaagggcaagaugaucaugaacucccucucccucuucgccgccaucuccggcaugauccucuccaucauggacauccucaacaucaagaucucccacuuccucaagauggagucccucaacuucauccgcgcccacacccccuacaucaacaucuacaacugcgagcccgccaaccccuccgagaagaacucccccuccacccaguacugcuacuccauccagucccucuuccucggcauccucuccgucaugcucaucuucgccuucuuccaggagcucgucaucgccggcaucgucgagaacgaguggaagcgcaccugcucccgccccaaguccaacaucguccuccucuccgccgaggagaagaaggagcagaccaucgagaucaaggaggaggucgucggccucaccgagaccuccucccagcccaagaacgaggaggacaucgagaucauccccauccaggaggaggaggaggaggagaccgagaccaacuuccccgagcccccccaggaccaggaguccucccccaucgagaacgacuccucccccuga

SEQ ID NO: 801 - RNA, 894 nt, Artificial Sequence
  derived and/or modified sequence opt3 from CD20__Homo_sapiens__AAA35581
augaccacacccagaaacagcgugaauggcacuuucccugccgagccaaugaaggggccgaucgcuaugcaguccggacccaaaccucuguuuaggcggaugucuucacucgucgguccaacgcaaaguuucuuuaugcgcgaaagcaagacccuuggcgcaguucagauuaugaacgggcuguuccacauagccuugggaggcuuacugaugauccccgcggguauuuacgcuccuaucugcgugacaguaugguauccacuauggggaggaauuauguacaucauauccggcucucuccuggccgcaacugagaaaaauucgcgaaagugucuugugaaaggcaagaugaucaugaacucacugagcuuguuugccgcuauuagugggaugauccucuccauuauggacauccugaauauaaagauuucucauuuccugaaaauggaaagccucaacuuuauccgugcacacacccccuauauuaauaucuacaacugcgagccugccaauccauccgaaaagaacucaccgaguacacaguauuguuacagcauccagucuuuauuccuggggauucuuuccgucauguugauauuugcuuucuuucaagagcuggugaucgccgguauuguugagaaugaauggaaaagaaccugcucaaggcccaagagcaacaucgugcuacucagugcggaggagaaaaaggaacagacuauagagauuaaggaagaggucgugggccugacagaaaccucuucccagccuaaaaaugaggaagauaucgagaucauuccaauccaggaggaagaggaagaggaaacggagacuaacuuccccgagccuccacaagaccaggaaagcucgcccauugagaaugauucuuccccguga

SEQ ID NO: 802 - RNA, 894 nt, Artificial Sequence
  derived and/or modified sequence opt4 from CD20__Homo_sapiens__AAA35581
augaccacccccagaaacagcgugaacggcaccuuccccgccgagcccaugaagggccccaucgccaugcagagcggccccaagccccuguucagaagaaugagcagccuggugggccccacccagagcuucuucaugagagagagcaagacccugggcgccgugcagaucaugaacggccuguuccacaucgcccugggcggccugcugaugauccccgccggcaucuacgcccccaucugcgugaccgugugguacccccuguggggcggcaucauguacaucaucagcggcagccugcuggccgccaccgagaagaacagcagaaagugccuggugaagggcaagaugaucaugaacagccugagccuguucgccgccaucagcggcaugauccugagcaucauggacauccugaacaucaagaucagccacuuccugaagauggagagccugaacuucaucagagcccacacccccuacaucaacaucuacaacugcgagcccgccaaccccagcgagaagaacagccccagcacccaguacugcuacagcauccagagccuguuccugggcauccugagcgugaugcugaucuucgccuucuuccaggagcuggugaucgccggcaucguggagaacgaguggaagagaaccugcagcagacccaagagcaacaucgugcugcugagcgccgaggagaagaaggagcagaccaucgagaucaaggaggagguggugggccugaccgagaccagcagccagcccaagaacgaggaggacaucgagaucauccccauccaggaggaggaggaggaggagaccgagaccaacuuccccgagcccccccaggaccaggagagcagccccaucgagaacgacagcagccccuga

SEQ ID NO: 803 - RNA, 894 nt, Artificial Sequence
  derived and/or modified sequence opt5 from CD20__Homo_sapiens__AAA35581
augaccacacccagaaacagcgugaauggcacguucccugccgagccgaugaaggggcccaucgcuaugcaguccggaccuaaaccccuguuucggcgcaugucuagccucgucggcccuacccaauccuucuuuaugagagaaucuaagacacugggggccguucagauuaugaacggacuuuuccacaucgcgcugggcgggcuccugaugauucccgcuggaaucuacgccccuauuugcgugaccgugugguauccgcuuuggggcggcaucauguacaucauuagcgggucccugcucgccgcuacagagaaaaauucucggaagugucuggucaaaggaaagaugaucaugaacagccugucccucuuugccgcuauuagcggcaugauccugucuauuauggacauccuuaauauuaagaucucccauuuccugaaaauggaaagccucaacuuuauccgcgcccacacccccuauauuaauaucuacaacugcgagccugcgaaucccucugaaaagaacuccccuagcacacaguauuguuacucuauucagucccuguuccuugggauccugagcgugaugcucauuuuugccuucuuucaagagcugguuaucgcuggaaucguggagaaugaauggaaaagaaccugcucccggcccaagucuaacauuguccugcucagcgccgaggagaaaaaggaacagacgaucgagauuaaggaagaggugguuggccugaccgaaacauccagccagccgaaaaaugaggaagauaucgagauuaucccuauccaggaggaagaggaagaggaaaccgagacaaacuuccccgagccuccccaagaccaggaaucuucccccauugagaaugauagcucuccuuga

SEQ ID NO: 804 - protein, 662 aa, Artificial Sequence [sequence omitted]

SEQ ID NO: 805 - RNA, 1989 nt, Artificial Sequence
  CD22__Homo_sapiens__AAC18956
auggaguccaagacugagaaauggauggaacgaauacaccucaaugucucugaaaggccuuuuccaccucauauccagcucccuccagaaauucaagagucccaggaagucacucugaccugcuugcugaauuucuccugcuauggguauccgauccaauugcaguggcuccuagaggggguuccaaugaggcaggcugcugucaccucgaccuccuugaccaucaagucugucuucacccggagcgagcucaaguucuccccacaguggagucaccaugggaagauugugaccugccagcuucaggaugcagaugggaaguuccucuccaaugacacggugcagcugaacgugaagcacaccccgaaguuggagaucaaggucacucccagugaugccauagugagggagggggacucugugaccaugaccugcgaggucagcagcacgaacccggaguacacgacgguauccuggcucaaggaugggaccucgcugaagaagcagaauacauucacgcuaaaccugcgcgaagugaccaaggaccagagugggaaguacugcugucaggucuccaaugacgugggcccgggaaggucggaagaaguguuccugcaagugcaguaugccccggaaccuuccacgguucagauccuccacucaccggcuguggagggaagucaagucgaguuucuuugcaugucacuggccaauccucuuccaacaaauuacacgugguaccacaaugggaaagaaaugcagggaaggacagaggagaaaguccacaucccaaagauccuccccuggcacgcugggacuuauuccuguguggcagaaaacauucuugguacuggacagaggggcccgggagcugagcuggauguccaguauccucccaagaaggugaccacagugauucaaaaccccaugccgauucgagaaggagacacagugacccuuuccuguaacuacaauuccaguaaccccaguguuacccgguaugaauggaaaccccauggcgccugggaggagccaucgcuuggggugcugaagauccaaaagguuggcugggacaacacaaccaucgccugcgcacguuguaauaguuggugcucgugggccuccccugucgcccugaauguccaguaugccccccgagacgugaggguccggaaaaucaagccccuuuccgagauucacucuggaaacucggucagccuccaaugugacuucucaagcagccaccccaaagaaguccaguucuucugggagaaaaauggcaggcuucuggggaaagaaagccagcugaauuuugacuccaucuccccagaagaugcugggaguuacagcugcugggugaacaacuccauaggacagacagcguccaaggccuggacacuugaagugcuguaugcacccaggaggcugcguguguccaugagcccgggggaccaagugauggaggggaagagugcaacccugaggugugagagcgacgccaacccucccgucucccacuacaccugguuugacuggaauaaccaaagccuccccuaccacagccagaagcugagauuggagccggugaagguccagcacucgggugccuacuggugccaggggaccaacagugugggcaagggccguucgccucucagcacccucaccgucuacuauagcccggagaccaucggcaggcgaguggcugugggacucggguccugccucgccauccucauccuggcaaucugugggcucaagcuccagcgacgagaugcagaguccucagagaugcagagaccuccccggaccugcgaugacacggucacuuauucagcauugcacaagcgccaagugggcgacuaugagaacgucauuccagauuuuccagaagaugaggggauucauuacucagagcugauccaguuuggggucggggagcggccucaggcacaagaaaauguggacuaugugauccucaaacauuga

SEQ ID NO: 806 - RNA, 1989 nt, Artificial Sequence
  derived and/or modified sequence opt1 from CD22__Homo_sapiens__AAC18956
auggagagcaagaccgagaaguggauggagcgcauccaccugaacguguccgagcggcccuucccgccccacauccagcucccgcccgagauccaggagagccaggaggucacccugacgugccugcucaacuucuccugcuacggcuaccccauccagcugcaguggcugcucgagggggugcccaugcgccaggccgccgugaccagcaccucccugaccaucaagagcgucuucacgcgguccgagcugaaguucagcccccaguggucccaccacggcaagaucgugaccugccagcuccaggacgcggacgggaaguuccugagcaacgacaccgugcagcugaacgucaagcacacccccaagcucgagaucaaggugacgccguccgacgccaucgugcgcgagggcgacagcgucaccaugaccugcgagguguccagcaccaaccccgaguacacgaccguguccuggcugaaggacgggaccagccugaagaagcagaacaccuucacgcucaaccugcgggaggucaccaaggaccaguccggcaaguacugcugccaggugagcaacgacgugggccccgggcgcuccgaggaggucuuccuccaggugcaguacgcccccgagccgagcaccgugcagauccugcacagccccgccgucgagggcucccagguggaguuccugugcaugagccuggccaacccccuccccaccaacuacacgugguaccacaacgggaaggagaugcagggccggaccgaggagaaggugcacaucccgaagauccugcccuggcacgcggggaccuacuccugcgucgccgagaacauccugggcaccggccagcgcgggcccggcgccgagcucgacgugcaguacccgcccaagaaggugacgaccgucauccagaaccccaugcccauccgggagggggacaccgugacccugagcugcaacuacaacuccagcaaccccuccgucacgcgcuacgaguggaagccgcacggcgccugggaggagcccagccugggcgugcucaagauccagaagguggggugggacaacaccaccaucgcgugcgcccggugcaacuccuggugcagcugggccucccccgucgcccugaacgugcaguacgcgccccgcgacgugcggguccgcaagaucaagccgcugagcgagauccacuccggcaacagcgugucccuccagugcgacuucagcuccagccaccccaaggaggugcaguucuucugggagaagaacgggcggcugcugggcaaggagucccagcucaacuucgacagcaucagccccgaggacgccggguccuacagcugcugggucaacaacuccaucggccagaccgccagcaaggccuggacgcuggaggugcuguacgccccgcgccggcuccgcguguccaugagccccggcgaccaggucauggaggggaaguccgccacccugcggugcgagagcgacgcgaacccgcccgugucccacuacaccugguucgacuggaacaaccagagccugcccuaccacucccagaagcuccgccuggagcccgugaagguccagcacagcggcgccuacuggugccaggggaccaacuccgugggcaaggggcggagcccccuguccacgcucaccguguacuacagccccgagaccaucggccgccgcgucgccgugggccugggguccugccuggccauccucauccuggccaucugcggccugaagcuccagcggcgcgacgcggagagcagcgagaugcagcggccgccccggaccugcgacgacaccgugacguacuccgcccugcacaagcgccaggucggggacuacgagaacgugauccccgacuuccccgaggacgagggcauccacuacagcgagcugauccaguucggggugggcgagcgcccgcaggcccaggagaacgucgacuacgugauccugaagcacuga

SEQ ID NO: 807 - RNA, 1989 nt, Artificial Sequence
  derived and/or modified sequence opt2 from CD22__Homo_sapiens__AAC18956
auggaguccaagaccgagaaguggauggagcgcauccaccucaacgucuccgagcgccccuuccccccccacauccagcucccccccgagauccaggagucccaggaggucacccucaccugccuccucaacuucuccugcuacggcuaccccauccagcuccaguggcuccucgagggcguccccaugcgccaggccgccgucaccuccaccucccucaccaucaaguccgucuucacccgcuccgagcucaaguucuccccccaguggucccaccacggcaagaucgucaccugccagcuccaggacgccgacggcaaguuccucuccaacgacaccguccagcucaacgucaagcacacccccaagcucgagaucaaggucacccccuccgacgccaucguccgcgagggcgacuccgucaccaugaccugcgaggucuccuccaccaaccccgaguacaccaccgucuccuggcucaaggacggcaccucccucaagaagcagaacaccuucacccucaaccuccgcgaggucaccaaggaccaguccggcaaguacugcugccaggucuccaacgacgucggccccggccgcuccgaggaggucuuccuccagguccaguacgcccccgagcccuccaccguccagauccuccacucccccgccgucgagggcucccaggucgaguuccucugcaugucccucgccaacccccuccccaccaacuacaccugguaccacaacggcaaggagaugcagggccgcaccgaggagaagguccacauccccaagauccuccccuggcacgccggcaccuacuccugcgucgccgagaacauccucggcaccggccagcgcggccccggcgccgagcucgacguccaguacccccccaagaaggucaccaccgucauccagaaccccaugcccauccgcgagggcgacaccgucacccucuccugcaacuacaacuccuccaaccccuccgucacccgcuacgaguggaagccccacggcgccugggaggagcccucccucggcguccucaagauccagaaggucggcugggacaacaccaccaucgccugcgcccgcugcaacuccuggugcuccugggccucccccgucgcccucaacguccaguacgccccccgcgacguccgcguccgcaagaucaagccccucuccgagauccacuccggcaacuccgucucccuccagugcgacuucuccuccucccaccccaaggagguccaguucuucugggagaagaacggccgccuccucggcaaggagucccagcucaacuucgacuccaucucccccgaggacgccggcuccuacuccugcugggucaacaacuccaucggccagaccgccuccaaggccuggacccucgagguccucuacgccccccgccgccuccgcgucuccaugucccccggcgaccaggucauggagggcaaguccgccacccuccgcugcgaguccgacgccaacccccccgucucccacuacaccugguucgacuggaacaaccagucccuccccuaccacucccagaagcuccgccucgagcccgucaagguccagcacuccggcgccuacuggugccagggcaccaacuccgucggcaagggccgcuccccccucuccacccucaccgucuacuacucccccgagaccaucggccgccgcgucgccgucggccucggcuccugccucgccauccucauccucgccaucugcggccucaagcuccagcgccgcgacgccgaguccuccgagaugcagcgccccccccgcaccugcgacgacaccgucaccuacuccgcccuccacaagcgccaggucggcgacuacgagaacgucauccccgacuuccccgaggacgagggcauccacuacuccgagcucauccaguucggcgucggcgagcgcccccaggcccaggagaacgucgacuacgucauccucaagcacuga

SEQ ID NO: 808 - RNA, 1989 nt, Artificial Sequence
  derived and/or modified sequence opt3 from CD22__Homo_sapiens__AAC18956
auggagagcaagaccgaaaaauggauggagagaauccaccugaacguguccgaaaggcccuucccuccacauauucagcucccgcccgagauacaagaaucucaggaggucacacuuacuugccuguugaauuuuucauguuacggcuauccuauccaguuacaguggcugcuagaggggguuccaaugcggcaagccgcugugacgaguaccagccucacaauuaaguccguauucacucgcucugaacugaaauuuucgccccaguggucacaccauggaaagaucgugaccugccagcuucaggacgcagaugguaaauuccugagcaacgacacaguccaauugaaugugaagcacaccccuaagcucgagauuaaaguuacuccaagugaugccaucgugcgagaaggcgacuccgucacaaugaccugugaggugucuagcacgaaccccgaguacacuaccguauccuggcugaaggaugggacaucacugaaaaagcagaauacuuuuacccucaacuuacgugaaguuacaaaagaccagaguggaaaguauugcugucaggugagcaaugaugucggcccugguagaucugaggaaguguuccugcaagugcaguacgcgccagagccguccaccguccagauacuucauucacccgcuguugaagggagccaaguggaguuuuugugcaugagucuggccaacccucuaccaacgaauuauacuugguaccacaacggaaaggagaugcagggcaggacagaagagaaaguacacauccccaagauucucccuuggcaugcaggcaccuauucuuguguggccgaaaauauccuggggacuggacagcgggguccaggcgcugagcuugacguccaguaucccccgaaaaaggugacaaccguuauucaaaacccuaugcccauccgcgaaggggauacggugacccuguccugcaauuacaacagcucgaauccaucugucacaagauacgaguggaaaccucacggagcaugggaggaacccuccuugggcgugcucaagauacagaaaguagguugggacaacacuaccauugccugugcuaggugcaacucaugguguaguugggccagcccaguugcgcugaaugugcaguacgcaccccgggauguccgcgugcgaaagaucaagccuuuauccgagauucauucugggaacagcgucucacugcagugcgacuucaguuccagccacccaaaagaagugcaauuuuucugggagaagaauggaagacuccuuggcaaagaaucucagcugaacuuugauucaaucaguccggaggacgccggcagcuauuccugcuggguuaauaacucuaucgggcagacagcuucgaaggccuggacuuuggaggugcuauacgcacccaggcggcugcguguaagcauguccccuggagaccaggucauggaagguaaaucagcuacccuccgcugugagagugaugccaauccacccgugucucacuauacaugguucgacuggaacaaucaaagccugccuuaccauucccagaaacuuagacuggaaccaguuaaggugcagcacucaggcgcguauuggugccaggggaccaacagcgucggaaagggcaggucucccuuguccacucucacgguguacuacaguccggagacaauuggucggcgaguagccguggggcugggcagcuguuuagcaauacugauccuagcuauuugcggacucaagcugcaacgcagagaugccgagucuuccgaaaugcagaggccuccacggaccugugacgauacuguuaccuauucagcccuucauaaacgccaggucggcgacuacgagaaugugauccccgauuuuccugaagacgaggggauacacuauagugaauugauucaauucggagugggugagagaccccaggcucaggagaacgucgauuacguuauccugaagcauuga

SEQ ID NO: 809 - RNA, 1989 nt, Artificial Sequence
  derived and/or modified sequence opt4 from CD22__Homo_sapiens__AAC18956
auggagagcaagaccgagaaguggauggagagaauccaccugaacgugagcgagagacccuuccccccccacauccagcugccccccgagauccaggagagccaggaggugacccugaccugccugcugaacuucagcugcuacggcuaccccauccagcugcaguggcugcuggagggcgugcccaugagacaggccgccgugaccagcaccagccugaccaucaagagcguguucaccagaagcgagcugaaguucagcccccaguggagccaccacggcaagaucgugaccugccagcugcaggacgccgacggcaaguuccugagcaacgacaccgugcagcugaacgugaagcacacccccaagcuggagaucaaggugacccccagcgacgccaucgugagagagggcgacagcgugaccaugaccugcgaggugagcagcaccaaccccgaguacaccaccgugagcuggcugaaggacggcaccagccugaagaagcagaacaccuucacccugaaccugagagaggugaccaaggaccagagcggcaaguacugcugccaggugagcaacgacgugggccccggcagaagcgaggagguguuccugcaggugcaguacgcccccgagcccagcaccgugcagauccugcacagccccgccguggagggcagccagguggaguuccugugcaugagccuggccaacccccugcccaccaacuacaccugguaccacaacggcaaggagaugcagggcagaaccgaggagaaggugcacauccccaagauccugcccuggcacgccggcaccuacagcugcguggccgagaacauccugggcaccggccagagaggccccggcgccgagcuggacgugcaguacccccccaagaaggugaccaccgugauccagaaccccaugcccaucagagagggcgacaccgugacccugagcugcaacuacaacagcagcaaccccagcgugaccagauacgaguggaagccccacggcgccugggaggagcccagccugggcgugcugaagauccagaaggugggcugggacaacaccaccaucgccugcgccagaugcaacagcuggugcagcugggccagccccguggcccugaacgugcaguacgcccccagagacgugagagugagaaagaucaagccccugagcgagauccacagcggcaacagcgugagccugcagugcgacuucagcagcagccaccccaaggaggugcaguucuucugggagaagaacggcagacugcugggcaaggagagccagcugaacuucgacagcaucagccccgaggacgccggcagcuacagcugcugggugaacaacagcaucggccagaccgccagcaaggccuggacccuggaggugcuguacgcccccagaagacugagagugagcaugagccccggcgaccaggugauggagggcaagagcgccacccugagaugcgagagcgacgccaacccccccgugagccacuacaccugguucgacuggaacaaccagagccugcccuaccacagccagaagcugagacuggagcccgugaaggugcagcacagcggcgccuacuggugccagggcaccaacagcgugggcaagggcagaagcccccugagcacccugaccguguacuacagccccgagaccaucggcagaagaguggccgugggccugggcagcugccuggccauccugauccuggccaucugcggccugaagcugcagagaagagacgccgagagcagcgagaugcagagaccccccagaaccugcgacgacaccgugaccuacagcgcccugcacaagagacaggugggcgacuacgagaacgugauccccgacuuccccgaggacgagggcauccacuacagcgagcugauccaguucggcgugggcgagagaccccaggcccaggagaacguggacuacgugauccugaagcacuga

SEQ ID NO: 810 - RNA, 1989 nt, Artificial Sequence
  derived and/or modified sequence opt5 from CD22__Homo_sapiens__AAC18956
auggagagcaagaccgaaaaauggauggagagaauccaccugaacguguccgaacggcccuucccuccgcauauucagcuucccccugagauccaagaaucucaggaggucacacugacgugccuucugaauuuuagcuguuacggcuaucccauucagcuccaguggcugcuugaggggguuccuaugcgccaagccgcugugaccuccacaucucugaccaucaagagcguguucacaagauccgaacucaaauuuucuccccaguggagccaccauggaaagauugugaccugccagcugcaggacgccgauggcaaauuccuguccaacgacacagugcaacucaauguuaagcacaccccuaagcuggagaucaaagugacgccgagcgaugcgaucguccgggaaggggacucugugaccaugacaugugagguuuccagcaccaaccccgaguacacaaccgugucuuggcuuaaggauggaacgucccugaaaaagcagaauacauuuacccucaaccugcgcgaagucacaaaagaccagagcggcaaguauugcugucaggugucuaaugauguggggccuggaagauccgaggaagucuuccuucaaguucaguacgcucccgagccuagcaccgugcagauucugcauucccccgccguggaaggcucucaagucgaguuucucugcaugagccuggccaacccgcugccuaccaauuauacaugguaccacaacggcaaggagaugcaggggcggacggaagagaaagugcacauccccaagauucucccuuggcaugcuggaaccuauuccuguguugccgaaaauauccugggcacagggcagcgcggacccggcgcugagcuugacgugcaguaucccccuaaaaaggucaccacagugauucaaaacccgaugcccaucagagaaggggauaccguuacgcugagcugcaauuacaacucuuccaauccuagcgugacacgguacgaguggaaaccccacggagccugggaggaaccuucucucggcguccugaagauucagaaagugggcugggacaacaccaccaucgcgugugcccgcugcaacagcugguguuccugggcuucucccgucgcccuuaaugugcaguacgcuccgagagauguucgggugcgcaagaucaagccucugagcgagauucauuccgggaacagcgucucucuccagugcgacuucuccagcucucaccccaaagaagugcaauuuuucugggagaagaauggaagacugcugggcaaagaaucccagcucaacuuugauagcaucuccccugaggacgccgggucuuauagcugcuggguuaauaacuccauuggacagacagcgucuaaggccuggacccuggaggugcuuuacgcuccccggcgccugagagucagcauguccccuggcgaccaggugauggaagggaaaagcgccacacuccggugugagucugaugcuaaucccccggugucccacuauacgugguucgacuggaacaaucaaagccugccuuaccauucucagaagcucagacuggaacccguuaagguccagcacuccggagccuauuggugccagggcaccaacagcgugggcaaagggcgcucuccccucagcacacugaccguguacuacuccccugagacaaucggacggagagucgccgugggccuggggagcugucucgcuauucugauccuugcgaucugcggacugaagcuccaacgccgggaugccgagucuuccgaaaugcagagaccgccccgcaccugugacgauacgguuaccuauagcgcucugcauaaacggcaggucggcgacuacgagaaugucauuccugauuuucccgaagacgaggggauccacuauuccgaacugauucaauucggcgugggagagagaccucaggcccaggagaacguugauuacgugauccuuaagcauuga

SEQ ID NO: 811 - protein, 847 aa, Artificial Sequence
  CD22__Homo_sapiens__P20273
MHLLGPWLLLLVLEYLAFSDSSKWVFEHPETLYAWEGACVWIPCTYRALDGDLESFILFHNPEYNKNTSKFDGTRLYESTKDGKVPSEQKRVQFLGDKNKNCTLSIHPVHLNDSGQLGLRMESKTEKWMERIHLNVSERPFPPHIQLPPEIQESQEVTLTCLLNFSCYGYPIQLQWLLEGVPMRQAAVTSTSLTIKSVFTRSELKFSPQWSHHGKIVTCQLQDADGKFLSNDTVQLNVKHTPKLEIKVTPSDAIVREGDSVTMTCEVSSSNPEYTTVSWLKDGTSLKKQNTFTLNLREVTKDQSGKYCCQVSNDVGPGRSEEVFLQVQYAPEPSTVQILHSPAVEGSQVEFLCMSLANPLPTNYTWYHNGKEMQGRTEEKVHIPKILPWHAGTYSCVAENILGTGQRGPGAELDVQYPPKKVTTVIQNPMPIREGDTVTLSCNYNSSNPSVTRYEWKPHGAWEEPSLGVLKIQNVGWDNTTIACAACNSWCSWASPVALNVQYAPRDVRVRKIKPLSEIHSGNSVSLQCDFSSSHPKEVQFFWEKNGRLLGKESQLNFDSISPEDAGSYSCWVNNSIGQTASKAWTLEVLYAPRRLRVSMSPGDQVMEGKSATLTCESDANPPVSHYTWFDWNNQSLPYHSQKLRLEPVKVQHSGAYWCQGTNSVGKGRSPLSTLTVYYSPETIGRRVAVGLGSCLAILILAICGLKLQRRWKRTQSQQGLQENSSGQSFFVRNKKVRRAPLSEGPHSLGCYNPMMEDGISYTTLRFPEMNIPRTGDAESSEMQRPPPDCDDTVTYSALHKRQVGDYENVIPDFPEDEGIHYSELIQFGVGERPQAQENVDYVILKH

SEQ ID NO: 812 - RNA, 2544 nt, Artificial Sequence
  CD22__Homo_sapiens__AAB06448
augcaucuccucggccccuggcuccugcuccugguucuagaauacuuggcuuucucugacucaaguaaauggguuuuugagcacccugaaacccucuacgccugggagggggccugcgucuggauccccugcaccuacagagcccuagauggugaccuggaaagcuucauccuguuccacaauccugaguauaacaagaacaccucgaaguuugaugggacaagacucuaugaaagcacaaaggaugggaagguuccuucugagcagaaaagggugcaauuccugggagacaagaauaagaacugcacacugaguauccacccggugcaccucaaugacaguggucagcuggggcugaggauggaguccaagacugagaaauggauggaacgaauacaccucaaugucucugaaaggccuuuuccaccucauauccagcucccuccagaaauucaagagucccaggaagucacucugaccugcuugcugaauuucuccugcuauggguauccgauccaauugcaguggcuccuagaggggguuccaaugaggcaggcugcugucaccucgaccuccuugaccaucaagucugucuucacccggagcgagcucaaguucuccccacaguggagucaccaugggaagauugugaccugccagcuucaggaugcagaugggaaguuccucuccaaugacacggugcagcugaacgugaagcacaccccgaaguuggagaucaaggucacucccagugaugccauagugagggagggggacucugugaccaugaccugcgaggucagcagcagcaacccggaguacacgacgguauccuggcucaaggaugggaccucgcugaagaagcagaauacauucacgcuaaaccugcgcgaagugaccaaggaccagagugggaaguacugcugucaggucuccaaugacgugggcccgggaaggucggaagaaguguuccugcaagugcaguaugccccggaaccuuccacgguucagauccuccacucaccggcuguggagggaagucaagucgaguuucuuugcaugucacuggccaauccucuuccaacaaauuacacgugguaccacaaugggaaagaaaugcagggaaggacagaggagaaaguccacaucccaaagauccuccccuggcacgcugggacuuauuccuguguggcagaaaacauucuugguacuggacagaggggcccgggagcugagcuggauguccaguauccucccaagaaggugaccacagugauucaaaaccccaugccgauucgagaaggagacacagugacccuuuccuguaacuacaauuccaguaaccccaguguuacccgguaugaauggaaaccccauggcgccugggaggagccaucgcuuggggugcugaagauccaaaacguuggcugggacaacacaaccaucgccugcgcagcuuguaauaguuggugcucgugggccuccccugucgcccugaauguccaguaugccccccgagacgugaggguccggaaaaucaagccccuuuccgagauucacucuggaaacucggucagccuccaaugugacuucucaagcagccaccccaaagaaguccaguucuucugggagaaaaauggcaggcuucuggggaaagaaagccagcugaauuuugacuccaucuccccagaagaugcugggaguuacagcugcugggugaacaacuccauaggacagacagcguccaaggccuggacacuugaagugcuguaugcacccaggaggcugcguguguccaugagcccgggggaccaagugauggaggggaagagugcaacccugaccugugagagcgacgccaacccucccgucucccacuacaccugguuugacuggaauaaccaaagccuccccuaccacagccagaagcugagauuggagccggugaagguccagcacucgggugccuacuggugccaggggaccaacagugugggcaagggccguucgccucucagcacccucaccgucuacuauagcccggagaccaucggcaggcgaguggcugugggacucggguccugccucgccauccucauccuggcaaucugugggcucaagcuccagcgacguuggaagaggacacagagccagcaggggcuucaggagaauuccagcggccagagcuucuuugugaggaauaaaaagguuagaagggccccccucucugaaggcccccacucccugggaugcuacaauccaaugauggaagauggcauuagcuacaccacccugcgcuuucccgagaugaacauaccacgaacuggagaugcagaguccucagagaugcagagaccucccccggacugcgaugacacggucacuuauucagcauugcacaagcgccaagugggcgacuaugagaacgucauuccagauuuuccagaagaugaggggauucauuacucagagcugauccaguuuggggucggggagcggccucaggcacaagaaaauguggacuaugugauccucaaacauuga

SEQ ID NO: 813 - RNA, 2544 nt, Artificial Sequence
  derived and/or modified sequence opt1 from CD22__Homo_sapiens__AAB06448
augcaccuccucggccccuggcugcugcuccuggugcuggaguaccucgccuucagcgacuccagcaagugggucuucgagcacccggagacccuguacgccugggagggggcgugcguguggauccccugcaccuaccgcgcccuggacggcgaccucgaguccuucauccuguuccacaaccccgaguacaacaagaacacgagcaaguucgacgggacccggcuguacgaguccaccaaggacggcaaggugcccagcgagcagaagcgcguccaguuccucggggacaagaacaagaacugcacccuguccauccacccggugcaccugaacgacagcggccagcucggccugcggauggaguccaagacggagaaguggauggagcgcauccaccugaacgugagcgagcggcccuucccgccccacauccagcucccgcccgagauccaggagucccaggaggucacccugaccugccugcucaacuucagcugcuacggguaccccauccagcugcaguggcugcucgagggcgugcccaugcgccaggccgccgugaccuccacgagccugaccaucaaguccgucuucacccggagcgagcugaaguucuccccgcaguggagccaccacgggaagaucgugaccugccagcuccaggacgccgacggcaaguuccuguccaacgacacggugcagcugaacgucaagcacacccccaagcucgagaucaaggugacccccagcgacgcgaucgugcgcgagggggacagcgucaccaugacgugcgagguguccagcuccaaccccgaguacaccaccgugagcuggcugaaggacggcaccucccugaagaagcagaacacguucacccucaaccugcgggaggucaccaaggaccagagcggcaaguacugcugccagguguccaacgacguggggcccggccgcagcgaggaggucuuccuccaggugcaguacgcccccgagcccuccaccgugcagauccugcacagccccgccgucgaggggucccagguggaguuccugugcaugagccuggccaacccgcuccccacgaacuacaccugguaccacaacggcaaggagaugcagggccggaccgaggagaagguccacauccccaagauccugcccuggcacgcggggaccuacuccugcguggccgagaacauccugggcacggggcagcgcggcccgggggccgagcucgacgugcaguacccgcccaagaaggucaccaccgugauccagaaccccaugcccauccgggagggcgacaccgugacgcugagcugcaacuacaacuccagcaaccccuccgucacccgcuacgaguggaagccccacggcgccugggaggagccgagccugggggugcucaagauccagaacgugggcugggacaacaccaccaucgccugcgcggccugcaacuccuggugcagcugggccagccccgucgcccugaacgugcaguacgcgccccgggacgugcgcguccggaagaucaagccccuguccgagauccacagcgggaacuccgugagccuccagugcgacuucuccagcucccacccgaaggaggugcaguucuucugggagaagaacggccgccugcuggggaaggagagccagcugaacuucgacuccaucagccccgaggacgccggcuccuacagcugcugggucaacaacuccaucggccagacggccagcaaggccuggacccucgaggugcuguacgcgccccggcgccugcggguguccaugagccccggggaccaggucauggagggcaaguccgccacccugaccugcgagagcgacgccaacccgcccgugagccacuacaccugguucgacuggaacaaccagucccugcccuaccacagccagaagcugcgccucgagcccgugaagguccagcacuccggggccuacuggugccagggcacgaacagcguggggaagggccgcuccccgcugagcacccugaccguguacuacucccccgagaccaucggccggcgcgucgccguggggcucggcagcugccuggccauccugauccucgccaucugcgggcugaagcugcagcggcgcuggaagcggacgcagucccagcagggccuccaggagaacagcuccggccagagcuucuucgugcgcaacaagaagguccggcgcgcgccccuguccgaggggccccacagccugggcugcuacaacccgaugauggaggacgggaucuccuacaccacccuccgguuccccgagaugaacaucccccgcaccggcgacgccgagagcuccgagaugcagcggcccccgcccgacugcgacgacacggugaccuacagcgcccugcacaagcgccaggugggggacuacgagaacgucauccccgacuuccccgaggacgagggcauccacuacuccgagcugauccaguucggcgugggggagcggccgcaggcccaggagaacguggacuacgucauccucaagcacuga

SEQ ID NO: 814 - RNA, 2544 nt, Artificial Sequence
  derived and/or modified sequence opt2 from CD22__Homo_sapiens__AAB06448
augcaccuccucggccccuggcuccuccuccucguccucgaguaccucgccuucuccgacuccuccaagugggucuucgagcaccccgagacccucuacgccugggagggcgccugcgucuggauccccugcaccuaccgcgcccucgacggcgaccucgaguccuucauccucuuccacaaccccgaguacaacaagaacaccuccaaguucgacggcacccgccucuacgaguccaccaaggacggcaagguccccuccgagcagaagcgcguccaguuccucggcgacaagaacaagaacugcacccucuccauccaccccguccaccucaacgacuccggccagcucggccuccgcauggaguccaagaccgagaaguggauggagcgcauccaccucaacgucuccgagcgccccuuccccccccacauccagcucccccccgagauccaggagucccaggaggucacccucaccugccuccucaacuucuccugcuacggcuaccccauccagcuccaguggcuccucgagggcguccccaugcgccaggccgccgucaccuccaccucccucaccaucaaguccgucuucacccgcuccgagcucaaguucuccccccaguggucccaccacggcaagaucgucaccugccagcuccaggacgccgacggcaaguuccucuccaacgacaccguccagcucaacgucaagcacacccccaagcucgagaucaaggucacccccuccgacgccaucguccgcgagggcgacuccgucaccaugaccugcgaggucuccuccuccaaccccgaguacaccaccgucuccuggcucaaggacggcaccucccucaagaagcagaacaccuucacccucaaccuccgcgaggucaccaaggaccaguccggcaaguacugcugccaggucuccaacgacgucggccccggccgcuccgaggaggucuuccuccagguccaguacgcccccgagcccuccaccguccagauccuccacucccccgccgucgagggcucccaggucgaguuccucugcaugucccucgccaacccccuccccaccaacuacaccugguaccacaacggcaaggagaugcagggccgcaccgaggagaagguccacauccccaagauccuccccuggcacgccggcaccuacuccugcgucgccgagaacauccucggcaccggccagcgcggccccggcgccgagcucgacguccaguacccccccaagaaggucaccaccgucauccagaaccccaugcccauccgcgagggcgacaccgucacccucuccugcaacuacaacuccuccaaccccuccgucacccgcuacgaguggaagccccacggcgccugggaggagcccucccucggcguccucaagauccagaacgucggcugggacaacaccaccaucgccugcgccgccugcaacuccuggugcuccugggccucccccgucgcccucaacguccaguacgccccccgcgacguccgcguccgcaagaucaagccccucuccgagauccacuccggcaacuccgucucccuccagugcgacuucuccuccucccaccccaaggagguccaguucuucugggagaagaacggccgccuccucggcaaggagucccagcucaacuucgacuccaucucccccgaggacgccggcuccuacuccugcugggucaacaacuccaucggccagaccgccuccaaggccuggacccucgagguccucuacgccccccgccgccuccgcgucuccaugucccccggcgaccaggucauggagggcaaguccgccacccucaccugcgaguccgacgccaacccccccgucucccacuacaccugguucgacuggaacaaccagucccuccccuaccacucccagaagcuccgccucgagcccgucaagguccagcacuccggcgccuacuggugccagggcaccaacuccgucggcaagggccgcuccccccucuccacccucaccgucuacuacucccccgagaccaucggccgccgcgucgccgucggccucggcuccugccucgccauccucauccucgccaucugcggccucaagcuccagcgccgcuggaagcgcacccagucccagcagggccuccaggagaacuccuccggccaguccuucuucguccgcaacaagaagguccgccgcgccccccucuccgagggcccccacucccucggcugcuacaaccccaugauggaggacggcaucuccuacaccacccuccgcuuccccgagaugaacaucccccgcaccggcgacgccgaguccuccgagaugcagcgccccccccccgacugcgacgacaccgucaccuacuccgcccuccacaagcgccaggucggcgacuacgagaacgucauccccgacuuccccgaggacgagggcauccacuacuccgagcucauccaguucggcgucggcgagcgcccccaggcccaggagaacgucgacuacgucauccucaagcacuga

SEQ ID NO: 815 - RNA, 2544 nt, Artificial Sequence
  derived and/or modified sequence opt3 from CD22__Homo_sapiens__AAB06448
augcaucugcucggccccuggcuucuguuguuagugcuggaguaccuagccuucagcgacuccucuaagugggucuuugaacacccugagacccucuaugcuugggaaggggcaugcguuuggaucccauguacauacagagcccuggauggagaccuugagucauucauucuguuucacaacccggaauauaauaaaaacacuucuaaguucgaugguacgagguuguacgagagcaccaaagacggcaaggugcccuccgagcagaaacggguacaauuucucggggauaagaauaagaacugcacacugucuauacauccugugcaccugaaugacucgggacagcucggcuuacgcauggaaucaaaaacugagaaguggauggaacgaauccaucugaacgucagcgagcguccauuucccccucacauucagcuuccacccgagauccaggaaagucaagaggugaccuugacaugucugcuaaauuucuccugcuaugguuacccuauucagcuccaguggcugcuugaagggguuccaaugagacaggcggcugugaccucuacuagccugacaaucaaauccgucuucaccaggucagaguugaaguuuaguccgcaauggagccaccauggaaaaauagugacgugucagcuccaggaugccgacggcaaguuccugucuaacgauacuguacaguuaaauguuaagcacacccccaaacuggaaaucaaggugacaccuuccgacgcaauuguccgggagggcgauucagugacuaugaccugcgaggugagcaguucuaacccagaauauacaaccgucuccuggcucaaagacgggacgagccuuaagaaacaaaauacuuuuacacugaacuugcgcgagguuaccaaggaucagucgggaaaauacuguugccaggugucuaaugacguaggucccggcagauccgaagagguguuccuacaaguccaguacgccccugaaccaucaacugugcagauccugcauagucccgcuguugaggggagccagguggaguuucucuguaugucccuggcaaacccgcuuccuacaaauuauaccugguaccacaacggaaaggaaaugcaaggcaggacggaggaaaagguccacauucccaaaauccugccauggcaugccgguaccuauucuugcguggcugagaacauauuggggacaggacagcggggcccuggcgccgaacucgacguacaguaucccccaaagaaaguuacuaccgugauucagaaucccaugccuauccgcgagggggauacagucacucugagcuguaacuacaauucaaguaacccauccgugacccgauacgaguggaagccgcacggagcgugggaggaacccagcuuagguguccugaaaauucaaaaugugggcugggacaacacaaccaucgcaugcgccgcuugcaauucuugguguucaugggccaguccuguugcacuaaacgugcaguaugcuccaagagauguaaggguccggaagaucaagccccucagcgaaauucauuccgggaauagugugucgcugcagugcgacuucagcuccucacacccuaaagagguucaguucuuuugggagaagaacggacgucuuuugggcaaagaaagucaacugaauuucgauucuauaagcccagaggacgccgguuccuacucauguugggugaacaauagcaucgggcagacugcgucuaaggccuggacgcucgaaguccuguacgcaccccgcagacuuaggguguccaugaguccgggcgaucagguaauggagggaaaaagcgcuacacugaccugcgaaucugacgccaacccuccagugucccauuauacuugguuugauuggaauaaccagucauugcccuaccacagucaaaagcuccggcuggagccuguuaagguccagcacagcggcgcuuauuggugucaggggaccaacucggugggaaaaggucgaucccccuuaucuacacugaccguguacuauagcccagagacuauuggccgcagagucgccguugggcuaggaucaugccucgcaauccugauacuugccauuuguggcuugaagcugcaaaggcgguggaaacgcacacagagucagcagggucuccaagaaaauuccucugggcagagcuucuuugugagaaacaagaaagugaggcgugcuccucuguccgagggcccccauucauuaggaugcuacaauccaaugauggaagacggcaucagcuauacgacccugcgguucccggagaugaacaucccucgaacuggggaugcggaaaguucugagaugcagagacccccacccgacugugacgauacaguaaccuacuccgcacuucacaagaggcaggucggagacuacgagaaugugauuccugauuuuccagaagacgaggguauccauuauagcgaauugauucaauucggcguuggggagcgcccccaggcccaggaaaacguggauuacgucauacucaagcacuga

SEQ ID NO: 816 - RNA, 2544 nt, Artificial Sequence
  derived and/or modified sequence opt4 from CD22__Homo_sapiens__AAB06448
augcaccugcugggccccuggcugcugcugcuggugcuggaguaccuggccuucagcgacagcagcaaguggguguucgagcaccccgagacccuguacgccugggagggcgccugcguguggauccccugcaccuacagagcccuggacggcgaccuggagagcuucauccuguuccacaaccccgaguacaacaagaacaccagcaaguucgacggcaccagacuguacgagagcaccaaggacggcaaggugcccagcgagcagaagagagugcaguuccugggcgacaagaacaagaacugcacccugagcauccaccccgugcaccugaacgacagcggccagcugggccugagaauggagagcaagaccgagaaguggauggagagaauccaccugaacgugagcgagagacccuuccccccccacauccagcugccccccgagauccaggagagccaggaggugacccugaccugccugcugaacuucagcugcuacggcuaccccauccagcugcaguggcugcuggagggcgugcccaugagacaggccgccgugaccagcaccagccugaccaucaagagcguguucaccagaagcgagcugaaguucagcccccaguggagccaccacggcaagaucgugaccugccagcugcaggacgccgacggcaaguuccugagcaacgacaccgugcagcugaacgugaagcacacccccaagcuggagaucaaggugacccccagcgacgccaucgugagagagggcgacagcgugaccaugaccugcgaggugagcagcagcaaccccgaguacaccaccgugagcuggcugaaggacggcaccagccugaagaagcagaacaccuucacccugaaccugagagaggugaccaaggaccagagcggcaaguacugcugccaggugagcaacgacgugggccccggcagaagcgaggagguguuccugcaggugcaguacgcccccgagcccagcaccgugcagauccugcacagccccgccguggagggcagccagguggaguuccugugcaugagccuggccaacccccugcccaccaacuacaccugguaccacaacggcaaggagaugcagggcagaaccgaggagaaggugcacauccccaagauccugcccuggcacgccggcaccuacagcugcguggccgagaacauccugggcaccggccagagaggccccggcgccgagcuggacgugcaguacccccccaagaaggugaccaccgugauccagaaccccaugcccaucagagagggcgacaccgugacccugagcugcaacuacaacagcagcaaccccagcgugaccagauacgaguggaagccccacggcgccugggaggagcccagccugggcgugcugaagauccagaacgugggcugggacaacaccaccaucgccugcgccgccugcaacagcuggugcagcugggccagccccguggcccugaacgugcaguacgcccccagagacgugagagugagaaagaucaagccccugagcgagauccacagcggcaacagcgugagccugcagugcgacuucagcagcagccaccccaaggaggugcaguucuucugggagaagaacggcagacugcugggcaaggagagccagcugaacuucgacagcaucagccccgaggacgccggcagcuacagcugcugggugaacaacagcaucggccagaccgccagcaaggccuggacccuggaggugcuguacgcccccagaagacugagagugagcaugagccccggcgaccaggugauggagggcaagagcgccacccugaccugcgagagcgacgccaacccccccgugagccacuacaccugguucgacuggaacaaccagagccugcccuaccacagccagaagcugagacuggagcccgugaaggugcagcacagcggcgccuacuggugccagggcaccaacagcgugggcaagggcagaagcccccugagcacccugaccguguacuacagccccgagaccaucggcagaagaguggccgugggccugggcagcugccuggccauccugauccuggccaucugcggccugaagcugcagagaagauggaagagaacccagagccagcagggccugcaggagaacagcagcggccagagcuucuucgugagaaacaagaaggugagaagagccccccugagcgagggcccccacagccugggcugcuacaaccccaugauggaggacggcaucagcuacaccacccugagauuccccgagaugaacauccccagaaccggcgacgccgagagcagcgagaugcagagacccccccccgacugcgacgacaccgugaccuacagcgcccugcacaagagacaggugggcgacuacgagaacgugauccccgacuuccccgaggacgagggcauccacuacagcgagcugauccaguucggcgugggcgagagaccccaggcccaggagaacguggacuacgugauccugaagcacuga

SEQ ID NO: 817 - RNA, 2544 nt, Artificial Sequence
  derived and/or modified sequence opt5 from CD22__Homo_sapiens__AAB06448
augcaucugcucggccccuggcugcuucugcucgugcuggaguaccuugccuucagcgacuccucuaagugggucuuugaacacccugagacccuguaugcuugggaaggggccugcguuuggaucccguguacauacagagcgcucgauggagaccuggagagcuucauucuguuucacaaccccgaauauaauaaaaacacguccaaguucgauggcacccggcucuacgagucuacaaaagacgggaaggugccuagcgagcagaaacgcgugcaauuucugggagauaagaauaagaacugcacccuuuccauccaucccguccaccugaaugacucuggccagcucgggcugagaauggaaagcaaaacagagaaguggauggaacggauucaucuuaacguguccgagcgcccuuuucccccucacauccagcugccgcccgagauucaggaaagccaagagguuacccucacaugucugcugaauuucucuugcuauggauacccuauccagcuccaguggcugcuugaaggcgugcccaugagacaggcugccgucaccuccacgagccugaccaucaaaucuguguucacacgguccgagcucaaguuuagcccucaauggucucaccauggcaaaauuguuaccugucagcugcaggaugccgacgggaaguuccuuuccaacgauacagugcagcugaaugucaagcacacccccaaacucgaaaucaaggugacgccgagcgacgcuauugugcgcgagggagauuccgucacaaugaccugcgagguuucuagcuccaacccugaauauacaaccgugagcuggcugaaagacggcaccucucugaagaaacaaaauacauuuacgcucaaccugagagaggugaccaaggaucaguccgggaaauacuguugccaggucagcaaugacgugggacccggccggucugaagagguuuuccuucaagugcaguacgccccugaacccagcacaguccagauccugcauucccccgcuguggaggggucucagguugaguuucucuguaugagccuggccaacccucuuccgaccaauuauacaugguaccacaacggaaaggaaaugcaaggccgcaccgaggaaaaggugcacauucccaaaauccugccuuggcaugcgggcacguauuccugcgucgccgagaacauucucgggacaggacagagaggccccggggcugaacuggacgugcaguacccucccaagaaagucaccaccgugauccagaauccgaugccuauccgggagggagauacaguuacccugagcuguaacuauaauucuuccaaccccagcgugacacgcuacgaguggaagccucacggcgccugggaggaacccucucucgggguccugaaaauucaaaaugugggaugggacaacacgaccaucgcuugcgccgcgugcaauuccugguguagcugggccuccccuguugcucuuaacgugcaguaugcccccagagauguccgggugcgcaagauuaagccgcugucugaaauccauagcggcaauuccgugucucuccagugcgacuucagcuccagccacccuaaagagguucaguucuuuugggagaagaacggcagacugcuggggaaagaaucucaacuuaauuucgauuccauuagccccgaggacgcuggaucuuacuccuguugggucaacaauagcaucggccagacagccucuaaggccuggacccucgaagugcuguacgcuccccggagacugcgcgugagcauguccccuggggaucaggucauggagggaaaaagcgcgacacuuaccugcgaaucugacgccaacccgcccgugucccauuauacgugguuugauuggaauaaccagagccugccuuaccacucccaaaagcuccggcuggagcccguuaaggugcagcacucuggcgcuuauuggugucaggggaccaacagcgucggcaaaggaagauccccucucucuacacugaccguguacuauagccccgagacaaucggccgccggguugccguggggcugggauccugccuugccauucucauccuggcuauuuguggccugaagcuccaaagacgcuggaaacggacccagucucagcaggggcugcaagaaaauagcuccggacagagcuucuuugucagaaacaagaaagugcgccgggccccucuuucugagggcccccauucccuggggugcuacaauccgaugauggaagacggcaucagcuauacgacacucagauucccugagaugaacauuccccgcaccggagaugcggaaucuuccgagaugcagcggccucccccggacugugacgauacaguuaccuacagcgcucugcacaagagacaggugggcgacuacgagaaugucaucccugauuuucccgaagacgaggggauccauuauucugaacugauucaauucggagugggcgagcggccucaggcccaggaaaacguggauuacgucauccuuaagcacuga

SEQ ID NO: 818 - protein, 847 aa, Artificial Sequence; identical to SEQ ID NO: 811
  CD22__Homo_sapiens__Q0EAF5

SEQ ID NO: 819 - RNA, 2544 nt, Artificial Sequence; identical to SEQ ID NO: 812
  CD22__Homo_sapiens__ABK41939

SEQ ID NO: 820 - RNA, 2544 nt, Artificial Sequence; identical to SEQ ID NO: 813
  derived and/or modified sequence opt1 from CD22__Homo_sapiens__ABK41939

SEQ ID NO: 821 - RNA, 2544 nt, Artificial Sequence; identical to SEQ ID NO: 814
  derived and/or modified sequence opt2 from CD22__Homo_sapiens__ABK41939

SEQ ID NO: 822 - RNA, 2544 nt, Artificial Sequence; identical to SEQ ID NO: 815
  derived and/or modified sequence opt3 from CD22__Homo_sapiens__ABK41939

SEQ ID NO: 823 - RNA, 2544 nt, Artificial Sequence; identical to SEQ ID NO: 816
  derived and/or modified sequence opt4 from CD22__Homo_sapiens__ABK41939

SEQ ID NO: 824 - RNA, 2544 nt, Artificial Sequence; identical to SEQ ID NO: 817
  derived and/or modified sequence opt5 from CD22__Homo_sapiens__ABK41939

SEQ ID NO: 825 - protein, 534 aa, Artificial Sequence
  CD276__Homo_sapiens__Q5ZPR3
MLRRRGSPGMGVHVGAALGALWFCLTGALEVQVPEDPVVALVGTDATLCCSFSPEPGFSLAQLNLIWQLTDTKQLVHSFAEGQDQGSAYANRTALFPDLLAQGNASLRLQRVRVADEGSFTCFVSIRDFGSAAVSLQVAAPYSKPSMTLEPNKDLRPGDTVTITCSSYQGYPEAEVFWQDGQGVPLTGNVTTSQMANEQGLFDVHSILRVVLGANGTYSCLVRNPVLQQDAHSSVTITPQRSPTGAVEVQVPEDPVVALVGTDATLRCSFSPEPGFSLAQLNLIWQLTDTKQLVHSFTEGRDQGSAYANRTALFPDLLAQGNASLRLQRVRVADEGSFTCFVSIRDFGSAAVSLQVAAPYSKPSMTLEPNKDLRPGDTVTITCSSYRGYPEAEVFWQDGQGVPLTGNVTTSQMANEQGLFDVHSVLRVVLGANGTYSCLVRNPVLQQDAHGSVTITGQPMTFPPEALWVTVGLSVCLIALLVALAFVCWRKIKQSCEEENAGAEDQDGEGEGSKTALQPLKHSDSKEDDGQEIA

SEQ ID NO: 826 - RNA, 1605 nt, Artificial Sequence
  CD276__Homo_sapiens__CAE47548
augcugcgucggcggggcagcccuggcaugggugugcaugugggugcagcccugggagcacugugguucugccucacaggagcccuggagguccaggucccugaagacccagugguggcacuggugggcaccgaugccacccugugcugcuccuucucccccgagccuggcuucagccuggcacagcucaaccucaucuggcagcugacagauaccaaacagcuggugcacagcuuugcugagggccaggaccagggcagcgccuaugccaaccgcacggcccucuucccggaccugcuggcacagggcaacgcaucccugaggcugcagcgcgugcguguggcggacgagggcagcuucaccugcuucgugagcauccgggauuucggcagcgcugccgucagccugcagguggccgcucccuacucgaagcccagcaugacccuggagcccaacaaggaccugcggccaggggacacggugaccaucacgugcuccagcuaccagggcuacccugaggcugagguguucuggcaggaugggcagggugugccccugacuggcaacgugaccacgucgcagauggccaacgagcagggcuuguuugaugugcacagcauccugcggguggugcugggugcaaauggcaccuacagcugccuggugcgcaaccccgugcugcagcaggaugcgcacagcucugucaccaucacaccccagagaagccccacaggagccguggagguccaggucccugaggacccggugguggcccuagugggcaccgaugccacccugcgcugcuccuucucccccgagccuggcuucagccuggcacagcucaaccucaucuggcagcugacagacaccaaacagcuggugcacaguuucaccgaaggccgggaccagggcagcgccuaugccaaccgcacggcccucuucccggaccugcuggcacaaggcaaugcaucccugaggcugcagcgcgugcguguggcggacgagggcagcuucaccugcuucgugagcauccgggauuucggcagcgcugccgucagccugcagguggccgcucccuacucgaagcccagcaugacccuggagcccaacaaggaccugcggccaggggacacggugaccaucacgugcuccagcuaccggggcuacccugaggcugagguguucuggcaggaugggcagggugugccccugacuggcaacgugaccacgucgcagauggccaacgagcagggcuuguuugaugugcacagcguccugcggguggugcugggugcgaauggcaccuacagcugccuggugcgcaaccccgugcugcagcaggaugcgcacggcucugucaccaucacagggcagccuaugacauuccccccagaggcccugugggugaccguggggcugucugucugucucauugcacugcugguggcccuggcuuucgugugcuggagaaagaucaaacagagcugugaggaggagaaugcaggagcugaggaccaggauggggagggagaaggcuccaagacagcccugcagccucugaaacacucugacagcaaagaagaugauggacaagaaauagccuga

SEQ ID NO: 827 - RNA, 1605 nt, Artificial Sequence
  derived and/or modified sequence opt1 from CD276__Homo_sapiens__CAE47548
augcugcgccggcgcggcagccccgggaugggcgugcacgucggggccgcccucggcgcgcugugguucugccugaccggggcccucgagguccaggugccggaggaccccgugguggcccuggugggcaccgacgccacgcugugcugcuccuucagccccgagcccggcuucucccucgcccagcugaaccugaucuggcagcucaccgacaccaagcagcugguccacagcuucgcggaggggcaggaccagggcuccgccuacgccaaccggaccgcccuguucccggaccuccuggcgcaggggaacgccagccugcgccuccagcgggugcgcguggccgacgagggcuccuucacgugcuucgucagcauccgggacuucggguccgccgccgugagccuccagguggcggcccccuacuccaagcccagcaugacccuggagcccaacaaggaccugcgcccgggcgacaccgucaccaucacgugcuccagcuaccagggcuaccccgaggccgagguguucuggcaggacgggcagggcgugccccugaccgggaacgucaccaccucccagauggccaacgagcagggccuguucgacgugcacagcauccuccgggugguccugggcgccaacgggacguacuccugccuggugcgcaaccccgugcuccagcaggacgcgcacagcuccgucaccaucaccccgcagcggagccccaccggcgccguggaggugcagguccccgaggaccccguggucgcccugguggggacggacgccacccugcgcugcagcuucuccccggagcccggcuucagccucgcccagcugaaccugaucuggcagcucaccgacaccaagcagcuggugcacuccuucacggaggggcgggaccagggcagcgcguacgccaaccgcaccgcccuguuccccgaccuccuggcccagggcaacgccucccugcggcuccagcgcguccggguggcggacgaggggagcuucacgugcuucguguccauccgcgacuucggcagcgccgccgucucccuccagguggccgcgcccuacagcaagccguccaugacccuggagcccaacaaggaccugcggcccggggacaccgugaccaucacgugcagcuccuaccgcggcuaccccgaggccgaggucuucuggcaggacgggcagggcgugccgcugaccggcaacgugaccaccagccagauggccaacgagcaggggcuguucgacguccacuccgugcuccgggugguccugggcgccaacgggaccuacagcugccuggugcgcaaccccgugcuccagcaggacgcccacggcuccgucaccaucacggggcagcccaugaccuucccgcccgaggcgcugugggugaccgugggccugagcgucugccucaucgcccugcugguggcccuggccuucgugugcuggcgcaagaucaagcaguccugcgaggaggagaacgccggcgcggaggaccaggacggggagggcgaggggagcaagaccgcccuccagccccugaagcacagcgacuccaaggaggacgacggccaggagaucgccuga

SEQ ID NO: 828 - RNA, 1605 nt, Artificial Sequence
  derived and/or modified sequence opt2 from CD276__Homo_sapiens__CAE47548
augcuccgccgccgcggcucccccggcaugggcguccacgucggcgccgcccucggcgcccucugguucugccucaccggcgcccucgagguccagguccccgaggaccccgucgucgcccucgucggcaccgacgccacccucugcugcuccuucucccccgagcccggcuucucccucgcccagcucaaccucaucuggcagcucaccgacaccaagcagcucguccacuccuucgccgagggccaggaccagggcuccgccuacgccaaccgcaccgcccucuuccccgaccuccucgcccagggcaacgccucccuccgccuccagcgcguccgcgucgccgacgagggcuccuucaccugcuucgucuccauccgcgacuucggcuccgccgccgucucccuccaggucgccgcccccuacuccaagcccuccaugacccucgagcccaacaaggaccuccgccccggcgacaccgucaccaucaccugcuccuccuaccagggcuaccccgaggccgaggucuucuggcaggacggccagggcgucccccucaccggcaacgucaccaccucccagauggccaacgagcagggccucuucgacguccacuccauccuccgcgucguccucggcgccaacggcaccuacuccugccucguccgcaaccccguccuccagcaggacgcccacuccuccgucaccaucaccccccagcgcucccccaccggcgccgucgagguccagguccccgaggaccccgucgucgcccucgucggcaccgacgccacccuccgcugcuccuucucccccgagcccggcuucucccucgcccagcucaaccucaucuggcagcucaccgacaccaagcagcucguccacuccuucaccgagggccgcgaccagggcuccgccuacgccaaccgcaccgcccucuuccccgaccuccucgcccagggcaacgccucccuccgccuccagcgcguccgcgucgccgacgagggcuccuucaccugcuucgucuccauccgcgacuucggcuccgccgccgucucccuccaggucgccgcccccuacuccaagcccuccaugacccucgagcccaacaaggaccuccgccccggcgacaccgucaccaucaccugcuccuccuaccgcggcuaccccgaggccgaggucuucuggcaggacggccagggcgucccccucaccggcaacgucaccaccucccagauggccaacgagcagggccucuucgacguccacuccguccuccgcgucguccucggcgccaacggcaccuacuccugccucguccgcaaccccguccuccagcaggacgcccacggcuccgucaccaucaccggccagcccaugaccuucccccccgaggcccucugggucaccgucggccucuccgucugccucaucgcccuccucgucgcccucgccuucgucugcuggcgcaagaucaagcaguccugcgaggaggagaacgccggcgccgaggaccaggacggcgagggcgagggcuccaagaccgcccuccagccccucaagcacuccgacuccaaggaggacgacggccaggagaucgccuga

SEQ ID NO: 829 - RNA, 1605 nt, Artificial Sequence
  derived and/or modified sequence opt3 from CD276__Homo_sapiens__CAE47548
augcugagaaggcggggcagccccgggaugggagugcacgucggugccgcucucggcgcacuuugguucugccugaccggggccuuggagguucaggugccugaagacccaguaguggcguuagucggaacagaugcuacucuguguugcuccuuuucuccggagcccggcuucucacuagcccaacucaaccugaucuggcagcuuacggacaccaagcagcuggugcauaguuuugcagaaggucaggaucaagggagcgccuacgcuaaucgcacagcauuguucccugaccuccuggcccagggaaacgcuucccugcgacuccagcguguuagaguggccgaugagggcucuuuuacuuguuucgucucgauuagggacuuuggcucagcggcagugagcuuacagguagccgcuccauauaguaaacccuccaugacccuggaaccuaauaaggaucuucggccaggggacacaguuaccauaacuugcucuagcuaccaaggauaucccgaggccgagguguucuggcaggauggucagggcgucccuuugacagggaacgugaccacgucccagauggcaaaugaacaaggacuguuugacgugcacucaauccuacgcgucguucucggcgcuaacgguacuuacaguugucuggugagaaauccaguacuucagcaggaugcccauagcucugugaccauuacaccgcaaaggucccccacuggggcggucgaggugcagguuccugaagacccaguggucgcccuggugggaaccgaugcaacauugcggugcucauucagccccgagccuggcuuuagucucgcucagcugaacuuaaucuggcagcugaccgacacgaaacaacucguacacucuuucacugagggccgcgaccagggguccgccuaugcuaaucgaacagcccuuuuuccagaucuguuggcacagggaaacgccagccuaagacugcagaggguucggguggcugacgaagguucguucaccuguuucgucucuauucgugauuuuggcuccgcggcagugucacuccaagucgccgcucccuacaguaagccgagcaugacucuggagccuaauaaagaccuucgccccggggauacagugaccaucacgugcuccucuuauagaggauacccagaagccgagguuuucuggcaggacggccagggugugccucugaccgggaacguaacaacuagccagauggcaaaugaacaaggcuuguuugauguccauucagugcucaggguugugcugggagccaacggcaccuacaguuguuuaguccggaaucccgugcugcagcaggacgcucacggguccguaacaauaacuggacagccaaugaccuuucccccugaggcccuaugggugacaguuggucucagcgucugccugaucgcacuuuugguggcgcuggcuuucguguguuggcgaaagauuaagcaaucuugcgaggaagagaacgccggcgcagaagaucaggacggggagggagaaggcucaaaaaccgcccuccagccacugaagcacagugauagcaaagaggacgacggucaagagaucgcuuga

SEQ ID NO: 830 - RNA, 1605 nt, Artificial Sequence
  derived and/or modified sequence opt4 from CD276__Homo_sapiens__CAE47548
augcugagaagaagaggcagccccggcaugggcgugcacgugggcgccgcccugggcgcccugugguucugccugaccggcgcccuggaggugcaggugcccgaggaccccgugguggcccuggugggcaccgacgccacccugugcugcagcuucagccccgagcccggcuucagccuggcccagcugaaccugaucuggcagcugaccgacaccaagcagcuggugcacagcuucgccgagggccaggaccagggcagcgccuacgccaacagaaccgcccuguuccccgaccugcuggcccagggcaacgccagccugagacugcagagagugagaguggccgacgagggcagcuucaccugcuucgugagcaucagagacuucggcagcgccgccgugagccugcagguggccgcccccuacagcaagcccagcaugacccuggagcccaacaaggaccugagacccggcgacaccgugaccaucaccugcagcagcuaccagggcuaccccgaggccgagguguucuggcaggacggccagggcgugccccugaccggcaacgugaccaccagccagauggccaacgagcagggccuguucgacgugcacagcauccugagaguggugcugggcgccaacggcaccuacagcugccuggugagaaaccccgugcugcagcaggacgcccacagcagcgugaccaucaccccccagagaagccccaccggcgccguggaggugcaggugcccgaggaccccgugguggcccuggugggcaccgacgccacccugagaugcagcuucagccccgagcccggcuucagccuggcccagcugaaccugaucuggcagcugaccgacaccaagcagcuggugcacagcuucaccgagggcagagaccagggcagcgccuacgccaacagaaccgcccuguuccccgaccugcuggcccagggcaacgccagccugagacugcagagagugagaguggccgacgagggcagcuucaccugcuucgugagcaucagagacuucggcagcgccgccgugagccugcagguggccgcccccuacagcaagcccagcaugacccuggagcccaacaaggaccugagacccggcgacaccgugaccaucaccugcagcagcuacagaggcuaccccgaggccgagguguucuggcaggacggccagggcgugccccugaccggcaacgugaccaccagccagauggccaacgagcagggccuguucgacgugcacagcgugcugagaguggugcugggcgccaacggcaccuacagcugccuggugagaaaccccgugcugcagcaggacgcccacggcagcgugaccaucaccggccagcccaugaccuucccccccgaggcccugugggugaccgugggccugagcgugugccugaucgcccugcugguggcccuggccuucgugugcuggagaaagaucaagcagagcugcgaggaggagaacgccggcgccgaggaccaggacggcgagggcgagggcagcaagaccgcccugcagccccugaagcacagcgacagcaaggaggacgacggccaggagaucgccuga

SEQ ID NO: 831 - RNA, 1605 nt, Artificial Sequence
  derived and/or modified sequence opt5 from CD276__Homo_sapiens__CAE47548
augcugagacggcgcggcagccccgggaugggagugcacgucggcgccgcucucggggcccugugguucugccuuaccggagcgcuggagguucaggugccugaagacccgguggucgcucucgugggcacagaugccacgcuguguugcuccuuuucucccgagccuggguucagccuugcccaacugaaccucaucuggcagcugaccgacacaaagcagcugguucauuccuuugcugaaggacaggaucaaggcucugccuacgcuaauagaaccgcccucuuccccgaccugcuugcgcagggcaacgccagccugcggcuccagcgcgugagagucgcugaugagggguccuuuacauguuucgugucuauucgggacuuuggaagcgccgcuguuucccuucagguggccgcgccuuauagcaaacccucuaugacccuggaaccuaauaaggaucugcgcccgggcgacacagucaccaucacgugcuccagcuaccaaggguaucccgaggccgagguguucuggcaggauggacagggcgugccucucaccgggaacgucacaaccucucagauggcuaaugaacaaggacuguuugacguucacuccauucugagaguggugcucggcgccaacggcacauacagcugucugguccggaaucccgugcuucagcaggaugcucauucuuccguuaccaucacgccucaacgcagccccacaggggccguggagguccaggugccggaagacccuguuguggcccuggucggaaccgaugcuacacucagaugcuccuucucucccgagccuggcuuuagccuggcgcagcuuaaccugauuuggcagcucaccgacaccaaacaacuggugcacuccuucacagaggggcgggaccagggaagcgccuaugcuaaucgcacggcccuguuucccgaucuccuggcccagggcaacgcuucucuuagacugcagcggguccgcguggccgacgaaggguccuucaccuguuucguuagcaucagagauuuuggaucugcggcugugagccuccaagucgccgcccccuacuccaagccuucuaugacacuggagccgaauaaagaccuucggcccggcgauaccgugacaauuaccugcagcuccuauagaggcuacccugaagcugagguuuucuggcaggacgggcagggagugccccugacgggcaacgucacaaccagccagauggccaaugaacaagggcucuuugaugugcauucugugcugcgcguuguccugggagcuaacggcaccuacuccugucucgugcggaauccugugcugcagcaggacgcccacgggagcgucacaaucaccggccagcccaugacauucccgccugaggcgcuuugggugacgguuggacugucugugugccucaucgcccugcuggucgcucuugccuuuguguguuggagaaagauuaagcaauccugcgaggaagagaacgcuggcgccgaagaucaggacggggagggagaaggcagcaaaaccgcgcuccagccccugaagcacuccgauucuaaagaggacgacgggcaagagaucgccuga

SEQ ID NO: 832 - protein, 212 aa, Artificial Sequence
  CD33__Homo_sapiens__B4DF51
MPLLLLLPLLWADLTHRPKILIPGTLEPGHSKNLTCSVSWACEQGTPPIFSWLSAAPTSLGPRTTHSSVLIITPRPQDHGTNLTCQVKFAGAGVTTERTIQLNVTYVPQNPTTGIFPGDGSGKQETRAGVVHGAIGGAGVTALLALCLCLIFFIVKTHRRKAARTAVGRNDTHPTTGSASPVSDGASWHPVCPADTSSQCGPPSCPIQHFQN

SEQ ID NO: 833 - RNA, 639 nt, Artificial Sequence
  CD33__Homo_sapiens__BAG57312
augccgcugcugcuacugcugccccugcugugggcagacuugacccacaggcccaaaauccucaucccuggcacucuagaacccggccacuccaaaaaccugaccugcucuguguccugggccugugagcagggaacacccccgaucuucuccugguugucagcugcccccaccucccugggccccaggacuacucacuccucggugcucauaaucaccccacggccccaggaccacggcaccaaccugaccugucaggugaaguucgcuggagcuggugugacuacggagagaaccauccagcucaacgucaccuauguuccacagaacccaacaacugguaucuuuccaggagauggcucagggaaacaagagaccagagcaggagugguucauggggccauuggaggagcugguguuacagcccugcucgcucuuugucucugccucaucuucuucauagugaagacccacaggaggaaagcagccaggacagcagugggcaggaaugacacccacccuaccacagggucagccuccccggugagugauggggcauccuggcauccagucuguccugcagacaccuccucccaauguggcccaccgucaugccccauucagcauuuccagaacuga

SEQ ID NO: 834 - RNA, 639 nt, Artificial Sequence
  derived and/or modified sequence opt1 from CD33__Homo_sapiens__BAG57312
augccccugcuccugcugcucccccugcugugggccgaccucacccaccgccccaagauccugauccccggcacccuggagcccgggcacagcaagaaccucacgugcuccgugagcugggccugcgagcagggcaccccgcccaucuucuccuggcugagcgcggcccccaccucccuggggccccggaccacgcacagcuccguccucaucaucaccccgcgcccccaggaccacggcaccaaccugaccugccaggugaaguucgccggggccggcgugacgaccgagcggaccauccagcugaacgucaccuacgugccccagaaccccacgaccggcaucuucccgggggacggcagcgggaagcaggagacccgcgccggcgugguccacggggcgaucggcggcgccggggugaccgcccuccuggcccugugccucugccugaucuucuucaucgugaagacgcaccggcgcaaggcggcccggaccgccgucggccgcaacgacacccaccccaccacgggguccgccagccccguguccgacggcgccagcuggcaccccgugugcccggcggacaccuccagccagugcggcccgcccuccugccccauccagcacuuccagaacuga

SEQ ID NO: 835 - RNA, 639 nt, Artificial Sequence
  derived and/or modified sequence opt2 from CD33__Homo_sapiens__BAG57312
augccccuccuccuccuccucccccuccucugggccgaccucacccaccgccccaagauccucauccccggcacccucgagcccggccacuccaagaaccucaccugcuccgucuccugggccugcgagcagggcaccccccccaucuucuccuggcucuccgccgcccccaccucccucggcccccgcaccacccacuccuccguccucaucaucaccccccgcccccaggaccacggcaccaaccucaccugccaggucaaguucgccggcgccggcgucaccaccgagcgcaccauccagcucaacgucaccuacgucccccagaaccccaccaccggcaucuuccccggcgacggcuccggcaagcaggagacccgcgccggcgucguccacggcgccaucggcggcgccggcgucaccgcccuccucgcccucugccucugccucaucuucuucaucgucaagacccaccgccgcaaggccgcccgcaccgccgucggccgcaacgacacccaccccaccaccggcuccgccucccccgucuccgacggcgccuccuggcaccccgucugccccgccgacaccuccucccagugcggcccccccuccugccccauccagcacuuccagaacuga

SEQ ID NO: 836 - RNA, 639 nt, Artificial Sequence
  derived and/or modified sequence opt3 from CD33__Homo_sapiens__BAG57312
augccccugcuccuucuguugccuuuacugugggccgaccuaacccacagaccaaagauccucauuccgggcacacuggagcccgggcauagcaaaaaccuuacuugcuccgugucuugggcuugugaacagggaacgccuccaauauucucauggcugagugcagcccccaccagcuuggguccuaggacaacucacuccucuguccucaucauuaccccacggccccaagaucauggcacaaaucugaccugccagguuaaguuugcgggggcuggagugacuacagagcgcaccauccagcugaacguaacguacgugccucagaauccaacuaccggcauuuucccgggugacgggucgggaaaacaagaaacacgagccggcgucgugcacggcgcaaucgggggagccgguguuacugcucucuuagcacugugucuuugcuugauauuuuucaucgugaagacccaucguagaaaagccgcuaggacagccgucggccggaacgauacccaccccacgacugggucagcgagcccugugagugacggagcauccuggcacccaguaugucccgccgauacaucuagccagugcggcccuccauccugucccauucagcauuuucagaauuga

SEQ ID NO: 837 - RNA, 639 nt, Artificial Sequence
  derived and/or modified sequence opt4 from CD33__Homo_sapiens__BAG57312
augccccugcugcugcugcugccccugcugugggccgaccugacccacagacccaagauccugauccccggcacccuggagcccggccacagcaagaaccugaccugcagcgugagcugggccugcgagcagggcaccccccccaucuucagcuggcugagcgccgcccccaccagccugggccccagaaccacccacagcagcgugcugaucaucacccccagaccccaggaccacggcaccaaccugaccugccaggugaaguucgccggcgccggcgugaccaccgagagaaccauccagcugaacgugaccuacgugccccagaaccccaccaccggcaucuuccccggcgacggcagcggcaagcaggagaccagagccggcguggugcacggcgccaucggcggcgccggcgugaccgcccugcuggcccugugccugugccugaucuucuucaucgugaagacccacagaagaaaggccgccagaaccgccgugggcagaaacgacacccaccccaccaccggcagcgccagccccgugagcgacggcgccagcuggcaccccgugugccccgccgacaccagcagccagugcggcccccccagcugccccauccagcacuuccagaacuga

SEQ ID NO: 838 - RNA, 639 nt, Artificial Sequence
  derived and/or modified sequence opt5 from CD33__Homo_sapiens__BAG57312
augccccugcuccugcuucugccucuccugugggccgaccuuacccacagaccgaagauccugauucccggcacacucgagccugggcauagcaaaaaccugacgugcuccgugucuugggcuugugaacagggaacacccccuaucuucagcuggcuguccgccgcgcccaccucucucggcccucggaccacacacagcuccguccugauuaucaccccgcgcccccaagaucaugggacaaaucuuaccugccagguuaaguuugcuggagccggcgugacgaccgagagaacaauucagcugaacgugaccuacgucccucagaaucccacaaccgggaucuucccuggagacggcucuggcaaacaagaaacgcgggccggggugguucacggagcuaucggcggggccggagugacagcucuccuggcccuuugucugugccucaucuuuuucauugucaagacccaucgcagaaaagcggcccggacagcugugggccgcaacgauacccaccccaccacagggagcgccuccccgguuagcgacggagcuucuuggcacccugugugucccgccgauacguccagccagugcggcccucccucuugucccauucagcauuuucagaauuga

SEQ ID NO: 839 - protein, 364 aa, Artificial Sequence
  CD33__Homo_sapiens__P20138
MPLLLLLPLLWAGALAMDPNFWLQVQESVTVQEGLCVLVPCTFFHPIPYYDKNSPVHGYWFREGAIISRDSPVATNKLDQEVQEETQGRFRLLGDPSRNNCSLSIVDARRRDNGSYFFRMERGSTKYSYKSPQLSVHVTDLTHRPKILIPGTLEPGHSKNLTCSVSWACEQGTPPIFSWLSAAPTSLGPRTTHSSVLIITPRPQDHGTNLTCQVKFAGAGVTTERTIQLNVTYVPQNPTTGIFPGDGSGKQETRAGVVHGAIGGAGVTALLALCLCLIFFIVKTHRRKAARTAVGRNDTHPTTGSASPKHQKKSKLHGPTETSSCSGAAPTVEMDEELHYASLNFHGMNPSKDTSTEYSEVRTQ

SEQ ID NO: 840 - RNA, 1095 nt, Artificial Sequence
  CD33__Homo_sapiens__AAK83654
augccgcugcugcuacugcugccccugcugugggcaggggcccuggcuauggauccaaauuucuggcugcaagugcaggagucagugacgguacaggaggguuugugcguccucgugcccugcacuuucuuccaucccauacccuacuacgacaagaacuccccaguucaugguuacugguuccgggaaggagccauuauauccagggacucuccaguggccacaaacaagcuagaucaagaaguacaggaggagacucagggcagauuccgccuccuuggggaucccaguaggaacaacugcucccugagcaucguagacgccaggaggagggauaaugguucauacuucuuucggauggagagaggaaguaccaaauacaguuacaaaucuccccagcucucugugcaugugacagacuugacccacaggcccaaaauccucaucccuggcacucuagaacccggccacuccaaaaaccugaccugcucuguguccugggccugugagcagggaacacccccgaucuucuccugguugucagcugcccccaccucccugggccccaggacuacucacuccucggugcucauaaucaccccacggccccaggaccacggcaccaaccugaccugucaggugaaguucgcuggagcuggugugacuacggagagaaccauccagcucaacgucaccuauguuccacagaacccaacaacugguaucuuuccaggagauggcucagggaaacaagagaccagagcaggagugguucauggggccauuggaggagcugguguuacagcccugcucgcucuuugucucugccucaucuucuucauagugaagacccacaggaggaaagcagccaggacagcagugggcaggaaugacacccacccuaccacagggucagccuccccgaaacaccagaagaaguccaaguuacauggccccacugaaaccucaagcuguucaggugccgccccuacuguggagauggaugaggagcugcauuaugcuucccucaacuuucaugggaugaauccuuccaaggacaccuccaccgaauacucagaggucaggacccaguga

SEQ ID NO: 841 - RNA, 1095 nt, Artificial Sequence
  derived and/or modified sequence opt1 from CD33__Homo_sapiens__AAK83654
augccccugcuccugcugcucccgcugcugugggccggcgcccucgcgauggaccccaacuucuggcuccaggugcaggagagcgucaccgugcaggaggggcugugcgugcucguccccugcaccuucuuccaccccaucccguacuacgacaagaacucccccgugcacggcuacugguuccgcgagggggccaucaucagccgggacucccccguggccacgaacaagcuggaccaggagguccaggaggagacccagggccgcuuccggcugcucggggaccccagccgcaacaacugcucccugagcaucguggacgcccggcgccgggacaacggcuccuacuucuuccgcauggagcggggcagcaccaaguacuccuacaagagcccgcagcuguccgugcacgucaccgaccucacgcaccgccccaagauccugauccccgggacccuggagcccggccacagcaagaaccugaccugcuccgugagcugggccugcgagcaggggaccccgcccaucuucuccuggcugagcgcggcccccacgucccugggcccccggaccacccacagcuccgugcucaucaucaccccgcgcccccaggaccacgggacgaaccugaccugccaggucaaguucgccggcgccggcgugaccaccgagcggacgauccagcugaacgugaccuacgucccccagaaccccaccaccgggaucuucccgggcgacgggagcggcaagcaggagacgcgcgcgggcguggugcacggggccaucggcggggccggcgucaccgcccuccuggcccugugccucugccugaucuucuucaucgugaagacccaccggcgcaaggcggcccggaccgccguggggcgcaacgacacgcaccccaccaccggcagcgccucccccaagcaccagaagaaguccaagcugcacggccccaccgagacgagcagcugcuccggggccgcgccgaccgucgagauggacgaggagcuccacuacgccagccugaacuuccacggcaugaaccccuccaaggacaccagcaccgaguacuccgaggugcggacgcaguga

SEQ ID NO: 842 - RNA, 1095 nt, Artificial Sequence
  derived and/or modified sequence opt2 from CD33__Homo_sapiens__AAK83654
augccccuccuccuccuccucccccuccucugggccggcgcccucgccauggaccccaacuucuggcuccagguccaggaguccgucaccguccaggagggccucugcguccucguccccugcaccuucuuccaccccauccccuacuacgacaagaacucccccguccacggcuacugguuccgcgagggcgccaucaucucccgcgacucccccgucgccaccaacaagcucgaccaggagguccaggaggagacccagggccgcuuccgccuccucggcgaccccucccgcaacaacugcucccucuccaucgucgacgcccgccgccgcgacaacggcuccuacuucuuccgcauggagcgcggcuccaccaaguacuccuacaaguccccccagcucuccguccacgucaccgaccucacccaccgccccaagauccucauccccggcacccucgagcccggccacuccaagaaccucaccugcuccgucuccugggccugcgagcagggcaccccccccaucuucuccuggcucuccgccgcccccaccucccucggcccccgcaccacccacuccuccguccucaucaucaccccccgcccccaggaccacggcaccaaccucaccugccaggucaaguucgccggcgccggcgucaccaccgagcgcaccauccagcucaacgucaccuacgucccccagaaccccaccaccggcaucuuccccggcgacggcuccggcaagcaggagacccgcgccggcgucguccacggcgccaucggcggcgccggcgucaccgcccuccucgcccucugccucugccucaucuucuucaucgucaagacccaccgccgcaaggccgcccgcaccgccgucggccgcaacgacacccaccccaccaccggcuccgccucccccaagcaccagaagaaguccaagcuccacggccccaccgagaccuccuccugcuccggcgccgcccccaccgucgagauggacgaggagcuccacuacgccucccucaacuuccacggcaugaaccccuccaaggacaccuccaccgaguacuccgagguccgcacccaguga

SEQ ID NO: 843 - RNA, 1095 nt, Artificial Sequence
  derived and/or modified sequence opt3 from CD33__Homo_sapiens__AAK83654
augccccugcuccuucuguugccuuuacugugggccggcgcucuagcaauggacccaaacuucuggcuccaggugcaagagagcgucaccguucaggaagggcugugcgugcuuguaccguguacauuuuuccaccccaucccuuacuaugauaaaaauuccccagugcauggauacugguuuagagagggugccauuauaucuagggacucacccgucgcgacuaacaagcuggaucaggaagugcaggaggaaacgcaaggccgguuccgcuugcucggggacccuagucgaaauaacugcagccuguccaucguugaugcucguagaagggacaauggaucuuacuuuuuccggauggagcgcggcucgaccaaguauucauauaaaagcccacagcugagugugcacgucacagaucucacucauagacccaagauuuuaaucccugguacccuggagccagggcacuccaaaaaccuuacauguucugugagcugggccugcgaacagggaaccccgcccauuuuuaguugguugucagcagccccuacuucccugggcccaaggacaacccauagcucuguacuaaucauaacgccccggccucaggaccacggcacuaaucucaccugucaaguuaaguucgcuggggcaggagugacaacugagcgcaccauccagcugaacgucacauacgugccacagaaucccaccacggguauuuuuccgggcgauggguccggaaagcaggaaacucgagccggcgugguccacggugcuaucgggggagccggcguuacagcgcuucuggcauugugccucugucugauuuucuuuaucgugaaaacccauagaaggaaggccgcucggacugccguaggccguaacgacacacacccuaccacggggucagcaagccccaaacaucaaaagaaaaguaaguuacacggaccaaccgagacaucuuccugcagcggugcugccccuacuguggagauggaugaggaacugcacuaugcgucgcucaauuuccauggcaugaaccccucuaaggacaccuccacagaauacucagagguccgcacucaguga

SEQ ID NO: 844 - RNA, 1095 nt, Artificial Sequence
  derived and/or modified sequence opt4 from CD33__Homo_sapiens__AAK83654
augccccugcugcugcugcugccccugcugugggccggcgcccuggccauggaccccaacuucuggcugcaggugcaggagagcgugaccgugcaggagggccugugcgugcuggugcccugcaccuucuuccaccccauccccuacuacgacaagaacagccccgugcacggcuacugguucagagagggcgccaucaucagcagagacagccccguggccaccaacaagcuggaccaggaggugcaggaggagacccagggcagauucagacugcugggcgaccccagcagaaacaacugcagccugagcaucguggacgccagaagaagagacaacggcagcuacuucuucagaauggagagaggcagcaccaaguacagcuacaagagcccccagcugagcgugcacgugaccgaccugacccacagacccaagauccugauccccggcacccuggagcccggccacagcaagaaccugaccugcagcgugagcugggccugcgagcagggcaccccccccaucuucagcuggcugagcgccgcccccaccagccugggccccagaaccacccacagcagcgugcugaucaucacccccagaccccaggaccacggcaccaaccugaccugccaggugaaguucgccggcgccggcgugaccaccgagagaaccauccagcugaacgugaccuacgugccccagaaccccaccaccggcaucuuccccggcgacggcagcggcaagcaggagaccagagccggcguggugcacggcgccaucggcggcgccggcgugaccgcccugcuggcccugugccugugccugaucuucuucaucgugaagacccacagaagaaaggccgccagaaccgccgugggcagaaacgacacccaccccaccaccggcagcgccagccccaagcaccagaagaagagcaagcugcacggccccaccgagaccagcagcugcagcggcgccgcccccaccguggagauggacgaggagcugcacuacgccagccugaacuuccacggcaugaaccccagcaaggacaccagcaccgaguacagcgaggugagaacccaguga

SEQ ID NO: 845 - RNA, 1095 nt, Artificial Sequence
  derived and/or modified sequence opt5 from CD33__Homo_sapiens__AAK83654
augccccugcuccugcuucugccucuccugugggccggcgcucuugccauggacccgaacuucuggcuccaggugcaagagagcgucaccguucaggaagggcugugcgugcuggugcccuguacauuuuuccacccuauccccuacuaugauaaaaauuccccuguccauggauacugguuuagagagggcgcgauuaucucucgggacagccccguggcuacgaacaagcuggaucaggaaguucaggaggaaacccaagggcgcuucagacuccugggagacccuucccggaauaacugcucucuuagcauuguggaugcccgcagacgggacaauggcuccuacuuuuuccgcauggagagagggucuacaaaguauagcuauaaauccccgcagcugagcguccacgugaccgaucucacacaucggcccaagauccugauuccuggaacccuugagcccggccacucuaaaaaccugacauguuccguuagcugggccugcgaacagggcaccccucccaucuuuucuuggcucuccgcugccccgacgagccuggggccucgcaccacacauucuuccgugcugaucauuacccccagaccucaggaccacggaacaaaucucaccugucaagucaaguucgcuggcgccggggugacgacagagcggaccauccagcugaacgugacauacgucccccagaaucccaccaccggaauuuuuccuggcgaugggagcggaaagcaggaaacacgcgcgggcguugugcacggcgccaucgggggagcuggcgugacggcccuucuggcucucugccugugucuuauuuucuuuaucgucaaaacccauagacggaaggccgcgcgcacagccguggggagaaacgacacccacccgacaaccggauccgcuucucccaaacaucaaaagaaaagcaagcugcacggcccuacggagacauccagcugcucuggggccgcucccaccguugagauggaugaggaacuccacuaugccucccugaauuuccauggaaugaacccuagcaaggacaccucuacagaauacagcgaggugcggacccaguga

SEQ ID NO: 846 - protein, 364 aa, Artificial Sequence; identical to SEQ ID NO: 839
  CD33__Homo_sapiens__Q546G0

SEQ ID NO: 847 - RNA, 1095 nt, Artificial Sequence; identical to SEQ ID NO: 840
  CD33__Homo_sapiens__CAD36509

SEQ ID NO: 848 - RNA, 1095 nt, Artificial Sequence; identical to SEQ ID NO: 841
  derived and/or modified sequence opt1 from CD33__Homo_sapiens__CAD36509

SEQ ID NO: 849 - RNA, 1095 nt, Artificial Sequence; identical to SEQ ID NO: 842
  derived and/or modified sequence opt2 from CD33__Homo_sapiens__CAD36509

SEQ ID NO: 850 - RNA, 1095 nt, Artificial Sequence; identical to SEQ ID NO: 843
  derived and/or modified sequence opt3 from CD33__Homo_sapiens__CAD36509

SEQ ID NO: 851 - RNA, 1095 nt, Artificial Sequence; identical to SEQ ID NO: 844
  derived and/or modified sequence opt4 from CD33__Homo_sapiens__CAD36509

SEQ ID NO: 852 - RNA, 1095 nt, Artificial Sequence; identical to SEQ ID NO: 845
  derived and/or modified sequence opt5 from CD33__Homo_sapiens__CAD36509

SEQ ID NO: 853 - protein, 207 aa, Artificial Sequence
  CD3E__Homo_sapiens__P07766
MQSGTHWRVLGLCLLSVGVWGQDGNEEMGGITQTPYKVSISGTTVILTCPQYPGSEILWQHNDKNIGGDEDDKNIGSDEDHLSLKEFSELEQSGYYVCYPRGSKPEDANFYLYLRARVCENCMEMDVMSVATIVIVDICITGGLLLLVYYWSKNRKAKAKPVTRGAGAGGRQRGQNKERPPPVPNPDYEPIRKGQRDLYSGLNQRRI

SEQ ID NO: 854 - RNA, 624 nt, Artificial Sequence
  CD3E__Homo_sapiens__AAA52295
augcagucgggcacucacuggagaguucugggccucugccucuuaucaguugguguuugggggcaagaugguaaugaagaaaugggugguauuacacagacaccauauaaagucuccaucucuggaaccacaguaauauugacaugcccucaguauccuggaucugaaauacuauggcaacacaaugauaaaaacauaggcggugaugaggaugauaaaaacauaggcagugaugaggaucaccugucacugaaggaauuuucagaauuggagcaaagugguuauuaugucugcuaccccagaggaagcaaaccagaagaugcgaacuuuuaucucuaccugagggcaagagugugugagaacugcauggagauggaugugaugucgguggccacaauugucauaguggacaucugcaucacugggggcuugcugcugcugguuuacuacuggagcaagaauagaaaggccaaggccaagccugugacacgaggagcgggugcuggcggcaggcaaaggggacaaaacaaggagaggccaccaccuguucccaacccagacuaugagcccauccggaaaggccagcgggaccuguauucuggccugaaucagagacgcaucuga

SEQ ID NO: 855 - RNA, 624 nt, Artificial Sequence
  derived and/or modified sequence opt1 from CD3E__Homo_sapiens__AAA52295
augcagagcggcacccacuggcgcgugcuggggcucugccugcuguccgucggcgugugggggcaggacggcaacgaggagaugggcgggaucacccagacgcccuacaaggugagcaucuccggcaccaccgucauccugaccugcccccaguaccccgggagcgagauccucuggcagcacaacgacaagaacaucggcggggacgaggacgacaagaacaucggcuccgacgaggaccaccugagccucaaggaguucuccgagcuggagcagagcggguacuacgugugcuacccccggggcuccaagcccgaggacgccaacuucuaccuguaccuccgcgcccgggugugcgagaacugcauggagauggacgucaugagcguggcgacgaucgugaucgucgacaucugcaucaccggcgggcugcugcuccugguguacuacugguccaagaaccgcaaggccaaggccaagccggugacccggggcgccggggccggcggccgccagcgggggcagaacaaggagcgcccgccgcccguccccaaccccgacuacgagcccauccggaagggccagcgcgaccuguacagcgggcucaaccagcggcgcaucuga

SEQ ID NO: 856 - RNA, 624 nt, Artificial Sequence
  derived and/or modified sequence opt2 from CD3E__Homo_sapiens__AAA52295
augcaguccggcacccacuggcgcguccucggccucugccuccucuccgucggcgucuggggccaggacggcaacgaggagaugggcggcaucacccagacccccuacaaggucuccaucuccggcaccaccgucauccucaccugcccccaguaccccggcuccgagauccucuggcagcacaacgacaagaacaucggcggcgacgaggacgacaagaacaucggcuccgacgaggaccaccucucccucaaggaguucuccgagcucgagcaguccggcuacuacgucugcuacccccgcggcuccaagcccgaggacgccaacuucuaccucuaccuccgcgcccgcgucugcgagaacugcauggagauggacgucauguccgucgccaccaucgucaucgucgacaucugcaucaccggcggccuccuccuccucgucuacuacugguccaagaaccgcaaggccaaggccaagcccgucacccgcggcgccggcgccggcggccgccagcgcggccagaacaaggagcgccccccccccguccccaaccccgacuacgagcccauccgcaagggccagcgcgaccucuacuccggccucaaccagcgccgcaucuga

SEQ ID NO: 857 - RNA, 624 nt, Artificial Sequence
  derived and/or modified sequence opt3 from CD3E__Homo_sapiens__AAA52295
augcagagcggcacccacuggagagugcuggggcucugccuucuguccgucggaguuuggggucaagacggcaacgaggaaaugggagggaucacacagacucccuacaaggugucuauuucaggcacgaccguaauauugacauguccucaguauccagguagugagaucuuauggcagcauaaugauaaaaacauugggggagacgaagaugacaagaauaucggcagcgaugaggaccaccugucccuaaaagaguucucugaacucgagcaaucgggcuacuaugugugcuacccgagggggucaaagcccgaagaugccaacuuuuaucuguaccuucgggcucgcgucugugagaauugcauggaaauggacgugaugagcguugcaacuauugugaucgucgauauauguaucaccggaggucuguugcuccugguguauuacuggaguaaaaaccgaaaggccaaggcgaaaccuguaacacguggcgcuggggccggaggcagacagaggggucagaauaaggagcggccacccccuguuccaaaccccgacuacgagccuauucgcaaagggcagagagaucuguauuccggacucaaucaaaggcggaucuga

SEQ ID NO: 858 - RNA, 624 nt, Artificial Sequence
  derived and/or modified sequence opt4 from CD3E__Homo_sapiens__AAA52295
augcagagcggcacccacuggagagugcugggccugugccugcugagcgugggcguguggggccaggacggcaacgaggagaugggcggcaucacccagacccccuacaaggugagcaucagcggcaccaccgugauccugaccugcccccaguaccccggcagcgagauccuguggcagcacaacgacaagaacaucggcggcgacgaggacgacaagaacaucggcagcgacgaggaccaccugagccugaaggaguucagcgagcuggagcagagcggcuacuacgugugcuaccccagaggcagcaagcccgaggacgccaacuucuaccuguaccugagagccagagugugcgagaacugcauggagauggacgugaugagcguggccaccaucgugaucguggacaucugcaucaccggcggccugcugcugcugguguacuacuggagcaagaacagaaaggccaaggccaagcccgugaccagaggcgccggcgccggcggcagacagagaggccagaacaaggagagacccccccccgugcccaaccccgacuacgagcccaucagaaagggccagagagaccuguacagcggccugaaccagagaagaaucuga

SEQ ID NO: 859 - RNA, 624 nt, Artificial Sequence
  derived and/or modified sequence opt5 from CD3E__Homo_sapiens__AAA52295
augcagagcggcacccacuggagagugcuggggcucugccugcuuuccgucggaguuuggggccaagacgggaacgaggaaaugggaggcaucacacagacgcccuacaaggugucuauuagcgggaccacagugauccugaccuguccucaguauccgggauccgagauucucuggcagcauaaugauaaaaacaucggcggcgacgaagaugacaagaauauugggucugaugaggaccaccugagccuuaaagaguucuccgaacuggagcaaucuggauacuaugucugcuacccccggggcagcaagccugaagaugccaacuuuuaucucuaccugcgcgcuagagugugugagaauugcauggaaauggacguuauguccguggccacaaucgucaucguggauauuuguaucaccgggggacugcuccugcuuguuuauuacuggagcaaaaaccggaaggcgaaggcuaaacccgugacacgcggcgccggggccggaggcagacagcggggccagaauaaggagcgcccucccccugucccgaaccccgacuacgagccuauuagaaaagggcagcgggaucuguauucuggacucaaucaacgcagaaucuga

SEQ ID NO: 860 - protein, 164 aa, Artificial Sequence
  CD3Z__Homo_sapiens__P20963
MKWKALFTAAILQAQLPITEAQSFGLLDPKLCYLLDGILFIYGVILTALFLRVKFSRSADAPAYQQGQNQLYNELNLGRREEYDVLDKRRGRDPEMGGKPQRRKNPQEGLYNELQKDKMAEAYSEIGMKGERRRGKGHDGLYQGLSTATKDTYDALHMQALPPR

SEQ ID NO: 861 - RNA, 495 nt, Artificial Sequence
  CD3Z__Homo_sapiens__AAH25703
augaaguggaaggcgcuuuucaccgcggccauccugcaggcacaguugccgauuacagaggcacagagcuuuggccugcuggaucccaaacucugcuaccugcuggauggaauccucuucaucuauggugucauucucacugccuuguuccugagagugaaguucagcaggagcgcagacgcccccgcguaccagcagggccagaaccagcucuauaacgagcucaaucuaggacgaagagaggaguacgauguuuuggacaagagacguggccgggacccugagauggggggaaagccgcagagaaggaagaacccucaggaaggccuguacaaugaacugcagaaagauaagauggcggaggccuacagugagauugggaugaaaggcgagcgccggaggggcaaggggcacgauggccuuuaccagggucucaguacagccaccaaggacaccuacgacgcccuucacaugcaggcccugcccccucgcuaa

SEQ ID NO: 862 - RNA, 495 nt, Artificial Sequence
  derived and/or modified sequence opt1 from CD3Z__Homo_sapiens__AAH25703
augaaguggaaggcccuguucaccgccgcgauccuccaggcccagcugcccaucaccgaggcccagagcuucggccugcucgaccccaagcugugcuaccugcucgacgggauccuguucaucuacggcgugauccugacggcccucuuccugcgcgucaaguucucccggagcgccgacgcgcccgccuaccagcaggggcagaaccagcuguacaacgagcucaaccugggccgccgggaggaguacgacgugcuggacaagcgccgggggcgcgaccccgagaugggcggcaagccccagcggcgcaagaacccgcaggaggggcucuacaacgagcugcagaaggacaagauggccgaggccuacuccgagaucggcaugaagggggagcggcgccggggcaaggggcacgacggccuguaccagggccucagcaccgcgaccaaggacaccuacgacgcccugcacaugcaggcccugccgccccgcuga

SEQ ID NO: 863 - RNA, 495 nt, Artificial Sequence
  derived and/or modified sequence opt2 from CD3Z__Homo_sapiens__AAH25703
augaaguggaaggcccucuucaccgccgccauccuccaggcccagcuccccaucaccgaggcccaguccuucggccuccucgaccccaagcucugcuaccuccucgacggcauccucuucaucuacggcgucauccucaccgcccucuuccuccgcgucaaguucucccgcuccgccgacgcccccgccuaccagcagggccagaaccagcucuacaacgagcucaaccucggccgccgcgaggaguacgacguccucgacaagcgccgcggccgcgaccccgagaugggcggcaagccccagcgccgcaagaacccccaggagggccucuacaacgagcuccagaaggacaagauggccgaggccuacuccgagaucggcaugaagggcgagcgccgccgcggcaagggccacgacggccucuaccagggccucuccaccgccaccaaggacaccuacgacgcccuccacaugcaggcccuccccccccgcuga

SEQ ID NO: 864 - RNA, 495 nt, Artificial Sequence
  derived and/or modified sequence opt3 from CD3Z__Homo_sapiens__AAH25703
augaaguggaaagcccuguucaccgcugcaauccuccaggcccaacuucccauuacagaggcgcagagcuuuggccuguuggacccuaaguuaugcuaccugcuagaugggauacucuucaucuauggagugauucugacugcucuuuuucugagagucaaauucuccaggucugccgacgcaccagccuaccagcagggucaaaaccaguuguauaaugaacucaaccugggccggcgcgaggaauacgauguucuggacaagcgacgugggagagauccggagaugggaggcaaaccccagaggcggaagaauccucaggaaggucucuauaacgaguuacaaaaggacaaaauggcugaggcauacucagaaaucgggaugaagggagagcgcagaaggggcaaaggccacgaugggcuguaucagggacuuaguacggccaccaaggacacauacgaugcuuugcauaugcaggcccugccaccccgguga

SEQ ID NO: 865 - RNA, 495 nt, Artificial Sequence
  derived and/or modified sequence opt4 from CD3Z__Homo_sapiens__AAH25703
augaaguggaaggcccuguucaccgccgccauccugcaggcccagcugcccaucaccgaggcccagagcuucggccugcuggaccccaagcugugcuaccugcuggacggcauccuguucaucuacggcgugauccugaccgcccuguuccugagagugaaguucagcagaagcgccgacgcccccgccuaccagcagggccagaaccagcuguacaacgagcugaaccugggcagaagagaggaguacgacgugcuggacaagagaagaggcagagaccccgagaugggcggcaagccccagagaagaaagaacccccaggagggccuguacaacgagcugcagaaggacaagauggccgaggccuacagcgagaucggcaugaagggcgagagaagaagaggcaagggccacgacggccuguaccagggccugagcaccgccaccaaggacaccuacgacgcccugcacaugcaggcccugccccccagauga

SEQ ID NO: 866 - RNA, 495 nt, Artificial Sequence
  derived and/or modified sequence opt5 from CD3Z__Homo_sapiens__AAH25703
augaaguggaaagcccuguucaccgcugccauccuccaggcgcaacugcccauuacagaggcucagagcuuuggccuucuggacccuaagcucugcuaccugcuugaugggauccuguucauuuauggagugauccucacggcccuguuucugagagucaaauucucccggucugccgacgcuccggccuaccagcagggccaaaaccagcucuauaaugaacugaaccuugggcgcagagaggaauacgauguucuggacaagcggcgcggaagagaucccgagaugggcgggaaaccucagcggcgcaagaauccccaggaaggacucuauaacgagcugcaaaaggacaaaauggcugaggccuacagcgaaauuggcaugaagggcgagagacggcgcgggaaaggacacgauggccuuuaucaggggcuguccaccgcgacaaaggacaccuacgaugcccuccauaugcaggcucugccucccagauga

SEQ ID NO: 867 - protein, 742 aa, Artificial Sequence
  CD44_Isoform_1__Homo_sapiens__P16070
MDKFWWHAAWGLCLVPLSLAQIDLNITCRFAGVFHVEKNGRYSISRTEAADLCKAFNSTLPTMAQMEKALSIGFETCRYGFIEGHVVIPRIHPNSICAANNTGVYILTSNTSQYDTYCFNASAPPEEDCTSVTDLPNAFDGPITITIVNRDGTRYVQKGEYRTNPEDIYPSNPTDDDVSSGSSSERSSTSGGYIFYTFSTVHPIPDEDSPWITDSTDRIPATTLMSTSATATETATKRQETWDWFSWLFLPSESKNHLHTTTQMAGTSSNTISAGWEPNEENEDERDRHLSFSGSGIDDDEDFISSTISTTPRAFDHTKQNQDWTQWNPSHSNPEVLLQTTTRMTDVDRNGTTAYEGNWNPEAHPPLIHHEHHEEEETPHSTSTIQATPSSTTEETATQKEQWFGNRWHEGYRQTPKEDSHSTTGTAAASAHTSHPMQGRTTPSPEDSSWTDFFNPISHPMGRGHQAGRRMDMDSSHSITLQPTANPNTGLVEDLDRTGPLSMTTQQSNSQSFSTSHEGLEEDKDHPTTSTLTSSNRNDVTGGRRDPNHSEGSTTLLEGYTSHYPHTKESRTFIPVTSAKTGSFGVTAVTVGDSNSNVNRSLSGDQDTFHPSGGSHTTHGSESDGHSHGSQEGGANTTSGPIRTPQIPEWLIILASLLALALILAVCIAVNSRRRCGQKKKLVINSGNGAVEDRKPSGLNGEASKSQEMVHLVNKESSETPDQFMTADETRNLQNVDMKIGV

SEQ ID NO: 868 - RNA, 2229 nt, Artificial Sequence
  CD44_Isoform_1__Homo_sapiens__CCDS7897.1
auggacaaguuuugguggcacgcagccuggggacucugccucgugccgcugagccuggcgcagaucgauuugaauauaaccugccgcuuugcagguguauuccacguggagaaaaauggucgcuacagcaucucucggacggaggccgcugaccucugcaaggcuuucaauagcaccuugcccacaauggcccagauggagaaagcucugagcaucggauuugagaccugcagguauggguucauagaagggcacguggugauuccccggauccaccccaacuccaucugugcagcaaacaacacagggguguacauccucacauccaacaccucccaguaugacacauauugcuucaaugcuucagcuccaccugaagaagauuguacaucagucacagaccugcccaaugccuuugauggaccaauuaccauaacuauuguuaaccgugauggcacccgcuauguccagaaaggagaauacagaacgaauccugaagacaucuaccccagcaacccuacugaugaugacgugagcagcggcuccuccagugaaaggagcagcacuucaggagguuacaucuuuuacaccuuuucuacuguacaccccaucccagacgaagacagucccuggaucaccgacagcacagacagaaucccugcuaccacuuugaugagcacuagugcuacagcaacugagacagcaaccaagaggcaagaaaccugggauugguuuucaugguuguuucuaccaucagagucaaagaaucaucuucacacaacaacacaaauggcugguacgucuucaaauaccaucucagcaggcugggagccaaaugaagaaaaugaagaugaaagagacagacaccucaguuuuucuggaucaggcauugaugaugaugaagauuuuaucuccagcaccauuucaaccacaccacgggcuuuugaccacacaaaacagaaccaggacuggacccaguggaacccaagccauucaaauccggaagugcuacuucagacaaccacaaggaugacugauguagacagaaauggcaccacugcuuaugaaggaaacuggaacccagaagcacacccuccccucauucaccaugagcaucaugaggaagaagagaccccacauucuacaagcacaauccaggcaacuccuaguaguacaacggaagaaacagcuacccagaaggaacagugguuuggcaacagauggcaugagggauaucgccaaacacccaaagaagacucccauucgacaacagggacagcugcagccucagcucauaccagccauccaaugcaaggaaggacaacaccaagcccagaggacaguuccuggacugauuucuucaacccaaucucacaccccaugggacgaggucaucaagcaggaagaaggauggauauggacuccagucauaguauaacgcuucagccuacugcaaauccaaacacagguuugguggaagauuuggacaggacaggaccucuuucaaugacaacgcagcagaguaauucucagagcuucucuacaucacaugaaggcuuggaagaagauaaagaccauccaacaacuucuacucugacaucaagcaauaggaaugaugucacagguggaagaagagacccaaaucauucugaaggcucaacuacuuuacuggaagguuauaccucucauuacccacacacgaaggaaagcaggaccuucaucccagugaccucagcuaagacuggguccuuuggaguuacugcaguuacuguuggagauuccaacucuaaugucaaucguuccuuaucaggagaccaagacacauuccaccccaguggggggucccauaccacucauggaucugaaucagauggacacucacaugggagucaagaagguggagcaaacacaaccucugguccuauaaggacaccccaaauuccagaauggcugaucaucuuggcaucccucuuggccuuggcuuugauucuugcaguuugcauugcagucaacagucgaagaaggugugggcagaagaaaaagcuagugaucaacaguggcaauggagcuguggaggacagaaagccaaguggacucaacggagaggccagcaagucucaggaaauggugcauuuggugaacaaggagucgucagaaacuccagaccaguuuaugacagcugaugagacaaggaaccugcagaauguggacaugaagauugggguguaa

SEQ ID NO: 869 - RNA, 2229 nt, Artificial Sequence
  derived and/or modified sequence opt1 from CD44_Isoform_1__Homo_sapiens__CCDS7897.1
auggacaaguucugguggcacgccgccuggggccugugccucgugccccugagccuggcgcagaucgaccucaacaucacgugccgcuucgccggggucuuccacguggagaagaacggccgguacuccaucagccgcaccgaggccgccgaccugugcaaggccuucaacuccacccugccgaccauggcgcagauggagaaggcccucagcaucggguucgagaccugccgguacggcuucaucgaggggcacguggucaucccccgcauccaccccaacuccaucugcgccgccaacaacaccggcguguacauccugacgagcaacaccucccaguacgacaccuacugcuucaacgcgagcgcgcccccggaggaggacugcaccuccgugacggaccugcccaacgccuucgacggccccaucaccaucaccaucgucaaccgggacgggacccgcuacgugcagaagggcgaguaccggacgaaccccgaggacaucuacccgagcaaccccaccgacgacgacguguccagcggguccagcuccgagcgcagcuccaccagcggcggguacaucuucuacaccuucuccacgguccaccccauccccgacgaggacagcccguggaucaccgacagcaccgaccggauccccgccaccacgcucauguccaccagcgccaccgccaccgagacggccaccaagcgccaggagaccugggacugguucuccuggcuguuccugcccagcgaguccaagaaccaccuccacaccacgacccagauggccggcaccagcuccaacaccaucagcgccggcugggagcccaacgaggagaacgaggacgagcgggaccgccaccuguccuucagcggguccggcaucgacgacgacgaggacuucaucagcuccacgaucagcaccaccccgcgggccuucgaccacaccaagcagaaccaggacuggacgcaguggaaccccucccacagcaaccccgaggugcugcuccagaccaccacccgcaugaccgacguggaccggaacgggacgaccgcguacgagggcaacuggaaccccgaggcccacccgccccugauccaccacgagcaccacgaggaggaggagacgccccacuccaccagcaccauccaggccacccccuccagcaccaccgaggagacggccacccagaaggagcagugguucggcaaccgcuggcacgagggguaccggcagaccccgaaggaggacagccacuccaccacgggcaccgccgcggccagcgcccacaccucccaccccaugcaggggcgcaccacgcccagccccgaggacuccagcuggaccgacuucuucaacccgaucucccaccccaugggccgggggcaccaggccggccgccggauggacauggacagcucccacagcaucacccugcagcccaccgccaacccgaacacgggccucgucgaggaccuggaccgcaccgggccccuguccaugaccacccagcagagcaacucccagagcuucuccacgagccacgagggccucgaggaggacaaggaccaccccaccaccuccacccugacgagcagcaaccgcaacgacgugaccgggggccggcgcgaccccaaccacuccgaggggagcaccacccugcucgagggcuacacgucccacuacccgcacaccaaggagagccggaccuucauccccgugaccuccgcgaagacgggcagcuucggggucaccgccgugaccgugggcgacuccaacagcaacgucaaccgcucccugagcggggaccaggacaccuuccaccccuccggcgggagccacaccacgcacggcuccgagagcgacggccacucccacgggagccaggagggcggggccaacaccaccuccggccccauccggaccccgcagauccccgaguggcugaucauccucgccagccugcuggcgcucgcccugauccuggccgugugcaucgccgugaacucccgccggcgcugcggccagaagaagaagcucgucaucaacagcgggaacggcgccguggaggaccggaagcccagcgggcugaacggcgaggcguccaagagccaggagauggugcaccuggucaacaaggaguccagcgagacgcccgaccaguucaugaccgccgacgagacccgcaaccuccagaacguggacaugaagaucggggucuga

SEQ ID NO: 870 - RNA, 2229 nt, Artificial Sequence
  derived and/or modified sequence opt2 from CD44_Isoform_1__Homo_sapiens__CCDS7897.1
auggacaaguucugguggcacgccgccuggggccucugccucgucccccucucccucgcccagaucgaccucaacaucaccugccgcuucgccggcgucuuccacgucgagaagaacggccgcuacuccaucucccgcaccgaggccgccgaccucugcaaggccuucaacuccacccuccccaccauggcccagauggagaaggcccucuccaucggcuucgagaccugccgcuacggcuucaucgagggccacgucgucaucccccgcauccaccccaacuccaucugcgccgccaacaacaccggcgucuacauccucaccuccaacaccucccaguacgacaccuacugcuucaacgccuccgccccccccgaggaggacugcaccuccgucaccgaccuccccaacgccuucgacggccccaucaccaucaccaucgucaaccgcgacggcacccgcuacguccagaagggcgaguaccgcaccaaccccgaggacaucuaccccuccaaccccaccgacgacgacgucuccuccggcuccuccuccgagcgcuccuccaccuccggcggcuacaucuucuacaccuucuccaccguccaccccauccccgacgaggacucccccuggaucaccgacuccaccgaccgcauccccgccaccacccucauguccaccuccgccaccgccaccgagaccgccaccaagcgccaggagaccugggacugguucuccuggcucuuccuccccuccgaguccaagaaccaccuccacaccaccacccagauggccggcaccuccuccaacaccaucuccgccggcugggagcccaacgaggagaacgaggacgagcgcgaccgccaccucuccuucuccggcuccggcaucgacgacgacgaggacuucaucuccuccaccaucuccaccaccccccgcgccuucgaccacaccaagcagaaccaggacuggacccaguggaaccccucccacuccaaccccgagguccuccuccagaccaccacccgcaugaccgacgucgaccgcaacggcaccaccgccuacgagggcaacuggaaccccgaggcccaccccccccucauccaccacgagcaccacgaggaggaggagaccccccacuccaccuccaccauccaggccacccccuccuccaccaccgaggagaccgccacccagaaggagcagugguucggcaaccgcuggcacgagggcuaccgccagacccccaaggaggacucccacuccaccaccggcaccgccgccgccuccgcccacaccucccaccccaugcagggccgcaccacccccucccccgaggacuccuccuggaccgacuucuucaaccccaucucccaccccaugggccgcggccaccaggccggccgccgcauggacauggacuccucccacuccaucacccuccagcccaccgccaaccccaacaccggccucgucgaggaccucgaccgcaccggcccccucuccaugaccacccagcaguccaacucccaguccuucuccaccucccacgagggccucgaggaggacaaggaccaccccaccaccuccacccucaccuccuccaaccgcaacgacgucaccggcggccgccgcgaccccaaccacuccgagggcuccaccacccuccucgagggcuacaccucccacuacccccacaccaaggagucccgcaccuucauccccgucaccuccgccaagaccggcuccuucggcgucaccgccgucaccgucggcgacuccaacuccaacgucaaccgcucccucuccggcgaccaggacaccuuccaccccuccggcggcucccacaccacccacggcuccgaguccgacggccacucccacggcucccaggagggcggcgccaacaccaccuccggccccauccgcaccccccagauccccgaguggcucaucauccucgccucccuccucgcccucgcccucauccucgccgucugcaucgccgucaacucccgccgccgcugcggccagaagaagaagcucgucaucaacuccggcaacggcgccgucgaggaccgcaagcccuccggccucaacggcgaggccuccaagucccaggagaugguccaccucgucaacaaggaguccuccgagacccccgaccaguucaugaccgccgacgagacccgcaaccuccagaacgucgacaugaagaucggcgucuga

SEQ ID NO: 871 - RNA, 2229 nt, Artificial Sequence
  derived and/or modified sequence opt3 from CD44_Isoform_1__Homo_sapiens__CCDS7897.1
auggacaaguucugguggcacgccgcuuggggccugugccucgugccccuuagccuggcacagaucgauuugaacauuaccuguagauuugccggggucuuccauguugagaaaaauggaagguacuccauaucucggacagaagcggcugacuuaugcaaggccuuuaacucaacucugccuacgauggcacaaauggagaaagcccuaaguaucgguuucgaaaccugucgcuauggcuuuauugaggggcacgugguaaucccacguauucauccgaauagcaucugcgcugcaaacaauacaggaguguacauacucacuuccaacaccucucaguaugauacauacuguuucaaugccucggcucccccugaagaggacugcaccucagucacugaucugccaaacgccuuugacggccccaucacaauuaccaucgugaaucgagaugguacgagauauguucagaagggggaguacaggacuaacccugaagacauuuauccaagcaaucccaccgaugacgaugugaguuccggaucuagcuccgagcggucaaguacaagcggcggcuacaucuucuacacuuuuucuaccguccacccuauaccagacgaagauuccccguggauuacagacucaaccgaccgcauccccgcgacgacucuuaugagcacaagugcaaccgccacugagacagcuaccaaaagacaggagacgugggauugguucucuuggcuguuuuugccuuccgaaagcaagaaccaucuccacaccacaacucaaauggccgggaccucgucuaauacaauuuccgcaggaugggagccaaacgaagagaaugaagacgagagggaucggcaccugucauucagugguagcggcaucgacgaugacgaggauuuuaucuccucuacuauuagcaccacaccccgcgcuuucgaccauaccaagcagaaccaggauuggacucaguggaacccuucacacaguaauccagaagugcugcuccaaacgacaacccgaaugacugacguagauagaaacgggaccacagccuaugagggaaauuggaaccccgaagcgcauccgccuuuaauacaccacgagcaucacgaagaggaggaaacuccccauuccacuagcacaauccaggccacgccaucuucaaccacugaggaaacagcaacccagaaagagcagugguucggcaauagguggcacgaagguuaccggcaaacaccuaaggaggacagucauagcacuaccgggacggcugccgcuuccgcccacaccucucaccccaugcagggacguacaacuccaucgcccgaggacagcuccuggaccgacuuuuucaacccuauuucacauccaaugggccgcggccaccaggcagggagaaggauggauauggauaguucucauagcaucacacugcaaccgacugccaaucccaacaccggacuuguugaagacuuggaucggacggguccucuguccaugacaacccagcagucaaauagccagucuuuuuccaccagucacgagggccuagaagaggacaaagaucacccaacaaccagcacucucaccucuuccaaccgaaaugacgugacagggggacgcagagaucccaaccauucagagggcaguacgacccugcuugaagguuauacuagccacuacccucauacaaaggagucgaggaccuucauaccagucacauccgcuaaaacugggucuuuuggcgugaccgcggugacggucggagacagcaauucaaacguuaaucggagucuguccggcgaucaagacacauuccaccccucugggggaagccauaccacucacgguuccgaaucagauggccacagccaugggagucaggagggaggcgcaaacaccacaucugguccgauucgcacuccucagaucccagaaugguugaucauucucgccucccuguuagcucuggcccucauccuugcaguguguauugccguaaacagcagaaggcguugcgggcagaagaagaaacuggugauaaauucgggcaacggagcugucgaggaccggaagcccucaggcuugaauggggaggccucuaaaagucaagaaauggugcaccuaguuaacaaggaguccagcgaaaccccugaccaguuuaugacagcagaugagacgcgaaaucugcagaacguggacaugaaaaucggagucuga

SEQ ID NO: 872 - RNA, 2229 nt, Artificial Sequence
  derived and/or modified sequence opt4 from CD44_Isoform_1__Homo_sapiens__CCDS7897.1
auggacaaguucugguggcacgccgccuggggccugugccuggugccccugagccuggcccagaucgaccugaacaucaccugcagauucgccggcguguuccacguggagaagaacggcagauacagcaucagcagaaccgaggccgccgaccugugcaaggccuucaacagcacccugcccaccauggcccagauggagaaggcccugagcaucggcuucgagaccugcagauacggcuucaucgagggccacguggugauccccagaauccaccccaacagcaucugcgccgccaacaacaccggcguguacauccugaccagcaacaccagccaguacgacaccuacugcuucaacgccagcgccccccccgaggaggacugcaccagcgugaccgaccugcccaacgccuucgacggccccaucaccaucaccaucgugaacagagacggcaccagauacgugcagaagggcgaguacagaaccaaccccgaggacaucuaccccagcaaccccaccgacgacgacgugagcagcggcagcagcagcgagagaagcagcaccagcggcggcuacaucuucuacaccuucagcaccgugcaccccauccccgacgaggacagccccuggaucaccgacagcaccgacagaauccccgccaccacccugaugagcaccagcgccaccgccaccgagaccgccaccaagagacaggagaccugggacugguucagcuggcuguuccugcccagcgagagcaagaaccaccugcacaccaccacccagauggccggcaccagcagcaacaccaucagcgccggcugggagcccaacgaggagaacgaggacgagagagacagacaccugagcuucagcggcagcggcaucgacgacgacgaggacuucaucagcagcaccaucagcaccacccccagagccuucgaccacaccaagcagaaccaggacuggacccaguggaaccccagccacagcaaccccgaggugcugcugcagaccaccaccagaaugaccgacguggacagaaacggcaccaccgccuacgagggcaacuggaaccccgaggcccaccccccccugauccaccacgagcaccacgaggaggaggagaccccccacagcaccagcaccauccaggccacccccagcagcaccaccgaggagaccgccacccagaaggagcagugguucggcaacagauggcacgagggcuacagacagacccccaaggaggacagccacagcaccaccggcaccgccgccgccagcgcccacaccagccaccccaugcagggcagaaccacccccagccccgaggacagcagcuggaccgacuucuucaaccccaucagccaccccaugggcagaggccaccaggccggcagaagaauggacauggacagcagccacagcaucacccugcagcccaccgccaaccccaacaccggccugguggaggaccuggacagaaccggcccccugagcaugaccacccagcagagcaacagccagagcuucagcaccagccacgagggccuggaggaggacaaggaccaccccaccaccagcacccugaccagcagcaacagaaacgacgugaccggcggcagaagagaccccaaccacagcgagggcagcaccacccugcuggagggcuacaccagccacuacccccacaccaaggagagcagaaccuucauccccgugaccagcgccaagaccggcagcuucggcgugaccgccgugaccgugggcgacagcaacagcaacgugaacagaagccugagcggcgaccaggacaccuuccaccccagcggcggcagccacaccacccacggcagcgagagcgacggccacagccacggcagccaggagggcggcgccaacaccaccagcggccccaucagaaccccccagauccccgaguggcugaucauccuggccagccugcuggcccuggcccugauccuggccgugugcaucgccgugaacagcagaagaagaugcggccagaagaagaagcuggugaucaacagcggcaacggcgccguggaggacagaaagcccagcggccugaacggcgaggccagcaagagccaggagauggugcaccuggugaacaaggagagcagcgagacccccgaccaguucaugaccgccgacgagaccagaaaccugcagaacguggacaugaagaucggcguguga

SEQ ID NO: 873 - RNA, 2229 nt, Artificial Sequence
  derived and/or modified sequence opt5 from CD44_Isoform_1__Homo_sapiens__CCDS7897.1
auggacaaguucugguggcacgccgcuuggggccugugccucgugccccugagccuugcccagaucgaucugaacauuaccuguagauuugcgggggucuuccauguugagaaaaauggacgguacuccaucucucgcacagaagcugccgaccucugcaaggccuuuaacagcacgcugccuaccauggcucaaauggagaaagcccuuuccauuggcuucgaaacauguagauauggguuuaucgagggacacguggugauuccgcggauccaucccaauucuaucugcgcugccaacaauaccggcgucuacauucugacaagcaacaccucccaguaugauacauacuguuucaaugcgucugccccucccgaagaggacugcaccagcgugacggaucucccuaacgcuuuugacgggcccaucaccauuacaaucguuaaucgcgauggaaccagauaugugcagaagggcgaguaccggacaaacccugaagacauuuauccguccaaucccaccgaugacgaugucagcucuggcuccagcucugagcgcuccagcacgucugggggauacaucuucuacacauuuuccaccgugcacccuauucccgacgaagauagcccuuggaucacagacuccaccgacagaauccccgccaccacacugaugucuacgagcgcuaccgccacagagaccgcgacaaaacggcaggagaccugggauugguucuccuggcuguuucucccgagcgaaucuaagaaccaucugcacacgacaacccaaauggccggcaccuccagcaauacaauuucugcugggugggagccuaacgaagagaaugaagacgagcgcgauagacaccuuagcuucuccggaucuggcaucgacgaugacgaggauuuuauuagcuccaccaucagcacaacgccccgggccuucgaccauaccaagcagaaccaggauuggacacaguggaacccuucucacuccaaucccgaaguucugcuccaaaccacaacccgcaugacggacguggauagaaacgggaccacagcuuaugagggaaauuggaaccccgaagcccauccuccgcugauucaccacgagcaucacgaagaggaggaaacaccccauagcaccucuaccauccaggccacgccuuccagcacaaccgaggaaacagcuacccagaaagagcagugguucggcaaucgguggcacgaaggcuaccgccaaacccccaaggaggacucccauucuacaacggggaccgcggccgcuagcgcccacacaucccacccuaugcagggaagaaccacacccucuccggaggacagcuccuggaccgacuuuuucaacccuaucagccaucccaugggccgggggcaccaggccggaagacgcauggauauggauucuucccauagcauuacgcuucaaccuacagcuaaucccaacaccggccuggucgaagaccucgaucggaccgggccucugucuaugacaacccagcaguccaauagccagucuuuuagcacaucccacgagggacuggaagaggacaaagaucaccccacgaccagcacacucaccucuuccaacagaaaugacgugacaggcggccgccgggauccgaaccauagcgagggguccaccacgcugcuugaaggauauaccucucacuacccucauacaaaggagagcagaaccuucauccccgugacauccgccaaaaccggcucuuuuggggucacagcgguuaccgugggagacagcaauuccaacgugaaucgcucucugagcggcgaucaagacacguuccaccccuccgggggcagccauacaacccacggaucugaauccgauggccacagccaugggucucaggagggaggcgcuaacaccacauccgggccuauucggaccccgcagauccccgaauggcucauuauccuggccagccuucuggcccucgcucugauccuggccgucuguauugcugugaacucuagacgccggugcggacagaagaagaaacucguuaucaauuccggcaacggggccguggaggacagaaagccuagcggccugaauggagaggcguccaaaagccaagaaaugguccaccuugugaacaaggagucuagcgaaacgcccgaccaguuuaugacagccgaugagacccgcaaucugcagaacguugacaugaaaauuggcguguga

SEQ ID NO: 874 - protein, 699 aa, Artificial Sequence
  CD44_Isoform_6__Homo_sapiens__P16070-6
MDKFWWHAAWGLCLVPLSLAQIDLNITCRFAGVFHVEKNGRYSISRTEAADLCKAFNSTLPTMAQMEKALSIGFETCRYGFIEGHVVIPRIHPNSICAANNTGVYILTSNTSQYDTYCFNASAPPEEDCTSVTDLPNAFDGPITITIVNRDGTRYVQKGEYRTNPEDIYPSNPTDDDVSSGSSSERSSTSGGYIFYTFSTVHPIPDEDSPWITDSTDRIPATTLMSTSATATETATKRQETWDWFSWLFLPSESKNHLHTTTQMAGTSSNTISAGWEPNEENEDERDRHLSFSGSGIDDDEDFISSTISTTPRAFDHTKQNQDWTQWNPSHSNPEVLLQTTTRMTDVDRNGTTAYEGNWNPEAHPPLIHHEHHEEEETPHSTSTTASAHTSHPMQGRTTPSPEDSSWTDFFNPISHPMGRGHQAGRRMDMDSSHSITLQPTANPNTGLVEDLDRTGPLSMTTQQSNSQSFSTSHEGLEEDKDHPTTSTLTSSNRNDVTGGRRDPNHSEGSTTLLEGYTSHYPHTKESRTFIPVTSAKTGSFGVTAVTVGDSNSNVNRSLSGDQDTFHPSGGSHTTHGSESDGHSHGSQEGGANTTSGPIRTPQIPEWLIILASLLALALILAVCIAVNSRRRCGQKKKLVINSGNGAVEDRKPSGLNGEASKSQEMVHLVNKESSETPDQFMTADETRNLQNVDMKIGV

SEQ ID NO: 875 - RNA, 2100 nt, Artificial Sequence
  CD44_Isoform_6__Homo_sapiens__XM_006718388.1
auggacaaguuuugguggcacgcagccuggggacucugccucgugccgcugagccuggcgcagaucgauuugaauauaaccugccgcuuugcagguguauuccacguggagaaaaauggucgcuacagcaucucucggacggaggccgcugaccucugcaaggcuuucaauagcaccuugcccacaauggcccagauggagaaagcucugagcaucggauuugagaccugcagguauggguucauagaagggcacguggugauuccccggauccaccccaacuccaucugugcagcaaacaacacagggguguacauccucacauccaacaccucccaguaugacacauauugcuucaaugcuucagcuccaccugaagaagauuguacaucagucacagaccugcccaaugccuuugauggaccaauuaccauaacuauuguuaaccgugauggcacccgcuauguccagaaaggagaauacagaacgaauccugaagacaucuaccccagcaacccuacugaugaugacgugagcagcggcuccuccagugaaaggagcagcacuucaggagguuacaucuuuuacaccuuuucuacuguacaccccaucccagacgaagacagucccuggaucaccgacagcacagacagaaucccugcuaccacuuugaugagcacuagugcuacagcaacugagacagcaaccaagaggcaagaaaccugggauugguuuucaugguuguuucuaccaucagagucaaagaaucaucuucacacaacaacacaaauggcugguacgucuucaaauaccaucucagcaggcugggagccaaaugaagaaaaugaagaugaaagagacagacaccucaguuuuucuggaucaggcauugaugaugaugaagauuuuaucuccagcaccauuucaaccacaccacgggcuuuugaccacacaaaacagaaccaggacuggacccaguggaacccaagccauucaaauccggaagugcuacuucagacaaccacaaggaugacugauguagacagaaauggcaccacugcuuaugaaggaaacuggaacccagaagcacacccuccccucauucaccaugagcaucaugaggaagaagagaccccacauucuacaagcacaacagcuucagcucauaccagccauccaaugcaaggaaggacaacaccaagcccagaggacaguuccuggacugauuucuucaacccaaucucacaccccaugggacgaggucaucaagcaggaagaaggauggauauggacuccagucauaguauaacgcuucagccuacugcaaauccaaacacagguuugguggaagauuuggacaggacaggaccucuuucaaugacaacgcagcagaguaauucucagagcuucucuacaucacaugaaggcuuggaagaagauaaagaccauccaacaacuucuacucugacaucaagcaauaggaaugaugucacagguggaagaagagacccaaaucauucugaaggcucaacuacuuuacuggaagguuauaccucucauuacccacacacgaaggaaagcaggaccuucaucccagugaccucagcuaagacuggguccuuuggaguuacugcaguuacuguuggagauuccaacucuaaugucaaucguuccuuaucaggagaccaagacacauuccaccccaguggggggucccauaccacucauggaucugaaucagauggacacucacaugggagucaagaagguggagcaaacacaaccucugguccuauaaggacaccccaaauuccagaauggcugaucaucuuggcaucccucuuggccuuggcuuugauucuugcaguuugcauugcagucaacagucgaagaaggugugggcagaagaaaaagcuagugaucaacaguggcaauggagcuguggaggacagaaagccaaguggacucaacggagaggccagcaagucucaggaaauggugcauuuggugaacaaggagucgucagaaacuccagaccaguuuaugacagcugaugagacaaggaaccugcagaauguggacaugaagauugggguguaa

SEQ ID NO: 876 - RNA, 2100 nt, Artificial Sequence
  derived and/or modified sequence opt1 from CD44_Isoform_6__Homo_sapiens__XM_006718388.1
auggacaaguucugguggcacgccgccuggggccugugccucgugccccugagccuggcgcagaucgaccucaacaucacgugccgcuucgccggggucuuccacguggagaagaacggccgguacuccaucagccgcaccgaggccgccgaccugugcaaggccuucaacuccacccugccgaccauggcgcagauggagaaggcccucagcaucggguucgagaccugccgguacggcuucaucgaggggcacguggucaucccccgcauccaccccaacuccaucugcgccgccaacaacaccggcguguacauccugacgagcaacaccucccaguacgacaccuacugcuucaacgcgagcgcgcccccggaggaggacugcaccuccgugacggaccugcccaacgccuucgacggccccaucaccaucaccaucgucaaccgggacgggacccgcuacgugcagaagggcgaguaccggacgaaccccgaggacaucuacccgagcaaccccaccgacgacgacguguccagcggguccagcuccgagcgcagcuccaccagcggcggguacaucuucuacaccuucuccacgguccaccccauccccgacgaggacagcccguggaucaccgacagcaccgaccggauccccgccaccacgcucauguccaccagcgccaccgccaccgagacggccaccaagcgccaggagaccugggacugguucuccuggcuguuccugcccagcgaguccaagaaccaccuccacaccacgacccagauggccggcaccagcuccaacaccaucagcgccggcugggagcccaacgaggagaacgaggacgagcgggaccgccaccuguccuucagcggguccggcaucgacgacgacgaggacuucaucagcuccacgaucagcaccaccccgcgggccuucgaccacaccaagcagaaccaggacuggacgcaguggaaccccucccacagcaaccccgaggugcugcuccagaccaccacccgcaugaccgacguggaccggaacgggacgaccgcguacgagggcaacuggaaccccgaggcccacccgccccugauccaccacgagcaccacgaggaggaggagacgccccacuccaccagcaccaccgccuccgcccacaccagccaccccaugcagggccgcaccacgccgagccccgaggacuccagcuggaccgacuucuucaaccccaucucccaccccauggggcggggccaccaggccgggcgccggauggacauggacagcucccacagcaucacccugcagccgaccgcgaaccccaacacgggccucgucgaggaccuggaccgcaccgggccccuguccaugaccacccagcagagcaacucccagagcuucuccacgagccacgagggccucgaggaggacaaggaccacccgaccaccuccacccugacgagcuccaaccggaacgacgugaccggcgggcgccgcgaccccaaccacagcgagggcuccaccacccugcucgagggguacacgagccacuacccccacaccaaggagagccggaccuucauccccgugaccuccgccaagacgggcagcuucggggucaccgccgugaccgugggcgacuccaacagcaacgucaaccgcucccugagcggcgaccaggacaccuuccacccguccgggggcagccacacgacccacggguccgagagcgacggccacucccacgggagccaggagggcggcgccaacaccaccuccgggcccauccggacgccccagauccccgaguggcugaucauccucgccagccugcuggcgcucgcccugauccuggccgugugcaucgccgugaacucccgccggcgcugcggccagaagaagaagcucgucaucaacagcgggaacggcgcgguggaggaccggaagccguccggccugaacggggaggccagcaagucccaggagauggugcaccuggucaacaaggagagcagcgagacccccgaccaguucaugaccgccgacgagacccgcaaccuccagaacguggacaugaagaucggcgucuga

SEQ ID NO: 877 - RNA, 2100 nt, Artificial Sequence
  derived and/or modified sequence opt2 from CD44_Isoform_6__Homo_sapiens__XM_006718388.1
auggacaaguucugguggcacgccgccuggggccucugccucgucccccucucccucgcccagaucgaccucaacaucaccugccgcuucgccggcgucuuccacgucgagaagaacggccgcuacuccaucucccgcaccgaggccgccgaccucugcaaggccuucaacuccacccuccccaccauggcccagauggagaaggcccucuccaucggcuucgagaccugccgcuacggcuucaucgagggccacgucgucaucccccgcauccaccccaacuccaucugcgccgccaacaacaccggcgucuacauccucaccuccaacaccucccaguacgacaccuacugcuucaacgccuccgccccccccgaggaggacugcaccuccgucaccgaccuccccaacgccuucgacggccccaucaccaucaccaucgucaaccgcgacggcacccgcuacguccagaagggcgaguaccgcaccaaccccgaggacaucuaccccuccaaccccaccgacgacgacgucuccuccggcuccuccuccgagcgcuccuccaccuccggcggcuacaucuucuacaccuucuccaccguccaccccauccccgacgaggacucccccuggaucaccgacuccaccgaccgcauccccgccaccacccucauguccaccuccgccaccgccaccgagaccgccaccaagcgccaggagaccugggacugguucuccuggcucuuccuccccuccgaguccaagaaccaccuccacaccaccacccagauggccggcaccuccuccaacaccaucuccgccggcugggagcccaacgaggagaacgaggacgagcgcgaccgccaccucuccuucuccggcuccggcaucgacgacgacgaggacuucaucuccuccaccaucuccaccaccccccgcgccuucgaccacaccaagcagaaccaggacuggacccaguggaaccccucccacuccaaccccgagguccuccuccagaccaccacccgcaugaccgacgucgaccgcaacggcaccaccgccuacgagggcaacuggaaccccgaggcccaccccccccucauccaccacgagcaccacgaggaggaggagaccccccacuccaccuccaccaccgccuccgcccacaccucccaccccaugcagggccgcaccacccccucccccgaggacuccuccuggaccgacuucuucaaccccaucucccaccccaugggccgcggccaccaggccggccgccgcauggacauggacuccucccacuccaucacccuccagcccaccgccaaccccaacaccggccucgucgaggaccucgaccgcaccggcccccucuccaugaccacccagcaguccaacucccaguccuucuccaccucccacgagggccucgaggaggacaaggaccaccccaccaccuccacccucaccuccuccaaccgcaacgacgucaccggcggccgccgcgaccccaaccacuccgagggcuccaccacccuccucgagggcuacaccucccacuacccccacaccaaggagucccgcaccuucauccccgucaccuccgccaagaccggcuccuucggcgucaccgccgucaccgucggcgacuccaacuccaacgucaaccgcucccucuccggcgaccaggacaccuuccaccccuccggcggcucccacaccacccacggcuccgaguccgacggccacucccacggcucccaggagggcggcgccaacaccaccuccggccccauccgcaccccccagauccccgaguggcucaucauccucgccucccuccucgcccucgcccucauccucgccgucugcaucgccgucaacucccgccgccgcugcggccagaagaagaagcucgucaucaacuccggcaacggcgccgucgaggaccgcaagcccuccggccucaacggcgaggccuccaagucccaggagaugguccaccucgucaacaaggaguccuccgagacccccgaccaguucaugaccgccgacgagacccgcaaccuccagaacgucgacaugaagaucggcgucuga

SEQ ID NO: 878 - RNA, 2100 nt, Artificial Sequence
  derived and/or modified sequence opt3 from CD44_Isoform_6__Homo_sapiens__XM_006718388.1
auggacaaguucugguggcacgccgcuuggggccugugccucgugccccuuagccuggcacagaucgauuugaacauuaccuguagauuugccggggucuuccauguugagaaaaauggaagguacuccauaucucggacagaagcggcugacuuaugcaaggccuuuaacucaacucugccuacgauggcacaaauggagaaagcccuaaguaucgguuucgaaaccugucgcuauggcuuuauugaggggcacgugguaaucccacguauucauccgaauagcaucugcgcugcaaacaauacaggaguguacauacucacuuccaacaccucucaguaugauacauacuguuucaaugccucggcucccccugaagaggacugcaccucagucacugaucugccaaacgccuuugacggccccaucacaauuaccaucgugaaucgagaugguacgagauauguucagaagggggaguacaggacuaacccugaagacauuuauccaagcaaucccaccgaugacgaugugaguuccggaucuagcuccgagcggucaaguacaagcggcggcuacaucuucuacacuuuuucuaccguccacccuauaccagacgaagauuccccguggauuacagacucaaccgaccgcauccccgcgacgacucuuaugagcacaagugcaaccgccacugagacagcuaccaaaagacaggagacgugggauugguucucuuggcuguuuuugccuuccgaaagcaagaaccaucuccacaccacaacucaaauggccgggaccucgucuaauacaauuuccgcaggaugggagccaaacgaagagaaugaagacgagagggaucggcaccugucauucagugguagcggcaucgacgaugacgaggauuuuaucuccucuacuauuagcaccacaccccgcgcuuucgaccauaccaagcagaaccaggauuggacucaguggaacccuucacacaguaauccagaagugcugcuccaaacgacaacccgaaugacugacguagauagaaacgggaccacagccuaugagggaaauuggaaccccgaagcgcauccgccuuuaauacaccacgagcaucacgaagaggaggaaacuccccauuccaccagcacaacggccucugcacacaccucacauccaaugcagggcaggacuacaccuagucccgaggacagcuccuggaccgacuucuuuaauccaaucucucaccccaugggucgggggcaccaggcuggacgucgcauggauauggacucgagccauuccauuacacugcagccuacugccaacccaaauaccggccuuguugaagauuuggacagaacgggcccgcugucaaugaccacacaacagaguaacucucagagcuucuccacuucacacgaggggcuagaagaggauaaagaccaucccaccacaagcacucucaccucuuccaauaggaacgaugugacgggaggucggcgagacccuaaucacagugagggcagcacaacccugcuugaaggguacacuucucacuauccacauacaaaggagucccgcaccuuuauccccgucacuucagcuaaaaccggaaguuucggcgugacagccgugacggucggugauagcaacucgaauguuaacagaucccugucuggggaccaagauaccuuucacccuagcggcggaucacauacuacacacggcagugaauccgacgggcauucucacggaagccaggaggguggcgcaaauaccacauccgggccaauaaggacuccccagauuccggagugguugaucauccucgccucacuguuagcucuggcgcucauucuugcaguguguaucgccguaaacagccggcgcagaugcggacagaagaaaaagcuggugauuaacaguggcaauggugcugucgaagauaggaagccuucuggguugaacggcgaggccuccaaaagccaagaaauggugcaccuaguuaauaaggagucgucagaaaccccagaccaguucaugacggcagacgagacacguaaccugcagaauguggauaugaaaauaggagucuga

SEQ ID NO: 879 - RNA, 2100 nt, Artificial Sequence
  derived and/or modified sequence opt4 from CD44_Isoform_6__Homo_sapiens__XM_006718388.1
auggacaaguucugguggcacgccgccuggggccugugccuggugccccugagccuggcccagaucgaccugaacaucaccugcagauucgccggcguguuccacguggagaagaacggcagauacagcaucagcagaaccgaggccgccgaccugugcaaggccuucaacagcacccugcccaccauggcccagauggagaaggcccugagcaucggcuucgagaccugcagauacggcuucaucgagggccacguggugauccccagaauccaccccaacagcaucugcgccgccaacaacaccggcguguacauccugaccagcaacaccagccaguacgacaccuacugcuucaacgccagcgccccccccgaggaggacugcaccagcgugaccgaccugcccaacgccuucgacggccccaucaccaucaccaucgugaacagagacggcaccagauacgugcagaagggcgaguacagaaccaaccccgaggacaucuaccccagcaaccccaccgacgacgacgugagcagcggcagcagcagcgagagaagcagcaccagcggcggcuacaucuucuacaccuucagcaccgugcaccccauccccgacgaggacagccccuggaucaccgacagcaccgacagaauccccgccaccacccugaugagcaccagcgccaccgccaccgagaccgccaccaagagacaggagaccugggacugguucagcuggcuguuccugcccagcgagagcaagaaccaccugcacaccaccacccagauggccggcaccagcagcaacaccaucagcgccggcugggagcccaacgaggagaacgaggacgagagagacagacaccugagcuucagcggcagcggcaucgacgacgacgaggacuucaucagcagcaccaucagcaccacccccagagccuucgaccacaccaagcagaaccaggacuggacccaguggaaccccagccacagcaaccccgaggugcugcugcagaccaccaccagaaugaccgacguggacagaaacggcaccaccgccuacgagggcaacuggaaccccgaggcccaccccccccugauccaccacgagcaccacgaggaggaggagaccccccacagcaccagcaccaccgccagcgcccacaccagccaccccaugcagggcagaaccacccccagccccgaggacagcagcuggaccgacuucuucaaccccaucagccaccccaugggcagaggccaccaggccggcagaagaauggacauggacagcagccacagcaucacccugcagcccaccgccaaccccaacaccggccugguggaggaccuggacagaaccggcccccugagcaugaccacccagcagagcaacagccagagcuucagcaccagccacgagggccuggaggaggacaaggaccaccccaccaccagcacccugaccagcagcaacagaaacgacgugaccggcggcagaagagaccccaaccacagcgagggcagcaccacccugcuggagggcuacaccagccacuacccccacaccaaggagagcagaaccuucauccccgugaccagcgccaagaccggcagcuucggcgugaccgccgugaccgugggcgacagcaacagcaacgugaacagaagccugagcggcgaccaggacaccuuccaccccagcggcggcagccacaccacccacggcagcgagagcgacggccacagccacggcagccaggagggcggcgccaacaccaccagcggccccaucagaaccccccagauccccgaguggcugaucauccuggccagccugcuggcccuggcccugauccuggccgugugcaucgccgugaacagcagaagaagaugcggccagaagaagaagcuggugaucaacagcggcaacggcgccguggaggacagaaagcccagcggccugaacggcgaggccagcaagagccaggagauggugcaccuggugaacaaggagagcagcgagacccccgaccaguucaugaccgccgacgagaccagaaaccugcagaacguggacaugaagaucggcguguga

SEQ ID NO: 880 - RNA, 2100 nt, Artificial Sequence
  derived and/or modified sequence opt5 from CD44_Isoform_6__Homo_sapiens__XM_006718388.1
auggacaaguucugguggcacgccgcuuggggccugugccucgugccccugagccuugcccagaucgaucugaacauuaccuguagauuugcgggggucuuccauguugagaaaaauggacgguacuccaucucucgcacagaagcugccgaccucugcaaggccuuuaacagcacgcugccuaccauggcucaaauggagaaagcccuuuccauuggcuucgaaacauguagauauggguuuaucgagggacacguggugauuccgcggauccaucccaauucuaucugcgcugccaacaauaccggcgucuacauucugacaagcaacaccucccaguaugauacauacuguuucaaugcgucugccccucccgaagaggacugcaccagcgugacggaucucccuaacgcuuuugacgggcccaucaccauuacaaucguuaaucgcgauggaaccagauaugugcagaagggcgaguaccggacaaacccugaagacauuuauccguccaaucccaccgaugacgaugucagcucuggcuccagcucugagcgcuccagcacgucugggggauacaucuucuacacauuuuccaccgugcacccuauucccgacgaagauagcccuuggaucacagacuccaccgacagaauccccgccaccacacugaugucuacgagcgcuaccgccacagagaccgcgacaaaacggcaggagaccugggauugguucuccuggcuguuucucccgagcgaaucuaagaaccaucugcacacgacaacccaaauggccggcaccuccagcaauacaauuucugcugggugggagccuaacgaagagaaugaagacgagcgcgauagacaccuuagcuucuccggaucuggcaucgacgaugacgaggauuuuauuagcuccaccaucagcacaacgccccgggccuucgaccauaccaagcagaaccaggauuggacacaguggaacccuucucacuccaaucccgaaguucugcuccaaaccacaacccgcaugacggacguggauagaaacgggaccacagcuuaugagggaaauuggaaccccgaagcccauccuccgcugauucaccacgagcaucacgaagaggaggaaacaccccauagcaccucuaccacggccuccgcucacacaagccauccuaugcagggccggaccacacccuccccugaggacucuagcuggaccgacuucuuuaaucccaucucccacccgaugggccgcgggcaccaggcgggaagacggauggauauggacucuagccauuccaucacccuucagccuacagccaaccccaauacgggccuggucgaagaucucgacagaaccgggccucugagcaugacaacccaacagucuaacucccagagcuucucuacaucccacgagggacuggaagaggauaaagaccaucccaccacgagcacacucaccucuagcaaucgcaacgaugugaccggcgggcggagagacccuaaucacuccgagggaagcacaacccugcuugaaggcuacacaucucacuauccccauacgaaggagucccgcaccuuuauuccggugacaagcgcuaaaaccggcuccuucggggucacagccguuaccgugggagauucuaacagcaaugugaaccggucccugucuggcgaccaagauacguuucacccuagcgggggaucccauaccacacacggcucugaaagcgacgggcauucccacggcagccaggagggaggcgccaauaccacaucugggcccaucagaacaccccagauuccugaguggcucaucauucuggcuucccuucuggcccucgcgcugauccuggcugucuguaucgccgugaacagccgccggagaugcggacagaagaaaaagcucguuauuaacucuggcaauggggccguggaagaucgcaagccguccggacugaacggcgaggcuagcaaaucucaagaaaugguccaccuugugaauaaggaguccagcgaaacccccgaccaguucaugaccgccgacgagacgcggaaccugcagaauguugauaugaaaaucgggguguga

SEQ ID NO: 881 - protein, 458 aa, Artificial Sequence
  CD4__Homo_sapiens__P01730
MNRGVPFRHLLLVLQLALLPAATQGKKVVLGKKGDTVELTCTASQKKSIQFHWKNSNQIKILGNQGSFLTKGPSKLNDRADSRRSLWDQGNFPLIIKNLKIEDSDTYICEVEDQKEEVQLLVFGLTANSDTHLLQGQSLTLTLESPPGSSPSVQCRSPRGKNIQGGKTLSVSQLELQDSGTWTCTVLQNQKKVEFKIDIVVLAFQKASSIVYKKEGEQVEFSFPLAFTVEKLTGSGELWWQAERASSSKSWITFDLKNKEVSVKRVTQDPKLQMGKKLPLHLTLPQALPQYAGSGNLTLALEAKTGKLHQEVNLVVMRATQLQKNLTCEVWGPTSPKLMLSLKLENKEAKVSKREKAVWVLNPEAGMWQCLLSDSGQVLLESNIKVLPTWSTPVQPMALIVLGGVAGLLLFIGLGIFFCVRCRHRRRQAERMSQIKRLLSEKKTCQCPHRFQKTCSPI

SEQ ID NO: 882 - RNA, 1377 nt, Artificial Sequence
  CD4__Homo_sapiens__AAA35572
augaaccggggagucccuuuuaggcacuugcuucuggugcugcaacuggcgcuccucccagcagccacucagggaaagaaaguggugcugggcaaaaaaggggauacaguggaacugaccuguacagcuucccagaagaagagcauacaauuccacuggaaaaacuccaaccagauaaagauucugggaaaucagggcuccuucuuaacuaaagguccauccaagcugaaugaucgcgcugacucaagaagaagccuuugggaccaaggaaacuucccccugaucaucaagaaucuuaagauagaagacucagauacuuacaucugugaaguggaggaccagaaggaggaggugcaauugcuaguguucggauugacugccaacucugacacccaccugcuucaggggcagagccugacccugaccuuggagagccccccugguaguagccccucagugcaauguaggaguccaagggguaaaaacauacagggggggaagacccucuccgugucucagcuggagcuccaggauaguggcaccuggacaugcacugucuugcagaaccagaagaagguggaguucaaaauagacaucguggugcuagcuuuccagaaggccuccagcauagucuauaagaaagagggggaacagguggaguucuccuucccacucgccuuuacaguugaaaagcugacgggcaguggcgagcugugguggcaggcggagagggcuuccuccuccaagucuuggaucaccuuugaccugaagaacaaggaagugucuguaaaacggguuacccaggacccuaagcuccagaugggcaagaagcucccgcuccaccucacccugccccaggccuugccucaguaugcuggcucuggaaaccucacccuggcccuugaagcgaaaacaggaaaguugcaucaggaagugaaccugguggugaugagagccacucagcuccagaaaaauuugaccugugagguguggggacccaccuccccuaagcugaugcugagcuugaaacuggagaacaaggaggcaaaggucucgaagcgggagaaggcggugugggugcugaacccugaggcggggauguggcagugucugcugagugacucgggacagguccugcuggaauccaacaucaagguucugcccacaugguccaccccggugcagccaauggcccugauugugcuggggggcgucgccggccuccugcuuuucauugggcuaggcaucuucuucugugucaggugccggcaccgaaggcgccaagcagagcggaugucucagaucaagagacuccucagugagaagaagaccugccagugcccucaccgguuucagaagacauguagccccauuuga

SEQ ID NO: 883 - RNA, 1377 nt, Artificial Sequence
  derived and/or modified sequence opt1 from CD4__Homo_sapiens__AAA35572
augaaccgcggcgugcccuuccggcaccuccuccugguccugcagcucgcccugcugccggccgcgacccaggggaagaagguggugcucggcaagaagggggacaccgucgagcugacgugcaccgccagccagaagaaguccauccaguuccacuggaagaacagcaaccagaucaagauccugggcaaccagggguccuuccucaccaagggccccagcaagcugaacgaccgcgccgacucccggcgcagccugugggaccagggcaacuucccccucaucaucaagaaccugaagaucgaggacuccgacaccuacaucugcgagguggaggaccagaaggaggaggugcagcugcucgucuucgggcugacggccaacagcgacacccaccuccugcagggccagucccugacccugacccucgagagcccgcccggguccagccccuccgugcagugccggagcccccgcggcaagaacauccagggcgggaagacgcuguccgugagccagcuggagcuccaggacuccggcaccuggaccugcaccguccugcagaaccagaagaagguggaguucaagaucgacaucgugguccuggccuuccagaaggcgagcuccaucguguacaagaaggagggggagcaggucgaguucagcuucccccucgccuucacgguggagaagcugaccggcagcggggagcugugguggcaggccgagcgggccuccagcuccaagagcuggaucaccuucgaccucaagaacaaggagguguccgugaagcgcgucacccaggacccgaagcugcagaugggcaagaagcugccccuccaccugacgcugccccaggcgcucccccaguacgccggcagcgggaaccugacccuggcccucgaggccaagaccggcaagcugcaccaggaggugaaccugguggucaugcgggccacccagcuccagaagaaccugacgugcgaggugugggggccgaccucccccaagcugaugcucagccugaagcuggagaacaaggaggcgaagguguccaagcgcgagaaggccgucugggugcucaaccccgaggccggcauguggcagugccugcugagcgacuccgggcagguccugcucgagagcaacaucaaggugcugcccaccugguccaccccggugcagcccauggcccugaucguccucggcggcguggccgggcugcugcuguucaucggccuggggaucuucuucugcgugcggugccgccaccggcgccggcaggcggagcgcaugagccagaucaagcggcugcucuccgagaagaagacgugccagugcccccaccgcuuccagaagaccugcagccccaucuga

SEQ ID NO: 884 - RNA, 1377 nt, Artificial Sequence
  derived and/or modified sequence opt2 from CD4__Homo_sapiens__AAA35572
augaaccgcggcguccccuuccgccaccuccuccucguccuccagcucgcccuccuccccgccgccacccagggcaagaaggucguccucggcaagaagggcgacaccgucgagcucaccugcaccgccucccagaagaaguccauccaguuccacuggaagaacuccaaccagaucaagauccucggcaaccagggcuccuuccucaccaagggccccuccaagcucaacgaccgcgccgacucccgccgcucccucugggaccagggcaacuucccccucaucaucaagaaccucaagaucgaggacuccgacaccuacaucugcgaggucgaggaccagaaggaggagguccagcuccucgucuucggccucaccgccaacuccgacacccaccuccuccagggccagucccucacccucacccucgaguccccccccggcuccucccccuccguccagugccgcuccccccgcggcaagaacauccagggcggcaagacccucuccgucucccagcucgagcuccaggacuccggcaccuggaccugcaccguccuccagaaccagaagaaggucgaguucaagaucgacaucgucguccucgccuuccagaaggccuccuccaucgucuacaagaaggagggcgagcaggucgaguucuccuucccccucgccuucaccgucgagaagcucaccggcuccggcgagcucugguggcaggccgagcgcgccuccuccuccaaguccuggaucaccuucgaccucaagaacaaggaggucuccgucaagcgcgucacccaggaccccaagcuccagaugggcaagaagcucccccuccaccucacccucccccaggcccucccccaguacgccggcuccggcaaccucacccucgcccucgaggccaagaccggcaagcuccaccaggaggucaaccucgucgucaugcgcgccacccagcuccagaagaaccucaccugcgaggucuggggccccaccucccccaagcucaugcucucccucaagcucgagaacaaggaggccaaggucuccaagcgcgagaaggccgucuggguccucaaccccgaggccggcauguggcagugccuccucuccgacuccggccagguccuccucgaguccaacaucaagguccuccccaccugguccacccccguccagcccauggcccucaucguccucggcggcgucgccggccuccuccucuucaucggccucggcaucuucuucugcguccgcugccgccaccgccgccgccaggccgagcgcaugucccagaucaagcgccuccucuccgagaagaagaccugccagugcccccaccgcuuccagaagaccugcucccccaucuga

SEQ ID NO: 885 - RNA, 1377 nt, Artificial Sequence
  derived and/or modified sequence opt3 from CD4__Homo_sapiens__AAA35572
augaacagaggcgugcccuucaggcaucugcuccuuguccugcaguuggccuuacugccugcugcaacccaagggaagaaaguugugcuaggaaagaaaggugacacaguagagcucacuugcacggccagccagaagaaauccauccaguuucacuggaaaaauucuaaccagauuaagauacugggcaaucaagggucauuccuuaccaaaggaccaaguaagcugaacgaucgggcggacagccgccgauccuugugggaucagggcaauuuuccgcucaucauuaaaaaccugaagaucgaagacucugauacauacauuugugagguggaagaccagaaagaggaaguccagcugcucguguucgguuuaacugcuaauucggauacccaucugcuucaagggcagucauugacacugacccuagagagucccccuggaagcuccccaucuguucagugccguagccccagaggcaagaacauccagggcgggaagacucucuccgugucacaacuggagcuucaggacaguggaacauggaccuguacgguccugcagaaucaaaagaagguggaauuuaaaauagauaucguaguuuuggccuuccagaaggcaagcucuauuguguauaaaaaggagggugaacaggucgaguuuuccuucccucucgccuuuacuguggagaaacugaccggcucaggggaauuaugguggcaggcugagagggcaagcaguucuaaguccuggaucacauucgaccugaagaacaaagaagugagcgucaagcggguuacucaagauccaaaacuccagaugggaaagaaacuuccccugcacuugacccuaccucaggcccugccacaguacgcuggcucggguaaucucacacuggcccuugaggcgaagaccgggaagcugcaccaagaagugaacuugguagugaugcgcgcaacgcagcuccagaaaaaucugacuugcgaggucuggggaccgacaucucccaaguuaaugcugucccuaaaacucgagaacaaggaagccaaagugucaaagagagagaaggcuguuugggugcugaauccugaagccggcauguggcagugucuuuugagugacagcggccaaguccugcucgaguccaacauuaaagugcugccaaccuggucuacucccguacagccuauggcacuuaucguucugggagggguggcugguuugcuccuguuuauaggcuuagggauuuucuuuugcgucaggugucggcaucgccgaagacaggccgaaaggaugagccagaucaagcggcugcuaucagagaaaaagacaugccaauguccacaccguuuccagaaaaccugcagucccauuuga

SEQ ID NO: 886 - RNA, 1377 nt, Artificial Sequence
  derived and/or modified sequence opt4 from CD4__Homo_sapiens__AAA35572
augaacagaggcgugcccuucagacaccugcugcuggugcugcagcuggcccugcugcccgccgccacccagggcaagaagguggugcugggcaagaagggcgacaccguggagcugaccugcaccgccagccagaagaagagcauccaguuccacuggaagaacagcaaccagaucaagauccugggcaaccagggcagcuuccugaccaagggccccagcaagcugaacgacagagccgacagcagaagaagccugugggaccagggcaacuucccccugaucaucaagaaccugaagaucgaggacagcgacaccuacaucugcgagguggaggaccagaaggaggaggugcagcugcugguguucggccugaccgccaacagcgacacccaccugcugcagggccagagccugacccugacccuggagagcccccccggcagcagccccagcgugcagugcagaagccccagaggcaagaacauccagggcggcaagacccugagcgugagccagcuggagcugcaggacagcggcaccuggaccugcaccgugcugcagaaccagaagaagguggaguucaagaucgacaucguggugcuggccuuccagaaggccagcagcaucguguacaagaaggagggcgagcagguggaguucagcuucccccuggccuucaccguggagaagcugaccggcagcggcgagcugugguggcaggccgagagagccagcagcagcaagagcuggaucaccuucgaccugaagaacaaggaggugagcgugaagagagugacccaggaccccaagcugcagaugggcaagaagcugccccugcaccugacccugccccaggcccugccccaguacgccggcagcggcaaccugacccuggcccuggaggccaagaccggcaagcugcaccaggaggugaaccugguggugaugagagccacccagcugcagaagaaccugaccugcgagguguggggccccaccagccccaagcugaugcugagccugaagcuggagaacaaggaggccaaggugagcaagagagagaaggccgugugggugcugaaccccgaggccggcauguggcagugccugcugagcgacagcggccaggugcugcuggagagcaacaucaaggugcugcccaccuggagcacccccgugcagcccauggcccugaucgugcugggcggcguggccggccugcugcuguucaucggccugggcaucuucuucugcgugagaugcagacacagaagaagacaggccgagagaaugagccagaucaagagacugcugagcgagaagaagaccugccagugcccccacagauuccagaagaccugcagccccaucuga

SEQ ID NO: 887 - RNA, 1377 nt, Artificial Sequence
  derived and/or modified sequence opt5 from CD4__Homo_sapiens__AAA35572
augaacagaggcgugcccuuccggcaucugcuccugguccuucagcuggcccuccugccugcugccacccaagggaagaaaguugugcuuggaaagaaaggcgacacaguggagcugacgugcaccgcgagccagaagaaauccauccaguuucacuggaaaaauucuaaccagauuaagauccucgggaaucaaggcagcuuccugacaaaaggaccguccaagcugaacgaucgcgcugacucuagacggagccucugggaucaggggaauuuuccccugauuaucaaaaaccuuaagauugaagacuccgauaccuacaucugugaggucgaagaccagaaagaggaagugcagcugcucguuuucggacugacagccaauucugauacccaccuucugcaaggccagagccucacacugacccuggaguccccucccggcagcucuccuuccgugcagugccgcagccccagagggaagaacauccagggaggcaagacgcucucugucucccaacuggagcuucaggacagcgggaccuggacauguaccgugcugcagaaucaaaagaagguugaauuuaaaauugauaucgugguccucgccuuccagaaggcuucuuccauuguguauaaaaaggagggagaacagguggaguuuagcuucccucuggccuuuacagucgagaaacuuaccggcuccggggaacugugguggcaggcugagcgggccucuagcuccaagagcuggaucacguucgaccucaagaacaaagaaguuucugugaagcgcgugacacaagauccgaaacugcagaugggaaagaaacugccccuccaucugacccuuccucaggcgcugccccaguacgccggcuccggcaaucucacacuggcucuugaggccaagaccgggaagcugcaccaagaagucaaccucgugguuaugagagcuacccagcugcagaaaaaucugacaugcgagguguggggaccuacgagccccaagcucaugcugucucuuaaacuggagaacaaggaagccaaagucagcaagcgggagaaggcgguguggguucucaauccggaagccggcauguggcagugucugcuguccgacucugggcaagugcuucucgagagcaacauuaaaguccugccuaccugguccacacccgugcagccuauggcucugaucguccucggaggcguggccgggcugcuucuguuuauuggacucggcaucuucuuuugcguucgcuguagacaucggcgcagacaggcugaacggaugagccagaucaagcgccugcugucugagaaaaagaccugccaauguccccacagauuccagaaaacaugcucccccauuuga

SEQ ID NO: 888 - protein, 61 aa, Artificial Sequence
  CD52__Homo_sapiens__P31358
MKRFLFLLLTISLLVMVQIQTGLSGQNDTSQTSSPSASSNISGGIFLFFVANAIIHLFCFS

SEQ ID NO: 889 - RNA, 186 nt, Artificial Sequence
  CD52__Homo_sapiens__CAA44323
augaagcgcuuccucuuccuccuacucaccaucagccuccugguuaugguacagauacaaacuggacucucaggacaaaacgacaccagccaaaccagcagccccucagcauccagcaacauaagcggaggcauuuuccuuuucuucguggccaaugccauaauccaccucuucugcuucaguuga

SEQ ID NO: 890 - RNA, 186 nt, Artificial Sequence
  derived and/or modified sequence opt1 from CD52__Homo_sapiens__CAA44323
augaagcgcuuccuguuccuccugcugaccaucagccuccuggugaugguccagauccagaccggccuguccgggcagaacgacacgagccagaccuccagccccuccgccagcuccaacaucagcggcgggaucuuccucuucuucguggccaacgcgaucauccaccuguucugcuucuccuga

SEQ ID NO: 891 - RNA, 186 nt, Artificial Sequence
  derived and/or modified sequence opt2 from CD52__Homo_sapiens__CAA44323
augaagcgcuuccucuuccuccuccucaccaucucccuccucgucaugguccagauccagaccggccucuccggccagaacgacaccucccagaccuccucccccuccgccuccuccaacaucuccggcggcaucuuccucuucuucgucgccaacgccaucauccaccucuucugcuucuccuga

SEQ ID NO: 892 - RNA, 186 nt, Artificial Sequence
  derived and/or modified sequence opt3 from CD52__Homo_sapiens__CAA44323
augaagagauuccuguuucuccuucugaccaucagcuuguuagugaugguccagauucaaacaggccuguccgggcagaacgacacuucucagacgucaagucccagcgccuccucuaauauaucgggagguaucuuccuauuuuucguugcuaacgcaauuauccaccucuuuugcuucucauga

SEQ ID NO: 893 - RNA, 186 nt, Artificial Sequence
  derived and/or modified sequence opt4 from CD52__Homo_sapiens__CAA44323
augaagagauuccuguuccugcugcugaccaucagccugcuggugauggugcagauccagaccggccugagcggccagaacgacaccagccagaccagcagccccagcgccagcagcaacaucagcggcggcaucuuccuguucuucguggccaacgccaucauccaccuguucugcuucagcuga

SEQ ID NO: 894 - RNA, 186 nt, Artificial Sequence
  derived and/or modified sequence opt5 from CD52__Homo_sapiens__CAA44323
augaagagauuccuguuucuccugcuuaccaucagccugcucgugaugguccagauucaaacaggccuguccgggcagaacgacacgucucagaccagcucccccucugccagcuccaauaucucuggaggcauuuuccuuuucuuuguugcuaacgccaucauucaccuguuuugcuucagcuga

SEQ ID NO: 895 - protein, 61 aa, Artificial Sequence
  CD52__Homo_sapiens__Q6IBD0
MKRFLFLLLTISLLVMVQIQTGLSGQNDTSQTSSPSASSSMSGGIFLFFVANAIIHLFCFS

SEQ ID NO: 896 - RNA, 186 nt, Artificial Sequence
  CD52__Homo_sapiens__AAP35780
augaagcgcuuccucuuccuccuacucaccaucagccuccugguuaugguacagauacaaacuggacucucaggacaaaacgacaccagccaaaccagcagccccucagcauccagcagcaugagcggaggcauuuuccuuuucuucguggccaaugccauaauccaccucuucugcuucaguuag

SEQ ID NO: 897 - RNA, 186 nt, Artificial Sequence
  derived and/or modified sequence opt1 from CD52__Homo_sapiens__AAP35780
augaagcgcuuccuguuccuccugcugaccaucagccuccuggugaugguccagauccagaccggccuguccgggcagaacgacacgagccagaccuccagccccuccgccagcuccagcauguccggcgggaucuuccucuucuucguggccaacgcgaucauccaccuguucugcuucagcuga

SEQ ID NO: 898 - RNA, 186 nt, Artificial Sequence
  derived and/or modified sequence opt2 from CD52__Homo_sapiens__AAP35780
augaagcgcuuccucuuccuccuccucaccaucucccuccucgucaugguccagauccagaccggccucuccggccagaacgacaccucccagaccuccucccccuccgccuccuccuccauguccggcggcaucuuccucuucuucgucgccaacgccaucauccaccucuucugcuucuccuga

SEQ ID NO: 899 - RNA, 186 nt, Artificial Sequence
  derived and/or modified sequence opt3 from CD52__Homo_sapiens__AAP35780
augaagagauuccuguuucuccuucugaccaucagcuuguuagugaugguccagauucaaacaggccuguccgggcagaacgacacuucucagacgucaagucccagcgccuccucuucgaugucaggagguauauuccuauuuuucguugcuaaugcaaucauucaccucuuuugcuucagcuga

SEQ ID NO: 900 - RNA, 186 nt, Artificial Sequence
  derived and/or modified sequence opt4 from CD52__Homo_sapiens__AAP35780
augaagagauuccuguuccugcugcugaccaucagccugcuggugauggugcagauccagaccggccugagcggccagaacgacaccagccagaccagcagccccagcgccagcagcagcaugagcggcggcaucuuccuguucuucguggccaacgccaucauccaccuguucugcuucagcuga

SEQ ID NO: 901 - RNA, 186 nt, Artificial Sequence
  derived and/or modified sequence opt5 from CD52__Homo_sapiens__AAP35780
augaagagauuccuguuucuccugcuuaccaucagccugcucgugaugguccagauucaaacaggccuguccgggcagaacgacacgucucagaccagcucccccucugccagcuccucuaugagcggaggcaucuuccuuuucuuuguugcuaaugccauuauccaccuguuuugcuucuccuga

SEQ ID NO: 902 - protein, 61 aa, Artificial Sequence; identical to SEQ ID NO: 888
  CD52__Homo_sapiens__V9HWN9

SEQ ID NO: 903 - RNA, 186 nt, Artificial Sequence; identical to SEQ ID NO: 889
  CD52__Homo_sapiens__ACS44650

SEQ ID NO: 904 - RNA, 186 nt, Artificial Sequence; identical to SEQ ID NO: 890
  derived and/or modified sequence opt1 from CD52__Homo_sapiens__ACS44650

SEQ ID NO: 905 - RNA, 186 nt, Artificial Sequence; identical to SEQ ID NO: 891
  derived and/or modified sequence opt2 from CD52__Homo_sapiens__ACS44650

SEQ ID NO: 906 - RNA, 186 nt, Artificial Sequence; identical to SEQ ID NO: 892
  derived and/or modified sequence opt3 from CD52__Homo_sapiens__ACS44650

SEQ ID NO: 907 - RNA, 186 nt, Artificial Sequence; identical to SEQ ID NO: 893
  derived and/or modified sequence opt4 from CD52__Homo_sapiens__ACS44650

SEQ ID NO: 908 - RNA, 186 nt, Artificial Sequence; identical to SEQ ID NO: 894
  derived and/or modified sequence opt5 from CD52__Homo_sapiens__ACS44650

SEQ ID NO: 909 - protein, 317 aa, Artificial Sequence
  CD55__Homo_sapiens__B1AP15
MTVARPSVPAALPLLGELPRLLLLVLLCLPAVWGDCGLPPDVPNAQPALEGRTSFPEDTVITYKCEESFVKIPGEKDSVICLKGSQWSDIEEFCNQKSCPNPGEIRNGQIDVPGGILFGATISFSCNTGYKLFGSTSSFCLISGSSVQWSDPLPECREIYCPAPPQIDNGIIQGERDHYGYRQSVTYACNKGFTMIGEHSIYCTVNNDEGEWSGPPPECRGKSLTSKVPPTVQKPTTVNVPTTEVSPTSQKTTTKTTTPNAQATRSTPVSRTTKHFHETTPNKGSGTTSGTTRLLSGHTCFTLTGLLGTLVTMGLLT

SEQ ID NO: 910 - RNA, 954 nt, Artificial Sequence
  CD55__Homo_sapiens__EAW93489
augaccgucgcgcggccgagcgugcccgcggcgcugccccuccucggggagcugccccggcugcugcugcuggugcuguugugccugccggccguguggggugacuguggccuucccccagauguaccuaaugcccagccagcuuuggaaggccguacaaguuuucccgaggauacuguaauaacguacaaaugugaagaaagcuuugugaaaauuccuggcgagaaggacucagugaucugccuuaagggcagucaauggucagauauugaagaguucugcaaucagaaaucaugcccuaauccgggagaaauacgaaauggucagauugauguaccagguggcauauuauuuggugcaaccaucuccuucucauguaacacaggguacaaauuauuuggcucgacuucuaguuuuugucuuauuucaggcagcucuguccaguggagugacccguugccagagugcagagaaauuuauuguccagcaccaccacaaauugacaauggaauaauucaaggggaacgugaccauuauggauauagacagucuguaacguaugcauguaauaaaggauucaccaugauuggagagcacucuauuuauuguacugugaauaaugaugaaggagaguggaguggcccaccaccugaaugcagaggaaaaucucuaacuuccaaggucccaccaacaguucagaaaccuaccacaguaaauguuccaacuacagaagucucaccaacuucucagaaaaccaccacaaaaaccaccacaccaaaugcucaagcaacacggaguacaccuguuuccaggacaaccaagcauuuucaugaaacaaccccaaauaaaggaaguggaaccacuucagguacuacccgucuucuaucugggcacacguguuucacguugacagguuugcuugggacgcuaguaaccaugggcuugcugacuuag

SEQ ID NO: 911 - RNA, 954 nt, Artificial Sequence
  derived and/or modified sequence opt1 from CD55__Homo_sapiens__EAW93489
augaccguggcccgccccagcgucccggccgcgcugccccuccugggcgagcugccccggcuccugcugcucgugcugcugugccuccccgccguguggggcgacugcgggcugccgcccgacguccccaacgcccagcccgcccuggaggggcgcaccuccuucccggaggacacggugaucaccuacaagugcgaggagagcuucgugaagauccccggcgagaaggacuccgucaucugccucaaggggagccagugguccgacaucgaggaguucugcaaccagaaguccugccccaaccccggcgagauccggaacggccagaucgacgugcccgggggcauccuguucggggccaccaucagcuucagcugcaacaccggcuacaagcuguucggguccacgagcuccuucugccucaucagcggcuccagcgugcagugguccgacccccugcccgagugccgcgagaucuacugccccgcgccgccccagaucgacaacggcaucauccagggggagcgggaccacuacggcuaccgccagagcgucaccuacgccugcaacaagggguucaccaugaucggcgagcacuccaucuacugcaccgugaacaacgacgagggcgaguggagcgggccgcccccggagugccggggcaagucccugacgagcaaggugccgcccaccguccagaagcccaccaccgugaacgugcccacgaccgaggucagccccaccucccagaagaccacgaccaagaccaccacgcccaacgcccaggccacccgcagcacccccgugucccggaccacgaagcacuuccacgagaccaccccgaacaaggggagcggcaccacguccgggaccacccgccuccugagcggccacacgugcuucacccugaccggccuccuggggacccuggugaccaugggccuccugacguga

SEQ ID NO: 912 - RNA, 954 nt, Artificial Sequence
  derived and/or modified sequence opt2 from CD55__Homo_sapiens__EAW93489
augaccgucgcccgccccuccguccccgccgcccucccccuccucggcgagcucccccgccuccuccuccucguccuccucugccuccccgccgucuggggcgacugcggccucccccccgacguccccaacgcccagcccgcccucgagggccgcaccuccuuccccgaggacaccgucaucaccuacaagugcgaggaguccuucgucaagauccccggcgagaaggacuccgucaucugccucaagggcucccagugguccgacaucgaggaguucugcaaccagaaguccugccccaaccccggcgagauccgcaacggccagaucgacguccccggcggcauccucuucggcgccaccaucuccuucuccugcaacaccggcuacaagcucuucggcuccaccuccuccuucugccucaucuccggcuccuccguccagugguccgacccccuccccgagugccgcgagaucuacugccccgcccccccccagaucgacaacggcaucauccagggcgagcgcgaccacuacggcuaccgccaguccgucaccuacgccugcaacaagggcuucaccaugaucggcgagcacuccaucuacugcaccgucaacaacgacgagggcgagugguccggccccccccccgagugccgcggcaagucccucaccuccaaggucccccccaccguccagaagcccaccaccgucaacguccccaccaccgaggucucccccaccucccagaagaccaccaccaagaccaccacccccaacgcccaggccacccgcuccacccccgucucccgcaccaccaagcacuuccacgagaccacccccaacaagggcuccggcaccaccuccggcaccacccgccuccucuccggccacaccugcuucacccucaccggccuccucggcacccucgucaccaugggccuccucaccuga

SEQ ID NO: 913 - RNA, 954 nt, Artificial Sequence
  derived and/or modified sequence opt3 from CD55__Homo_sapiens__EAW93489
augaccguggccagacccagcgucccugcugcacugccacuccuuggcgagcugccgagguuguuacugcuaguucuccugugccuucccgccguguggggagacugugggcugccuccagauguacccaacgcgcagccugcuuuggaaggucggacauccuucccagaggacacugugaucacguacaagugcgaagagucuuuugucaaaauucccggcgaaaaggauucagugauaugucucaaagggagucaauggagcgacaucgaggaguucugcaaucagaaguccuguccuaacccaggagaaauucgcaauggccagaucgauguuccgggugggauucuguuuggagccaccaucucuuucucgugcaacacaggcuauaaacuguuuggcucaacuagcaguuucugucucauauccgggucuagcgugcagugguccgaccccuuaccugagugccgagaaaucuacuguccagcacccccucaaauugauaauggaaucauucagggugagcgugaccacuauggcuacagacagucagucaccuaugccugcaacaagggguuuacaaugaucggagagcauaguauauacuguaccgugaauaacgaugaaggcgaguggagcgguccacccccggaaugcagggggaagucucugacuuccaaaguaccucccacaguucagaagccaaccacggugaaugucccuacuaccgaggugucacccacaagccagaaaacuaccacaaagaccacgacuccaaacgcucaagcaacacggaguacccccgugucucgcacuacaaaacacuuccaugaaaccacgccuaauaagggauccggcaccacaagcggcacuaccagacuuuugucggggcacacaugcuuuacucugaccggacuacucgguacacuggucaccaugggccuucugacuuga

SEQ ID NO: 914 - RNA, 954 nt, Artificial Sequence
  derived and/or modified sequence opt4 from CD55__Homo_sapiens__EAW93489
augaccguggccagacccagcgugcccgccgcccugccccugcugggcgagcugcccagacugcugcugcuggugcugcugugccugcccgccguguggggcgacugcggccugccccccgacgugcccaacgcccagcccgcccuggagggcagaaccagcuuccccgaggacaccgugaucaccuacaagugcgaggagagcuucgugaagauccccggcgagaaggacagcgugaucugccugaagggcagccaguggagcgacaucgaggaguucugcaaccagaagagcugccccaaccccggcgagaucagaaacggccagaucgacgugcccggcggcauccuguucggcgccaccaucagcuucagcugcaacaccggcuacaagcuguucggcagcaccagcagcuucugccugaucagcggcagcagcgugcaguggagcgacccccugcccgagugcagagagaucuacugccccgcccccccccagaucgacaacggcaucauccagggcgagagagaccacuacggcuacagacagagcgugaccuacgccugcaacaagggcuucaccaugaucggcgagcacagcaucuacugcaccgugaacaacgacgagggcgaguggagcggccccccccccgagugcagaggcaagagccugaccagcaaggugccccccaccgugcagaagcccaccaccgugaacgugcccaccaccgaggugagccccaccagccagaagaccaccaccaagaccaccacccccaacgcccaggccaccagaagcacccccgugagcagaaccaccaagcacuuccacgagaccacccccaacaagggcagcggcaccaccagcggcaccaccagacugcugagcggccacaccugcuucacccugaccggccugcugggcacccuggugaccaugggccugcugaccuga

SEQ ID NO: 915 - RNA, 954 nt, Artificial Sequence
  derived and/or modified sequence opt5 from CD55__Homo_sapiens__EAW93489
augaccguggccagacccagcgucccugcugcccugccgcuccugggcgagcuuccccggcugcuccugcuuguucugcucugccugccugcgguguggggcgacuguggacugcccccugaugugcccaacgcucagccugcccucgaaggccgcacauccuucccggaggacacggucaucaccuacaagugcgaagagucuuuugugaaaauucccggggaaaaggauagcguuaucugucugaaaggaucccaauggucugacauugaggaguucugcaaucaaaagagcuguccuaaccccggcgaaaucagaaaugggcagauugaugugccuggaggcauccuuuuuggcgccacaaucuccuucucuugcaacaccggguauaaacuguuuggaagcacauccagcuucugucucauuucuggcuccagcguccaguggucugacccccugccggagugccgggaaaucuacuguccugcucccccucaaauugauaaugggaucauucagggagagcgcgaccacuauggcuacagacaguccgugaccuaugccugcaacaagggguuuacaaugaucggagagcauagcauuuacuguaccguuaauaacgaugaaggcgaguggucugggcccccucccgaaugccgggggaagucccuuacgagcaaagugccgcccaccguccagaagccuacaaccgugaaugugcccacaaccgaggucuccccuacgucucagaaaacaaccacaaagaccaccacacccaacgcucaggccacgcgcagcaccccgguuuccagaacaaccaaacacuuccaugaaacaaccccuaauaagggaagcggcacgacaucugggaccacccggcugcucuccggacacacaugcuuuacccugacaggccugcucgggacgcuggugaccaugggacuucugacauga

SEQ ID NO: 916 - protein, 293 aa, Artificial Sequence [sequence omitted]

SEQ ID NO: 917 - RNA, 882 nt, Artificial Sequence
  CD55__Homo_sapiens__EAW93497
augauuggagagcacucuauuuauuguacugugaauaaugaugaaggagaguggaguggcccaccaccugaaugcagaggaaaaucucuaacuuccaaggucccaccaacaguucagaaaccuaccacaguaaauguuccaacuacagaagucucaccaacuucucagaaaaccaccacaaaaaccaccacaccaaaugcucaagguacagagacuccaucaguucuucaaaaacacaccacagaaaauguuucagcuacaagaaccccaccaacuccucagaaacccaccacaguaaaugucccagcuacaauagucacaccaacaccucagaaacccaccacaauaaauguuccagcuacaggagucucaucaacaccucaaagacacaccauaguaaauguuucagcuacaggaacccuaccaacucuucagaaacccaccagagcaaaugauucagccaccaaauccccagcagcagcucagacaucuuucauaucaaaaacccuaucuacaaagaccccuucugcagcucagaaucccaugaugacaaaugcuucugcuacacaggccacacuaacagcccaaaaauucaccacagcaaaaguugcauuuacgcagaguccuucagcagcacguaaguccacuaauguacauuccccagugacuaauggucucaagaguacacaaagauucccuucugcucauauuacagcaacacggaguacaccuguuuccaggacaaccaagcauuuucaugaaacaaccccaaauaaaggaaguggaaccacuucagguacuacccgucuucuaucugggcacacguguuucacguugacagguuugcuugggacgcuaguaaccaugggcuugcugacuuag

SEQ ID NO: 918 - RNA, 882 nt, Artificial Sequence
  derived and/or modified sequence opt1 from CD55__Homo_sapiens__EAW93497
augaucggcgagcacagcaucuacugcaccgugaacaacgacgagggggagugguccgggcccccgcccgagugccgcggcaagagccugaccuccaaggucccgcccacggugcagaagcccaccaccgugaacguccccaccacggaggugagccccaccucccagaagaccaccacgaagaccaccacccccaacgcccagggcacggagaccccgagcgugcuccagaagcacaccaccgagaacgucuccgccacgcggaccccgcccacgccccagaagcccaccaccgugaacgugcccgcgaccaucgucacccccacgccccagaagccgaccaccaucaacgugcccgccaccggggugagcuccacgccccagcgccacaccaucgucaacgugagcgccaccggcacccugcccacccugcagaagccgacgcgggccaacgacuccgccaccaagagccccgcggccgcccagaccuccuucaucagcaagacccucuccacgaagacccccagcgccgcgcagaaccccaugaugaccaacgccuccgccacccaggccacccugacggcccagaaguucaccaccgcgaagguggccuucacccagagcccguccgccgcccgcaagagcacgaacguccacagccccgugaccaacggccugaaguccacccagcgguuccccagcgcccacaucaccgcgacgcgcuccacccccgugagccggaccaccaagcacuuccacgagacgaccccgaacaagggguccggcaccaccagcgggacgacccgccuccuguccggccacacgugcuucacccugaccgggcuccugggcacccuggucaccaugggccuccugaccuga

SEQ ID NO: 919 - RNA, 882 nt, Artificial Sequence
  derived and/or modified sequence opt2 from CD55__Homo_sapiens__EAW93497
augaucggcgagcacuccaucuacugcaccgucaacaacgacgagggcgagugguccggccccccccccgagugccgcggcaagucccucaccuccaaggucccccccaccguccagaagcccaccaccgucaacguccccaccaccgaggucucccccaccucccagaagaccaccaccaagaccaccacccccaacgcccagggcaccgagacccccuccguccuccagaagcacaccaccgagaacgucuccgccacccgcaccccccccaccccccagaagcccaccaccgucaacguccccgccaccaucgucacccccaccccccagaagcccaccaccaucaacguccccgccaccggcgucuccuccaccccccagcgccacaccaucgucaacgucuccgccaccggcacccuccccacccuccagaagcccacccgcgccaacgacuccgccaccaagucccccgccgccgcccagaccuccuucaucuccaagacccucuccaccaagacccccuccgccgcccagaaccccaugaugaccaacgccuccgccacccaggccacccucaccgcccagaaguucaccaccgccaaggucgccuucacccagucccccuccgccgcccgcaaguccaccaacguccacucccccgucaccaacggccucaaguccacccagcgcuuccccuccgcccacaucaccgccacccgcuccacccccgucucccgcaccaccaagcacuuccacgagaccacccccaacaagggcuccggcaccaccuccggcaccacccgccuccucuccggccacaccugcuucacccucaccggccuccucggcacccucgucaccaugggccuccucaccuga

SEQ ID NO: 920 - RNA, 882 nt, Artificial Sequence
  derived and/or modified sequence opt3 from CD55__Homo_sapiens__EAW93497
augaucggcgagcacagcauuuacugcaccgugaacaaugacgaaggggagugguccggacccccuccagaauguagagguaagucucugacaucaaaagucccgcccacuguucagaagccuacgaccgugaacguaccaacaacugaggugagucccaccagccagaaaacaaccacuaagacaaccacgccuaaugcccaaggcacugaaaccccauccguccuccagaaacauacaacugagaacgugucugcuaccaggacacccccuaccccacagaagccgacgacuguuaaugugcccgcaacaauagucaccccuacuccacaaaagcccacaaccaucaacgugccugccacggggguaucgucaaccccacagcggcacacaauuguuaaugugagcgcgacuggaacccuucccacacugcagaaaccgacucgcgcuaacgauagugccaccaaguccccugcagccgcucagacaucuuucaucagcaaaaccuuguccacuaagacgcccucagcagcccaaaauccaaugaugacaaacgcuagugccacccaggcgacuuuaaccgcacagaaauuuacaaccgccaaggucgcuuucacucagagcccuucugccgcacgaaaguccacaaaugugcauucacccgugacgaacggccugaaaagcacccaacguuuuccaagugcucacauuacugccacaagaucuacccccgucuccaggacaacuaagcauuuccacgagaccacgccuaauaaagguagcgggaccacaucgggaacuacccggcuacucucuggccacacaugcuuuacucugaccggccuucuggggacguugguuacaaugggacuccugaccuga

SEQ ID NO: 921 - RNA, 882 nt, Artificial Sequence
  derived and/or modified sequence opt4 from CD55__Homo_sapiens__EAW93497
augaucggcgagcacagcaucuacugcaccgugaacaacgacgagggcgaguggagcggccccccccccgagugcagaggcaagagccugaccagcaaggugccccccaccgugcagaagcccaccaccgugaacgugcccaccaccgaggugagccccaccagccagaagaccaccaccaagaccaccacccccaacgcccagggcaccgagacccccagcgugcugcagaagcacaccaccgagaacgugagcgccaccagaaccccccccaccccccagaagcccaccaccgugaacgugcccgccaccaucgugacccccaccccccagaagcccaccaccaucaacgugcccgccaccggcgugagcagcaccccccagagacacaccaucgugaacgugagcgccaccggcacccugcccacccugcagaagcccaccagagccaacgacagcgccaccaagagccccgccgccgcccagaccagcuucaucagcaagacccugagcaccaagacccccagcgccgcccagaaccccaugaugaccaacgccagcgccacccaggccacccugaccgcccagaaguucaccaccgccaagguggccuucacccagagccccagcgccgccagaaagagcaccaacgugcacagccccgugaccaacggccugaagagcacccagagauuccccagcgcccacaucaccgccaccagaagcacccccgugagcagaaccaccaagcacuuccacgagaccacccccaacaagggcagcggcaccaccagcggcaccaccagacugcugagcggccacaccugcuucacccugaccggccugcugggcacccuggugaccaugggccugcugaccuga

SEQ ID NO: 922 - RNA, 882 nt, Artificial Sequence
  derived and/or modified sequence opt5 from CD55__Homo_sapiens__EAW93497
augaucggcgagcacagcauuuacugcaccgugaacaaugacgaaggggagugguccggacccccuccggaauguagaggcaagucucugacaagcaaaguucccccuacgguccagaagcccaccacagugaacgugccuaccacagaggucucccccaccucucaaaagacaaccacgaagaccacaaccccuaaugcccaggggacagaaaccccgagcgugcuccagaaacauacgacagagaacguuuccgcuacccggacacccccuacaccccagaagccuaccaccgugaauguccccgccacgaucgugaccccgacaccucaaaagcccaccacaauuaacguuccugcgaccggagugucuagcacgccccagcgccacacaaucgucaauguguccgcuaccggcacccugcccacacuucagaaaccuaccagagccaacgauagcgccacaaagucuccggcugccgcucagacguccuucauuagcaaaacccugucuacaaagacccccuccgccgcgcaaaauccuaugaugacaaacgccagcgcuacccaggccacgcucaccgcucagaaauuuacaaccgccaagguggcguucacacagucucccuccgccgcucggaaaagcaccaauguccauuccccuguuacgaacgggcugaaaucuacacaacgcuuucccagcgcccacaucaccgcuacaagauccaccccggugagccggaccacaaagcauuuccacgagacgaccccuaauaaaggaucuggcacaaccuccggcacaacccgccuucugagcgggcacacgugcuuuacacucaccggacugcugggcacccucgugacaauggggcugcuuaccuga

SEQ ID NO: 923 - protein, 267 aa, Artificial Sequence [sequence omitted]

SEQ ID NO: 924 - RNA, 804 nt, Artificial Sequence
  CD55__Homo_sapiens__EAW93493
augauuggagagcacucuauuuauuguacugugaauaaugaugaaggagaguggaguggcccaccaccugaaugcagaggaaaaucucuaacuuccaaggucccaccaacaguucagaaaccuaccacaguaaauguuccaacuacagaagucucaccaacuucucagaaaaccaccacaaaaaccaccacaccaaaugcucaagguacagagacuccaucaguucuucaaaaacacaccacagaaaauguuucagcuacaagaaccccaccaacuccucagaaacccaccacaguaaaugucccagcuacaauagucacaccaacaccucagaaacccaccacaauaaauguuccagcuacaggagucucaucaacaccucaaagacacaccauaguaaauguuucagcuacaggaacccuaccaacucuucagaaacccaccagagcaaaugauucagccaccaaauccccagcagcagcucagacaucuuucauaucaaaaacccuaucuacaaagaccccuucugcagcucagaaucccaugaugacaaaugcuucugcuacacaggccacacuaacagcccaaaaauucaccacagcaaaaguugcauuuacgcagaguccuucagcagcaccaacacggaguacaccuguuuccaggacaaccaagcauuuucaugaaacaaccccaaauaaaggaaguggaaccacuucagguacuacccgucuucuaucugggcacacguguuucacguugacagguuugcuugggacgcuaguaaccaugggcuugcugacuuag

SEQ ID NO: 925 - RNA, 804 nt, Artificial Sequence
  derived and/or modified sequence opt1 from CD55__Homo_sapiens__EAW93493
augaucggcgagcacagcaucuacugcaccgugaacaacgacgagggggagugguccgggcccccgcccgagugccgcggcaagagccugaccuccaaggucccgcccacggugcagaagcccaccaccgugaacguccccaccacggaggugagccccaccucccagaagaccaccacgaagaccaccacccccaacgcccagggcacggagaccccgagcgugcuccagaagcacaccaccgagaacgucuccgccacgcggaccccgcccacgccccagaagcccaccaccgugaacgugcccgcgaccaucgucacccccacgccccagaagccgaccaccaucaacgugcccgccaccggggugagcuccacgccccagcgccacaccaucgucaacgugagcgccaccggcacccugcccacccugcagaagccgacgcgggccaacgacuccgccaccaagagccccgcggccgcccagaccuccuucaucagcaagacccucuccacgaagacccccagcgccgcgcagaaccccaugaugaccaacgccuccgccacccaggccacccugacggcccagaaguucaccaccgcgaagguggccuucacccagagcccguccgccgcccccacgcgcagcacccccgucagccggaccaccaagcacuuccacgagacgacccccaacaagggcuccgggaccaccagcggcacgacccgccugcucuccgggcacacgugcuucacccugaccggccugcucgggacccuggugaccaugggccugcucaccuga

SEQ ID NO: 926 - RNA, 804 nt, Artificial Sequence
  derived and/or modified sequence opt2 from CD55__Homo_sapiens__EAW93493
augaucggcgagcacuccaucuacugcaccgucaacaacgacgagggcgagugguccggccccccccccgagugccgcggcaagucccucaccuccaaggucccccccaccguccagaagcccaccaccgucaacguccccaccaccgaggucucccccaccucccagaagaccaccaccaagaccaccacccccaacgcccagggcaccgagacccccuccguccuccagaagcacaccaccgagaacgucuccgccacccgcaccccccccaccccccagaagcccaccaccgucaacguccccgccaccaucgucacccccaccccccagaagcccaccaccaucaacguccccgccaccggcgucuccuccaccccccagcgccacaccaucgucaacgucuccgccaccggcacccuccccacccuccagaagcccacccgcgccaacgacuccgccaccaagucccccgccgccgcccagaccuccuucaucuccaagacccucuccaccaagacccccuccgccgcccagaaccccaugaugaccaacgccuccgccacccaggccacccucaccgcccagaaguucaccaccgccaaggucgccuucacccagucccccuccgccgcccccacccgcuccacccccgucucccgcaccaccaagcacuuccacgagaccacccccaacaagggcuccggcaccaccuccggcaccacccgccuccucuccggccacaccugcuucacccucaccggccuccucggcacccucgucaccaugggccuccucaccuga

SEQ ID NO: 927 - RNA, 804 nt, Artificial Sequence
  derived and/or modified sequence opt3 from CD55__Homo_sapiens__EAW93493
augaucggcgagcacagcauuuacugcaccgugaacaaugacgaaggggagugguccggacccccuccagaauguagagguaagucucugacaucaaaagucccgcccacuguucagaagccuacgaccgugaacguaccaacaacugaggugagucccaccagccagaaaacaaccacuaagacaaccacgccuaaugcccaaggcacugaaaccccauccguccuccagaaacauacaacugagaacgugucugcuaccaggacacccccuaccccacagaagccgacgacuguuaaugugcccgcaacaauagucaccccuacuccacaaaagcccacaaccaucaacgugccugccacggggguaucgucaaccccacagcggcacacaauuguuaaugugagcgcgacuggaacccuucccacacugcagaaaccgacucgcgcuaacgauagugccaccaaguccccugcagccgcucagacaucuuucaucagcaaaaccuuguccacuaagacgcccucagcagcccaaaauccaaugaugacaaacgcuagugccacccaggcgacuuuaaccgcacagaaauuuacaaccgccaaggucgcuuucacucagagcccuucugccgcacccacacgauccacgccagugucacguaccacuaagcauuuucacgagacaacccccaauaaaggcagcgguacaaccagugggacuacgagacugcuaucuggacauaccugcuucacacucacuggccugcuuggcacccuggugacaaugggguugcucacuuga

SEQ ID NO: 928 - RNA, 804 nt, Artificial Sequence
  derived and/or modified sequence opt4 from CD55__Homo_sapiens__EAW93493
augaucggcgagcacagcaucuacugcaccgugaacaacgacgagggcgaguggagcggccccccccccgagugcagaggcaagagccugaccagcaaggugccccccaccgugcagaagcccaccaccgugaacgugcccaccaccgaggugagccccaccagccagaagaccaccaccaagaccaccacccccaacgcccagggcaccgagacccccagcgugcugcagaagcacaccaccgagaacgugagcgccaccagaaccccccccaccccccagaagcccaccaccgugaacgugcccgccaccaucgugacccccaccccccagaagcccaccaccaucaacgugcccgccaccggcgugagcagcaccccccagagacacaccaucgugaacgugagcgccaccggcacccugcccacccugcagaagcccaccagagccaacgacagcgccaccaagagccccgccgccgcccagaccagcuucaucagcaagacccugagcaccaagacccccagcgccgcccagaaccccaugaugaccaacgccagcgccacccaggccacccugaccgcccagaaguucaccaccgccaagguggccuucacccagagccccagcgccgcccccaccagaagcacccccgugagcagaaccaccaagcacuuccacgagaccacccccaacaagggcagcggcaccaccagcggcaccaccagacugcugagcggccacaccugcuucacccugaccggccugcugggcacccuggugaccaugggccugcugaccuga

SEQ ID NO: 929 - RNA, 804 nt, Artificial Sequence
  derived and/or modified sequence opt5 from CD55__Homo_sapiens__EAW93493
augaucggcgagcacagcauuuacugcaccgugaacaaugacgaaggggagugguccggacccccuccggaauguagaggcaagucucugacaagcaaaguucccccuacgguccagaagcccaccacagugaacgugccuaccacagaggucucccccaccucucagaaaacaaccacgaagaccacaaccccuaaugcccaagggacagaaaccccgagcgugcuccagaaacauacgacagagaacguuuccgcuacccggacacccccuacaccccagaagccuaccaccgugaauguccccgccacgaucgugaccccgacaccucaaaagcccaccacaauuaacguuccugcgaccggagugucuagcacgccccagcgccacacaaucgucaauguguccgcuaccggcacccugcccacacuucagaaaccuaccagagccaacgauagcgccacaaagucuccggcugccgcucagacguccuucauuagcaaaacccugucuacaaagacccccuccgccgcgcaaaauccuaugaugacaaacgccagcgcuacccaggccacgcucaccgcucagaaauuuacaaccgccaagguggcguucacacagucucccuccgccgcuccuacccggagcacgcccgucucccgcacaaccaagcauuuucacgagacaaccccgaauaaagggucuggaaccacaagcggcacgaccagacugcuuuccggccauacaugcuucacccugacagggcuccugggaacccugguuacgaugggccuccugacauga

SEQ ID NO: 930 - protein, 381 aa, Artificial Sequence
  CD55__Homo_sapiens__P08174
MTVARPSVPAALPLLGELPRLLLLVLLCLPAVWGDCGLPPDVPNAQPALEGRTSFPEDTVITYKCEESFVKIPGEKDSVICLKGSQWSDIEEFCNRSCEVPTRLNSASLKQPYITQNYFPVGTVVEYECRPGYRREPSLSPKLTCLQNLKWSTAVEFCKKKSCPNPGEIRNGQIDVPGGILFGATISFSCNTGYKLFGSTSSFCLISGSSVQWSDPLPECREIYCPAPPQIDNGIIQGERDHYGYRQSVTYACNKGFTMIGEHSIYCTVNNDEGEWSGPPPECRGKSLTSKVPPTVQKPTTVNVPTTEVSPTSQKTTTKTTTPNAQATRSTPVSRTTKHFHETTPNKGSGTTSGTTRLLSGHTCFTLTGLLGTLVTMGLLT

SEQ ID NO: 931 - RNA, 1146 nt, Artificial Sequence
  CD55__Homo_sapiens__AAA52168
augaccgucgcgcggccgagcgugcccgcggcgcugccccuccucggggagcugccccggcugcugcugcuggugcuguugugccugccggccguguggggugacuguggccuucccccagauguaccuaaugcccagccagcuuuggaaggccguacaaguuuucccgaggauacuguaauaacguacaaaugugaagaaagcuuugugaaaauuccuggcgagaaggacucagugaucugccuuaagggcagucaauggucagauauugaagaguucugcaaucguagcugcgaggugccaacaaggcuaaauucugcaucccucaaacagccuuauaucacucagaauuauuuuccagucgguacuguuguggaauaugagugccguccagguuacagaagagaaccuucucuaucaccaaaacuaacuugccuucagaauuuaaaaugguccacagcagucgaauuuuguaaaaagaaaucaugcccuaauccgggagaaauacgaaauggucagauugauguaccagguggcauauuauuuggugcaaccaucuccuucucauguaacacaggguacaaauuauuuggcucgacuucuaguuuuugucuuauuucaggcagcucuguccaguggagugacccguugccagagugcagagaaauuuauuguccagcaccaccacaaauugacaauggaauaauucaaggggaacgugaccauuauggauauagacagucuguaacguaugcauguaauaaaggauucaccaugauuggagagcacucuauuuauuguacugugaauaaugaugaaggagaguggaguggcccaccaccugaaugcagaggaaaaucucuaacuuccaaggucccaccaacaguucagaaaccuaccacaguaaauguuccaacuacagaagucucaccaacuucucagaaaaccaccacaaaaaccaccacaccaaaugcucaagcaacacggaguacaccuguuuccaggacaaccaagcauuuucaugaaacaaccccaaauaaaggaaguggaaccacuucagguacuacccgucuucuaucugggcacacguguuucacguugacagguuugcuugggacgcuaguaaccaugggcuugcugacuuag

SEQ ID NO: 932 - RNA, 1146 nt, Artificial Sequence
  derived and/or modified sequence opt1 from CD55__Homo_sapiens__AAA52168
augaccguggcccgccccagcgucccggccgcgcugccccuccugggcgagcugccccggcuccugcugcucgugcugcugugccuccccgccguguggggcgacugcgggcugccgcccgacguccccaacgcccagcccgcccuggaggggcgcaccuccuucccggaggacacggugaucaccuacaagugcgaggagagcuucgugaagauccccggcgagaaggacuccgucaucugccucaaggggagccagugguccgacaucgaggaguucugcaaccggagcugcgaggugcccacccgccugaacuccgccagccugaagcagcccuacaucacccagaacuacuucccggugggcacggucguggaguacgagugccggcccggcuaccgccgggagcccucccucagccccaagcugaccugccugcagaaccucaagugguccaccgcgguggaguucugcaagaagaaguccugcccgaaccccggggagauccgcaacggccagaucgacguccccgggggcauccuguucggggccaccaucagcuucagcugcaacacgggcuacaagcuguucggcuccaccagcuccuucugccucaucagcggguccagcgugcaguggagcgacccccugccggagugccgggagaucuacugccccgccccgccccagaucgacaacggcaucauccagggggagcgcgaccacuacggcuaccggcaguccgugaccuacgccugcaacaagggcuucaccaugaucggggagcacagcaucuacugcacggucaacaacgacgagggcgagugguccgggcccccgcccgagugccgcggcaagagccugaccuccaaggugccgcccaccgugcagaagcccaccacggucaacgugcccaccaccgaggugagccccaccucccagaagacgaccaccaagaccacgacccccaacgcgcaggccacccggagcacccccgucucccgcacgaccaagcacuuccacgagaccacccccaacaaggggagcggcacgaccuccggcaccacccggcuccugagcgggcacacgugcuucacccugaccggccuccuggggacccuggugaccaugggccuccugacguga

SEQ ID NO: 933 - RNA, 1146 nt, Artificial Sequence
  derived and/or modified sequence opt2 from CD55__Homo_sapiens__AAA52168
augaccgucgcccgccccuccguccccgccgcccucccccuccucggcgagcucccccgccuccuccuccucguccuccucugccuccccgccgucuggggcgacugcggccucccccccgacguccccaacgcccagcccgcccucgagggccgcaccuccuuccccgaggacaccgucaucaccuacaagugcgaggaguccuucgucaagauccccggcgagaaggacuccgucaucugccucaagggcucccagugguccgacaucgaggaguucugcaaccgcuccugcgagguccccacccgccucaacuccgccucccucaagcagcccuacaucacccagaacuacuuccccgucggcaccgucgucgaguacgagugccgccccggcuaccgccgcgagcccucccucucccccaagcucaccugccuccagaaccucaagugguccaccgccgucgaguucugcaagaagaaguccugccccaaccccggcgagauccgcaacggccagaucgacguccccggcggcauccucuucggcgccaccaucuccuucuccugcaacaccggcuacaagcucuucggcuccaccuccuccuucugccucaucuccggcuccuccguccagugguccgacccccuccccgagugccgcgagaucuacugccccgcccccccccagaucgacaacggcaucauccagggcgagcgcgaccacuacggcuaccgccaguccgucaccuacgccugcaacaagggcuucaccaugaucggcgagcacuccaucuacugcaccgucaacaacgacgagggcgagugguccggccccccccccgagugccgcggcaagucccucaccuccaaggucccccccaccguccagaagcccaccaccgucaacguccccaccaccgaggucucccccaccucccagaagaccaccaccaagaccaccacccccaacgcccaggccacccgcuccacccccgucucccgcaccaccaagcacuuccacgagaccacccccaacaagggcuccggcaccaccuccggcaccacccgccuccucuccggccacaccugcuucacccucaccggccuccucggcacccucgucaccaugggccuccucaccuga

SEQ ID NO: 934 - RNA, 1146 nt, Artificial Sequence
  derived and/or modified sequence opt3 from CD55__Homo_sapiens__AAA52168
augaccguggccagacccagcgucccugcugcacugccacuccuuggcgagcugccgagguuguuacugcuaguucuccugugccuucccgccguguggggagacugugggcugccuccagauguacccaacgcgcagccugcuuuggaaggucggacauccuucccagaggacacugugaucacguacaagugcgaagagucuuuugucaaaauucccggcgaaaaggauucagugauaugucucaaagggagucaauggagcgacaucgaggaguucugcaaucgcuccugugaaguuccuacccgacugaacucugccucgcugaagcagccauauauuacacagaauuacuuuccggugggaacugucguggaguaugaaugccgucccggcuacagaagggagccuucacucagcccaaaauuaaccugucugcagaaccuuaaguggaguacagcaguagaguucugcaagaaaaaguccugucccaauccuggugaaauccggaacgggcaaauugauguuccaggaggcaucuuguuuggcgccaccauaucuuucagcugcaauacuggguauaaacuguuuggauccacaucaaguuucugucuaaucagcgguucuuccgugcaguggucagacccccucccggagugccgcgaaauuuacugcccugcucccccacagaucgauaacggcauuauccagggggagagagaccacuauggauacaggcaaagcgucaccuacgcauguaauaagggcuuuacgaugauaggugaacauaguauuuauugcacugugaacaaugaugagggggaguggucuggaccucccccagaaugucggggcaaaucccugaccagcaaggugcccccuacaguccagaagccaacuaccguuaacgugccgacaaccgagguaucgcccacgucucagaaaacuacaaccaagacuacaaccccuaaugcccaggcuacgcgcuccaccccagugucacgaacaacuaaacacuuccaugaaaccacacccaacaagggcagugggacuaccagcggaacaaccagacuucuguccggucacacuugcuuuacguugacaggccuccuggggaccuuagucacuaugggacugcucaccuga

SEQ ID NO: 935 - RNA, 1146 nt, Artificial Sequence
  derived and/or modified sequence opt4 from CD55__Homo_sapiens__AAA52168
augaccguggccagacccagcgugcccgccgcccugccccugcugggcgagcugcccagacugcugcugcuggugcugcugugccugcccgccguguggggcgacugcggccugccccccgacgugcccaacgcccagcccgcccuggagggcagaaccagcuuccccgaggacaccgugaucaccuacaagugcgaggagagcuucgugaagauccccggcgagaaggacagcgugaucugccugaagggcagccaguggagcgacaucgaggaguucugcaacagaagcugcgaggugcccaccagacugaacagcgccagccugaagcagcccuacaucacccagaacuacuuccccgugggcaccgugguggaguacgagugcagacccggcuacagaagagagcccagccugagccccaagcugaccugccugcagaaccugaaguggagcaccgccguggaguucugcaagaagaagagcugccccaaccccggcgagaucagaaacggccagaucgacgugcccggcggcauccuguucggcgccaccaucagcuucagcugcaacaccggcuacaagcuguucggcagcaccagcagcuucugccugaucagcggcagcagcgugcaguggagcgacccccugcccgagugcagagagaucuacugccccgcccccccccagaucgacaacggcaucauccagggcgagagagaccacuacggcuacagacagagcgugaccuacgccugcaacaagggcuucaccaugaucggcgagcacagcaucuacugcaccgugaacaacgacgagggcgaguggagcggccccccccccgagugcagaggcaagagccugaccagcaaggugccccccaccgugcagaagcccaccaccgugaacgugcccaccaccgaggugagccccaccagccagaagaccaccaccaagaccaccacccccaacgcccaggccaccagaagcacccccgugagcagaaccaccaagcacuuccacgagaccacccccaacaagggcagcggcaccaccagcggcaccaccagacugcugagcggccacaccugcuucacccugaccggccugcugggcacccuggugaccaugggccugcugaccuga

SEQ ID NO: 936 - RNA, 1146 nt, Artificial Sequence
  derived and/or modified sequence opt5 from CD55__Homo_sapiens__AAA52168
augaccguggccagacccagcgucccugcugcccugccgcuccugggcgagcuuccccggcugcuccugcuuguucugcucugccugccugcgguguggggagacugugggcugcccccugaugugcccaacgcucagccugcccucgaaggccgcacauccuucccggaggacacggucaucaccuacaagugcgaagagucuuuugugaaaauucccggggaaaaggauagcguuaucugucugaaaggaucccaauggucugacauugaggaguucugcaauagaagcugugaagugccuacacggcuuaacuccgccucucugaagcagcccuauaucacccagaauuacuuuccugucggcacagugguugaguaugaaugccgccccggguacagacgggagccgagccucuccccuaaacugaccugucuucagaaccugaaguggagcacagcuguggaguucugcaagaaaaagucuugucccaauccuggagaaauucgcaacggccaaaucgauguccccggcgggauccucuuuggagccaccauuuccuucagcugcaauacgggcuauaaacuguuugggucuaccuccagcuucugucugaucucuggauccagcgugcagugguccgacccccucccugagugcagagaaauuuacugcccggcucccccucagaucgauaacggcauuauccagggggagcgggaccacuauggauaccgccaaucugugacauacgccuguaauaagggcuuuaccaugauuggcgaacauagcaucuauugcacagucaacaaugaugagggggagugguccggacccccucccgaauguagaggcaaaagccugaccucuaagguuccgccuacggugcagaagcccacaaccgugaacgucccuacaaccgaggugucccccaccagccagaaaacaacgaccaagacaaccacaccuaaugcgcaggccacccggucuacgcccguuagccgcacaaccaaacacuuccaugaaaccacaccgaacaagggguccggaaccacaucuggcacgaccagacuucugagcgggcacacaugcuuuacccucacaggacugcuuggcacccuggugacgaugggccuccugaccuga

SEQ ID NO: 937 - protein, 858 aa, Artificial Sequence
  CD56__Homo_sapiens__P13591
MLQTKDLIWTLFFLGTAVSLQVDIVPSQGEISVGESKFFLCQVAGDAKDKDISWFSPNGEKLTPNQQRISVVWNDDSSSTLTIYNANIDDAGIYKCVVTGEDGSESEATVNVKIFQKLMFKNAPTPQEFREGEDAVIVCDVVSSLPPTIIWKHKGRDVILKKDVRFIVLSNNYLQIRGIKKTDEGTYRCEGRILARGEINFKDIQVIVNVPPTIQARQNIVNATANLGQSVTLVCDAEGFPEPTMSWTKDGEQIEQEEDDEKYIFSDDSSQLTIKKVDKNDEAEYICIAENKAGEQDATIHLKVFAKPKITYVENQTAMELEEQVTLTCEASGDPIPSITWRTSTRNISSEEKASWTRPEKQETLDGHMVVRSHARVSSLTLKSIQYTDAGEYICTASNTIGQDSQSMYLEVQYAPKLQGPVAVYTWEGNQVNITCEVFAYPSATISWFRDGQLLPSSNYSNIKIYNTPSASYLEVTPDSENDFGNYNCTAVNRIGQESLEFILVQADTPSSPSIDQVEPYSSTAQVQFDEPEATGGVPILKYKAEWRAVGEEVWHSKWYDAKEASMEGIVTIVGLKPETTYAVRLAALNGKGLGEISAASEFKTQPVQGEPSAPKLEGQMGEDGNSIKVNLIKQDDGGSPIRHYLVRYRALSSEWKPEIRLPSGSDHVMLKSLDWNAEYEVYVVAENQQGKSKAAHFVFRTSAQPTAIPANGSPTSGLSTGAIVGILIVIFVLLLVVVDITCYFLNKCGLFMCIAVNLCGKAGPGAKGKDMEEGKAAFSKDESKEPIVEVRTEEERTPNHDGGKHTEPNETTPLTEPEKGPVEAKPECQETETKPAPAEVKTVPNDATQTKENESKA

SEQ ID NO: 938 - RNA, 2577 nt, Artificial Sequence
  CD56__Homo_sapiens__CCDS73385.1
augcugcaaacuaaggaucucaucuggacuuuguuuuuccugggaacugcaguuucucugcagguggauauuguucccagccagggggagaucagcguuggagaguccaaauucuucuuaugccaaguggcaggagaugccaaagauaaagacaucuccugguucucccccaauggagaaaagcucaccccaaaccagcagcggaucucagugguguggaaugaugauuccuccuccacccucaccaucuauaacgccaacaucgacgacgccggcauuuacaagugugugguuacaggcgaggauggcagugagucagaggccaccgucaacgugaagaucuuucagaagcucauguucaagaaugcgccaaccccacaggaguuccgggagggggaagaugccgugauugugugugauguggucagcucccucccaccaaccaucaucuggaaacacaaaggccgagaugucauccugaaaaaagauguccgauucauaguccuguccaacaacuaccugcagauccggggcaucaagaaaacagaugagggcacuuaucgcugugagggcagaauccuggcacggggggagaucaacuucaaggacauucaggucauugugaaugugccaccuaccauccaggccaggcagaauauugugaaugccaccgccaaccucggccaguccgucacccuggugugcgaugccgaaggcuucccagagcccaccaugagcuggacaaaggauggggaacagauagagcaagaggaagacgaugagaaguacaucuucagcgacgauaguucccagcugaccaucaaaaagguggauaagaacgacgaggcugaguacaucugcauugcugagaacaaggcuggcgagcaggaugcgaccauccaccucaaagucuuugcaaaacccaaaaucacauauguagagaaccagacugccauggaauuagaggagcaggucacucuuaccugugaagccuccggagaccccauucccuccaucaccuggaggacuucuacccggaacaucagcagcgaagaaaaggcuucguggacucgaccagagaagcaagagacucuggaugggcacaugguggugcguagccaugcccgugugucgucgcugacccugaagagcauccaguacacugaugccggagaguacaucugcaccgccagcaacaccaucggccaggacucccaguccauguaccuugaagugcaauaugccccaaagcuacagggcccuguggcuguguacacuugggaggggaaccaggugaacaucaccugcgagguauuugccuaucccagugccacgaucucaugguuucgggauggccagcugcugccaagcuccaauuacagcaauaucaagaucuacaacacccccucugccagcuaucuggaggugaccccagacucugagaaugauuuugggaacuacaacuguacugcagugaaccgcauugggcaggaguccuuggaauucauccuuguucaagcagacacccccucuucaccauccaucgaccagguggagccauacuccagcacagcccaggugcaguuugaugaaccagaggccacagguggggugcccauccucaaauacaaagcugaguggagagcaguuggugaagaaguauggcauuccaagugguaugaugccaaggaagccagcauggagggcaucgucaccaucgugggccugaagcccgaaacaacguacgccguaaggcuggcggcgcucaauggcaaagggcugggugagaucagcgcggccuccgaguucaagacgcagccaguccaaggggaacccagugcaccuaagcucgaagggcagaugggagaggauggaaacucuauuaaagugaaccugaucaagcaggaugacggcggcucccccaucagacacuaucuggucagguaccgagcgcucuccuccgaguggaaaccagagaucaggcucccgucuggcagugaccacgucaugcugaagucccuggacuggaaugcugaguaugaggucuacgugguggcugagaaccagcaaggaaaauccaaggcggcucauuuuguguucaggaccucggcccagcccacagccaucccagccaacggcagccccaccucaggccugagcaccggggccaucgugggcauccucaucgucaucuucguccugcuccuggugguuguggacaucaccugcuacuuccugaacaaguguggccuguucaugugcauugcggucaaccuguguggaaaagccgggcccggggccaagggcaaggacauggaggagggcaaggccgccuucucgaaagaugaguccaaggagcccaucguggagguucgaacggaggaggagaggaccccaaaccaugauggagggaaacacacagagcccaacgagaccacgccacugacggagcccgagaagggccccguagaagcaaagccagagugccaggagacagaaacgaagccagcgccagccgaagucaagacgguccccaaugacgccacacagacaaaggagaacgagagcaaagcauga

SEQ ID NO: 939 - RNA, 2577 nt, Artificial Sequence
  derived and/or modified sequence opt1 from CD56__Homo_sapiens__CCDS73385.1
augcugcagaccaaggaccucaucuggacccuguucuuccugggcacggccgugagccuccaggucgacaucgugcccucccagggggagaucagcgugggcgaguccaaguucuuccugugccaggucgccggggacgcgaaggacaaggacaucagcugguucuccccgaacggcgagaagcugacccccaaccagcagcgcaucagcgugguguggaacgacgacuccagcuccacccucaccaucuacaacgccaacaucgacgacgccgggaucuacaagugcgucgugacgggcgaggacggcagcgaguccgaggccaccgugaacgucaagaucuuccagaagcugauguucaagaacgcccccacgccccaggaguuccgggagggggaggacgcggugaucgugugcgacgucgugagcucccugccgcccaccaucaucuggaagcacaagggccgcgacgugauccucaagaaggacguccgguucaucgugcugagcaacaacuaccugcagauccgcgggaucaagaagaccgacgagggcaccuaccggugcgaggggcgcauccucgcccggggcgagaucaacuucaaggacauccaggugaucgucaacgugccgcccaccauccaggcccgccagaacaucgugaacgccaccgcgaaccugggccaguccgucacgcuggugugcgacgccgagggguuccccgagcccaccaugagcuggaccaaggacggcgagcagaucgagcaggaggaggacgacgagaaguacaucuucuccgacgacagcucccagcucaccaucaagaagguggacaagaacgacgaggccgaguacaucugcaucgccgagaacaaggccggggagcaggacgcgacgauccaccugaaggucuucgccaagcccaagaucaccuacguggagaaccagaccgccauggagcuggaggagcaggucacccucacgugcgaggccagcggcgaccccaucccgagcaucaccuggcggaccuccacccgcaacaucagcuccgaggagaaggccagcuggacgcggcccgagaagcaggagacccuggacggccacaugguggugcgcucccacgcgcgggucagcucccugacccucaagagcauccaguacaccgacgccggggaguacaucugcacggccuccaacaccaucggccaggacagccaguccauguaccuggaggugcaguacgcccccaagcugcaggggcccguggccgucuacaccugggagggcaaccaggugaacaucacgugcgagguguucgcguacccgagcgccaccaucuccugguuccgcgacgggcagcuccugcccagcuccaacuacagcaacaucaagaucuacaacacccccuccgccagcuaccuggaggucacccccgacuccgagaacgacuucggcaacuacaacugcaccgccgugaaccggaucggccaggagagccucgaguucauccuggugcaggccgacacgccgagcucccccagcaucgaccaggucgagcccuacuccagcaccgcccaggugcaguucgacgagcccgaggcgaccgggggcgugccgauccugaaguacaaggccgaguggcgcgccgucggggaggagguguggcacuccaagugguacgacgcgaaggaggccagcauggagggcaucgugaccaucgucgggcucaagcccgagaccacguacgccgugcggcuggccgcccugaacggcaagggccucggggagaucuccgcggccagcgaguucaagacccagcccgugcagggcgagcccuccgccccgaagcuggaggggcagaugggcgaggacgggaacagcaucaaggucaaccugaucaagcaggacgacggcggcucccccauccgccacuaccucgugcgguaccgcgcccugagcuccgaguggaagcccgagauccggcugccgagcggguccgaccacgugaugcucaagagccuggacuggaacgccgaguacgaggucuacgugguggcggagaaccagcagggcaaguccaaggccgcccacuucgucuuccgcaccagcgcccagcccaccgccauccccgcgaacgggagccccacguccggccugagcaccggcgccaucguggggauccucaucgugaucuucguccugcugcucgugguggucgacaucacgugcuacuuccugaacaagugcggccuguucaugugcaucgccgugaaccucugcgggaaggccggcccgggggcgaagggcaaggacauggaggagggcaaggccgccuucuccaaggacgagagcaaggagcccaucguggagguccgcaccgaggaggagcggacccccaaccacgacgggggcaagcacaccgagcccaacgagaccaccccgcugacggagcccgagaaggggcccguggaggccaagcccgagugccaggagaccgagaccaagccggcccccgcggaggugaagaccguccccaacgacgccacgcagaccaaggagaacgaguccaaggccuga

SEQ ID NO: 940 - RNA, 2577 nt, Artificial Sequence
  derived and/or modified sequence opt2 from CD56__Homo_sapiens__CCDS73385.1
augcuccagaccaaggaccucaucuggacccucuucuuccucggcaccgccgucucccuccaggucgacaucguccccucccagggcgagaucuccgucggcgaguccaaguucuuccucugccaggucgccggcgacgccaaggacaaggacaucuccugguucucccccaacggcgagaagcucacccccaaccagcagcgcaucuccgucgucuggaacgacgacuccuccuccacccucaccaucuacaacgccaacaucgacgacgccggcaucuacaagugcgucgucaccggcgaggacggcuccgaguccgaggccaccgucaacgucaagaucuuccagaagcucauguucaagaacgcccccaccccccaggaguuccgcgagggcgaggacgccgucaucgucugcgacgucgucuccucccucccccccaccaucaucuggaagcacaagggccgcgacgucauccucaagaaggacguccgcuucaucguccucuccaacaacuaccuccagauccgcggcaucaagaagaccgacgagggcaccuaccgcugcgagggccgcauccucgcccgcggcgagaucaacuucaaggacauccaggucaucgucaacgucccccccaccauccaggcccgccagaacaucgucaacgccaccgccaaccucggccaguccgucacccucgucugcgacgccgagggcuuccccgagcccaccauguccuggaccaaggacggcgagcagaucgagcaggaggaggacgacgagaaguacaucuucuccgacgacuccucccagcucaccaucaagaaggucgacaagaacgacgaggccgaguacaucugcaucgccgagaacaaggccggcgagcaggacgccaccauccaccucaaggucuucgccaagcccaagaucaccuacgucgagaaccagaccgccauggagcucgaggagcaggucacccucaccugcgaggccuccggcgaccccauccccuccaucaccuggcgcaccuccacccgcaacaucuccuccgaggagaaggccuccuggacccgccccgagaagcaggagacccucgacggccacauggucguccgcucccacgcccgcgucuccucccucacccucaaguccauccaguacaccgacgccggcgaguacaucugcaccgccuccaacaccaucggccaggacucccaguccauguaccucgagguccaguacgcccccaagcuccagggccccgucgccgucuacaccugggagggcaaccaggucaacaucaccugcgaggucuucgccuaccccuccgccaccaucuccugguuccgcgacggccagcuccuccccuccuccaacuacuccaacaucaagaucuacaacacccccuccgccuccuaccucgaggucacccccgacuccgagaacgacuucggcaacuacaacugcaccgccgucaaccgcaucggccaggagucccucgaguucauccucguccaggccgacacccccuccucccccuccaucgaccaggucgagcccuacuccuccaccgcccagguccaguucgacgagcccgaggccaccggcggcguccccauccucaaguacaaggccgaguggcgcgccgucggcgaggaggucuggcacuccaagugguacgacgccaaggaggccuccauggagggcaucgucaccaucgucggccucaagcccgagaccaccuacgccguccgccucgccgcccucaacggcaagggccucggcgagaucuccgccgccuccgaguucaagacccagcccguccagggcgagcccuccgcccccaagcucgagggccagaugggcgaggacggcaacuccaucaaggucaaccucaucaagcaggacgacggcggcucccccauccgccacuaccucguccgcuaccgcgcccucuccuccgaguggaagcccgagauccgccuccccuccggcuccgaccacgucaugcucaagucccucgacuggaacgccgaguacgaggucuacgucgucgccgagaaccagcagggcaaguccaaggccgcccacuucgucuuccgcaccuccgcccagcccaccgccauccccgccaacggcucccccaccuccggccucuccaccggcgccaucgucggcauccucaucgucaucuucguccuccuccucgucgucgucgacaucaccugcuacuuccucaacaagugcggccucuucaugugcaucgccgucaaccucugcggcaaggccggccccggcgccaagggcaaggacauggaggagggcaaggccgccuucuccaaggacgaguccaaggagcccaucgucgagguccgcaccgaggaggagcgcacccccaaccacgacggcggcaagcacaccgagcccaacgagaccaccccccucaccgagcccgagaagggccccgucgaggccaagcccgagugccaggagaccgagaccaagcccgcccccgccgaggucaagaccguccccaacgacgccacccagaccaaggagaacgaguccaaggccuga

SEQ ID NO: 941 - RNA, 2577 nt, Artificial Sequence
  derived and/or modified sequence opt3 from CD56__Homo_sapiens__CCDS73385.1
augcugcagaccaaggaccucaucuggacacuuuucuuucugggcacugccgugagcuugcaagucgauauuguucccucccagggggagauaucugugggagaaucaaaauucuuuuuaugccagguagcuggugacgcaaaggauaaagacaucaguugguucagcccuaacggcgagaagcugacgccaaaucagcaaagaauuuccguggucuggaacgaugacucuucgucaacccuaacaaucuacaaugccaacauugaugacgcggggaucuauaaaugugugguuacuggagaagauggcagcgagagugaagcuaccgugaaugucaagauauuucagaagcucauguucaaaaacgccccgacaccccaggaguuuagggagggugaagacgcagugaucguaugcgauguuguguccucucugccuccaaccauuaucuggaagcacaaagggcgggacgucauucuuaagaaagaugugcgcuucaucgugcugagcaauaacuacuugcagauacgaggaauuaagaagacugacgagggcacauaucguugugaaggcagaauccucgcccgcggggagauuaauuuuaaagacauccaagucaucguuaacgugcccccuaccauucaggcucggcagaauauaguaaacgcaacggccaaucugggacaguccgugacucuggucugcgaugcugaggguuucccagaacccaccaugucauggacaaaggacggcgagcaaaucgaacaggaggaagaugacgagaaauacauuuuuagugaugacagcucucagcucacuaucaagaaaguggauaagaacgacgaggccgaauauauauguauugcggagaauaaagcaggggaacaagaugccaccauccauuuaaagguuuucgcuaagccuaaaaucacauacguggagaaccagaccgccauggaacuggaggagcaggucacgcuuacuugcgaagcauccggagacccaauuccgucaaucacauggcgcaccagcacuagaaacauuaguucugaggaaaaggcuuccuggacaaggcccgagaaacaggaaaccuuggauggccacauggugguacggagccaugcccgcguuucgucucugacgcuaaaguccauacaauauaccgacgcgggugaguacaucuguacagccucaaauacuauugggcaggacagucagagcauguaccucgaggugcaguaugcaccuaaacugcaaggaccagucgcuguguacaccugggaaggcaaccaggucaauaucacaugcgagguguuugccuaucccuccgcuacuaucucuugguuccgagauggccagcuucugccuagcucaaacuacaguaauauuaagauauauaacaccccauccgccagcuacuuggaaguuacacccgacucugagaaugauuucgggaacuauaauuguaccgcagugaacagaaucggacaggagucacucgaauuuauucugguacaagccgacacuccgaguagcccuuccaucgaucaggucgagcccuacucuucgacggcucaggugcaguucgacgaaccagaggcgacagguggcguuccuauuuuaaaguacaaagcagaauggagggccgugggggaggaggucuggcacagcaagugguaugaugcuaaagaagccuccauggagggaaucgugaccauaguaggccugaagcccgaaacuaccuacgcagugcggcucgccgcucuuaaugguaaagggcugggcgagaucucagccgcaagugaauuuaagacacaaccaguucagggagagcccucugcgccuaaguuggagggccagaugggggaagacggaaacagcauuaaagucaaucuaaucaagcaagaugacgguggcuccccaauucgucauuaucuggugcgcuacagagcucucucaagcgaguggaaaccggaaaucaggcugcccucuggguccgaucacgugaugcuuaagagucuggacuggaacgccgaguaugaagucuacguuguggcagagaaucagcagggaaaaagcaaggccgcucacuucguguuucggaccucugcccagccuacugcaauaccagcuaacggcucccccacaucagguuugaguacgggggccauuguaggcauccucauugucaucuucgugcuguuacugguuguggucgauauaaccugcuauuuucuaaacaaguguggacucuucaugugcaucgcggugaaucugugcggcaaagccgggccuggagcuaaggguaaagacauggaggaaggcaaggcagccuuuagcaaagacgagucgaaggaaccaauuguugaggugcgaacugaggaagagaggacacccaaccaugaugggggaaaacacaccgaaccgaaugagacaacuccucuuaccgaaccagagaagggccccguagaggcuaagccugaaugucaagagacggaaaccaaacccgccccagcagaggucaagacagugccuaacgacgcgacucagaccaaagaaaaugaguccaaggccuga

SEQ ID NO: 942 - RNA, 2577 nt, Artificial Sequence
  derived and/or modified sequence opt4 from CD56__Homo_sapiens__CCDS73385.1
augcugcagaccaaggaccugaucuggacccuguucuuccugggcaccgccgugagccugcagguggacaucgugcccagccagggcgagaucagcgugggcgagagcaaguucuuccugugccagguggccggcgacgccaaggacaaggacaucagcugguucagccccaacggcgagaagcugacccccaaccagcagagaaucagcgugguguggaacgacgacagcagcagcacccugaccaucuacaacgccaacaucgacgacgccggcaucuacaagugcguggugaccggcgaggacggcagcgagagcgaggccaccgugaacgugaagaucuuccagaagcugauguucaagaacgcccccaccccccaggaguucagagagggcgaggacgccgugaucgugugcgacguggugagcagccugccccccaccaucaucuggaagcacaagggcagagacgugauccugaagaaggacgugagauucaucgugcugagcaacaacuaccugcagaucagaggcaucaagaagaccgacgagggcaccuacagaugcgagggcagaauccuggccagaggcgagaucaacuucaaggacauccaggugaucgugaacgugccccccaccauccaggccagacagaacaucgugaacgccaccgccaaccugggccagagcgugacccuggugugcgacgccgagggcuuccccgagcccaccaugagcuggaccaaggacggcgagcagaucgagcaggaggaggacgacgagaaguacaucuucagcgacgacagcagccagcugaccaucaagaagguggacaagaacgacgaggccgaguacaucugcaucgccgagaacaaggccggcgagcaggacgccaccauccaccugaagguguucgccaagcccaagaucaccuacguggagaaccagaccgccauggagcuggaggagcaggugacccugaccugcgaggccagcggcgaccccauccccagcaucaccuggagaaccagcaccagaaacaucagcagcgaggagaaggccagcuggaccagacccgagaagcaggagacccuggacggccacaugguggugagaagccacgccagagugagcagccugacccugaagagcauccaguacaccgacgccggcgaguacaucugcaccgccagcaacaccaucggccaggacagccagagcauguaccuggaggugcaguacgcccccaagcugcagggccccguggccguguacaccugggagggcaaccaggugaacaucaccugcgagguguucgccuaccccagcgccaccaucagcugguucagagacggccagcugcugcccagcagcaacuacagcaacaucaagaucuacaacacccccagcgccagcuaccuggaggugacccccgacagcgagaacgacuucggcaacuacaacugcaccgccgugaacagaaucggccaggagagccuggaguucauccuggugcaggccgacacccccagcagccccagcaucgaccagguggagcccuacagcagcaccgcccaggugcaguucgacgagcccgaggccaccggcggcgugcccauccugaaguacaaggccgaguggagagccgugggcgaggagguguggcacagcaagugguacgacgccaaggaggccagcauggagggcaucgugaccaucgugggccugaagcccgagaccaccuacgccgugagacuggccgcccugaacggcaagggccugggcgagaucagcgccgccagcgaguucaagacccagcccgugcagggcgagcccagcgcccccaagcuggagggccagaugggcgaggacggcaacagcaucaaggugaaccugaucaagcaggacgacggcggcagccccaucagacacuaccuggugagauacagagcccugagcagcgaguggaagcccgagaucagacugcccagcggcagcgaccacgugaugcugaagagccuggacuggaacgccgaguacgagguguacgugguggccgagaaccagcagggcaagagcaaggccgcccacuucguguucagaaccagcgcccagcccaccgccauccccgccaacggcagccccaccagcggccugagcaccggcgccaucgugggcauccugaucgugaucuucgugcugcugcugguggugguggacaucaccugcuacuuccugaacaagugcggccuguucaugugcaucgccgugaaccugugcggcaaggccggccccggcgccaagggcaaggacauggaggagggcaaggccgccuucagcaaggacgagagcaaggagcccaucguggaggugagaaccgaggaggagagaacccccaaccacgacggcggcaagcacaccgagcccaacgagaccaccccccugaccgagcccgagaagggccccguggaggccaagcccgagugccaggagaccgagaccaagcccgcccccgccgaggugaagaccgugcccaacgacgccacccagaccaaggagaacgagagcaaggccuga

SEQ ID NO: 943 - RNA, 2577 nt, Artificial Sequence
  derived and/or modified sequence opt5 from CD56__Homo_sapiens__CCDS73385.1
augcugcagaccaaggaccucaucuggacacuguucuuucuuggcacggccgugagccugcaagucgauauuguucccucccagggggagaucucugugggagaaagcaaauucuuucucugccagguggcuggcgacgccaaggauaaagacauuuccugguucucuccuaacggggagaagcugaccccgaaucagcaaagaaucagcgucguguggaacgaugacuccucuagcacacuuaccauuuacaaugcgaacaucgaugacgcuggaaucuauaaauguguugugacaggcgaagauggguccgagagcgaagccaccgucaaugugaagauuuuucagaagcugauguucaaaaacgcccccacaccucaggaguuucgggagggagaagacgcuguuaucgugugcgaugucgugucuucccugcccccuaccauuaucuggaagcacaaaggccgcgacgugauucucaagaaagaugucagauucaucguucugagcaauaacuaccuccagauucggggcaucaagaagacggacgaggggaccuaucgcugugaaggaagaauccuggcccggggcgagauuaauuuuaaagacauccaagugauugugaacgugcccccuacaauccaggcucgccagaauauugugaacgccaccgcgaaucuugggcagucuguuacacuggugugcgaugccgagggauucccggaacccaccauguccuggacgaaggacggcgagcaaaucgaacaggaggaagaugacgagaaauacaucuuuagcgaugacucuucccagcucacaauuaagaaagucgauaagaacgacgaggcugaauauaucuguauugccgagaauaaagcuggggaacaagaugccaccauccaucugaagguguucgcgaagccuaaaauuacauacguugagaaccagaccgccauggaacuugaggagcaggucacccugacaugcgaagcuagcggagaccccaucccuuccaucacguggagaaccucuacacggaacauuagcuccgaggaaaaggccagcuggacccgccccgagaaacaggaaacacucgauggccacauggucgugagaucucaugcucgggucuccagccugacccugaagucuauccaauauacggacgccggcgaguacauuuguacagccagcaauaccaucgggcaggacucccagucuauguaccucgaggugcaguaugcuccgaaacugcaaggaccuguugcgguguacaccugggaaggcaaccaggucaauauuacaugcgagguguuugccuaucccagcgcuaccaucuccugguuccgcgaugggcagcuucugccuagcucuaacuacuccaauauuaagaucuauaacacacccagcgccucuuaccucgaaguuacgcccgacuccgagaaugauuucggaaacuauaauuguaccgccgugaacagaaucggccaggagagccuggaauuuauucuuguccaagcugacacaccuuccucuccgagcaucgaucagguggagcccuacuccucuaccgcccaggugcaguucgacgaaccugaggcgacagggggaguucccauucugaaguacaaagcugaauggcgggccgucggcgaggagguguggcacagcaagugguaugaugccaaagaggcuuccauggagggcaucgugaccauugucgggcucaagccugaaacgaccuacgccgugcgccuggcugcccugaauggaaaaggccucggggagaucagcgcggccucugaauuuaagacacaacccguucagggagagccguccgcuccuaagcuggagggccagaugggggaagacggcaacagcaucaaagugaaucuuauuaagcaagaugacggaggcucucccaucagacauuaucugguccgguacagagcccucuccagcgaguggaaaccugaaauucgccugcccucugggagcgaucacgugaugcuuaagucccuggacuggaacgcugaguaugaaguuuacguggucgccgagaaucagcagggaaaaagcaaggcggcccacuucguguuucggaccucugcucagccuacagccauccccgcuaacggcuccccgaccagcgggcucuccacgggagccauuguuggcauccugaucgugauuuucguccugcuccuggugguggucgauaucacaugcuauuuucuuaacaagugugggcuguucaugugcauugccguuaaucucugcggcaaagcuggaccuggcgcgaaggggaaagacauggaggaaggaaaggccgcuuuuucuaaagacgagagcaaggaacccaucguggaggugagaaccgaggaagaacgcacacccaaccaugauggcgggaaacacaccgaaccuaaugagaccacaccgcugacggaacccgagaagggaccugucgaggccaagcccgaaugucaagagaccgaaacaaaaccugcccccgcugaggugaagaccguuccuaacgacgccacacagaccaaagaaaaugaguccaaggcguga

SEQ ID NO: 944 - protein, 288 aa, Artificial Sequence
  CD80__Homo_sapiens__A0N0P2
MGHTRRQGTSPSKCPYLNFFQLLVLAGLSHFCSGVIHVTKEVKEVATLSCGHNVSVEELAQTRIYWQKEKKMVLTMMSGDMNIWPEYKNRTIFDITNNLSIVILALRPSDEGTYECVVLKYEKDAFKREHLAEVTLSVKADFPTPSISDFEIPTSNIRRIICSTSGGFPEPHLSWLENGEELNAINTTVSQDPETELYAVSSKLDFNMTTNHSFMCLIKYGHLRVNQTFNWNTTKQEHFPDNLLPSWAITLISVNGIFVICCLTYCFAPRCRERRRNERLRRESVRPV

SEQ ID NO: 945 - RNA, 867 nt, Artificial Sequence
  CD80__Homo_sapiens__ABK41933
augggccacacacggaggcagggaacaucaccauccaaguguccauaccucaauuucuuucagcucuuggugcuggcuggucuuucucacuucuguucagguguuauccacgugaccaaggaagugaaagaaguggcaacgcuguccuguggucacaauguuucuguugaagagcuggcacaaacucgcaucuacuggcaaaaggagaagaaaauggugcugacuaugaugucuggggacaugaauauauggcccgaguacaagaaccggaccaucuuugauaucacuaauaaccucuccauugugauccuggcucugcgcccaucugacgagggcacauacgaguguguuguucugaaguaugaaaaagacgcuuucaagcgggaacaccuggcugaagugacguuaucagucaaagcugacuucccuacaccuaguauaucugacuuugaaauuccaacuucuaauauuagaaggauaauuugcucaaccucuggagguuuuccagagccucaccucuccugguuggaaaauggagaagaauuaaaugccaucaacacaacaguuucccaagauccugaaacugagcucuaugcuguuagcagcaaacuggauuucaauaugacaaccaaccacagcuucaugugucucaucaaguauggacauuuaagagugaaucagaccuucaacuggaauacaaccaagcaagagcauuuuccugauaaccugcucccauccugggccauuaccuuaaucucaguaaauggaauuuuugugauaugcugccugaccuacugcuuugccccaagaugcagagagagaaggaggaaugagagauugagaagggaaaguguacgcccuguauaa

SEQ ID NO: 946 - RNA, 867 nt, Artificial Sequence
  derived and/or modified sequence opt1 from CD80__Homo_sapiens__ABK41933
augggccacacccgccggcaggggaccagccccuccaagugcccguaccugaacuucuuccagcuccuggugcuggccggccucagccacuucugcuccggggucauccacgugacgaaggaggugaaggaggucgccacccugagcugcggccacaacguguccguggaggagcuggcccagacccgcaucuacuggcagaaggagaagaagaugguccucaccaugaugagcggggacaugaacaucuggcccgaguacaagaaccggacgaucuucgacaucaccaacaaccuguccaucgugauccuggcccuccgccccagcgacgagggcaccuacgagugcgugguccugaaguacgagaaggacgccuucaagcgggagcaccuggccgaggugacccucuccgugaaggccgacuuccccacgccgagcaucuccgacuucgagauccccaccagcaacauccgccggaucaucugcuccaccagcggcggguuccccgagccccaccuguccuggcuggagaacggcgaggagcucaacgcgaucaacaccacggucagccaggacccggagaccgagcuguacgccguguccagcaagcuggacuucaacaugaccaccaaccacuccuucaugugccucaucaaguacgggcaccuccgcgugaaccagacguucaacuggaacaccaccaagcaggagcacuuccccgacaaccugcugcccagcugggccaucacccugaucagcgucaacggcaucuucgugaucugcugccugacguacugcuucgcgccccggugccgcgagcggcgccggaacgagcgccuccggcgcgaguccgugcggccggucuga

SEQ ID NO: 947 - RNA, 867 nt, Artificial Sequence
  derived and/or modified sequence opt2 from CD80__Homo_sapiens__ABK41933
augggccacacccgccgccagggcaccucccccuccaagugccccuaccucaacuucuuccagcuccucguccucgccggccucucccacuucugcuccggcgucauccacgucaccaaggaggucaaggaggucgccacccucuccugcggccacaacgucuccgucgaggagcucgcccagacccgcaucuacuggcagaaggagaagaagaugguccucaccaugauguccggcgacaugaacaucuggcccgaguacaagaaccgcaccaucuucgacaucaccaacaaccucuccaucgucauccucgcccuccgccccuccgacgagggcaccuacgagugcgucguccucaaguacgagaaggacgccuucaagcgcgagcaccucgccgaggucacccucuccgucaaggccgacuuccccacccccuccaucuccgacuucgagauccccaccuccaacauccgccgcaucaucugcuccaccuccggcggcuuccccgagccccaccucuccuggcucgagaacggcgaggagcucaacgccaucaacaccaccgucucccaggaccccgagaccgagcucuacgccgucuccuccaagcucgacuucaacaugaccaccaaccacuccuucaugugccucaucaaguacggccaccuccgcgucaaccagaccuucaacuggaacaccaccaagcaggagcacuuccccgacaaccuccuccccuccugggccaucacccucaucuccgucaacggcaucuucgucaucugcugccucaccuacugcuucgccccccgcugccgcgagcgccgccgcaacgagcgccuccgccgcgaguccguccgccccgucuga

SEQ ID NO: 948 - RNA, 867 nt, Artificial Sequence
  derived and/or modified sequence opt3 from CD80__Homo_sapiens__ABK41933
augggccacaccagaaggcaggggacaagccccuccaagugcccuuaccugaacuucuuucaacuccuugugcuggccggauugucucauuucuguucaggugucauccacguuacuaaagaggugaaggaaguagcuacguuaaguugcggccauaaugugagcgucgaggaacuggcacagacccggauuuauuggcagaaagagaagaaaauggugcuaacaaugauguccggggacaugaacauauggccagaauacaagaaucgcacuaucuuugauauuaccaacaaucucucuaucguuauucuggcccuucgaccgucggacgagggaacauaugagugugugguccugaaguacgaaaaagaugcguucaagcgugagcacuuggcugaagugacccucucaguaaaagccgacuuucccacuccuagcaucagugauuucgagauaccaacauccaacaucagaaggauuaucugcucuaccagcggcgguuuucccgagccucaucuguccuggcuggaaaauggggaggaacucaacgcaauuaauacgacuguuucacaggacccagagaccgaauuauaugccgugaguagcaagcuggauuucaacaugacaacuaaucacucuuuuaugugucuuaucaaauacggacacuugcgggucaaccaaaccuucaauuggaacacaaccaagcaggagcauuuucccgacaaucugcuaccuuccugggcuauaacgcucauuucagugaacggcaucuucgugauuugcugucugacuuauugcuuugcaccacgcuguagagagaggcggcgcaacgaacgacuuagaagggagagcguccggccgguuuga

SEQ ID NO: 949 - RNA, 867 nt, Artificial Sequence
  derived and/or modified sequence opt4 from CD80__Homo_sapiens__ABK41933
augggccacaccagaagacagggcaccagccccagcaagugccccuaccugaacuucuuccagcugcuggugcuggccggccugagccacuucugcagcggcgugauccacgugaccaaggaggugaaggagguggccacccugagcugcggccacaacgugagcguggaggagcuggcccagaccagaaucuacuggcagaaggagaagaagauggugcugaccaugaugagcggcgacaugaacaucuggcccgaguacaagaacagaaccaucuucgacaucaccaacaaccugagcaucgugauccuggcccugagacccagcgacgagggcaccuacgagugcguggugcugaaguacgagaaggacgccuucaagagagagcaccuggccgaggugacccugagcgugaaggccgacuuccccacccccagcaucagcgacuucgagauccccaccagcaacaucagaagaaucaucugcagcaccagcggcggcuuccccgagccccaccugagcuggcuggagaacggcgaggagcugaacgccaucaacaccaccgugagccaggaccccgagaccgagcuguacgccgugagcagcaagcuggacuucaacaugaccaccaaccacagcuucaugugccugaucaaguacggccaccugagagugaaccagaccuucaacuggaacaccaccaagcaggagcacuuccccgacaaccugcugcccagcugggccaucacccugaucagcgugaacggcaucuucgugaucugcugccugaccuacugcuucgcccccagaugcagagagagaagaagaaacgagagacugagaagagagagcgugagacccguguga

SEQ ID NO: 950 - RNA, 867 nt, Artificial Sequence
  derived and/or modified sequence opt5 from CD80__Homo_sapiens__ABK41933
augggccacaccagacggcaggggacaagccccuccaagugcccuuaccugaacuucuuucaacuccuggugcuugccggacugucucauuucuguagcggcgucauccacguuacgaaagaggugaaggaaguggcuacccucuccugcgggcauaaugucucuguggaggaacuggcccagacacgcauuuauuggcagaaagagaagaaaaugguucuuaccaugaugagcggagacaugaacaucuggccggaauacaagaauagaacaauuuuugauaucaccaacaaucuguccauugugauccucgcgcugcggcccucugacgagggcacauaugagugugucgugcugaaguacgaaaaagaugcuuucaagcgcgagcaccucgccgaaguuacccugagcgugaaagccgacuuuccuacgcccuccaucagcgauuucgagauuccuaccucuaacaucagacggauuaucugcuccacaagcgggggauuucccgagccucaucuuucuuggcuggaaaauggcgaggaacucaacgcuauuaauaccacagucucccaggacccggagaccgaacuguaugccgugagcucuaaacuugauuucaacaugacgacaaaucacuccuuuaugugucugaucaaguacggccaccuccgcgugaaccaaaccuucaauuggaacacaaccaagcaggagcauuuucccgacaaucugcugccuagcugggcuauuacccucaucuccgucaacgggaucuucguuauuugcugucugacauauugcuuugcccccagaugucgggagcgcagacggaacgaacgccuuagacgggagucugugcgcccuguguga

SEQ ID NO: 951 - protein, 288 aa, Artificial Sequence; identical to SEQ ID NO: 944
  CD80__Homo_sapiens__P33681

SEQ ID NO: 952 - RNA, 867 nt, Artificial Sequence; identical to SEQ ID NO: 945
  CD80__Homo_sapiens__AAA36045

SEQ ID NO: 953 - RNA, 867 nt, Artificial Sequence; identical to SEQ ID NO: 946
  derived and/or modified sequence opt1 from CD80__Homo_sapiens__AAA36045

SEQ ID NO: 954 - RNA, 867 nt, Artificial Sequence; identical to SEQ ID NO: 947
  derived and/or modified sequence opt2 from CD80__Homo_sapiens__AAA36045

SEQ ID NO: 955 - RNA, 867 nt, Artificial Sequence; identical to SEQ ID NO: 948
  derived and/or modified sequence opt3 from CD80__Homo_sapiens__AAA36045

SEQ ID NO: 956 - RNA, 867 nt, Artificial Sequence; identical to SEQ ID NO: 949
  derived and/or modified sequence opt4 from CD80__Homo_sapiens__AAA36045

SEQ ID NO: 957 - RNA, 867 nt, Artificial Sequence; identical to SEQ ID NO: 950
  derived and/or modified sequence opt5 from CD80__Homo_sapiens__AAA36045

SEQ ID NO: 958 - protein, 329 aa, Artificial Sequence
  CD86__Homo_sapiens__P42081
MDPQCTMGLSNILFVMAFLLSGAAPLKIQAYFNETADLPCQFANSQNQSLSELVVFWQDQENLVLNEVYLGKEKFDSVHSKYMGRTSFDSDSWTLRLHNLQIKDKGLYQCIIHHKKPTGMIRIHQMNSELSVLANFSQPEIVPISNITENVYINLTCSSIHGYPEPKKMSVLLRTKNSTIEYDGVMQKSQDNVTELYDVSISLSVSFPDVTSNMTIFCILETDKTRLLSSPFSIELEDPQPPPDHIPWITAVLPTVIICVMVFCLILWKWKKKKRPRNSYKCGTNTMEREESEQTKKREKIHIPERSDEAQRVFKSSKTSSCDKSDTCF

SEQ ID NO: 959 - RNA, 990 nt, Artificial Sequence
  CD86__Homo_sapiens__CCDS3009.1
auggauccccagugcacuaugggacugaguaacauucucuuugugauggccuuccugcucucuggugcugcuccucugaagauucaagcuuauuucaaugagacugcagaccugccaugccaauuugcaaacucucaaaaccaaagccugagugagcuaguaguauuuuggcaggaccaggaaaacuugguucugaaugagguauacuuaggcaaagagaaauuugacaguguucauuccaaguauaugggccgcacaaguuuugauucggacaguuggacccugagacuucacaaucuucagaucaaggacaagggcuuguaucaauguaucauccaucacaaaaagcccacaggaaugauucgcauccaccagaugaauucugaacugucagugcuugcuaacuucagucaaccugaaauaguaccaauuucuaauauaacagaaaauguguacauaaauuugaccugcucaucuauacacgguuacccagaaccuaagaagaugaguguuuugcuaagaaccaagaauucaacuaucgaguaugaugguguuaugcagaaaucucaagauaaugucacagaacuguacgacguuuccaucagcuugucuguuucauucccugauguuacgagcaauaugaccaucuucuguauucuggaaacugacaagacgcggcuuuuaucuucaccuuucucuauagagcuugaggacccucagccucccccagaccacauuccuuggauuacagcuguacuuccaacaguuauuauaugugugaugguuuucugucuaauucuauggaaauggaagaagaagaagcggccucgcaacucuuauaaauguggaaccaacacaauggagagggaagagagugaacagaccaagaaaagagaaaaaauccauauaccugaaagaucugaugaagcccagcguguuuuuaaaaguucgaagacaucuucaugcgacaaaagugauacauguuuuuaa

SEQ ID NO: 960 - RNA, 990 nt, Artificial Sequence
  derived and/or modified sequence opt1 from CD86__Homo_sapiens__CCDS3009.1
auggacccccagugcaccaugggccugagcaacauccucuucgugauggccuuccugcuguccggggccgcgccgcucaagauccaggccuacuucaacgagaccgccgaccugcccugccaguucgccaacagccagaaccagucccugagcgagcucgucguguucuggcaggaccaggagaaccuggugcugaacgaggucuaccucggcaaggagaaguucgacuccgugcacagcaaguacauggggcgcaccuccuucgacagcgacuccuggacccugcggcugcacaaccuccagaucaaggacaagggccuguaccagugcaucauccaccacaagaagcccaccgggaugauccgcauccaccagaugaacagcgagcuguccgugcucgccaacuucagccagcccgagaucgucccgaucuccaacaucaccgagaacguguacaucaaccugacgugcagcuccauccacggcuaccccgagcccaagaagaugagcgugcugcuccggaccaagaacuccaccaucgaguacgacggcgucaugcagaagucccaggacaacgugaccgagcuguacgacgugagcaucagccugagcgucuccuuccccgacgugacgagcaacaugaccaucuucugcauccucgagaccgacaagacccgccugcuguccagcccguucuccaucgagcucgaggacccccagcccccgcccgaccacauccccuggaucacggcggugcugcccaccgucaucaucugcgugaugguguucugccugauccucuggaaguggaagaagaagaagcggccccgcaacagcuacaagugcgggaccaacaccauggagcgggaggaguccgagcagacgaagaagcgcgagaagauccacaucccggagcggagcgacgaggcccagcgcgucuucaaguccagcaagaccuccagcugcgacaaguccgacacgugcuucuga

SEQ ID NO: 961 - RNA, 990 nt, Artificial Sequence
  derived and/or modified sequence opt2 from CD86__Homo_sapiens__CCDS3009.1
auggacccccagugcaccaugggccucuccaacauccucuucgucauggccuuccuccucuccggcgccgccccccucaagauccaggccuacuucaacgagaccgccgaccuccccugccaguucgccaacucccagaaccagucccucuccgagcucgucgucuucuggcaggaccaggagaaccucguccucaacgaggucuaccucggcaaggagaaguucgacuccguccacuccaaguacaugggccgcaccuccuucgacuccgacuccuggacccuccgccuccacaaccuccagaucaaggacaagggccucuaccagugcaucauccaccacaagaagcccaccggcaugauccgcauccaccagaugaacuccgagcucuccguccucgccaacuucucccagcccgagaucguccccaucuccaacaucaccgagaacgucuacaucaaccucaccugcuccuccauccacggcuaccccgagcccaagaagauguccguccuccuccgcaccaagaacuccaccaucgaguacgacggcgucaugcagaagucccaggacaacgucaccgagcucuacgacgucuccaucucccucuccgucuccuuccccgacgucaccuccaacaugaccaucuucugcauccucgagaccgacaagacccgccuccucuccucccccuucuccaucgagcucgaggacccccagcccccccccgaccacauccccuggaucaccgccguccuccccaccgucaucaucugcgucauggucuucugccucauccucuggaaguggaagaagaagaagcgcccccgcaacuccuacaagugcggcaccaacaccauggagcgcgaggaguccgagcagaccaagaagcgcgagaagauccacauccccgagcgcuccgacgaggcccagcgcgucuucaaguccuccaagaccuccuccugcgacaaguccgacaccugcuucuga

SEQ ID NO: 962 - RNA, 990 nt, Artificial Sequence
  derived and/or modified sequence opt3 from CD86__Homo_sapiens__CCDS3009.1
auggacccccagugcaccaugggccugagcaacauccucuucgugauggccuuucuucuguccggggcugcaccuuugaagauucaagccuacuucaaugagacagcggauuuaccaugucaguuugcuaacucucagaaucagucacugagugagcuagucguuuucuggcaagaccaggaaaaccucgugcugaaugaaguauaucuuggaaaagagaaguuugauagcgugcacuccaaauacauggguagaacuucuuucgacucggauucauggacgcugagguugcauaaccuccagauaaaggacaaaggccuguaucagugcaucauucaccauaagaagccgaccgggaugauccggauucaccaaaugaauagcgaacugaguguccucgccaacuuuucccagcccgagaucgugccuauaucuaauaucacagagaacguuuacauuaauuuaacuuguagcuccauccauggauauccagaacccaaaaagaugucagugcugcuucgcaccaaaaacaguacaauugaguacgauggcgucaugcagaagagucaggacaaugugaccgaauuguaugauguaucuaucucccugucaguuagcuucccugacgugacuagcaacaugacaauauuuugcauucuagagaccgauaaaacgcgacuccugucuuccccauucagcaucgagcuugaagacccccaaccuccaccggaucacauucccuggaucacugcaguccugccuaccgugaucauuugugugauggucuuuugcuugauacucuggaaguggaagaaaaagaaacguccaagaaauucguacaagugugguacaaacacuauggagagggaagagucugaacagaccaaaaagcgggagaaaauccacauucccgagcgcuccgacgaagcccagagaguuuucaagucaaguaagacaagcuccugcgacaaaucugauaccuguuuuuga

SEQ ID NO: 963 - RNA, 990 nt, Artificial Sequence
  derived and/or modified sequence opt4 from CD86__Homo_sapiens__CCDS3009.1
auggacccccagugcaccaugggccugagcaacauccuguucgugauggccuuccugcugagcggcgccgccccccugaagauccaggccuacuucaacgagaccgccgaccugcccugccaguucgccaacagccagaaccagagccugagcgagcuggugguguucuggcaggaccaggagaaccuggugcugaacgagguguaccugggcaaggagaaguucgacagcgugcacagcaaguacaugggcagaaccagcuucgacagcgacagcuggacccugagacugcacaaccugcagaucaaggacaagggccuguaccagugcaucauccaccacaagaagcccaccggcaugaucagaauccaccagaugaacagcgagcugagcgugcuggccaacuucagccagcccgagaucgugcccaucagcaacaucaccgagaacguguacaucaaccugaccugcagcagcauccacggcuaccccgagcccaagaagaugagcgugcugcugagaaccaagaacagcaccaucgaguacgacggcgugaugcagaagagccaggacaacgugaccgagcuguacgacgugagcaucagccugagcgugagcuuccccgacgugaccagcaacaugaccaucuucugcauccuggagaccgacaagaccagacugcugagcagccccuucagcaucgagcuggaggacccccagcccccccccgaccacauccccuggaucaccgccgugcugcccaccgugaucaucugcgugaugguguucugccugauccuguggaaguggaagaagaagaagagacccagaaacagcuacaagugcggcaccaacaccauggagagagaggagagcgagcagaccaagaagagagagaagauccacauccccgagagaagcgacgaggcccagagaguguucaagagcagcaagaccagcagcugcgacaagagcgacaccugcuucuga

SEQ ID NO: 964 - RNA, 990 nt, Artificial Sequence
  derived and/or modified sequence opt5 from CD86__Homo_sapiens__CCDS3009.1
auggacccccagugcaccaugggccugagcaacauccucuucgugauggccuuucugcuuuccggggcugccccucugaagauucaagcguacuucaaugagacagcugaucucccgugucaguuugccaacucucagaaucagagccuguccgaacuugucguuuucuggcaagaccaggagaaccuggugcucaaugaaguguaucugggaaaagagaaguuugauucuguccacagcaaauacaugggcagaacguccuucgacucugauagcuggacccugcggcuccauaaccugcagaucaaggacaaagggcuuuaucagugcauuauccaccauaagaagcccacaggaaugauucgcauccaccaaaugaacuccgaacugagcgugcucgccaauuuuucucagccugagaucguucccauuuccaauaucaccgagaacguguacauuaaucugacauguagcucuauccauggcuauccugaacccaaaaagauguccguccuucugagaaccaaaaacagcacaauugaguacgauggggugaugcagaagucucaggacaauguuaccgaacucuaugauguguccaucagccuguccgucucuuucccugacgugacgagcaacaugaccaucuuuugcauucuggagacagauaaaacccggcuccuguccagcccguucucuaucgagcuugaagacccccaaccucccccugaucacauucccuggaucacagcugugcugccgaccgucauuaucuguguuaugguguuuugccucauucuguggaaguggaagaaaaagaaacgcccuagaaauuccuacaaguguggaacgaacacaauggagcgggaagagagcgaacagaccaaaaagcgcgagaaaauccacauccccgagagaucugacgaagcccagcggguguucaagagcuccaagacaucuagcugcgacaaauccgauaccuguuuuuga

SEQ ID NO: 965 - protein, 235 aa, Artificial Sequence
  CD8A__Homo_sapiens__P01732
MALPVTALLLPLALLLHAARPSQFRVSPLDRTWNLGETVELKCQVLLSNPTSGCSWLFQPRGAAASPTFLLYLSQNKPKAAEGLDTQRFSGKRLGDTFVLTLSDFRRENEGYYFCSALSNSIMYFSHFVPVFLPAKPTTTPAPRPPTPAPTIASQPLSLRPEACRPAAGGAVHTRGLDFACDIYIWAPLAGTCGVLLLSLVITLYCNHRNRRRVCKCPRPVVKSGDKPSLSARYV

SEQ ID NO: 966 - RNA, 708 nt, Artificial Sequence
  CD8A__Homo_sapiens__AAA59674
auggccuuaccagugaccgccuugcuccugccgcuggccuugcugcuccacgccgccaggccgagccaguuccgggugucgccgcuggaucggaccuggaaccugggcgagacaguggagcugaagugccaggugcugcuguccaacccgacgucgggcugcucguggcucuuccagccgcgcggcgccgccgccagucccaccuuccuccuauaccucucccaaaacaagcccaaggcggccgaggggcuggacacccagcgguucucgggcaagagguugggggacaccuucguccucacccugagcgacuuccgccgagagaacgagggcuacuauuucugcucggcccugagcaacuccaucauguacuucagccacuucgugccggucuuccugccagcgaagcccaccacgacgccagcgccgcgaccaccaacaccggcgcccaccaucgcgucgcagccccugucccugcgcccagaggcgugccggccagcggcggggggcgcagugcacacgagggggcuggacuucgccugugauaucuacaucugggcgccccuggccgggacuugugggguccuucuccugucacugguuaucacccuuuacugcaaccacaggaaccgaagacguguuugcaaauguccccggccuguggucaaaucgggagacaagcccagccuuucggcgagauacgucuaa

SEQ ID NO: 967 - RNA, 708 nt, Artificial Sequence
  derived and/or modified sequence opt1 from CD8A__Homo_sapiens__AAA59674
auggcccugcccgugaccgcccuccugcugccgcucgcgcugcugcuccacgccgcccgccccagccaguuccgggucagcccccuggaccgcaccuggaaccugggcgagacgguggagcucaagugccaggugcugcugagcaaccccaccuccgggugcagcuggcuguuccagccgcggggcgccgccgcgucccccaccuuccuccuguaccucagccagaacaagcccaaggccgccgaggggcuggacacccagcgcuucuccggcaagcggcugggggacacguucguccucacccugagcgacuuccgccgggagaacgagggcuacuacuucugcuccgcccugagcaacuccaucauguacuucagccacuucgugcccguguuccucccggcgaagcccaccaccacgcccgcgccccgcccgcccacccccgcccccaccaucgccucccagccgcugagccugcggcccgaggccugccgccccgccgccggcggggccguccacacccggggccucgacuucgccugcgacaucuacaucugggcgccccuggccgggacgugcggcgugcugcuccugucccuggugaucacccucuacugcaaccaccgcaaccggcgccgggucugcaagugcccgcgccccguggugaaguccggggacaagcccucccugagcgcccgguacgucuga

SEQ ID NO: 968 - RNA, 708 nt, Artificial Sequence
  derived and/or modified sequence opt2 from CD8A__Homo_sapiens__AAA59674
auggcccuccccgucaccgcccuccuccucccccucgcccuccuccuccacgccgcccgccccucccaguuccgcgucuccccccucgaccgcaccuggaaccucggcgagaccgucgagcucaagugccagguccuccucuccaaccccaccuccggcugcuccuggcucuuccagccccgcggcgccgccgccucccccaccuuccuccucuaccucucccagaacaagcccaaggccgccgagggccucgacacccagcgcuucuccggcaagcgccucggcgacaccuucguccucacccucuccgacuuccgccgcgagaacgagggcuacuacuucugcuccgcccucuccaacuccaucauguacuucucccacuucguccccgucuuccuccccgccaagcccaccaccacccccgccccccgcccccccacccccgcccccaccaucgccucccagccccucucccuccgccccgaggccugccgccccgccgccggcggcgccguccacacccgcggccucgacuucgccugcgacaucuacaucugggccccccucgccggcaccugcggcguccuccuccucucccucgucaucacccucuacugcaaccaccgcaaccgccgccgcgucugcaagugcccccgccccgucgucaaguccggcgacaagcccucccucuccgcccgcuacgucuga

SEQ ID NO: 969 - RNA, 708 nt, Artificial Sequence
  derived and/or modified sequence opt3 from CD8A__Homo_sapiens__AAA59674
auggcccugcccgugaccgcucuccuucugccuuuggcauuacugcuacacgccgcgagaccaagccaguucagggucuccccgcucgaccggacauggaaccugggcgagacuguugaacuuaagugccaagugcuguugucuaaucccacgucaggguguaguuggcucuuucagccucgcggagcugccgcaagcccaaccuuccugcuguaccucucccagaacaaacccaaggccgcugaggguuuagauacacagcgauuuucuggcaaacgucugggggacacuuucguacuuaccuugucggauuuuagaagggaaaaugagggauauuacuucugcucagcacugagcaacaguaucauguauuuuucccauuucgugccugucuuucuaccagccaagcccacaaccacuccugcuccacggccgcccaccccugccccaacaauugcgucucaaccccucagccugcgcccugaagcauguagaccagccgcuggcggugccgugcacacgagggggcuugacuucgcaugcgauauauacaucugggcuccccuggccggaacuuguggcguuuugcuccuguccuuagugauuacccuguauugcaaucaucggaaccgccgaagagucuguaaaugcccgaggccugugguaaagucaggcgacaagcccagucucagcgcgcgguacguuuga

SEQ ID NO: 970 - RNA, 708 nt, Artificial Sequence
  derived and/or modified sequence opt4 from CD8A__Homo_sapiens__AAA59674
auggcccugcccgugaccgcccugcugcugccccuggcccugcugcugcacgccgccagacccagccaguucagagugagcccccuggacagaaccuggaaccugggcgagaccguggagcugaagugccaggugcugcugagcaaccccaccagcggcugcagcuggcuguuccagcccagaggcgccgccgccagccccaccuuccugcuguaccugagccagaacaagcccaaggccgccgagggccuggacacccagagauucagcggcaagagacugggcgacaccuucgugcugacccugagcgacuucagaagagagaacgagggcuacuacuucugcagcgcccugagcaacagcaucauguacuucagccacuucgugcccguguuccugcccgccaagcccaccaccacccccgcccccagaccccccacccccgcccccaccaucgccagccagccccugagccugagacccgaggccugcagacccgccgccggcggcgccgugcacaccagaggccuggacuucgccugcgacaucuacaucugggccccccuggccggcaccugcggcgugcugcugcugagccuggugaucacccuguacugcaaccacagaaacagaagaagagugugcaagugccccagacccguggugaagagcggcgacaagcccagccugagcgccagauacguguga

SEQ ID NO: 971 - RNA, 708 nt, Artificial Sequence
  derived and/or modified sequence opt5 from CD8A__Homo_sapiens__AAA59674
auggcccugcccgugaccgcucuccugcuuccucuggcccuccugcuucacgcggcuagaccgagccaguuccgggucucuccccuggaccgcacauggaaccucggcgagacgguugaacugaagugccaagugcugcucuccaauccuaccagcggguguuccuggcuguuucagcccagaggagccgccgcuucuccuacauuccuucuguaccucagccagaacaaacccaaggccgcugagggccuggauacccagcgguuuuccgggaaacgccuuggagacacauucgugcugacccucucugauuuuagacgggaaaaugagggcuauuacuucugcagcgcccuguccaacagcaucauguauuuuucucauuucgucccuguguuucugccggcgaagcccacaaccacgccugcgccccgcccucccaccccggcuccuacaauugccucccaaccccucagccugagaccugaagccugucggcccgccgccgggggagccguucacacccgcggccuugacuucgcuugcgauaucuacauuugggcuccccuggcuggcacauguggggugcuccugcuuucucuggucaucacccucuauugcaaucauagaaaccggcgcagaguguguaaaugcccucggccgguugugaaguccggagacaagcccagccugucugcccgcuacgucuga

SEQ ID NO: 972 - protein, 823 aa, Artificial Sequence
  CDC27/m__Homo_sapiens__G5EA36
MTVLQEPVQAAIWQALNHYAYRDAVFLAERLYAEVHSEEALFLLATCYYRSGKAYKAYRLLKGHSCTTPQCKYLLAKCCVDLSKLAEGEQILSGGVFNKQKSHDDIVTEFGDSACFTLSLLGHVYCKTDRLAKGSECYQKSLSLNPFLWSPFESLCEIGEKPDPDQTFKFTSLQNFSNCLPNSCTTQVPNHSLSHRQPETVLTETPQDTIELNRLNLESSNSKYSLNTDSSVSYIDSAVISPDTVPLGTGTSILSKQVQNKPKTGRSLLGGPAALSPLTPSFGILPLETPSPGDGSYLQNYTNTPPVIDVPSTGAPSKKSVARIGQTGTKSVFSQSGNSREVTPILAQTQSSGPQTSTTPQVLSPTITSPPNALPRRSSRLFTSDSSTTKENSKKLKMKFPPKIPNRKTKSKTNKGGITQPNINDSLEITKLDSSIISEGKISTITPQIQAFNLQKAAAGLMSLLREMGKGYLALCSYNCKEAINILSHLPSHHYNTGWVLCQIGRAYFELSEYMQAERIFSEVRRIENYRVEGMEIYSTTLWHLQKDVALSVLSKDLTDMDKNSPEAWCAAGNCFSLQREHDIAIKFFQRAIQVDPNYAYAYTLLGHEFVLTEELDKALACFRNAIRVNPRHYNAWYGLGMIYYKQEKFSLAEMHFQKALDINPQSSVLLCHIGVVQHALKKSEKALDTLNKAIVIDPKNPLCKFHRASVLFANEKYKSALQELEELKQIVPKESLVYFLIGKVYKKLGQTHLALMNFSWAMDLDPKGANNQIKEAIDKRYLPDDEEPITQEEQIMGTDESQESSMTDADDTQLHAAESDEF

SEQ ID NO: 973 - RNA, 2472 nt, Artificial Sequence
  CDC27/m__Homo_sapiens__EAW57688
augacggugcugcaggaacccguccaggcugcuauauggcaagcacuaaaccacuaugcuuaccgagaugcgguuuuccucgcagaacgccuuuaugcagaaguacacucagaagaagccuuguuuuuacuggcaaccuguuauuaccgcucaggaaaggcauauaaagcauauagacucuugaaaggacacaguuguacuacaccgcaaugcaaauaccugcuugcaaaauguuguguugaucucagcaagcuugcagaaggggaacaaaucuuaucugguggaguguuuaauaagcagaaaagccaugaugauauuguuacugaguuuggugauucagcuugcuuuacucuuucauuguugggacauguauauugcaagacagaucggcuugccaaaggaucagaauguuaccaaaagagccuuaguuuaaauccuuuccucuggucucccuuugaaucauuaugugaaauaggugaaaagccagauccugaccaaacauuuaaauucacaucuuuacagaacuuuagcaacugucugcccaacucuugcacaacacaaguaccuaaucauaguuuaucucacagacagccugagacaguucuuacggaaacaccccaggacacaauugaauuaaacagauugaauuuagaaucuuccaauucaaaguacuccuugaauacagauuccucagugucuuauauugauucagcuguaauuucaccugauacugucccacugggaacaggaacuuccauauuaucuaaacagguucaaaauaaaccaaaaacuggucgaaguuuauuaggaggaccagcagcucuuaguccauuaaccccaaguuuugggauuuugccauuagaaaccccaaguccuggagauggauccuauuuacaaaacuacacuaauacaccuccuguaauugaugugccauccaccggagccccuucaaaaaagucuguugccagaaucggccaaacuggaacaaagucugucuucucacagaguggaaauagccgagagguaacuccaauucuugcacaaacacaaaguucugguccacaaacaaguacaacaccucagguauugagccccacuauuacaucucccccaaacgcacugccucgaagaaguucacgacucuuuacuagugacagcuccacaaccaaggagaauagcaaaaaauuaaaaaugaaguuuccaccuaaaaucccaaacagaaaaacaaaaaguaaaacuaauaaaggaggaauaacucaaccuaacauaaaugauagccuggaaauuacaaaauuggacucuuccaucauuucagaagggaaaauauccacaaucacaccucagauucaggccuuuaaucuacaaaaagcagcagcagguuugaugagccuucuucgugaaauggggaaagguuauuuagcuuuguguucauacaacugcaaagaagcuauaaauauuuugagccaucuaccuucucaccacuacaauacugguuggguacugugccaaauuggaagggccuauuuugaacuuucagaguacaugcaagcugaaagaauauucucagagguuagaaggauugagaauuauagaguugaaggcauggagaucuacucuacaacacuuuggcaucuucaaaaagauguugcucuuucaguucugucaaaagacuuaacagacauggauaaaaauucgccagaggccuggugugcugcagggaacuguuucagucugcaacgggaacaugauauugcaauuaaauucuuccagagagcuauccaaguugauccaaauuacgcuuaugccuauacucuauuagggcaugaguuugucuuaacugaagaauuggacaaagcauuagcuuguuuucgaaaugcuaucagagucaauccuagacauuauaaugcaugguaugguuuaggaaugauuuauuacaagcaagaaaaauucagccuugcagaaaugcauuuccaaaaagcgcuugauaucaacccucaaaguucaguuuuacuuugccacauuggaguaguucaacaugcacugaaaaaaucagagaaggcuuuggauacccuaaacaaagccauugucauugaucccaagaacccucuaugcaaauuucacagagccucaguuuuauuugcaaaugaaaaauauaagucugcuuuacaagaacuugaagaauugaaacaaauuguucccaaagaaucccucguuuacuucuuaauaggaaagguuuacaagaaguuaggucaaacgcaccucgcccugaugaauuucucuugggcuauggauuuagauccuaaaggagccaauaaccagauuaaagaggcaauugauaagcguuaucuuccagaugaugaggagccaauaacccaagaagaacagaucaugggaacagaugaaucccaggagagcagcaugacagaugcggaugacacacaacuucaugcagcugaaagugaugaauuuuaa

SEQ ID NO: 974 - RNA, 2472 nt, Artificial Sequence
  derived and/or modified sequence opt1 from CDC27/m__Homo_sapiens__EAW57688
augaccgugcugcaggagcccguccaggccgccaucuggcaggcgcucaaccacuacgccuaccgcgacgccguguuccuggccgagcggcuguacgccgaggugcacagcgaggaggcccucuuccugcuggcgaccugcuacuaccgcuccggcaaggccuacaaggccuaccggcuccugaaggggcacagcugcacgaccccgcagugcaaguaccugcucgcgaagugcugcgucgaccuguccaagcuggccgagggcgagcagauccucagcgggggcguguucaacaagcagaagucccacgacgacaucgugaccgaguucggggacagcgccugcuucacccugucccugcucggccacgucuacugcaagacggaccgccuggccaagggcagcgagugcuaccagaagucccugagccucaaccccuuccuguggucccccuucgagagccugugcgagaucggggagaagcccgacccggaccagaccuucaaguucaccucccuccagaacuucagcaacugccugcccaacuccugcaccacccaggugcccaaccacagccugucccaccggcagcccgagaccgugcucaccgagaccccgcaggacacgaucgagcugaaccgccugaaccucgagagcuccaacagcaaguacagccugaacaccgacuccagcgucuccuacaucgacagcgccgugaucucccccgacaccgugccccugggcaccgggacgagcauccucuccaagcagguccagaacaagcccaagaccggccggagccugcucgggggcccggcggcccugagcccccugacgcccuccuucggcauccugccccucgagaccccgucccccggggacggcagcuaccugcagaacuacacgaacaccccgcccgugaucgacgugcccuccaccggggcgcccagcaagaaguccgucgcccgcaucggccagaccggcaccaagagcguguucucccagagcgggaacucccgggaggugacgcccauccuggcccagacccagagcagcggcccccagaccuccacgaccccgcagguccucagccccaccaucaccuccccgcccaacgcccugccccgccggagcucccgccuguucacgagcgacuccagcaccaccaaggagaacuccaagaagcucaagaugaaguucccgcccaagauccccaaccggaagaccaagagcaagacgaacaagggcgggaucacccagcccaacaucaacgacucccuggagaucaccaagcuggacagcuccaucaucagcgaggggaagaucuccaccaucacgccccagauccaggccuucaaccuccagaaggccgccgccggccugaugagccugcuccgcgagaugggcaagggguaccuggcgcugugcuccuacaacugcaaggaggccaucaacauccugagccaccuccccagccaccacuacaacaccggcugggugcugugccagaucgggcgggccuacuucgagcuguccgaguacaugcaggccgagcgcaucuucagcgaggugcggcgcaucgagaacuaccgggucgagggcauggagaucuacuccaccacccucuggcaccuccagaaggacguggcccugagcgugcuguccaaggaccugaccgacauggacaagaacagcccggaggcguggugcgccgccgggaacugcuucucccugcagcgcgagcacgacaucgccaucaaguucuuccagcgggcgauccaggucgaccccaacuacgccuacgccuacacgcuccugggccacgaguucgugcugaccgaggagcucgacaaggcccuggccugcuuccgcaacgcgauccgcgucaacccccggcacuacaacgccugguacggccuggggaugaucuacuacaagcaggagaaguucagccucgccgagaugcacuuccagaaggcccuggacaucaacccccaguccagcgugcugcucugccacaucggcgugguccagcacgcccugaagaaguccgagaaggcgcuggacacccucaacaaggccaucgugaucgacccgaagaacccccugugcaaguuccaccgcgccagcgugcuguucgccaacgagaaguacaaguccgcccuccaggagcuggaggagcugaagcagaucguccccaaggagagccucguguacuuccugaucgggaagguguacaagaagcugggccagacccaccucgcgcugaugaacuucuccugggccauggaccuggaccccaagggggccaacaaccagaucaaggaggccaucgacaagcgguaccucccggacgacgaggagcccaucacgcaggaggagcagaucaugggcaccgacgagagccaggaguccagcaugaccgacgcggacgacacccagcugcacgccgccgaguccgacgaguucuga

SEQ ID NO: 975 - RNA, 2472 nt, Artificial Sequence
  derived and/or modified sequence opt2 from CDC27/m__Homo_sapiens__EAW57688
augaccguccuccaggagcccguccaggccgccaucuggcaggcccucaaccacuacgccuaccgcgacgccgucuuccucgccgagcgccucuacgccgagguccacuccgaggaggcccucuuccuccucgccaccugcuacuaccgcuccggcaaggccuacaaggccuaccgccuccucaagggccacuccugcaccaccccccagugcaaguaccuccucgccaagugcugcgucgaccucuccaagcucgccgagggcgagcagauccucuccggcggcgucuucaacaagcagaagucccacgacgacaucgucaccgaguucggcgacuccgccugcuucacccucucccuccucggccacgucuacugcaagaccgaccgccucgccaagggcuccgagugcuaccagaagucccucucccucaaccccuuccucuggucccccuucgagucccucugcgagaucggcgagaagcccgaccccgaccagaccuucaaguucaccucccuccagaacuucuccaacugccuccccaacuccugcaccacccagguccccaaccacucccucucccaccgccagcccgagaccguccucaccgagaccccccaggacaccaucgagcucaaccgccucaaccucgaguccuccaacuccaaguacucccucaacaccgacuccuccgucuccuacaucgacuccgccgucaucucccccgacaccgucccccucggcaccggcaccuccauccucuccaagcagguccagaacaagcccaagaccggccgcucccuccucggcggccccgccgcccucuccccccucacccccuccuucggcauccucccccucgagacccccucccccggcgacggcuccuaccuccagaacuacaccaacaccccccccgucaucgacguccccuccaccggcgcccccuccaagaaguccgucgcccgcaucggccagaccggcaccaaguccgucuucucccaguccggcaacucccgcgaggucacccccauccucgcccagacccaguccuccggcccccagaccuccaccaccccccagguccucucccccaccaucaccuccccccccaacgcccucccccgccgcuccucccgccucuucaccuccgacuccuccaccaccaaggagaacuccaagaagcucaagaugaaguucccccccaagauccccaaccgcaagaccaaguccaagaccaacaagggcggcaucacccagcccaacaucaacgacucccucgagaucaccaagcucgacuccuccaucaucuccgagggcaagaucuccaccaucaccccccagauccaggccuucaaccuccagaaggccgccgccggccucaugucccuccuccgcgagaugggcaagggcuaccucgcccucugcuccuacaacugcaaggaggccaucaacauccucucccaccuccccucccaccacuacaacaccggcuggguccucugccagaucggccgcgccuacuucgagcucuccgaguacaugcaggccgagcgcaucuucuccgagguccgccgcaucgagaacuaccgcgucgagggcauggagaucuacuccaccacccucuggcaccuccagaaggacgucgcccucuccguccucuccaaggaccucaccgacauggacaagaacucccccgaggccuggugcgccgccggcaacugcuucucccuccagcgcgagcacgacaucgccaucaaguucuuccagcgcgccauccaggucgaccccaacuacgccuacgccuacacccuccucggccacgaguucguccucaccgaggagcucgacaaggcccucgccugcuuccgcaacgccauccgcgucaacccccgccacuacaacgccugguacggccucggcaugaucuacuacaagcaggagaaguucucccucgccgagaugcacuuccagaaggcccucgacaucaacccccaguccuccguccuccucugccacaucggcgucguccagcacgcccucaagaaguccgagaaggcccucgacacccucaacaaggccaucgucaucgaccccaagaacccccucugcaaguuccaccgcgccuccguccucuucgccaacgagaaguacaaguccgcccuccaggagcucgaggagcucaagcagaucguccccaaggagucccucgucuacuuccucaucggcaaggucuacaagaagcucggccagacccaccucgcccucaugaacuucuccugggccauggaccucgaccccaagggcgccaacaaccagaucaaggaggccaucgacaagcgcuaccuccccgacgacgaggagcccaucacccaggaggagcagaucaugggcaccgacgagucccaggaguccuccaugaccgacgccgacgacacccagcuccacgccgccgaguccgacgaguucuga

SEQ ID NO: 976 - RNA, 2472 nt, Artificial Sequence
  derived and/or modified sequence opt3 from CDC27/m__Homo_sapiens__EAW57688
augaccgugcugcaggagcccguccaagccgcuaucuggcaggcacucaaccacuacgccuauagagacgcgguuuuccuugcugaaaggcuguacgccgaggugcauagcgaagaggcauuguuuuuacuggccacaugcuauuaccgguccggcaaggcuuauaaagcauaccgccuacucaaggggcacucuuguacuacgccucagugcaaauaucugcuugccaaguguugcguagaucugucaaaauuggcugaaggagagcagauucucagugguggcguguucaauaagcaaaagagccaugacgauauagucaccgaguuuggggacuccgccuguuucacacugucucugcucggacacguguacugcaaaacugaucgauuagcgaagggcucggaauguuaccagaaaucacugagccuuaacccauuuuuguggaguccguucgagucccugugcgaaaucggugagaagcccgacccugaucagaccuuuaaauucacaucucuacagaauuuuagcaacugucucccaaauuccugcaccacucaaguucccaaccauucacugagucaccgucagccugagacagugcuuaccgaaacgccacaggacacuauugagcugaauagauugaaccucgaaagcucuaauuccaaguauucacugaacaccgauagcagugucucuuacaucgacuccgcagugauuagccccgauacaguaccuuuagggacuggaaccucgauccugucuaagcagguucaaaauaaaccaaagacaggcaggucccuccuuggcgggccggccgcucugucacccuugaccccuaguuucggaauacuaccacuggagacgcccagcccuggugacggcuccuaucuccagaacuacacuaauacaccacccgugaucgaugucccgucuaccggggccccuagcaaaaagucaguggcacggauuggacagacuggcacaaaaaguguguuuucccaaagcgguaacucucgcgaagucacccccauccuggcucagacgcagucaagugggccacagaccagcacaacuccucaaguucuuucccccaccauuacaucuccacccaaugcccugccuagaaggucgagccgguuguucacuuccgacucaaguaccacaaaggagaacucuaaaaagcucaagaugaaauuuccaccgaagauccccaaccgcaaaaccaagagcaaaacuaauaagggaggcauaacgcagccuaacauuaaugacucccuggagaucacaaaguuagauucaagcauuaucucugaaggcaaaaucuccaccauuacuccacagauacaggcguucaaccugcaaaaggccgcagcugggcuaaugagucuccugcgagagaugggaaaagguuaucuugccuuguguagcuacaauugcaaggaagcuaucaacauucugucucaccuccccucccaucacuauaauaccggcugggugcugugccagaucgggagagccuacuucgagcuuucagaauacaugcaggcagagaggauauuuagugagguacggcguauugaaaacuaucgcguggagggaauggaaaucuacagcacaacccuguggcauuugcagaaagacgucgcccucucggugcuguccaaggauuuaacugacauggauaaaaauucuccugaggcuuggugugcggcaggcaacugcuucagccugcaaagagaacacgacaucgccauuaaguuuuuccagagggcuauccagguugauccaaauuaugccuacgcauauacacuacucggucacgaguuugugcugacggaggaacuugacaaggccuuggcuuguuuccggaacgccauucgagucaauccccgccauuacaacgcaugguaugggcugggcaugauauacuacaaacaggagaaguuuucacucgcggaaaugcacuuccaaaaagcucuggauaucaauccgcagaguuccguguuacugugccauauuggaguaguucagcacgcccuuaagaagucugagaaagcauuggacacccucaacaaggccaucgugaucgauccuaaaaacccacuguguaaguuucauagagcuagcguccuauucgccaaugagaaauauaaguccgcacugcaagaacucgaggaacugaaacagauugugcccaaggagucacuugucuacuuuuugauaggcaagguguauaaaaagcuggggcagacucacuuagcucucaugaacuucagcugggccauggaccuggacccuaaaggagcgaauaaccagaucaaggaagccauugauaaaagguaccuucccgacgaugaggagccaaucacacaagaggaacagauuauggguaccgacgaaagucaggagucuuccaugacagaugcugacgauacucagcugcacgcagccgaaagcgacgaguuuuga

SEQ ID NO: 977 - RNA, 2472 nt, Artificial Sequence
  derived and/or modified sequence opt4 from CDC27/m__Homo_sapiens__EAW57688
augaccgugcugcaggagcccgugcaggccgccaucuggcaggcccugaaccacuacgccuacagagacgccguguuccuggccgagagacuguacgccgaggugcacagcgaggaggcccuguuccugcuggccaccugcuacuacagaagcggcaaggccuacaaggccuacagacugcugaagggccacagcugcaccaccccccagugcaaguaccugcuggccaagugcugcguggaccugagcaagcuggccgagggcgagcagauccugagcggcggcguguucaacaagcagaagagccacgacgacaucgugaccgaguucggcgacagcgccugcuucacccugagccugcugggccacguguacugcaagaccgacagacuggccaagggcagcgagugcuaccagaagagccugagccugaaccccuuccuguggagccccuucgagagccugugcgagaucggcgagaagcccgaccccgaccagaccuucaaguucaccagccugcagaacuucagcaacugccugcccaacagcugcaccacccaggugcccaaccacagccugagccacagacagcccgagaccgugcugaccgagaccccccaggacaccaucgagcugaacagacugaaccuggagagcagcaacagcaaguacagccugaacaccgacagcagcgugagcuacaucgacagcgccgugaucagccccgacaccgugccccugggcaccggcaccagcauccugagcaagcaggugcagaacaagcccaagaccggcagaagccugcugggcggccccgccgcccugagcccccugacccccagcuucggcauccugccccuggagacccccagccccggcgacggcagcuaccugcagaacuacaccaacaccccccccgugaucgacgugcccagcaccggcgcccccagcaagaagagcguggccagaaucggccagaccggcaccaagagcguguucagccagagcggcaacagcagagaggugacccccauccuggcccagacccagagcagcggcccccagaccagcaccaccccccaggugcugagccccaccaucaccagcccccccaacgcccugcccagaagaagcagcagacuguucaccagcgacagcagcaccaccaaggagaacagcaagaagcugaagaugaaguucccccccaagauccccaacagaaagaccaagagcaagaccaacaagggcggcaucacccagcccaacaucaacgacagccuggagaucaccaagcuggacagcagcaucaucagcgagggcaagaucagcaccaucaccccccagauccaggccuucaaccugcagaaggccgccgccggccugaugagccugcugagagagaugggcaagggcuaccuggcccugugcagcuacaacugcaaggaggccaucaacauccugagccaccugcccagccaccacuacaacaccggcugggugcugugccagaucggcagagccuacuucgagcugagcgaguacaugcaggccgagagaaucuucagcgaggugagaagaaucgagaacuacagaguggagggcauggagaucuacagcaccacccuguggcaccugcagaaggacguggcccugagcgugcugagcaaggaccugaccgacauggacaagaacagccccgaggccuggugcgccgccggcaacugcuucagccugcagagagagcacgacaucgccaucaaguucuuccagagagccauccagguggaccccaacuacgccuacgccuacacccugcugggccacgaguucgugcugaccgaggagcuggacaaggcccuggccugcuucagaaacgccaucagagugaaccccagacacuacaacgccugguacggccugggcaugaucuacuacaagcaggagaaguucagccuggccgagaugcacuuccagaaggcccuggacaucaacccccagagcagcgugcugcugugccacaucggcguggugcagcacgcccugaagaagagcgagaaggcccuggacacccugaacaaggccaucgugaucgaccccaagaacccccugugcaaguuccacagagccagcgugcuguucgccaacgagaaguacaagagcgcccugcaggagcuggaggagcugaagcagaucgugcccaaggagagccugguguacuuccugaucggcaagguguacaagaagcugggccagacccaccuggcccugaugaacuucagcugggccauggaccuggaccccaagggcgccaacaaccagaucaaggaggccaucgacaagagauaccugcccgacgacgaggagcccaucacccaggaggagcagaucaugggcaccgacgagagccaggagagcagcaugaccgacgccgacgacacccagcugcacgccgccgagagcgacgaguucuga

SEQ ID NO: 978 - RNA, 2472 nt, Artificial Sequence
  derived and/or modified sequence opt5 from CDC27/m__Homo_sapiens__EAW57688
augaccgugcugcaggagcccguccaagccgcuaucuggcaggcccucaaccacuacgcguauagagacgcuguuuuccuggccgaacggcuuuacgccgaggugcauagcgaagaggcucuguuucuccuggccacaugcuauuaccgcuccggcaaggcuuauaaagccuacagacuucugaaggggcacucuuguacgaccccucagugcaaauaucuccuggcgaaguguugcguggaucugagcaaacucgccgaaggagagcagauucuguccggcggggucuucaauaagcaaaagucucaugacgauaucgugacagaguuuggagacagcgcuuguuucacccuuucccugcucggccacguuuacugcaaaacagaucggcuggccaaggggucugaauguuaccagaaaagccuuucccugaacccguuucucuggagccccuucgagucucugugcgaaauuggagagaagccugaccccgaucagaccuuuaaauucacaucccugcagaauuuuagcaacugucucccuaauucuugcaccacgcaagugcccaaccauucccugagccaccgccagccugagaccguccuuacagaaaccccgcaggacacaaucgagcugaauagacucaaccuggaaucuuccaauagcaaguauucccuuaacaccgauucuagcguguccuacauugacagcgcuguuaucucucccgauacggugccucugggcacaggcaccuccauccucagcaagcagguccaaaauaaacccaagacagggcggucucugcugggaggcccugccgcgcucagcccccugaccccguccuucgggauucuuccucuggagacccccucuccuggagacggcagcuaucuccagaacuacacaaauacgccucccgugaucgaugugcccuccaccggggccccgagcaaaaagucugucgcucgcauuggacagacaggcaccaaauccguuuuuagccaaucuggcaacuccagagaagugacacccauccuggcccagacccagagcuccgggccucagacgucuacaacaccccaagugcuuagcccuaccauuaccucucccccgaaugcucugccucggcgcuccagcagacucuucaccuccgacagcucuacaacgaaggagaacuccaaaaagcugaagaugaaauuucccccuaagauccccaaccggaaaaccaagagcaaaacaaauaagggaggcauuacccagccuaacaucaaugacucucuggagaucacaaagcucgauuccagcauuaucucugaagggaaaauuagcaccaucacgccccagauucaggccuucaaccugcaaaaggccgcugcgggacuuaugucccugcuccgcgagaugggcaaaggguaucuggcccuguguagcuacaauugcaaggaagcuaucaacauccuuucucaccucccgucccaucacuauaauaccggauggguccugugccagauuggcagagccuacuucgagcugagcgaauacaugcaggccgagcggaucuuuuccgaggugcgcagaauugaaaacuaucggguugagggcauggaaaucuacucuacaacccucuggcaucugcagaaagacguggcucuuagcguccuguccaaggaucucacagacauggauaaaaauucuccugaggccuggugugcggcugggaacugcuucagccugcaaagagaacacgacauugccaucaaguuuuuccagcgcgccauccagguggaucccaauuaugcuuacgccuauacccugcuuggacacgaguuuguucucacggaggaacuggacaaggcucuggccuguuuccggaacgcgauuagagugaauccccgccauuacaacgccugguauggccucgggaugaucuacuacaaacaggagaaguuuucccuggcugaaaugcacuuccaaaaagcccuugauauuaauccucagucuagcguccugcucugccauaucggagugguccagcacgcucugaagaaguccgagaaagcccuggacacacuuaacaaggcgauugugaucgauccgaaaaacccccucuguaaguuucaucgggccagcguucuguucgcuaaugagaaauauaagucugcccugcaagaacucgaggaacugaaacagauugugccuaaggagucccuugucuacuuucugaucggcaagguguauaaaaagcucgggcagacccaccuggcucugaugaacuucagcugggccauggaccuugaccccaaaggcgccaauaaccagaucaaggaagcuauugauaaaagauaccucccugacgaugaggagcccaucacacaagaggaacagauuaugggaaccgacgaaucucaggaguccagcaugaccgaugcggacgauacacagcugcacgccgcugaaucugacgaguuuuga

SEQ ID NO: 979 - protein, 824 aa, Artificial Sequence
  CDC27/m__Homo_sapiens__P30260
MTVLQEPVQAAIWQALNHYAYRDAVFLAERLYAEVHSEEALFLLATCYYRSGKAYKAYRLLKGHSCTTPQCKYLLAKCCVDLSKLAEGEQILSGGVFNKQKSHDDIVTEFGDSACFTLSLLGHVYCKTDRLAKGSECYQKSLSLNPFLWSPFESLCEIGEKPDPDQTFKFTSLQNFSNCLPNSCTTQVPNHSLSHRQPETVLTETPQDTIELNRLNLESSNSKYSLNTDSSVSYIDSAVISPDTVPLGTGTSILSKQVQNKPKTGRSLLGGPAALSPLTPSFGILPLETPSPGDGSYLQNYTNTPPVIDVPSTGAPSKKSVARIGQTGTKSVFSQSGNSREVTPILAQTQSSGPQTSTTPQVLSPTITSPPNALPRRSSRLFTSDSSTTKENSKKLKMKFPPKIPNRKTKSKTNKGGITQPNINDSLEITKLDSSIISEGKISTITPQIQAFNLQKAAAEGLMSLLREMGKGYLALCSYNCKEAINILSHLPSHHYNTGWVLCQIGRAYFELSEYMQAERIFSEVRRIENYRVEGMEIYSTTLWHLQKDVALSVLSKDLTDMDKNSPEAWCAAGNCFSLQREHDIAIKFFQRAIQVDPNYAYAYTLLGHEFVLTEELDKALACFRNAIRVNPRHYNAWYGLGMIYYKQEKFSLAEMHFQKALDINPQSSVLLCHIGVVQHALKKSEKALDTLNKAIVIDPKNPLCKFHRASVLFANEKYKSALQELEELKQIVPKESLVYFLIGKVYKKLGQTHLALMNFSWAMDLDPKGANNQIKEAIDKRYLPDDEEPITQEEQIMGTDESQESSMTDADDTQLHAAESDEF

SEQ ID NO: 980 - RNA, 2475 nt, Artificial Sequence
  CDC27/m__Homo_sapiens__AAB34378
augacggugcugcaggaacccguccaggcugcuauauggcaagcacuaaaccacuaugcuuaccgagaugcgguuuuccucgcagaacgccuuuaugcagaaguacacucagaagaagccuuguuuuuacuggcaaccuguuauuaccgcucaggaaaggcauauaaagcauauagacucuugaaaggacacaguuguacuacaccgcaaugcaaauaccugcuugcaaaauguuguguugaucucagcaagcuugcagaaggggaacaaaucuuaucugguggaguguuuaauaagcagaaaagccaugaugauauuguuacugaguuuggugauucagcuugcuuuacucuuucauuguugggacauguauauugcaagacagaucggcuugccaaaggaucagaauguuaccaaaagagccuuaguuuaaauccuuuccucuggucucccuuugaaucauuaugugaaauaggugaaaagccagauccugaccaaacauuuaaauucacaucuuuacagaacuuuagcaacugucugcccaacucuugcacaacacaaguaccuaaucauaguuuaucucacagacagccugagacaguucuuacggaaacaccccaggacacaauugaauuaaacagauugaauuuagaaucuuccaauucaaaguacuccuugaauacagauuccucagugucuuauauugauucagcuguaauuucaccugauacugucccacugggaacaggaacuuccauauuaucuaaacagguucaaaauaaaccaaaaacuggucgaaguuuauuaggaggaccagcagcucuuaguccauuaaccccaaguuuugggauuuugccauuagaaaccccaaguccuggagauggauccuauuuacaaaacuacacuaauacaccuccuguaauugaugugccauccaccggagccccuucaaaaaagucuguugccagaaucggccaaacuggaacaaagucugucuucucacagaguggaaauagccgagagguaacuccaauucuugcacaaacacaaaguucugguccacaaacaaguacaacaccucagguauugagccccacuauuacaucucccccaaacgcacugccucgaagaaguucacgacucuuuacuagugacagcuccacaaccaaggagaauagcaaaaaauuaaaaaugaaguuuccaccuaaaaucccaaacagaaaaacaaaaaguaaaacuaauaaaggaggaauaacucaaccuaacauaaaugauagccuggaaauuacaaaauuggacucuuccaucauuucagaagggaaaauauccacaaucacaccucagauucaggccuuuaaucuacaaaaagcagcagcagaagguuugaugagccuucuucgugaaauggggaaagguuauuuagcuuuguguucauacaacugcaaagaagcuauaaauauuuugagccaucuaccuucucaccacuacaauacugguuggguacugugccaaauuggaagggccuauuuugaacuuucagaguacaugcaagcugaaagaauauucucagagguuagaaggauugagaauuauagaguugaaggcauggagaucuacucuacaacacuuuggcaucuucaaaaagauguugcucuuucaguucugucaaaagacuuaacagacauggauaaaaauucgccagaggccuggugugcugcagggaacuguuucagucugcaacgggaacaugauauugcaauuaaauucuuccagagagcuauccaaguugauccaaauuacgcuuaugccuauacucuauuagggcaugaguuugucuuaacugaagaauuggacaaagcauuagcuuguuuucgaaaugcuaucagagucaauccuagacauuauaaugcaugguaugguuuaggaaugauuuauuacaagcaagaaaaauucagccuugcagaaaugcauuuccaaaaagcgcuugauaucaacccucaaaguucaguuuuacuuugccacauuggaguaguucaacaugcacugaaaaaaucagagaaggcuuuggauacccuaaacaaagccauugucauugaucccaagaacccucuaugcaaauuucacagagccucaguuuuauuugcaaaugaaaaauauaagucugcuuuacaagaacuugaagaauugaaacaaauuguucccaaagaaucccucguuuacuucuuaauaggaaagguuuacaagaaguuaggucaaacgcaccucgcccugaugaauuucucuugggcuauggauuuagauccuaaaggagccaauaaccagauuaaagaggcaauugauaagcguuaucuuccagaugaugaggagccaauaacccaagaagaacagaucaugggaacagaugaaucccaggagagcagcaugacagaugcggaugacacacaacuucaugcagcugaaagugaugaauuuuaa

SEQ ID NO: 981 - RNA, 2475 nt, Artificial Sequence
  derived and/or modified sequence opt1 from CDC27/m__Homo_sapiens__AAB34378
augaccgugcugcaggagcccguccaggccgccaucuggcaggcgcucaaccacuacgccuaccgcgacgccguguuccuggccgagcggcuguacgccgaggugcacagcgaggaggcccucuuccugcuggcgaccugcuacuaccgcuccggcaaggccuacaaggccuaccggcuccugaaggggcacagcugcacgaccccgcagugcaaguaccugcucgcgaagugcugcgucgaccuguccaagcuggccgagggcgagcagauccucagcgggggcguguucaacaagcagaagucccacgacgacaucgugaccgaguucggggacagcgccugcuucacccugucccugcucggccacgucuacugcaagacggaccgccuggccaagggcagcgagugcuaccagaagucccugagccucaaccccuuccuguggucccccuucgagagccugugcgagaucggggagaagcccgacccggaccagaccuucaaguucaccucccuccagaacuucagcaacugccugcccaacuccugcaccacccaggugcccaaccacagccugucccaccggcagcccgagaccgugcucaccgagaccccgcaggacacgaucgagcugaaccgccugaaccucgagagcuccaacagcaaguacagccugaacaccgacuccagcgucuccuacaucgacagcgccgugaucucccccgacaccgugccccugggcaccgggacgagcauccucuccaagcagguccagaacaagcccaagaccggccggagccugcucgggggcccggcggcccugagcccccugacgcccuccuucggcauccugccccucgagaccccgucccccggggacggcagcuaccugcagaacuacacgaacaccccgcccgugaucgacgugcccuccaccggggcgcccagcaagaaguccgucgcccgcaucggccagaccggcaccaagagcguguucucccagagcgggaacucccgggaggugacgcccauccuggcccagacccagagcagcggcccccagaccuccacgaccccgcagguccucagccccaccaucaccuccccgcccaacgcccugccccgccggagcucccgccuguucacgagcgacuccagcaccaccaaggagaacuccaagaagcucaagaugaaguucccgcccaagauccccaaccggaagaccaagagcaagacgaacaagggcgggaucacccagcccaacaucaacgacucccuggagaucaccaagcuggacagcuccaucaucagcgaggggaagaucuccaccaucacgccccagauccaggccuucaaccuccagaaggccgccgccgagggccugaugagccugcuccgcgagaugggcaagggguaccuggcgcugugcuccuacaacugcaaggaggccaucaacauccugagccaccuccccagccaccacuacaacaccggcugggugcugugccagaucgggcgggccuacuucgagcuguccgaguacaugcaggccgagcgcaucuucagcgaggugcggcgcaucgagaacuaccgggucgagggcauggagaucuacuccaccacccucuggcaccuccagaaggacguggcccugagcgugcuguccaaggaccugaccgacauggacaagaacagcccggaggcguggugcgccgccgggaacugcuucucccugcagcgcgagcacgacaucgccaucaaguucuuccagcgggcgauccaggucgaccccaacuacgccuacgccuacacgcuccugggccacgaguucgugcugaccgaggagcucgacaaggcccuggccugcuuccgcaacgcgauccgcgucaacccccggcacuacaacgccugguacggccuggggaugaucuacuacaagcaggagaaguucagccucgccgagaugcacuuccagaaggcccuggacaucaacccccaguccagcgugcugcucugccacaucggcgugguccagcacgcccugaagaaguccgagaaggcgcuggacacccucaacaaggccaucgugaucgacccgaagaacccccugugcaaguuccaccgcgccagcgugcuguucgccaacgagaaguacaaguccgcccuccaggagcuggaggagcugaagcagaucguccccaaggagagccucguguacuuccugaucgggaagguguacaagaagcugggccagacccaccucgcgcugaugaacuucuccugggccauggaccuggaccccaagggggccaacaaccagaucaaggaggccaucgacaagcgguaccucccggacgacgaggagcccaucacgcaggaggagcagaucaugggcaccgacgagagccaggaguccagcaugaccgacgcggacgacacccagcugcacgccgccgaguccgacgaguucuga

SEQ ID NO: 982 - RNA, 2475 nt, Artificial Sequence
  derived and/or modified sequence opt2 from CDC27/m__Homo_sapiens__AAB34378
augaccguccuccaggagcccguccaggccgccaucuggcaggcccucaaccacuacgccuaccgcgacgccgucuuccucgccgagcgccucuacgccgagguccacuccgaggaggcccucuuccuccucgccaccugcuacuaccgcuccggcaaggccuacaaggccuaccgccuccucaagggccacuccugcaccaccccccagugcaaguaccuccucgccaagugcugcgucgaccucuccaagcucgccgagggcgagcagauccucuccggcggcgucuucaacaagcagaagucccacgacgacaucgucaccgaguucggcgacuccgccugcuucacccucucccuccucggccacgucuacugcaagaccgaccgccucgccaagggcuccgagugcuaccagaagucccucucccucaaccccuuccucuggucccccuucgagucccucugcgagaucggcgagaagcccgaccccgaccagaccuucaaguucaccucccuccagaacuucuccaacugccuccccaacuccugcaccacccagguccccaaccacucccucucccaccgccagcccgagaccguccucaccgagaccccccaggacaccaucgagcucaaccgccucaaccucgaguccuccaacuccaaguacucccucaacaccgacuccuccgucuccuacaucgacuccgccgucaucucccccgacaccgucccccucggcaccggcaccuccauccucuccaagcagguccagaacaagcccaagaccggccgcucccuccucggcggccccgccgcccucuccccccucacccccuccuucggcauccucccccucgagacccccucccccggcgacggcuccuaccuccagaacuacaccaacaccccccccgucaucgacguccccuccaccggcgcccccuccaagaaguccgucgcccgcaucggccagaccggcaccaaguccgucuucucccaguccggcaacucccgcgaggucacccccauccucgcccagacccaguccuccggcccccagaccuccaccaccccccagguccucucccccaccaucaccuccccccccaacgcccucccccgccgcuccucccgccucuucaccuccgacuccuccaccaccaaggagaacuccaagaagcucaagaugaaguucccccccaagauccccaaccgcaagaccaaguccaagaccaacaagggcggcaucacccagcccaacaucaacgacucccucgagaucaccaagcucgacuccuccaucaucuccgagggcaagaucuccaccaucaccccccagauccaggccuucaaccuccagaaggccgccgccgagggccucaugucccuccuccgcgagaugggcaagggcuaccucgcccucugcuccuacaacugcaaggaggccaucaacauccucucccaccuccccucccaccacuacaacaccggcuggguccucugccagaucggccgcgccuacuucgagcucuccgaguacaugcaggccgagcgcaucuucuccgagguccgccgcaucgagaacuaccgcgucgagggcauggagaucuacuccaccacccucuggcaccuccagaaggacgucgcccucuccguccucuccaaggaccucaccgacauggacaagaacucccccgaggccuggugcgccgccggcaacugcuucucccuccagcgcgagcacgacaucgccaucaaguucuuccagcgcgccauccaggucgaccccaacuacgccuacgccuacacccuccucggccacgaguucguccucaccgaggagcucgacaaggcccucgccugcuuccgcaacgccauccgcgucaacccccgccacuacaacgccugguacggccucggcaugaucuacuacaagcaggagaaguucucccucgccgagaugcacuuccagaaggcccucgacaucaacccccaguccuccguccuccucugccacaucggcgucguccagcacgcccucaagaaguccgagaaggcccucgacacccucaacaaggccaucgucaucgaccccaagaacccccucugcaaguuccaccgcgccuccguccucuucgccaacgagaaguacaaguccgcccuccaggagcucgaggagcucaagcagaucguccccaaggagucccucgucuacuuccucaucggcaaggucuacaagaagcucggccagacccaccucgcccucaugaacuucuccugggccauggaccucgaccccaagggcgccaacaaccagaucaaggaggccaucgacaagcgcuaccuccccgacgacgaggagcccaucacccaggaggagcagaucaugggcaccgacgagucccaggaguccuccaugaccgacgccgacgacacccagcuccacgccgccgaguccgacgaguucuga

SEQ ID NO: 983 - RNA, 2475 nt, Artificial Sequence
  derived and/or modified sequence opt3 from CDC27/m__Homo_sapiens__AAB34378
augaccgugcugcaggagcccguccaagccgcuaucuggcaggcacucaaccacuacgccuauagagacgcgguuuuccuugcugaaaggcuguacgccgaggugcauagcgaagaggcauuguuuuuacuggccacaugcuauuaccgguccggcaaggcuuauaaagcauaccgccuacucaaggggcacucuuguacuacgccucagugcaaauaucugcuugccaaguguugcguagaucugucaaaauuggcugaaggagagcagauucucagugguggcguguucaauaagcaaaagagccaugacgauauagucaccgaguuuggggacuccgccuguuucacacugucucugcucggacacguguacugcaaaacugaucgauuagcgaagggcucggaauguuaccagaaaucacugagccuuaacccauuuuuguggaguccguucgagucccugugcgaaaucggugagaagcccgacccugaucagaccuuuaaauucacaucucuacagaauuuuagcaacugucucccaaauuccugcaccacucaaguucccaaccauucacugagucaccgucagccugagacagugcuuaccgaaacgccacaggacacuauugagcugaauagauugaaccucgaaagcucuaauuccaaguauucacugaacaccgauagcagugucucuuacaucgacuccgcagugauuagccccgauacaguaccuuuagggacuggaaccucgauccugucuaagcagguucaaaauaaaccaaagacaggcaggucccuccuuggcgggccggccgcucugucacccuugaccccuaguuucggaauacuaccacuggagacgcccagcccuggugacggcuccuaucuccagaacuacacuaauacaccacccgugaucgaugucccgucuaccggggccccuagcaaaaagucaguggcacggauuggacagacuggcacaaaaaguguguuuucccaaagcgguaacucucgcgaagucacccccauccuggcucagacgcagucaagugggccacagaccagcacaacuccucaaguucuuucccccaccauuacaucuccacccaaugcccugccuagaaggucgagccgguuguucacuuccgacucaaguaccacaaaggagaacucuaaaaagcucaagaugaaauuuccaccgaagauccccaaccgcaaaaccaagagcaaaacuaauaagggaggcauaacgcagccuaacauuaaugacucccuggagaucacaaaguuagauucaagcauuaucucugaaggcaaaaucuccaccauuacuccacagauacaggcguucaaccugcaaaaggccgcagcugaggggcuaaugagucuccugcgagaaaugggaaaagguuaucuugccuuguguagcuacaauugcaaggaggcuaucaacauucugucucaccuccccucccaucacuauaauaccggcugggugcugugccagaucgggagagccuacuucgaacuuucagaguacaugcaggcagagaggauauuuagugaaguacggcguauugagaacuaucgcguggaaggaauggagaucuacagcacaacccuguggcauuugcagaaagacgucgcccucucggugcuguccaaggauuuaacugacauggauaaaaauucuccugaggcuuggugugcggcaggcaacugcuucagccugcaaagagagcacgacaucgccauuaaguuuuuccagagggcuauccagguugauccaaauuaugccuacgcauauacacuacucggucacgaguuugugcugacggaagaacuugacaaggccuuggcuuguuuccggaacgccauucgagucaauccccgccauuacaacgcaugguaugggcugggcaugauauacuacaaacaggaaaaguuuucacucgcggagaugcacuuccaaaaagcucuggauaucaauccgcagaguuccguguuacugugccauauuggaguaguucagcacgcccuuaagaagucugagaaagcauuggacacccucaacaaggccaucgugaucgauccuaaaaacccacuguguaaguuucauagagcuagcguccuauucgccaaugaaaaauauaaguccgcacugcaagagcucgaggaacugaaacagauugugcccaaggaaucacuugucuacuuuuugauaggcaagguguauaaaaagcuggggcagacucacuuagcucucaugaacuucagcugggccauggaccuggacccuaaaggagcgaauaaccagaucaaggaggccauugauaaaagguaccuucccgacgaugaggaaccaaucacacaagaggaacagauuauggguaccgacgagagucaggaaucuuccaugacagaugcugacgauacucagcugcacgcagccgagagcgacgaguuuuga

SEQ ID NO: 984 - RNA, 2475 nt, Artificial Sequence
  derived and/or modified sequence opt4 from CDC27/m__Homo_sapiens__AAB34378
augaccgugcugcaggagcccgugcaggccgccaucuggcaggcccugaaccacuacgccuacagagacgccguguuccuggccgagagacuguacgccgaggugcacagcgaggaggcccuguuccugcuggccaccugcuacuacagaagcggcaaggccuacaaggccuacagacugcugaagggccacagcugcaccaccccccagugcaaguaccugcuggccaagugcugcguggaccugagcaagcuggccgagggcgagcagauccugagcggcggcguguucaacaagcagaagagccacgacgacaucgugaccgaguucggcgacagcgccugcuucacccugagccugcugggccacguguacugcaagaccgacagacuggccaagggcagcgagugcuaccagaagagccugagccugaaccccuuccuguggagccccuucgagagccugugcgagaucggcgagaagcccgaccccgaccagaccuucaaguucaccagccugcagaacuucagcaacugccugcccaacagcugcaccacccaggugcccaaccacagccugagccacagacagcccgagaccgugcugaccgagaccccccaggacaccaucgagcugaacagacugaaccuggagagcagcaacagcaaguacagccugaacaccgacagcagcgugagcuacaucgacagcgccgugaucagccccgacaccgugccccugggcaccggcaccagcauccugagcaagcaggugcagaacaagcccaagaccggcagaagccugcugggcggccccgccgcccugagcccccugacccccagcuucggcauccugccccuggagacccccagccccggcgacggcagcuaccugcagaacuacaccaacaccccccccgugaucgacgugcccagcaccggcgcccccagcaagaagagcguggccagaaucggccagaccggcaccaagagcguguucagccagagcggcaacagcagagaggugacccccauccuggcccagacccagagcagcggcccccagaccagcaccaccccccaggugcugagccccaccaucaccagcccccccaacgcccugcccagaagaagcagcagacuguucaccagcgacagcagcaccaccaaggagaacagcaagaagcugaagaugaaguucccccccaagauccccaacagaaagaccaagagcaagaccaacaagggcggcaucacccagcccaacaucaacgacagccuggagaucaccaagcuggacagcagcaucaucagcgagggcaagaucagcaccaucaccccccagauccaggccuucaaccugcagaaggccgccgccgagggccugaugagccugcugagagagaugggcaagggcuaccuggcccugugcagcuacaacugcaaggaggccaucaacauccugagccaccugcccagccaccacuacaacaccggcugggugcugugccagaucggcagagccuacuucgagcugagcgaguacaugcaggccgagagaaucuucagcgaggugagaagaaucgagaacuacagaguggagggcauggagaucuacagcaccacccuguggcaccugcagaaggacguggcccugagcgugcugagcaaggaccugaccgacauggacaagaacagccccgaggccuggugcgccgccggcaacugcuucagccugcagagagagcacgacaucgccaucaaguucuuccagagagccauccagguggaccccaacuacgccuacgccuacacccugcugggccacgaguucgugcugaccgaggagcuggacaaggcccuggccugcuucagaaacgccaucagagugaaccccagacacuacaacgccugguacggccugggcaugaucuacuacaagcaggagaaguucagccuggccgagaugcacuuccagaaggcccuggacaucaacccccagagcagcgugcugcugugccacaucggcguggugcagcacgcccugaagaagagcgagaaggcccuggacacccugaacaaggccaucgugaucgaccccaagaacccccugugcaaguuccacagagccagcgugcuguucgccaacgagaaguacaagagcgcccugcaggagcuggaggagcugaagcagaucgugcccaaggagagccugguguacuuccugaucggcaagguguacaagaagcugggccagacccaccuggcccugaugaacuucagcugggccauggaccuggaccccaagggcgccaacaaccagaucaaggaggccaucgacaagagauaccugcccgacgacgaggagcccaucacccaggaggagcagaucaugggcaccgacgagagccaggagagcagcaugaccgacgccgacgacacccagcugcacgccgccgagagcgacgaguucuga

SEQ ID NO: 985 - RNA, 2475 nt, Artificial Sequence
  derived and/or modified sequence opt5 from CDC27/m__Homo_sapiens__AAB34378
augaccgugcugcaggagcccguccaagccgcuaucuggcaggcccucaaccacuacgcguauagagacgcuguuuuccuggccgaacggcuuuacgccgaggugcauagcgaagaggcucuguuucuccuggccacaugcuauuaccgcuccggcaaggcuuauaaagccuacagacuucugaaggggcacucuuguacgaccccucagugcaaauaucuccuggcgaaguguugcguggaucugagcaaacucgccgaaggagagcagauucuguccggcggggucuucaauaagcaaaagucucaugacgauaucgugacagaguuuggagacagcgcuuguuucacccuuucccugcucggccacguuuacugcaaaacagaucggcuggccaaggggucugaauguuaccagaaaagccuuucccugaacccguuucucuggagccccuucgagucucugugcgaaauuggagagaagccugaccccgaucagaccuuuaaauucacaucccugcagaauuuuagcaacugucucccuaauucuugcaccacgcaagugcccaaccauucccugagccaccgccagccugagaccguccuuacagaaaccccgcaggacacaaucgagcugaauagacucaaccuggaaucuuccaauagcaaguauucccuuaacaccgauucuagcguguccuacauugacagcgcuguuaucucucccgauacggugccucugggcacaggcaccuccauccucagcaagcagguccaaaauaaacccaagacagggcggucucugcugggaggcccugccgcgcucagcccccugaccccguccuucgggauucuuccucuggagacccccucuccuggagacggcagcuaucuccagaacuacacaaauacgccucccgugaucgaugugcccuccaccggggccccgagcaaaaagucugucgcucgcauuggacagacaggcaccaaauccguuuuuagccaaucuggcaacuccagagaagugacacccauccuggcccagacccagagcuccgggccucagacgucuacaacaccccaagugcuuagcccuaccauuaccucucccccgaaugcucugccucggcgcuccagcagacucuucaccuccgacagcucuacaacgaaggagaacuccaaaaagcugaagaugaaauuucccccuaagauccccaaccggaaaaccaagagcaaaacaaauaagggaggcauuacccagccuaacaucaaugacucucuggagaucacaaagcucgauuccagcauuaucucugaagggaaaauuagcaccaucacgccccagauucaggccuucaaccugcaaaaggccgcugcggagggacuuaugucccugcuccgcgaaaugggcaaaggguaucuggcccuguguagcuacaauugcaaggaggcuaucaacauccuuucucaccucccgucccaucacuauaauaccggauggguccugugccagauuggcagagccuacuucgaacugagcgaguacaugcaggccgagcggaucuuuuccgaagugcgcagaauugagaacuaucggguugaaggcauggagaucuacucuacaacccucuggcaucugcagaaagacguggcucuuagcguccuguccaaggaucucacagacauggauaaaaauucuccugaagccuggugugcggcugggaacugcuucagccugcaaagagagcacgacauugccaucaaguuuuuccagcgcgccauccagguggaucccaauuaugcuuacgccuauacccugcuuggacacgaguuuguucucacggaagaacuggacaaggcucuggccuguuuccggaacgcgauuagagugaauccccgccauuacaacgccugguauggccucgggaugaucuacuacaaacaggaaaaguuuucccuggcugagaugcacuuccaaaaagcccuugauauuaauccucagucuagcguccugcucugccauaucggagugguccagcacgcucugaagaaguccgagaaagcccuggacacacuuaacaaggcgauugugaucgauccgaaaaacccccucuguaaguuucaucgggccagcguucuguucgcuaaugaaaaauauaagucugcccugcaagagcucgaggagcugaaacagauugugccuaaggaaucccuugucuacuuucugaucggcaagguguauaaaaagcucgggcagacccaccuggcucugaugaacuucagcugggccauggaccuugaccccaaaggcgccaauaaccagaucaaggaggcuauugauaaaagauaccucccugacgaugaggaacccaucacacaagaggaacagauuaugggaaccgacgagucucaggaauccagcaugaccgaugcggacgauacacagcugcacgccgcugagucugacgaguuuuga

SEQ ID NO: 986 - protein, 595 aa, Artificial Sequence
  CDE30__Homo_sapiens__P28908
MRVLLAALGLLFLGALRAFPQDRPFEDTCHGNPSHYYDKAVRRCCYRCPMGLFPTQQCPQRPTDCRKQCEPDYYLDEADRCTACVTCSRDDLVEKTPCAWNSSRVCECRPGMFCSTSAVNSCARCFFHSVCPAGMIVKFPGTAQKNTVCEPASPGVSPACASPENCKEPSSGTIPQAKPTPVSPATSSASTMPVRGGTRLAQEAASKLTRAPDSPSSVGRPSSDPGLSPTQPCPEGSGDCRKQCEPDYYLDEAGRCTACVSCSRDDLVEKTPCAWNSSRTCECRPGMICATSATNSCARCVPYPICAAETVTKPQDMAEKDTTFEAPPLGTQPDCNPTPENGEAPASTSPTQSLLVDSQASKTLPIPTSAPVALSSTGKPVLDAGPVLFWVILVLVVVVGSSAFLLCHRRACRKRIRQKLHLCYPVQTSQPKLELVDSRPRRSSTQLRSGASVTEPVAEERGLMSQPLMETCHSVGAAYLESLPLQDASPAGGPSSPRDLPEPRVSTEHTNNKIEKIYIMKADTVIVGTVKAELPEGRGLAGPAEPELEEELEADHTPHYPEQETEPPLGSCSDVMLSVEEEGKEDPLPTAASGK

SEQ ID NO: 987 - RNA, 1788 nt, Artificial Sequence
  CDE30__Homo_sapiens__AAA51947
augcgcguccuccucgccgcgcugggacugcuguuccugggggcgcuacgagccuucccacaggaucgacccuucgaggacaccugucauggaaaccccagccacuacuaugacaaggcugucaggaggugcuguuaccgcugccccauggggcuguucccgacacagcagugcccacagaggccuacugacugcaggaagcagugugagccugacuacuaccuggaugaggccgaccgcuguacagccugcgugacuuguucucgagaugaccucguggagaagacgccgugugcauggaacuccucccgugucugcgaaugucgacccggcauguucuguuccacgucugccgucaacuccugugcccgcugcuucuuccauucugucuguccggcagggaugauugucaaguucccaggcacggcgcagaagaacacggucugugagccggcuuccccaggggucagcccugccugugccagcccagagaacugcaaggaacccuccaguggcaccaucccccaggccaagcccaccccgguguccccagcaaccuccagugccagcaccaugccuguaagagggggcacccgccucgcccaggaagcugcuucuaaacugacgagggcucccgacucucccuccucugugggaaggccuaguucagauccaggucuguccccaacacagccaugcccagaggggucuggugauugcagaaagcagugugagcccgacuacuaccuggacgaggccggccgcugcacagccugcgugagcuguucucgagaugaccuuguggagaagacgccaugugcauggaacuccucccgcaccugcgaaugucgaccuggcaugaucugugccacaucagccaccaacuccugugcccgcuguguccccuacccaaucugugcagcagagacggucaccaagccccaggauauggcugagaaggacaccaccuuugaggcgccaccccuggggacccagccggacugcaaccccaccccagagaauggcgaggcgccugccagcaccagccccacucagagcuugcugguggacucccaggccaguaagacgcugcccaucccaaccagcgcucccgucgcucucuccuccacggggaagcccguucuggaugcagggccagugcucuucugggugauccugguguugguugugguggucggcuccagcgccuuccuccugugccaccggagggccugcaggaagcgaauucggcagaagcuccaccugugcuacccgguccagaccucccagcccaagcuagagcuuguggauuccagacccaggaggagcucaacgcagcugaggaguggugcgucggugacagaacccgucgcggaagagcgaggguuaaugagccagccacugauggagaccugccacagcgugggggcagccuaccuggagagccugccgcugcaggaugccagcccggccgggggccccucgucccccagggaccuuccugagccccggguguccacggagcacaccaauaacaagauugagaaaaucuacaucaugaaggcugacaccgugaucguggggaccgugaaggcugagcugccggagggccggggccuggcggggccagcagagcccgaguuggaggaggagcuggaggcggaccauaccccccacuaccccgagcaggagacagaaccgccucugggcagcugcagcgaugucaugcucucaguggaagaggaagggaaagaagaccccuugcccacagcugccucuggaaaguga

SEQ ID NO: 988 - RNA, 1788 nt, Artificial Sequence
  derived and/or modified sequence opt1 from CDE30__Homo_sapiens__AAA51947
augcgcgugcugcucgccgcccugggccuccucuuccugggggcgcugcgggccuucccccaggaccgcccguucgaggacacgugccacggcaaccccagccacuacuacgacaaggccguccggcgcugcugcuaccggugccccauggggcuguuccccacccagcagugcccgcagcgccccaccgacugccggaagcagugcgagcccgacuacuaccuggacgaggccgaccgcugcaccgccugcgugaccugcucccgggacgaccugguggagaagacccccugcgcguggaacagcucccgcgucugcgagugccggccgggcauguucugcagcaccuccgccgugaacagcugcgcccgcugcuucuuccacuccgugugccccgccgggaugaucgucaaguuccccggcaccgcgcagaagaacaccgugugcgagcccgccagcccgggcgugucccccgccugcgccagccccgagaacugcaaggagcccuccagcgggaccaucccgcaggccaagcccacgcccgucucccccgcgaccagcuccgccagcaccaugccggugcggggcgggacccgccucgcccaggaggccgccuccaagcugacgcgggcgcccgacagccccuccagcgugggccgccccagcuccgacccggggcugagccccacccagcccugccccgagggcuccggcgacugccggaagcagugcgagccggacuacuaccucgacgaggccgggcgcugcaccgccugcgucagcugcucccgggacgaccugguggagaagacccccugcgccuggaacagcucccgcacgugcgagugccggcccggcaugaucugcgccaccagcgcgaccaacuccugcgcccgcugcgugccguaccccaucugcgccgccgagaccgucacgaagccccaggacauggccgagaaggacaccaccuucgaggcgcccccgcuggggacccagcccgacugcaaccccacgcccgagaacggcgaggccccggccagcaccucccccacccagagccuccugguggacucccaggccagcaagacccugcccauccccacguccgcgccgguggcccucagcuccaccggcaagcccguccuggacgccgggcccgugcuguucugggugauccucguccuggugguggucgugggcagcuccgccuuccugcucugccaccgccgggccugccgcaagcggauccgccagaagcugcaccugugcuaccccguccagaccagccagccgaagcucgagcugguggacagccggccccgccgguccagcacccagcugcgcuccggggcgagcgugacggagcccgucgccgaggagcggggccucaugucccagccccugauggagaccugccacagcgugggggccgccuaccuggagucccucccgcugcaggacgccagccccgcgggcggccccuccagcccccgcgaccugccggagccccggguguccaccgagcacaccaacaacaagaucgagaagaucuacaucaugaaggccgacacggucaucguggggaccgugaaggccgagcuccccgagggccgcgggcuggccggcccggccgagcccgagcuggaggaggagcucgaggcggaccacacgccccacuaccccgagcaggagaccgagccgccccuggggagcugcuccgacgucaugcugagcguggaggaggagggcaaggaggacccccuccccaccgccgccuccggcaaguga

SEQ ID NO: 989 - RNA, 1788 nt, Artificial Sequence
  derived and/or modified sequence opt2 from CDE30__Homo_sapiens__AAA51947
augcgcguccuccucgccgcccucggccuccucuuccucggcgcccuccgcgccuucccccaggaccgccccuucgaggacaccugccacggcaaccccucccacuacuacgacaaggccguccgccgcugcugcuaccgcugccccaugggccucuuccccacccagcagugcccccagcgccccaccgacugccgcaagcagugcgagcccgacuacuaccucgacgaggccgaccgcugcaccgccugcgucaccugcucccgcgacgaccucgucgagaagacccccugcgccuggaacuccucccgcgucugcgagugccgccccggcauguucugcuccaccuccgccgucaacuccugcgcccgcugcuucuuccacuccgucugccccgccggcaugaucgucaaguuccccggcaccgcccagaagaacaccgucugcgagcccgccucccccggcgucucccccgccugcgccucccccgagaacugcaaggagcccuccuccggcaccaucccccaggccaagcccacccccgucucccccgccaccuccuccgccuccaccaugcccguccgcggcggcacccgccucgcccaggaggccgccuccaagcucacccgcgcccccgacucccccuccuccgucggccgccccuccuccgaccccggccucucccccacccagcccugccccgagggcuccggcgacugccgcaagcagugcgagcccgacuacuaccucgacgaggccggccgcugcaccgccugcgucuccugcucccgcgacgaccucgucgagaagacccccugcgccuggaacuccucccgcaccugcgagugccgccccggcaugaucugcgccaccuccgccaccaacuccugcgcccgcugcguccccuaccccaucugcgccgccgagaccgucaccaagccccaggacauggccgagaaggacaccaccuucgaggcccccccccucggcacccagcccgacugcaaccccacccccgagaacggcgaggcccccgccuccaccucccccacccagucccuccucgucgacucccaggccuccaagacccuccccauccccaccuccgcccccgucgcccucuccuccaccggcaagcccguccucgacgccggccccguccucuucugggucauccucguccucgucgucgucgucggcuccuccgccuuccuccucugccaccgccgcgccugccgcaagcgcauccgccagaagcuccaccucugcuaccccguccagaccucccagcccaagcucgagcucgucgacucccgcccccgccgcuccuccacccagcuccgcuccggcgccuccgucaccgagcccgucgccgaggagcgcggccucaugucccagccccucauggagaccugccacuccgucggcgccgccuaccucgagucccucccccuccaggacgccucccccgccggcggccccuccuccccccgcgaccuccccgagccccgcgucuccaccgagcacaccaacaacaagaucgagaagaucuacaucaugaaggccgacaccgucaucgucggcaccgucaaggccgagcuccccgagggccgcggccucgccggccccgccgagcccgagcucgaggaggagcucgaggccgaccacaccccccacuaccccgagcaggagaccgagcccccccucggcuccugcuccgacgucaugcucuccgucgaggaggagggcaaggaggacccccuccccaccgccgccuccggcaaguga

SEQ ID NO: 990 - RNA, 1788 nt, Artificial Sequence
  derived and/or modified sequence opt3 from CDE30__Homo_sapiens__AAA51947
augagagugcugcucgccgcucuuggccuguuguucuuaggggcacugagggccuuuccccaggaccggccuuucgaggauaccugccacggaaacccaagccauuacuaugacaaggcgguccgccgauguugcuaccguuguccgaugggucuauuucccacacaacagugcccucagagaccaacugauuguaggaaacagugcgaacccgacuauuaccucgaugaggcugaccgguguacggccugcguuaccuguucccgcgaugaccugguggaaaagacaccuugcgcauggaacucuucaagaguaugugagugcaggccaggcauguucugcaguacuagcgccgucaauuccugugcucggugcuuuuuccacucugugugucccgcagggaugaucgugaaauuuccuggaaccgcccaaaagaauacaguuugcgaaccagcuucgccgggcgugucacccgccugugcgagcccugagaacugcaaagagccaaguuccgguaccauuccccaggcaaagccuacuccagucucucccgccacaagcuccgcuucaaccaugccggugcgcgggggaacgcgacuugcccaggaagcagcuaguaagcugacuagagccccugauagccccucuuccguaggcaggccaucaagcgacccuggcuugagucccacccagccaugucccgaggggucuggagauugccggaaacaaugugaaccugacuauuaccucgaugaggcgggucguugcacagccuguguuuccugcagccgcgacgaccugguggagaagacuccaugcgcauggaacucgucuagaaccugugaaugcaggccgggcaugauaugugcuacauccgccaccaauucaugcgcucgguguguccccuauccuaucugcgccgcagagacggugacuaaaccacaggauauggccgaaaaggacacaaccuucgaggcucccccucuggggacucagccagauuguaaucccacaccggaaaacggagaggcgccugcaaguaccagcccaacgcagucccucuuaguggacucucaagccagcaaaacccugcccauuccuacaucagcucccgucgcccuuaguuccacuggcaagccaguuuuggaugcagguccugugcuguuuuggguaauccuagugcucgucgugguuguggggagcucugccuuccugcuuugccaucgacgcgcuuguagaaagaggauucggcagaaacugcacuugugcuaccccguccagaccucacaaccaaagcucgagcugguggacagucgcccgagaaggagcuccacacaguuacguucuggagccucgguaacugaaccuguugcagaggaacggggccugaugagccagccccucauggagaccugucauuccgugggcgcggcuuaccuugaaucacugccauugcaggaugccagucccgcagggggaccuucuagcccacgagaccuacccgagccuagagucuccacagagcacaccaauaacaaaaucgaaaagauauauaucaugaaagccgauacugugauugucgguacggugaaggcugagcugccggaaggcagggggcucgccggaccagcagagcccgaacuggaggaggaacuugaggcugaccacacaccucauuacccagaacaagagaccgagcccccucugggcucaugcagcgauguuauguugucuguggaagaggaagguaaagaggacccgcuccccacugccgcguccgggaaguga

SEQ ID NO: 991 - RNA, 1788 nt, Artificial Sequence
  derived and/or modified sequence opt4 from CDE30__Homo_sapiens__AAA51947
augagagugcugcuggccgcccugggccugcuguuccugggcgcccugagagccuucccccaggacagacccuucgaggacaccugccacggcaaccccagccacuacuacgacaaggccgugagaagaugcugcuacagaugccccaugggccuguuccccacccagcagugcccccagagacccaccgacugcagaaagcagugcgagcccgacuacuaccuggacgaggccgacagaugcaccgccugcgugaccugcagcagagacgaccugguggagaagacccccugcgccuggaacagcagcagagugugcgagugcagacccggcauguucugcagcaccagcgccgugaacagcugcgccagaugcuucuuccacagcgugugccccgccggcaugaucgugaaguuccccggcaccgcccagaagaacaccgugugcgagcccgccagccccggcgugagccccgccugcgccagccccgagaacugcaaggagcccagcagcggcaccaucccccaggccaagcccacccccgugagccccgccaccagcagcgccagcaccaugcccgugagaggcggcaccagacuggcccaggaggccgccagcaagcugaccagagcccccgacagccccagcagcgugggcagacccagcagcgaccccggccugagccccacccagcccugccccgagggcagcggcgacugcagaaagcagugcgagcccgacuacuaccuggacgaggccggcagaugcaccgccugcgugagcugcagcagagacgaccugguggagaagacccccugcgccuggaacagcagcagaaccugcgagugcagacccggcaugaucugcgccaccagcgccaccaacagcugcgccagaugcgugcccuaccccaucugcgccgccgagaccgugaccaagccccaggacauggccgagaaggacaccaccuucgaggcccccccccugggcacccagcccgacugcaaccccacccccgagaacggcgaggcccccgccagcaccagccccacccagagccugcugguggacagccaggccagcaagacccugcccauccccaccagcgcccccguggcccugagcagcaccggcaagcccgugcuggacgccggccccgugcuguucugggugauccuggugcugguggugguggugggcagcagcgccuuccugcugugccacagaagagccugcagaaagagaaucagacagaagcugcaccugugcuaccccgugcagaccagccagcccaagcuggagcugguggacagcagacccagaagaagcagcacccagcugagaagcggcgccagcgugaccgagcccguggccgaggagagaggccugaugagccagccccugauggagaccugccacagcgugggcgccgccuaccuggagagccugccccugcaggacgccagccccgccggcggccccagcagccccagagaccugcccgagcccagagugagcaccgagcacaccaacaacaagaucgagaagaucuacaucaugaaggccgacaccgugaucgugggcaccgugaaggccgagcugcccgagggcagaggccuggccggccccgccgagcccgagcuggaggaggagcuggaggccgaccacaccccccacuaccccgagcaggagaccgagcccccccugggcagcugcagcgacgugaugcugagcguggaggaggagggcaaggaggacccccugcccaccgccgccagcggcaaguga

SEQ ID NO: 992 - RNA, 1788 nt, Artificial Sequence
  derived and/or modified sequence opt5 from CDE30__Homo_sapiens__AAA51947
augagagugcugcucgccgcucugggccuucuguuccucggggcccugcgggcguuuccccaggaccgcccuuucgaggauaccugccacggaaacccgagccauuacuaugacaaggcugucagacgguguugcuaccgcugucccaugggccuuuuuccuacacaacagugcccccagagaccuacggauugucggaaacagugcgaacccgacuauuaccuggaugaggccgaccgcuguaccgccugcguuacauguuccagagaugaccucguggaaaagaccccuugcgcuuggaacucuagccgggugugugagugccgcccggggauguucugcuccacaucugccgucaauagcugugcuagaugcuuuuuccacuccgugugucccgccggaaugaucguuaaauuuccuggcaccgcgcaaaagaauacagugugcgaacccgccucuccuggggucagccccgcuugugccuccccggagaacugcaaagagccuagcucuggaaccauuccccaggcuaagccuacgcccgugucccccgccaccagcucugcguccacaaugccuguucggggcggcacccgccuggcccaggaagcugccagcaagcugacaagagcuccggauucucccuccagcguggggcggccuuccucugaccccggacucagcccuacccagcccuguccggagggcuccggggauugccgcaaacaaugugaaccugacuauuaccuggaugaggccggaagaugcacggccugugucagcugcucucgggacgaccuuguggagaagacacccugcgcuuggaacuccagcagaaccugugaaugccgcccuggcaugaucugugcgacaucugccaccaauagcugcgcucggugugugcccuauccuauuugcgccgccgagaccgucacaaaaccccaggauauggcugaaaaggacacgaccuucgaggccccgccucuggggacacagcccgauuguaaucccaccccugaaaacggagaggcgccggcuuccacaucucccacccagagccuccugguugacucccaagccagcaaaacgcuuccuauccccacaucugccccuguggcucuguccagcaccggcaagcccgugcucgaugccggcccuguccuguuuugggugauucugguucucguggucgugguugggucuuccgcuuuccugcuuugccauagacgcgccugucggaagagaauccgccagaaacugcaccucugcuaccccgugcagaccagccaaccgaagcuggagcuugucgacucccggccuagacgcucuagcacacagcugcgguccggagcgucugugaccgaacccgucgccgaggaaagaggccucaugagccagccucugauggagacaugucauuccgugggggcugccuaccuggaaagccucccccugcaggaugcuucuccggccggaggcccuuccagcccccgcgaccuuccugagccccggguuucuacggagcacaccaauaacaaaaucgaaaagauuuauaucaugaaagcggauacagugauugucgggaccgugaaggccgagcugcccgaaggaagaggccucgcuggcccugccgagccggaacuggaggaggaacuugaggcugaccacacaccccauuacccugaacaagagaccgagcccccucugggguccugcagcgauguuaugcucucuguggaagaggaaggaaaagaggacccccugccuacggccgccagcggcaaguga

SEQ ID NO: 993 - protein, 303 aa, Artificial Sequence
  CDK4/m__Homo_sapiens__A0A024RBB6
MATSRYEPVAEIGVGAYGTVYKARDPHSGHFVALKSVRVPNGGGGGGGLPISTVREVALLRRLEAFEHPNVVRLMDVCATSRTDREIKVTLVFEHVDQDLRTYLDKAPPPGLPAETIKDLMRQFLRGLDFLHANCIVHRDLKPENILVTSGGTVKLADFGLARIYSYQMALTPVVVTLWYRAPEVLLQSTYATPVDMWSVGCIFAEMFRRKPLFCGNSEADQLGKIFDLIGLPPEDDWPRDVSLPRGAFPPRGPRPVQSVVPEMEESGAQLLLEMLTFNPHKRISAFRALQHSYLHKDEGNPE

SEQ ID NO: 994 - RNA, 912 nt, Artificial Sequence
  CDK4/m__Homo_sapiens__EAW97060
auggcuaccucucgauaugagccaguggcugaaauuggugucggugccuaugggacaguguacaaggcccgugauccccacaguggccacuuuguggcccucaagagugugagaguccccaauggaggaggagguggaggaggccuucccaucagcacaguucgugagguggcuuuacugaggcgacuggaggcuuuugagcaucccaauguuguccggcugauggacgucugugccacaucccgaacugaccgggagaucaagguaacccugguguuugagcauguagaccaggaccuaaggacauaucuggacaaggcacccccaccaggcuugccagccgaaacgaucaaggaucugaugcgccaguuucuaagaggccuagauuuccuucaugccaauugcaucguucaccgagaucugaagccagagaacauucuggugacaagugguggaacagucaagcuggcugacuuuggccuggccagaaucuacagcuaccagauggcacuuacacccgugguuguuacacucugguaccgagcucccgaaguucuucugcaguccacauaugcaacaccuguggacauguggaguguuggcuguaucuuugcagagauguuucgucgaaagccucucuucuguggaaacucugaagccgaccaguugggcaaaaucuuugaccugauugggcugccuccagaggaugacuggccucgagauguaucccugccccguggagccuuuccccccagagggccccgcccagugcagucggugguaccugagauggaggagucgggagcacagcugcugcuggaaaugcugacuuuuaacccacacaagcgaaucucugccuuucgagcucugcagcacucuuaucuacauaaggaugaagguaauccggaguga

SEQ ID NO: 995 - RNA, 912 nt, Artificial Sequence
  derived and/or modified sequence opt1 from CDK4/m__Homo_sapiens__EAW97060
auggccaccagccgcuacgagcccguggccgagaucggcgucggggcguacggcaccguguacaaggcccgggacccgcacuccgggcacuucguggcccucaagagcguccgcgugcccaacggcgggggcggcgggggcgggcugcccaucuccacggugcgggaggucgcccugcugcgccggcucgaggccuucgagcaccccaacguggugcgccugauggacgucugcgcgaccagccggaccgaccgcgagaucaaggugacccugguguucgagcacgucgaccaggaccuccggacguaccuggacaaggccccgccgcccggccugcccgccgagaccaucaaggaccucaugcgccaguuccugcgggggcuggacuuccuccacgccaacugcaucgugcaccgcgaccugaagccggagaacauccuggugaccuccggcggcaccgucaagcucgcggacuucgggcuggcccggaucuacagcuaccagauggcccugacgcccgugguggucacccucugguaccgcgcccccgaggugcugcugcaguccaccuacgccacccccguggacauguggagcgucggcugcaucuucgcggagauguuccggcgcaagccccucuucugcgggaacuccgaggccgaccagcugggcaagaucuucgaccugaucggccucccgcccgaggacgacuggccccgggacgugagccugccccgcggggccuucccgccccggggcccccgccccgugcaguccgucgugcccgagauggaggagagcggggcccagcugcuccuggagaugcugacguucaacccccacaagcggaucuccgccuuccgcgcgcuccagcacagcuaccugcacaaggacgagggcaaccccgaguga

SEQ ID NO: 996 - RNA, 912 nt, Artificial Sequence
  derived and/or modified sequence opt2 from CDK4/m__Homo_sapiens__EAW97060
auggccaccucccgcuacgagcccgucgccgagaucggcgucggcgccuacggcaccgucuacaaggcccgcgacccccacuccggccacuucgucgcccucaaguccguccgcguccccaacggcggcggcggcggcggcggccuccccaucuccaccguccgcgaggucgcccuccuccgccgccucgaggccuucgagcaccccaacgucguccgccucauggacgucugcgccaccucccgcaccgaccgcgagaucaaggucacccucgucuucgagcacgucgaccaggaccuccgcaccuaccucgacaaggcccccccccccggccuccccgccgagaccaucaaggaccucaugcgccaguuccuccgcggccucgacuuccuccacgccaacugcaucguccaccgcgaccucaagcccgagaacauccucgucaccuccggcggcaccgucaagcucgccgacuucggccucgcccgcaucuacuccuaccagauggcccucacccccgucgucgucacccucugguaccgcgcccccgagguccuccuccaguccaccuacgccacccccgucgacaugugguccgucggcugcaucuucgccgagauguuccgccgcaagccccucuucugcggcaacuccgaggccgaccagcucggcaagaucuucgaccucaucggccucccccccgaggacgacuggccccgcgacgucucccucccccgcggcgccuuccccccccgcggcccccgccccguccaguccgucguccccgagauggaggaguccggcgcccagcuccuccucgagaugcucaccuucaacccccacaagcgcaucuccgccuuccgcgcccuccagcacuccuaccuccacaaggacgagggcaaccccgaguga

SEQ ID NO: 997 - RNA, 912 nt, Artificial Sequence
  derived and/or modified sequence opt3 from CDK4/m__Homo_sapiens__EAW97060
auggccaccagcagauacgagcccguggcugaaaucggcgucggggcauauggaacaguuuacaaggccagggacccucacuccggucauuucguggcgcugaaaucuguacgggugccaaacggcgggggaggcggugggggacucccgauuucaacuguccgcgagguggcucugcuucgacguuuggaagccuuugagcaccccaauguugugagauuaauggaugucugcgcaacgaguaggaccgaccgggaaauaaaggugacacugguauucgagcauguugaucaggaccuacgcacuuaucucgauaaagccccuccacccggccugccugcugagaccaucaaggaccuuaugagacaauuucugaggggcuuggauuuccuccacgcaaacuguauugugcaucgggaccugaaaccagaaaauauccuggucacaagcgggggaaccgugaagcucgccgauuuugguuuagcucgcauuuacuccuaucagauggcccugacucccguggucguuacacuuugguaccgagcgccugagguguugcugcagucuaccuaugcaacgccaguagacauguggucggugggcugcaucuucgccgaaauguuuagaaggaagccgcuauucugugggaacucagaggcugaucagcucggaaaaauauuugaccugaucggccuucccccugaggaugacuggccacgggacgucagccugccccguggugccuucccuccacgcgggcccagaccggugcaaaguguugugccugaaauggaggaauccggagcacaguugcuccuggagauguuaacuuuuaauccccacaagaggauuucugcuuuccgggcccugcagcacagcuaccuccauaaagaugaaggcaacccagaguga

SEQ ID NO: 998 - RNA, 912 nt, Artificial Sequence
  derived and/or modified sequence opt4 from CDK4/m__Homo_sapiens__EAW97060
auggccaccagcagauacgagcccguggccgagaucggcgugggcgccuacggcaccguguacaaggccagagacccccacagcggccacuucguggcccugaagagcgugagagugcccaacggcggcggcggcggcggcggccugcccaucagcaccgugagagagguggcccugcugagaagacuggaggccuucgagcaccccaacguggugagacugauggacgugugcgccaccagcagaaccgacagagagaucaaggugacccugguguucgagcacguggaccaggaccugagaaccuaccuggacaaggcccccccccccggccugcccgccgagaccaucaaggaccugaugagacaguuccugagaggccuggacuuccugcacgccaacugcaucgugcacagagaccugaagcccgagaacauccuggugaccagcggcggcaccgugaagcuggccgacuucggccuggccagaaucuacagcuaccagauggcccugacccccgugguggugacccugugguacagagcccccgaggugcugcugcagagcaccuacgccacccccguggacauguggagcgugggcugcaucuucgccgagauguucagaagaaagccccuguucugcggcaacagcgaggccgaccagcugggcaagaucuucgaccugaucggccugccccccgaggacgacuggcccagagacgugagccugcccagaggcgccuucccccccagaggccccagacccgugcagagcguggugcccgagauggaggagagcggcgcccagcugcugcuggagaugcugaccuucaacccccacaagagaaucagcgccuucagagcccugcagcacagcuaccugcacaaggacgagggcaaccccgaguga

SEQ ID NO: 999 - RNA, 912 nt, Artificial Sequence
  derived and/or modified sequence opt5 from CDK4/m__Homo_sapiens__EAW97060
auggccaccagcagauacgagcccguggcugaaaucggcgucggggccuauggaacaguuuacaaggcgcgggacccucacuccggccauuucguggcucugaaaucugugcgcgucccgaacgggggaggcgggggaggcggccuccccauuagcacggugagagagguugcccugcuucggcgccuggaagccuuugagcacccuaauguggucagacucauggaugugugcgcuaccucccggacagaccgcgaaaucaagguuacccugguguucgagcaugucgaucaggaccuuagaacauaucuggauaaagcucccccucccgggcucccugccgagaccauuaaggaccugaugcggcaauuucugcgcggacucgauuuccugcacgccaacuguaucgugcauagagaccuuaaaccggaaaauauucuggugacaucuggcgggaccgucaagcucgcggauuuuggacuggcccggaucuacagcuaucagauggcucuuacgcccguuguggugacccugugguaccgcgccccugagguccuccugcaguccacauaugcuacccccguggacauguggucuguuggcugcaucuucgccgaaauguuuagacggaagccucuguucugugggaacagcgaggcggaucagcucggaaaaauuuuugaccugaucggccuucccccggaggaugacuggccucgcgacgugucccugcccagaggcgccuucccuccccgggggcccagaccuguccaaagcgugguuccggaaauggaggaaucuggagcucagcuccugcuugagaugcugacauuuaauccccacaagcgcauuuccgccuuccgggcucuccagcacagcuaccugcauaaagaugaaggcaacccugaguga

SEQ ID NO: 1000 - protein, 303 aa, Artificial Sequence; identical to SEQ ID NO: 993
  CDK4/m__Homo_sapiens__P11802

SEQ ID NO: 1001 - RNA, 912 nt, Artificial Sequence; identical to SEQ ID NO: 994
  CDK4/m__Homo_sapiens__AAA35673

SEQ ID NO: 1002 - RNA, 912 nt, Artificial Sequence; identical to SEQ ID NO: 995
  derived and/or modified sequence opt1 from CDK4/m__Homo_sapiens__AAA35673

SEQ ID NO: 1003 - RNA, 912 nt, Artificial Sequence; identical to SEQ ID NO: 996
  derived and/or modified sequence opt2 from CDK4/m__Homo_sapiens__AAA35673

SEQ ID NO: 1004 - RNA, 912 nt, Artificial Sequence; identical to SEQ ID NO: 997
  derived and/or modified sequence opt3 from CDK4/m__Homo_sapiens__AAA35673

SEQ ID NO: 1005 - RNA, 912 nt, Artificial Sequence; identical to SEQ ID NO: 998
  derived and/or modified sequence opt4 from CDK4/m__Homo_sapiens__AAA35673

SEQ ID NO: 1006 - RNA, 912 nt, Artificial Sequence; identical to SEQ ID NO: 999
  derived and/or modified sequence opt5 from CDK4/m__Homo_sapiens__AAA35673

SEQ ID NO: 1007 - protein, 229 aa, Artificial Sequence
  CDK4/m__Homo_sapiens__Q6LC83
MDVCATSRTDREIKVTLVFEHVDQDLRTYLDKAPPPGLPAETIKDLMRQFLRGLDFLHANCIVHRDLKPENILVTSGGTVKLADFGLARIYSYQMALTPVVVTLWYRAPEVLLQSTYATPVDMWSVGCIFAEMFRRKPLFCGNSEADQLGKIFDLIGLPPEDDWPRDVSLPRGAFPPRGPRPVQSVVPEMEESGAQLLLEMLTFNPHKRISAFRALQHSYLHKDEGNPE

SEQ ID NO: 1008 - RNA, 690 nt, Artificial Sequence
  CDK4/m__Homo_sapiens__AAB50213
auggacgucugugccacaucccgaacugaccgggagaucaagguaacccugguguuugagcauguagaccaggaccuaaggacauaucuggacaaggcacccccaccaggcuugccagccgaaacgaucaaggaucugaugcgccaguuucuaagaggccuagauuuccuucaugccaauugcaucguucaccgagaucugaagccagagaacauucuggugacaagugguggaacagucaagcuggcugacuuuggccuggccagaaucuacagcuaccagauggcacuuacacccgugguuguuacacucugguaccgagcucccgaaguucuucugcaguccacauaugcaacaccuguggacauguggaguguuggcuguaucuuugcagagauguuucgucgaaagccucucuucuguggaaacucugaagccgaccaguugggcaaaaucuuugaccugauugggcugccuccagaggaugacuggccucgagauguaucccugccccguggagccuuuccccccagagggccccgcccagugcagucggugguaccugagauggaggagucgggagcacagcugcugcuggaaaugcugacuuuuaacccacacaagcgaaucucugccuuucgagcucugcagcacucuuaucuacauaaggaugaagguaauccggaguga

SEQ ID NO: 1009 - RNA, 690 nt, Artificial Sequence
  derived and/or modified sequence opt1 from CDK4/m__Homo_sapiens__AAB50213
auggacgugugcgccaccagccgcaccgaccgggagaucaaggucacgcugguguucgagcacguggaccaggaccuccgcaccuaccuggacaaggcgcccccgcccggccugcccgccgagaccaucaaggaccucaugcggcaguuccugcgcgggcuggacuuccuccacgccaacugcaucguccaccgggaccugaagcccgagaacauccuggugaccuccggcgggacggugaagcucgccgacuucggccuggcccgcaucuacagcuaccagauggcccugaccccggucguggugacccucugguaccgggcgcccgagguccugcugcaguccaccuacgccacgcccguggacauguggagcguggggugcaucuucgccgagauguuccgccggaagccccucuucugcggcaacuccgaggccgaccagcugggcaagaucuucgaccugaucgggcucccgcccgaggacgacuggccccgcgacgucagccugccccggggcgcguucccgccccgcgggccccggcccgugcaguccguggucccggagauggaggagagcggcgcccagcugcuccuggagaugcugaccuucaacccccacaagcgcaucuccgccuuccgggcccuccagcacagcuaccugcacaaggacgaggggaaccccgaguga

SEQ ID NO: 1010 - RNA, 690 nt, Artificial Sequence
  derived and/or modified sequence opt2 from CDK4/m__Homo_sapiens__AAB50213
auggacgucugcgccaccucccgcaccgaccgcgagaucaaggucacccucgucuucgagcacgucgaccaggaccuccgcaccuaccucgacaaggcccccccccccggccuccccgccgagaccaucaaggaccucaugcgccaguuccuccgcggccucgacuuccuccacgccaacugcaucguccaccgcgaccucaagcccgagaacauccucgucaccuccggcggcaccgucaagcucgccgacuucggccucgcccgcaucuacuccuaccagauggcccucacccccgucgucgucacccucugguaccgcgcccccgagguccuccuccaguccaccuacgccacccccgucgacaugugguccgucggcugcaucuucgccgagauguuccgccgcaagccccucuucugcggcaacuccgaggccgaccagcucggcaagaucuucgaccucaucggccucccccccgaggacgacuggccccgcgacgucucccucccccgcggcgccuuccccccccgcggcccccgccccguccaguccgucguccccgagauggaggaguccggcgcccagcuccuccucgagaugcucaccuucaacccccacaagcgcaucuccgccuuccgcgcccuccagcacuccuaccuccacaaggacgagggcaaccccgaguga

SEQ ID NO: 1011 - RNA, 690 nt, Artificial Sequence
  derived and/or modified sequence opt3 from CDK4/m__Homo_sapiens__AAB50213
auggacgugugcgccaccagcagaacagauagggagaucaaggucacucugguuuucgaacacguggaccaggaucuccggacguaccuugacaaagcucccccuccaggccugccggcagagaccauuaaggauuugaugcgccaauuuuuacgagggcuggacuuccuacaugccaacuguauaguacaccgugaucucaaacccgaaaauauccuggugacauccggagguacugucaaacuugcggacuuuggccuggcuagaauuuauucuuaccagauggccuugaccccugugguugugacacucugguauagggcaccagagguccugcugcagucaaccuacgccacucccguggauauguggaguguagggugcaucuucgcugaaauguuucggcgcaagccucucuucuguggaaacagcgaggcagaccaguuaggcaagauuuuugaucugaucggucuuccacccgaggacgauuggccuagagacguuuccuugccaaggggagccuucccgccccgggggccucgcccagugcaaucugucgugcccgaaauggaggaaucgggcgcucagcugcuacucgagaugcugacauuuaauccucauaagcgaauaucagccuucagagcgcuucagcacagcuaucugcauaaagacgagggcaacccagaauga

SEQ ID NO: 1012 - RNA, 690 nt, Artificial Sequence
  derived and/or modified sequence opt4 from CDK4/m__Homo_sapiens__AAB50213
auggacgugugcgccaccagcagaaccgacagagagaucaaggugacccugguguucgagcacguggaccaggaccugagaaccuaccuggacaaggcccccccccccggccugcccgccgagaccaucaaggaccugaugagacaguuccugagaggccuggacuuccugcacgccaacugcaucgugcacagagaccugaagcccgagaacauccuggugaccagcggcggcaccgugaagcuggccgacuucggccuggccagaaucuacagcuaccagauggcccugacccccgugguggugacccugugguacagagcccccgaggugcugcugcagagcaccuacgccacccccguggacauguggagcgugggcugcaucuucgccgagauguucagaagaaagccccuguucugcggcaacagcgaggccgaccagcugggcaagaucuucgaccugaucggccugccccccgaggacgacuggcccagagacgugagccugcccagaggcgccuucccccccagaggccccagacccgugcagagcguggugcccgagauggaggagagcggcgcccagcugcugcuggagaugcugaccuucaacccccacaagagaaucagcgccuucagagcccugcagcacagcuaccugcacaaggacgagggcaaccccgaguga

SEQ ID NO: 1013 - RNA, 690 nt, Artificial Sequence
  derived and/or modified sequence opt5 from CDK4/m__Homo_sapiens__AAB50213
auggacgugugcgccaccagcagaacagaucgggagaucaaggucacgcugguuuucgaacacguggaccaggaucuccgcaccuaccuggacaaagcucccccuccgggccuucccgccgagacaauuaaggaucugaugagacaauuucuccgggggcuggacuuccuucaugcgaacuguaucgugcaccgcgaucugaaaccugaaaauauucucgucaccuccggaggcacagugaagcuggcugacuuugggcuggccagaaucuauucuuaccagauggcccucacccccguuguggucacacugugguaucgggcuccugaggugcuucugcagagcaccuacgccacgcccguugauaugugguccgugggaugcauuuucgcugaaauguuucgcagaaaaccucucuucuguggcaacucugaggccgaccagcuggggaagaucuuugaucuuaucggacugccgcccgaggacgauuggccucgggacgucagccucccccgcggcgcguucccucccagaggcccgcggccugugcaauccgugguccccgaaauggaggaaucuggggcccagcugcugcucgagaugcugaccuuuaauccucauaagcgcauuagcgcuuucagagcccuucagcacuccuaucugcauaaagacgagggaaaccccgaauga

SEQ ID NO: 1014 - protein, 111 aa, Artificial Sequence
  CDK4/m__Homo_sapiens__Q96BE9
MATSRYEPVAEIGVGAYGTVYKARDPHSGHFVALKSVRVPNGGGGGGGLPISTVREVALLRRLEAFEHPNVVRLMDVCATSRTDREIKRCFVESLSSVETLKPTSWAKSLT

SEQ ID NO: 1015 - RNA, 336 nt, Artificial Sequence
  CDK4/m__Homo_sapiens__AAH15669
auggcuaccucucgauaugagccaguggcugaaauuggugucggugccuaugggacaguguacaaggcccgugauccccacaguggccacuuuguggcccucaagagugugagaguccccaauggaggaggagguggaggaggccuucccaucagcacaguucgugagguggcuuuacugaggcgacuggaggcuuuugagcaucccaauguuguccggcugauggacgucugugccacaucccgaacugaccgggagaucaagagauguuucgucgaaagccucucuucuguggaaacucugaagccgaccaguugggcaaaaucuuugaccuga

SEQ ID NO: 1016 - RNA, 336 nt, Artificial Sequence
  derived and/or modified sequence opt1 from CDK4/m__Homo_sapiens__AAH15669
auggccaccagccgcuacgagcccguggccgagaucggcgucggggcguacggcaccguguacaaggcccgggacccgcacuccgggcacuucguggcccucaagagcguccgcgugcccaacggcgggggcggcgggggcgggcugcccaucuccacggugcgggaggucgcccugcugcgccggcucgaggccuucgagcaccccaacguggugcgccugauggacgucugcgcgaccagccggaccgaccgcgagaucaagcggugcuucguggagucccugagcuccguggagacccucaagccgacgagcugggccaagucccugaccuga

SEQ ID NO: 1017 - RNA, 336 nt, Artificial Sequence
  derived and/or modified sequence opt2 from CDK4/m__Homo_sapiens__AAH15669
auggccaccucccgcuacgagcccgucgccgagaucggcgucggcgccuacggcaccgucuacaaggcccgcgacccccacuccggccacuucgucgcccucaaguccguccgcguccccaacggcggcggcggcggcggcggccuccccaucuccaccguccgcgaggucgcccuccuccgccgccucgaggccuucgagcaccccaacgucguccgccucauggacgucugcgccaccucccgcaccgaccgcgagaucaagcgcugcuucgucgagucccucuccuccgucgagacccucaagcccaccuccugggccaagucccucaccuga

SEQ ID NO: 1018 - RNA, 336 nt, Artificial Sequence
  derived and/or modified sequence opt3 from CDK4/m__Homo_sapiens__AAH15669
auggccaccagcagauacgagcccguggcugaaaucggcgucggggcauauggaacaguuuacaaggccagggacccucacuccggucauuucguggcgcugaaaucuguacgggugccaaacggcgggggaggcggugggggacucccgauuucaacuguccgcgagguggcucugcuucgacguuuggaagccuuugagcaccccaauguugugagauuaauggaugucugcgcaacgaguaggaccgaccgggaaauaaagcgcuguuucguggagagccuguccucuguagagacacuaaaaccuacuucgugggccaagucacucaccuga

SEQ ID NO: 1019 - RNA, 336 nt, Artificial Sequence
  derived and/or modified sequence opt4 from CDK4/m__Homo_sapiens__AAH15669
auggccaccagcagauacgagcccguggccgagaucggcgugggcgccuacggcaccguguacaaggccagagacccccacagcggccacuucguggcccugaagagcgugagagugcccaacggcggcggcggcggcggcggccugcccaucagcaccgugagagagguggcccugcugagaagacuggaggccuucgagcaccccaacguggugagacugauggacgugugcgccaccagcagaaccgacagagagaucaagagaugcuucguggagagccugagcagcguggagacccugaagcccaccagcugggccaagagccugaccuga

SEQ ID NO: 1020 - RNA, 336 nt, Artificial Sequence
  derived and/or modified sequence opt5 from CDK4/m__Homo_sapiens__AAH15669
auggccaccagcagauacgagcccguggcugaaaucggcgucggggccuauggaacaguuuacaaggcgcgggacccucacuccggccauuucguggcucugaaaucugugcgcgucccgaacgggggaggcgggggaggcggccuccccauuagcacggugagagagguugcccugcuucggcgccuggaagccuuugagcacccuaauguggucagacucauggaugugugcgcuaccucccggacagaccgcgaaaucaagagauguuucguugagucucugagcuccguggagacccuuaaacccacaucuugggccaagagccugaccuga

SEQ ID NO: 1021 - protein, 142 aa, Artificial Sequence [sequence omitted]

SEQ ID NO: 1022 - RNA, 429 nt, Artificial Sequence
  CDKN2A/m__Homo_sapiens__ACY78326
auggagccggcggcggggagcagcauggagccuucggcugacuggcuggccacggccgcggcccggggucggguagaggaggugcgggcgcugcuggaggcgggggcgcugcccaacgcaccgaauaguuacggucggaggccgauccaggucaugaugaugggcagcgcccgaguggcggagcugcugcugcuccacggcgcggagcccaacugcgccgaccccgccacucucacccgacccgugcacgacgcugcccgggagggcuuccuggacacgcugguggugcugcaccgggccggggcgccgugcgcgaugccuggggccgucugcccguggaccuggcugaggagcugggccaucgcgaugucgcacgguaccugcgcgcggcugcggggggcaccagaggcaguaaccaugcccgcauag

SEQ ID NO: 1023 - RNA, 429 nt, Artificial Sequence
  derived and/or modified sequence opt1 from CDKN2A/m__Homo_sapiens__ACY78326
auggagcccgccgccggcagcuccauggagccgagcgcggacuggcuggccaccgccgccgcccgcgggcggguggaggagguccgcgcgcuccuggaggccggcgcccugcccaacgcccccaacuccuacgggcggcgccccauccaggugaugaugaugggcagcgcgcggguggccgagcuccugcugcuccacggggccgagccgaacugcgccgaccccgccacccugacgcgccccguccacgacgcggcccgggagggcuuccuggacacccucguggugcugcaccgcgccggcgcccccugcgccaugccgggggcggucugccccuggaccuggcugcgguccugggccaucgccaugagccacgggaccugcgcccgccuccggggcgcccccgaggcggugacgaugcccgccuga

SEQ ID NO: 1024 - RNA, 429 nt, Artificial Sequence
  derived and/or modified sequence opt2 from CDKN2A/m__Homo_sapiens__ACY78326
auggagcccgccgccggcuccuccauggagcccuccgccgacuggcucgccaccgccgccgcccgcggccgcgucgaggagguccgcgcccuccucgaggccggcgcccuccccaacgcccccaacuccuacggccgccgccccauccaggucaugaugaugggcuccgcccgcgucgccgagcuccuccuccuccacggcgccgagcccaacugcgccgaccccgccacccucacccgccccguccacgacgccgcccgcgagggcuuccucgacacccucgucguccuccaccgcgccggcgcccccugcgccaugcccggcgccgucugccccuggaccuggcuccgcuccugggccaucgccaugucccacggcaccugcgcccgccuccgcggcgcccccgaggccgucaccaugcccgccuga

SEQ ID NO: 1025 - RNA, 429 nt, Artificial Sequence
  derived and/or modified sequence opt3 from CDKN2A/m__Homo_sapiens__ACY78326
auggagcccgccgcuggcagcuccauggaaccuucugcagacuggcuggccaccgcggcugccagagggaggguggaggaaguccgggcacuccuugaggccggagcucugccaaacgcacccaauucauacggucgccgaccgauccagguuaugaugaugggcagugcccguguggcugaauuguuacugcuacacggggccgagccuaacugcgcggauccagcaacacucacuagacccguacaugacgccgcuagggagggauuccuggauacgcuugugguccugcaccgggccggcgcaccuugugcuaugccaggugccgugugccccuggaccugguugcgcagcugggcgauugccaugucccaugggacaugugcaagacucaggggagcuccugaagccguuacuaugccagcuuga

SEQ ID NO: 1026 - RNA, 429 nt, Artificial Sequence
  derived and/or modified sequence opt4 from CDKN2A/m__Homo_sapiens__ACY78326
auggagcccgccgccggcagcagcauggagcccagcgccgacuggcuggccaccgccgccgccagaggcagaguggaggaggugagagcccugcuggaggccggcgcccugcccaacgcccccaacagcuacggcagaagacccauccaggugaugaugaugggcagcgccagaguggccgagcugcugcugcugcacggcgccgagcccaacugcgccgaccccgccacccugaccagacccgugcacgacgccgccagagagggcuuccuggacacccugguggugcugcacagagccggcgcccccugcgccaugcccggcgccgugugccccuggaccuggcugagaagcugggccaucgccaugagccacggcaccugcgccagacugagaggcgcccccgaggccgugaccaugcccgccuga

SEQ ID NO: 1027 - RNA, 429 nt, Artificial Sequence
  derived and/or modified sequence opt5 from CDKN2A/m__Homo_sapiens__ACY78326
auggagcccgccgcuggcagcuccauggaaccuucugccgacuggcuggcgaccgcugccgccagagggcggguggaggaaguccgcgcucuccuggaggccggagcccuuccgaacgcucccaauagcuacggcagacggccuauccagguuaugaugaugggguccgcgcgcguggccgaacugcuccugcuucacggagcugagcccaacugcgccgauccugcuacacugacgagacccgugcaugacgccgcgcgggagggcuuccucgauacccuggucgugcugcaccgcgccggggcuccuugugccaugccgggagcuguuugccccuggacauggcucagaucuugggccauugccaugagccauggcaccugugcucggcugcgcggcgcgccugaagccgugacaaugcccgcuuga

SEQ ID NO: 1028 - protein, 116 aa, Artificial Sequence
  CDKN2A/m__Homo_sapiens__G3XAG3
MEPAAGSSMEPSADWLATAAARGRVEEVRALLEAGALPNAPNSYGRRPIQVGRGSAAGAGDGGRLWRTKFAGELESGSASILRKKGRLPGEFSEGVCNHRPPPGDALGAWEAKEEE

SEQ ID NO: 1029 - RNA, 351 nt, Artificial Sequence
  CDKN2A/m__Homo_sapiens__EAW58598
auggagccggcggcggggagcagcauggagccuucggcugacuggcuggccacggccgcggcccggggucggguagaggaggugcgggcgcugcuggaggcgggggcgcugcccaacgcaccgaauaguuacggucggaggccgauccagguggguagagggucugcagcgggagcaggggauggcgggcgacucuggaggacgaaguuugcaggggaauuggaaucagguagcgcuucgauucuccggaaaaaggggaggcuuccuggggaguuuucagaagggguuuguaaucacagaccuccuccuggcgacgcccugggggcuugggaagccaaggaagaggaauga

SEQ ID NO: 1030 - RNA, 351 nt, Artificial Sequence
  derived and/or modified sequence opt1 from CDKN2A/m__Homo_sapiens__EAW58598
auggagcccgccgccggcagcuccauggagcccagcgcggacuggcuggccaccgccgccgcccgcgggcggguggaggagguccgcgcgcuccuggaggccggcgcccugcccaacgcccccaacuccuacgggcggcgccccauccaggugggccgggggagcgcggccggcgccggcgacgggggccgccucuggcggaccaaguucgccggggagcuggaguccggcagcgccuccauccugcgcaagaaggggcggcuccccggcgaguucagcgagggcgugugcaaccaccgcccgccgcccggggacgcgcugggcgccugggaggccaaggaggaggaguga

SEQ ID NO: 1031 - RNA, 351 nt, Artificial Sequence
  derived and/or modified sequence opt2 from CDKN2A/m__Homo_sapiens__EAW58598
auggagcccgccgccggcuccuccauggagcccuccgccgacuggcucgccaccgccgccgcccgcggccgcgucgaggagguccgcgcccuccucgaggccggcgcccuccccaacgcccccaacuccuacggccgccgccccauccaggucggccgcggcuccgccgccggcgccggcgacggcggccgccucuggcgcaccaaguucgccggcgagcucgaguccggcuccgccuccauccuccgcaagaagggccgccuccccggcgaguucuccgagggcgucugcaaccaccgccccccccccggcgacgcccucggcgccugggaggccaaggaggaggaguga

SEQ ID NO: 1032 - RNA, 351 nt, Artificial Sequence
  derived and/or modified sequence opt3 from CDKN2A/m__Homo_sapiens__EAW58598
auggagcccgccgcuggcagcuccauggaaccuucugcagacuggcuggccaccgcggcugccagagggaggguggaggaaguccgggcacuccuugaggccggagcucugccaaacgcacccaauucauacggucgccgaccgauccagguuggccgugggagugccgcuggagccggcgauggugggagauuguggaggacaaaguucgcgggagaauuagagagcggcuccgcaucuauucugcggaaaaagggccgccuaccuggggaguuuucggaaggagugugcaaccacagaccacccccuggugacgcccucggcgcuugggaggccaaagaagaggaguga

SEQ ID NO: 1033 - RNA, 351 nt, Artificial Sequence
  derived and/or modified sequence opt4 from CDKN2A/m__Homo_sapiens__EAW58598
auggagcccgccgccggcagcagcauggagcccagcgccgacuggcuggccaccgccgccgccagaggcagaguggaggaggugagagcccugcuggaggccggcgcccugcccaacgcccccaacagcuacggcagaagacccauccaggugggcagaggcagcgccgccggcgccggcgacggcggcagacuguggagaaccaaguucgccggcgagcuggagagcggcagcgccagcauccugagaaagaagggcagacugcccggcgaguucagcgagggcgugugcaaccacagacccccccccggcgacgcccugggcgccugggaggccaaggaggaggaguga

SEQ ID NO: 1034 - RNA, 351 nt, Artificial Sequence
  derived and/or modified sequence opt5 from CDKN2A/m__Homo_sapiens__EAW58598
auggagcccgccgcuggcagcuccauggaaccuucugccgacuggcuggcgaccgcugccgccagagggcggguggaggaaguccgcgcucuccuggaggccggagcccuuccgaacgcucccaauagcuacggcagacggccuauccagguugggcgcggauccgcggccggcgcuggggauggaggcagacuguggcggacaaaguucgccggcgaacucgagucugggagcgcuuccauucugcgcaaaaagggaagacuucccggcgaguuuucugaaggggugugcaaccaccggccucccccuggagacgcccugggcgcgugggaggccaaagaagaggaguga

SEQ ID NO: 1035 - protein, 156 aa, Artificial Sequence
  CDKN2A/m__Homo_sapiens__K7PML8
MEPAAGSSMEPSADWLATAAARGRVEEVRALLEAGALPNAPNSYGRRPIQVMMMGSARVAELLLLHGAEPNCADPATLTRPVHDAAREGFLDTLVVLHRAGARLDVRDAWGRLPVDLAEELGHRDVARYLRAAAGGTRGSNHARIDAAEGPSDIPD

SEQ ID NO: 1036 - RNA, 471 nt, Artificial Sequence
  CDKN2A/m__Homo_sapiens__AFN61598
auggagccggcggcggggagcagcauggagccuucggcugacuggcuggccacggccgcggcccggggucggguagaggaggugcgggcgcugcuggaggcgggggcgcugcccaacgcaccgaauaguuacggucggaggccgauccaggucaugaugaugggcagcgcccgaguggcggagcugcugcugcuccacggcgcggagcccaacugcgccgaccccgccacucucacccgacccgugcacgacgcugcccgggagggcuuccuggacacgcugguggugcugcaccgggccggggcgcggcuggacgugcgcgaugccuggggccgucugcccguggaccuggcugaggagcugggccaucgcgaugucgcacgguaccugcgcgcggcugcggggggcaccagaggcaguaaccaugcccgcauagaugccgcggaaggucccucagacauccccgauuga

SEQ ID NO: 1037 - RNA, 471 nt, Artificial Sequence
  derived and/or modified sequence opt1 from CDKN2A/m__Homo_sapiens__AFN61598
auggagcccgccgccggcagcuccauggagccgagcgcggacuggcuggccaccgccgccgcccgcgggcggguggaggagguccgcgcgcuccuggaggccggcgcccugcccaacgcccccaacuccuacgggcggcgccccauccaggugaugaugaugggcagcgcgcggguggccgagcuccugcugcuccacggggccgagccgaacugcgccgaccccgccacccugacgcgccccguccacgacgcggcccgggagggcuuccuggacacccucguggugcugcaccgcgccggcgcccggcuggacguccgcgacgccugggggcggcuccccguggaccuggcggaggagcugggccaccgcgacguggcccgguaccuccgcgccgccgccgggggcacccggggguccaaccacgcgcgcaucgacgccgccgagggcccgagcgacauccccgacuga

SEQ ID NO: 1038 - RNA, 471 nt, Artificial Sequence
  derived and/or modified sequence opt2 from CDKN2A/m__Homo_sapiens__AFN61598
auggagcccgccgccggcuccuccauggagcccuccgccgacuggcucgccaccgccgccgcccgcggccgcgucgaggagguccgcgcccuccucgaggccggcgcccuccccaacgcccccaacuccuacggccgccgccccauccaggucaugaugaugggcuccgcccgcgucgccgagcuccuccuccuccacggcgccgagcccaacugcgccgaccccgccacccucacccgccccguccacgacgccgcccgcgagggcuuccucgacacccucgucguccuccaccgcgccggcgcccgccucgacguccgcgacgccuggggccgccuccccgucgaccucgccgaggagcucggccaccgcgacgucgcccgcuaccuccgcgccgccgccggcggcacccgcggcuccaaccacgcccgcaucgacgccgccgagggccccuccgacauccccgacuga

SEQ ID NO: 1039 - RNA, 471 nt, Artificial Sequence
  derived and/or modified sequence opt3 from CDKN2A/m__Homo_sapiens__AFN61598
auggagcccgccgcuggcagcuccauggaaccuucugcagacuggcuggccaccgcggcugccagagggaggguggaggaaguccgggcacuccuugaggccggagcucugccaaacgcacccaauucauacggucgccgaccgauccagguuaugaugaugggcagugcccguguggcugaauuguuacugcuacacggggccgagccuaacugcgcggauccagcaacacucacuagacccguacaugacgccgcuagggagggauuccuggauacgcuugugguccugcaccgggccggcgcacgcuuggacgugagagaugcuugggguaggcucccuguugaccuggccgaggaacuggggcaucgggauguggcgcgcuaucuccgagccgcagcuggaggcaccagaggcagcaaucacgccaggauugacgcugccgaagggccauccgauauacccgacuga

SEQ ID NO: 1040 - RNA, 471 nt, Artificial Sequence
  derived and/or modified sequence opt4 from CDKN2A/m__Homo_sapiens__AFN61598
auggagcccgccgccggcagcagcauggagcccagcgccgacuggcuggccaccgccgccgccagaggcagaguggaggaggugagagcccugcuggaggccggcgcccugcccaacgcccccaacagcuacggcagaagacccauccaggugaugaugaugggcagcgccagaguggccgagcugcugcugcugcacggcgccgagcccaacugcgccgaccccgccacccugaccagacccgugcacgacgccgccagagagggcuuccuggacacccugguggugcugcacagagccggcgccagacuggacgugagagacgccuggggcagacugcccguggaccuggccgaggagcugggccacagagacguggccagauaccugagagccgccgccggcggcaccagaggcagcaaccacgccagaaucgacgccgccgagggccccagcgacauccccgacuga

SEQ ID NO: 1041 - RNA, 471 nt, Artificial Sequence
  derived and/or modified sequence opt5 from CDKN2A/m__Homo_sapiens__AFN61598
auggagcccgccgcuggcagcuccauggaaccuucugccgacuggcuggcgaccgcugccgccagagggcggguggaggaaguccgcgcucuccuggaggccggagcccuuccgaacgcucccaauagcuacggcagacggccuauccagguuaugaugaugggguccgcgcgcguggccgaacugcuccugcuucacggagcugagcccaacugcgccgauccugcuacacugacgagacccgugcaugacgccgcgcgggagggcuuccucgauacccuggucgugcugcaccgcgccggggcuagacucgacguucgggaugccuggggacgccugccuguggaccuugcugaggaacugggccauagagaugucgcccgguaucuccgcgccgcugcgggcgggacaagaggaucuaaucacgcccggauugacgcugccgaaggcccgagcgauauccccgacuga

SEQ ID NO: 1042 - protein, 108 aa, Artificial Sequence
  CDKN2A/m__Homo_sapiens__L8E941
MEVMMMGSARVAELLLLHGAEPNCADPATLTRPVHDAAREGFLDTLVVLHRAGARLDVRDAWGRLPVDLAEELGHRDVARYLRAAAGGTRGSNHARIDAAEGPSDIPD

SEQ ID NO: 1043 - RNA, 327 nt, Artificial Sequence
  CDKN2A/m__Homo_sapiens__CCQ43815
auggaagucaugaugaugggcagcgcccgaguggcggagcugcugcugcuccacggcgcggagcccaacugcgccgaccccgccacucucacccgacccgugcacgacgcugcccgggagggcuuccuggacacgcugguggugcugcaccgggccggggcgcggcuggacgugcgcgaugccuggggccgucugcccguggaccuggcugaggagcugggccaucgcgaugucgcacgguaccugcgcgcggcugcggggggcaccagaggcaguaaccaugcccgcauagaugccgcggaaggucccucagacauccccgauuga

SEQ ID NO: 1044 - RNA, 327 nt, Artificial Sequence
  derived and/or modified sequence opt1 from CDKN2A/m__Homo_sapiens__CCQ43815
auggaggugaugaugaugggcagcgcccgcgucgccgagcugcuccugcugcacggggcggagcccaacugcgccgacccggccacccucacccggcccgugcacgacgccgcccgcgagggcuuccuggacacgcuggugguccuccaccgggcgggggcccgccuggacgugcgggacgccuggggccgccugcccguggaccucgccgaggagcuggggcaccgggacgucgcgcgcuaccugcgggccgccgccggcggcacccgcggguccaaccacgcccggaucgacgcggccgagggccccagcgacaucccggacuga

SEQ ID NO: 1045 - RNA, 327 nt, Artificial Sequence
  derived and/or modified sequence opt2 from CDKN2A/m__Homo_sapiens__CCQ43815
auggaggucaugaugaugggcuccgcccgcgucgccgagcuccuccuccuccacggcgccgagcccaacugcgccgaccccgccacccucacccgccccguccacgacgccgcccgcgagggcuuccucgacacccucgucguccuccaccgcgccggcgcccgccucgacguccgcgacgccuggggccgccuccccgucgaccucgccgaggagcucggccaccgcgacgucgcccgcuaccuccgcgccgccgccggcggcacccgcggcuccaaccacgcccgcaucgacgccgccgagggccccuccgacauccccgacuga

SEQ ID NO: 1046 - RNA, 327 nt, Artificial Sequence
  derived and/or modified sequence opt3 from CDKN2A/m__Homo_sapiens__CCQ43815
auggaggugaugaugaugggcagcgccagagucgcugaacugcuccuucugcacggggcagagcccaacugcgccgacccugcgaccuugacaaggccaguucaugaugcugcccgggaaggauucuuagacacucuggugguacuacaccgcgccggugcacgacucgaugugcgugacgcuuggggcagacugccggucgaucuugcagaggaacuggggcauagggacguggcccgguacuugcgcgcugccgcgggaggcacgagagguuccaaucacgcaaggaucgaugccgcugaggggcccucugacauuccugauuga

SEQ ID NO: 1047 - RNA, 327 nt, Artificial Sequence
  derived and/or modified sequence opt4 from CDKN2A/m__Homo_sapiens__CCQ43815
auggaggugaugaugaugggcagcgccagaguggccgagcugcugcugcugcacggcgccgagcccaacugcgccgaccccgccacccugaccagacccgugcacgacgccgccagagagggcuuccuggacacccugguggugcugcacagagccggcgccagacuggacgugagagacgccuggggcagacugcccguggaccuggccgaggagcugggccacagagacguggccagauaccugagagccgccgccggcggcaccagaggcagcaaccacgccagaaucgacgccgccgagggccccagcgacauccccgacuga

SEQ ID NO: 1048 - RNA, 327 nt, Artificial Sequence
  derived and/or modified sequence opt5 from CDKN2A/m__Homo_sapiens__CCQ43815
auggaggugaugaugaugggcagcgccagagucgcugaacugcuccugcuucacggggccgagcccaacugcgcggacccugcuacccugacacggccgguucaugaugccgcccgcgaaggauuccucgacacgcugguggugcuucacagagcuggcgcccggcuggauguccgcgacgcuugggggagacuccccguggaucuggccgaggaacugggacaucgggacguugcgcgcuaccucagagccgcugccggcgggacccggggauccaaucacgcucgcaucgaugccgcggagggcccuucugacauucccgauuga

SEQ ID NO: 1049 - protein, 132 aa, Artificial Sequence
  CDKN2A/m__Homo_sapiens__Q8N726
MVRRFLVTLRIRRACGPPRVRVFVVHIPRLTGEWAAPGAPAAVALVLMLLRSQRLGQQPLPRRPGHDDGQRPSGGAAAAPRRGAQLRRPRHSHPTRARRCPGGLPGHAGGAAPGRGAAGRARCLGPSARGPG

SEQ ID NO: 1050 - RNA, 399 nt, Artificial Sequence
  CDKN2A/m__Homo_sapiens__AAA82236
auggugcgcagguucuuggugacccuccggauucggcgcgcgugcggcccgccgcgagugaggguuuucgugguucacaucccgcggcucacgggggagugggcagcgccaggggcgcccgccgcuguggcccucgugcugaugcuacugaggagccagcgucuagggcagcagccgcuuccuagaagaccaggucaugaugaugggcagcgcccgaguggcggagcugcugcugcuccacggcgcggagcccaacugcgccgaccccgccacucucacccgacccgugcacgacgcugcccgggagggcuuccuggacacgcugguggugcugcaccgggccggggcgcggcuggacgugcgcgaugccuggggccgucugcccguggaccuggcuga

SEQ ID NO: 1051 - RNA, 399 nt, Artificial Sequence
  derived and/or modified sequence opt1 from CDKN2A/m__Homo_sapiens__AAA82236
auggugcgccgguuccuggucacccuccgcauccggcgcgccugcgggcccccgcgggugcgcguguucgucgugcacaucccccggcugaccggggagugggccgcgcccggcgcccccgccgccguggcccugguccucaugcugcugcgcagccagcggcucgggcagcagccgcugccccgccggcccggccacgacgacgggcagcgccccuccggcggcgcggccgccgccccgcggcgcggggcgcagcugcggcgcccccggcacagccaccccacgcgcgcccggcgcugccccggcgggcucccgggccacgccgggggcgccgcccccggccggggcgcggccggccgcgcccgcugccuggggcccuccgcccggggccccggcuga

SEQ ID NO: 1052 - RNA, 399 nt, Artificial Sequence
  derived and/or modified sequence opt2 from CDKN2A/m__Homo_sapiens__AAA82236
augguccgccgcuuccucgucacccuccgcauccgccgcgccugcggccccccccgcguccgcgucuucgucguccacaucccccgccucaccggcgagugggccgcccccggcgcccccgccgccgucgcccucguccucaugcuccuccgcucccagcgccucggccagcagccccucccccgccgccccggccacgacgacggccagcgccccuccggcggcgccgccgccgccccccgccgcggcgcccagcuccgccgcccccgccacucccaccccacccgcgcccgccgcugccccggcggccuccccggccacgccggcggcgccgcccccggccgcggcgccgccggccgcgcccgcugccucggccccuccgcccgcggccccggcuga

SEQ ID NO: 1053 - RNA, 399 nt, Artificial Sequence
  derived and/or modified sequence opt3 from CDKN2A/m__Homo_sapiens__AAA82236
auggugagaagguuccuggucacccuccggauccgccgagccugcgggcccccucguguuagaguguuuguagugcacauuccaaggcuuacaggcgagugggcugcaccgggagcccccgcggcugucgcccugguguugauguuacugcggagccagcgccuaggucaacagccucucccaagaaggcccggccaugacgaugggcagcggccuuccggaggcgcagccgcugcaccacgccgaggugcccagcugagaaggccccggcacucucauccuacucgugcucgcagauguccagggggacuuccgggccacgccggcggggcggcacccggaaggggugccgcuggccgggcccgaugccuggggccuucagcacgcggaccaggcuga

SEQ ID NO: 1054 - RNA, 399 nt, Artificial Sequence
  derived and/or modified sequence opt4 from CDKN2A/m__Homo_sapiens__AAA82236
auggugagaagauuccuggugacccugagaaucagaagagccugcggcccccccagagugagaguguucguggugcacauccccagacugaccggcgagugggccgcccccggcgcccccgccgccguggcccuggugcugaugcugcugagaagccagagacugggccagcagccccugcccagaagacccggccacgacgacggccagagacccagcggcggcgccgccgccgcccccagaagaggcgcccagcugagaagacccagacacagccaccccaccagagccagaagaugccccggcggccugcccggccacgccggcggcgccgcccccggcagaggcgccgccggcagagccagaugccugggccccagcgccagaggccccggcuga

SEQ ID NO: 1055 - RNA, 399 nt, Artificial Sequence
  derived and/or modified sequence opt5 from CDKN2A/m__Homo_sapiens__AAA82236
auggugagacgguuccuggucacccuccgcaucagacgggccugcgggcccccucgcguuagaguguuugugguccacauuccgcggcugacaggcgagugggcugcccccggagcgccugcugccguggcccuuguucugaugcuccugcgcagccagagacuuggccaacagccccugccucggcgccccgggcaugacgauggacagagaccuuccggcggggcugccgcugccccgcggcgcggagcgcagcucagacggccccgccacucucauccuacgagagcccggagaugucccggcggccugccugggcacgcuggaggcgccgcucccgggcgcggagccgcgggccgggccagaugccuggggccgagcgcucgcggaccuggcuga

SEQ ID NO: 1056 - protein, 702 aa, Artificial Sequence
  CEA__Homo_sapiens__NP_004354
MESPSAPPHRWCIPWQRLLLTASLLTFWNPPTTAKLTIESTPFNVAEGKEVLLLVHNLPQHLFGYSWYKGERVDGNRQIIGYVIGTQQATPGPAYSGREIIYPNASLLIQNIIQNDTGFYTLHVIKSDLVNEEATGQFRVYPELPKPSISSNNSKPVEDKDAVAFTCEPETQDATYLWWVNNQSLPVSPRLQLSNGNRTLTLFNVTRNDTASYKCETQNPVSARRSDSVILNVLYGPDAPTISPLNTSYRSGENLNLSCHAASNPPAQYSWFVNGTFQQSTQELFIPNITVNNSGSYTCQAHNSDTGLNRTTVTTITVYAEPPKPFITSNNSNPVEDEDAVALTCEPEIQNTTYLWWVNNQSLPVSPRLQLSNDNRTLTLLSVTRNDVGPYECGIQNELSVDHSDPVILNVLYGPDDPTISPSYTYYRPGVNLSLSCHAASNPPAQYSWLIDGNIQQHTQELFISNITEKNSGLYTCQANNSASGHSRTTVKTITVSAELPKPSISSNNSKPVEDKDAVAFTCEPEAQNTTYLWWVNGQSLPVSPRLQLSNGNRTLTLFNVTRNDARAYVCGIQNSVSANRSDPVTLDVLYGPDTPIISPPDSSYLSGANLNLSCHSASNPSPQYSWRINGIPQQHTQVLFIAKITPNNNGTYACFVSNLATGRNNSIVKSITVSASGTSPGLSAGATVGIMIGVLVGVALI

SEQ ID NO: 1057 - RNA, 2109 nt, Artificial Sequence
  CEA__Homo_sapiens__CCDS12584.1
auggagucucccucggccccuccccacagauggugcauccccuggcagaggcuccugcucacagccucacuucuaaccuucuggaacccgcccaccacugccaagcucacuauugaauccacgccguucaaugucgcagaggggaaggaggugcuucuacuuguccacaaucugccccagcaucuuuuuggcuacagcugguacaaaggugaaagaguggauggcaaccgucaaauuauaggauauguaauaggaacucaacaagcuaccccagggcccgcauacaguggucgagagauaauauaccccaaugcaucccugcugauccagaacaucauccagaaugacacaggauucuacacccuacacgucauaaagucagaucuugugaaugaagaagcaacuggccaguuccggguauacccggagcugcccaagcccuccaucuccagcaacaacuccaaacccguggaggacaaggaugcuguggccuucaccugugaaccugagacucaggacgcaaccuaccugugguggguaaacaaucagagccucccggucagucccaggcugcagcuguccaauggcaacaggacccucacucuauucaaugucacaagaaaugacacagcaagcuacaaaugugaaacccagaacccagugagugccaggcgcagugauucagucauccugaauguccucuauggcccggaugcccccaccauuuccccucuaaacacaucuuacagaucaggggaaaaucugaaccucuccugccacgcagccucuaacccaccugcacaguacucuugguuugucaaugggacuuuccagcaauccacccaagagcucuuuauccccaacaucacugugaauaauaguggauccuauacgugccaagcccauaacucagacacuggccucaauaggaccacagucacgacgaucacagucuaugcagagccacccaaacccuucaucaccagcaacaacuccaaccccguggaggaugaggaugcuguagccuuaaccugugaaccugagauucagaacacaaccuaccugugguggguaaauaaucagagccucccggucagucccaggcugcagcuguccaaugacaacaggacccucacucuacucagugucacaaggaaugauguaggacccuaugaguguggaauccagaacgaauuaaguguugaccacagcgacccagucauccugaauguccucuauggcccagacgaccccaccauuucccccucauacaccuauuaccguccaggggugaaccucagccucuccugccaugcagccucuaacccaccugcacaguauucuuggcugauugaugggaacauccagcaacacacacaagagcucuuuaucuccaacaucacugagaagaacagcggacucuauaccugccaggccaauaacucagccaguggccacagcaggacuacagucaagacaaucacagucucugcggagcugcccaagcccuccaucuccagcaacaacuccaaacccguggaggacaaggaugcuguggccuucaccugugaaccugaggcucagaacacaaccuaccugugguggguaaauggucagagccucccagucagucccaggcugcagcuguccaauggcaacaggacccucacucuauucaaugucacaagaaaugacgcaagagccuauguauguggaauccagaacucagugagugcaaaccgcagugacccagucacccuggauguccucuaugggccggacacccccaucauuucccccccagacucgucuuaccuuucgggagcgaaccucaaccucuccugccacucggccucuaacccauccccgcaguauucuuggcguaucaaugggauaccgcagcaacacacacaaguucucuuuaucgccaaaaucacgccaaauaauaacgggaccuaugccuguuuugucucuaacuuggcuacuggccgcaauaauuccauagucaagagcaucacagucucugcaucuggaacuucuccuggucucucagcuggggccacugucggcaucaugauuggagugcugguugggguugcucugauauag

SEQ ID NO: 1058 - RNA, 2109 nt, Artificial Sequence
  derived and/or modified sequence opt1 from CEA__Homo_sapiens__CCDS12584.1
auggagagccccuccgccccgccccaccgcuggugcauccccuggcagcggcugcuccugaccgccagccugcucaccuucuggaacccgcccacgaccgcgaagcugaccaucgaguccacccccuucaacguggccgagggcaaggagguccugcuccuggugcacaaccugccccagcaccucuucggguacagcugguacaagggcgagcgcguggacgggaaccggcagaucaucggcuacgucaucgggacgcagcaggccacccccggcccggccuacuccggccgcgagaucaucuaccccaacgccagccugcugauccagaacaucauccagaacgacaccggguucuacacccuccacgugaucaaguccgaccuggugaacgaggaggcgacgggccaguuccgggucuaccccgagcugcccaagccgagcaucuccagcaacaacuccaagcccguggaggacaaggacgccguggccuucacgugcgagcccgagacccaggacgccaccuaccucuggugggucaacaaccagagccugcccguguccccgcgccugcagcucagcaacgggaaccggacgcugacccuguucaacgugacccgcaacgacaccgcguccuacaagugcgagacgcagaaccccgucagcgcccggcgcuccgacagcgugauccucaacgugcuguacggccccgacgcccccaccaucuccccgcugaacaccagcuaccggagcggggagaaccucaaccuguccugccacgccgccagcaacccgcccgcgcaguacuccugguucgucaacggcaccuuccagcagagcacgcaggagcuguucauccccaacaucaccgugaacaacuccggcagcuacacgugccaggcccacaacuccgacaccgggcucaaccgcaccaccgugaccaccaucacggucuacgccgagccgcccaagcccuucaucaccagcaacaacuccaaccccguggaggacgaggacgccguggcccugaccugcgagcccgagauccagaacaccacguaccuguggugggucaacaaccagagccuccccgugagcccccggcugcagcuguccaacgacaaccgcacccucacccugcuguccgugacccggaacgacgucggcccguacgagugcgggauccagaacgagcucagcguggaccacuccgaccccgucauccugaacgugcuguacggccccgacgaccccacgaucagcccguccuacaccuacuaccgccccggcgugaaccucagccuguccugccacgcggccagcaacccgcccgcccaguacagcuggcugaucgacgggaacauccagcagcacacccaggagcuguucaucuccaacaucaccgagaagaacagcggccucuacacgugccaggccaacaacuccgccagcgggcacucccggaccaccgucaagaccaucaccgugagcgcggagcugcccaagcccuccaucagcuccaacaacagcaagcccguggaggacaaggacgccgucgccuucacgugcgagcccgaggcccagaacaccaccuaccucuggugggugaacggccagucccugccggugagcccccgccugcagcucuccaacgggaaccggacccugacgcuguucaacgucacccgcaacgacgcccgggcguacgugugcggcauccagaacagcguguccgccaaccgcagcgaccccgucacccuggacgugcucuacggccccgacaccccgaucaucuccccgcccgacagcagcuaccuguccggggccaaccugaaccucagcugccacuccgccagcaaccccagcccccaguacuccuggcgcaucaacggcaucccccagcagcacacccaggugcuguucaucgcgaagaucacccccaacaacaacgggaccuacgccugcuucgucuccaaccuggccaccggccggaacaacagcaucgugaaguccaucacggugagcgccuccgggaccagccccggccucuccgccggcgcgaccgucgggaucaugaucggcgugcuggugggggucgcccugaucuga

SEQ ID NO: 1059 - RNA, 2109 nt, Artificial Sequence
  derived and/or modified sequence opt2 from CEA__Homo_sapiens__CCDS12584.1
auggagucccccuccgcccccccccaccgcuggugcauccccuggcagcgccuccuccucaccgccucccuccucaccuucuggaacccccccaccaccgccaagcucaccaucgaguccacccccuucaacgucgccgagggcaaggagguccuccuccucguccacaaccucccccagcaccucuucggcuacuccugguacaagggcgagcgcgucgacggcaaccgccagaucaucggcuacgucaucggcacccagcaggccacccccggccccgccuacuccggccgcgagaucaucuaccccaacgccucccuccucauccagaacaucauccagaacgacaccggcuucuacacccuccacgucaucaaguccgaccucgucaacgaggaggccaccggccaguuccgcgucuaccccgagcuccccaagcccuccaucuccuccaacaacuccaagcccgucgaggacaaggacgccgucgccuucaccugcgagcccgagacccaggacgccaccuaccucuggugggucaacaaccagucccuccccgucuccccccgccuccagcucuccaacggcaaccgcacccucacccucuucaacgucacccgcaacgacaccgccuccuacaagugcgagacccagaaccccgucuccgcccgccgcuccgacuccgucauccucaacguccucuacggccccgacgcccccaccaucuccccccucaacaccuccuaccgcuccggcgagaaccucaaccucuccugccacgccgccuccaacccccccgcccaguacuccugguucgucaacggcaccuuccagcaguccacccaggagcucuucauccccaacaucaccgucaacaacuccggcuccuacaccugccaggcccacaacuccgacaccggccucaaccgcaccaccgucaccaccaucaccgucuacgccgagccccccaagcccuucaucaccuccaacaacuccaaccccgucgaggacgaggacgccgucgcccucaccugcgagcccgagauccagaacaccaccuaccucuggugggucaacaaccagucccuccccgucuccccccgccuccagcucuccaacgacaaccgcacccucacccuccucuccgucacccgcaacgacgucggccccuacgagugcggcauccagaacgagcucuccgucgaccacuccgaccccgucauccucaacguccucuacggccccgacgaccccaccaucucccccuccuacaccuacuaccgccccggcgucaaccucucccucuccugccacgccgccuccaacccccccgcccaguacuccuggcucaucgacggcaacauccagcagcacacccaggagcucuucaucuccaacaucaccgagaagaacuccggccucuacaccugccaggccaacaacuccgccuccggccacucccgcaccaccgucaagaccaucaccgucuccgccgagcuccccaagcccuccaucuccuccaacaacuccaagcccgucgaggacaaggacgccgucgccuucaccugcgagcccgaggcccagaacaccaccuaccucuggugggucaacggccagucccuccccgucuccccccgccuccagcucuccaacggcaaccgcacccucacccucuucaacgucacccgcaacgacgcccgcgccuacgucugcggcauccagaacuccgucuccgccaaccgcuccgaccccgucacccucgacguccucuacggccccgacacccccaucaucuccccccccgacuccuccuaccucuccggcgccaaccucaaccucuccugccacuccgccuccaaccccuccccccaguacuccuggcgcaucaacggcaucccccagcagcacacccagguccucuucaucgccaagaucacccccaacaacaacggcaccuacgccugcuucgucuccaaccucgccaccggccgcaacaacuccaucgucaaguccaucaccgucuccgccuccggcaccucccccggccucuccgccggcgccaccgucggcaucaugaucggcguccucgucggcgucgcccucaucuga

SEQ ID NO: 1060 - RNA, 2109 nt, Artificial Sequence
  derived and/or modified sequence opt3 from CEA__Homo_sapiens__CCDS12584.1
auggagagccccuccgccccuccacacagauggugcaucccguggcagaggcugcuccuuaccgcuucucuguugacauucuggaaucccccuacuacggcaaaguuaaccauugaaucaacaccauuuaauguggccgagggcaaagaaguccugcuacucguucauaaccugccccaacaccuuuucggguacaguugguauaagggagagcggguggacgguaaucgccagauaaucggcuacguaauugggacucagcaggcgaccccuggaccagcuuauagcggccgagaaaucauuuaccccaacgccucccuguugauccaaaauauaauccagaacgauacagguuuuuauacccuccaugugauuaaaucugaccuggucaaugaggaggcaacugggcaguuccguguguacccugaacugccaaagccgucgaucucaagcaacaauaguaaacccguugaggauaaggacgccguggcuuuuacaugugaaccugagacccaggaugcaacguaucucuggugggucaacaaucaauccuuaccagugucucccagacugcagcuuagcaacggaaauaggacuuugacccuguucaacguaacacggaaugacacugccuccuacaagugcgagacccagaacccuguuucagcucgcagaagugauagcgugauucuaaacguccucuacggcccagacgcccccacaaucucuccgcugaauaccuccuauaggucaggcgaaaaccuuaaucugagcugucacgcggcaaguaacccucccgcccaguacucuugguuugugaaugggacguuccaacaguccacucaggaguuguuuauaccaaacauuacagugaauaacagcggaucguauaccugccaagcucauaauucugauacuggucucaaccggacaaccgucacgaccaucacaguuuacgccgaaccucccaaaccauucauuacuuccaauaacucaaaucccguggaggacgaagaugcaguagcucugaccugugagccugagauccagaacacaacuuauuuauggugggugaauaaccagagucugccagucagcccgcgccuccagcuuuccaacgacaaucgaacccugacauugcuaucugugaccagaaacgauguuggccccuacgaaugcgggauccaaaaugagcugagcguggaccacucagacccugucauucucaacgugcuguauggaccagaugaccccacuauaaguccuuccuacacguacuauaggccaggcguaaaucuuagccugucuugucacgccgcgucaaaucccccggcccaguacaguugguugaucgaugguaauauucagcagcauacacaagaacucuuuaucagcaacauaaccgagaagaacuccgggcuguauacuugccaggcaaacaauucugcuucgggacacagccggaccacaguuaaaaccauuacuguguccgccgaauuaccuaagccaucaaucaguucuaacaauagcaaacccgucgaggacaaggaugcuguggccuucacaugugagccugaagcacagaacacgaccuaccuguggugggucaauggccagucccuacccgugucaccacgucuccaacugagcaacggcaaccgcacucuuacauuguuuaauguuaccagaaacgacgccagggcuuaugugugcgggauccagaacucuguauccgcgaaccggagugauccugucacacuggacgugcucuacggacccgauacuccaauuaucagcccgccugacucuuccuaucugucaggugcaaaucuuaaccugaguugucauagcgccucgaaucccuccccacaguacucuuggcgaauuaacggcauaccccagcaacacacccagguuuuguucaucgcuaagauuacgccuaauaacaaugggaccuacgccugcuucgugagcaaccucgcaacaggacgcaauaacucaaucgucaaaaguaucacuguguccgccucuggcaccagcccaggucuguccgcuggggccacaguaggcauuaugauaggaguguuaguuggcgucgcacugaucuga

SEQ ID NO: 1061 - RNA, 2109 nt, Artificial Sequence
  derived and/or modified sequence opt4 from CEA__Homo_sapiens__CCDS12584.1
auggagagccccagcgcccccccccacagauggugcauccccuggcagagacugcugcugaccgccagccugcugaccuucuggaacccccccaccaccgccaagcugaccaucgagagcacccccuucaacguggccgagggcaaggaggugcugcugcuggugcacaaccugccccagcaccuguucggcuacagcugguacaagggcgagagaguggacggcaacagacagaucaucggcuacgugaucggcacccagcaggccacccccggccccgccuacagcggcagagagaucaucuaccccaacgccagccugcugauccagaacaucauccagaacgacaccggcuucuacacccugcacgugaucaagagcgaccuggugaacgaggaggccaccggccaguucagaguguaccccgagcugcccaagcccagcaucagcagcaacaacagcaagcccguggaggacaaggacgccguggccuucaccugcgagcccgagacccaggacgccaccuaccuguggugggugaacaaccagagccugcccgugagccccagacugcagcugagcaacggcaacagaacccugacccuguucaacgugaccagaaacgacaccgccagcuacaagugcgagacccagaaccccgugagcgccagaagaagcgacagcgugauccugaacgugcuguacggccccgacgcccccaccaucagcccccugaacaccagcuacagaagcggcgagaaccugaaccugagcugccacgccgccagcaacccccccgcccaguacagcugguucgugaacggcaccuuccagcagagcacccaggagcuguucauccccaacaucaccgugaacaacagcggcagcuacaccugccaggcccacaacagcgacaccggccugaacagaaccaccgugaccaccaucaccguguacgccgagccccccaagcccuucaucaccagcaacaacagcaaccccguggaggacgaggacgccguggcccugaccugcgagcccgagauccagaacaccaccuaccuguggugggugaacaaccagagccugcccgugagccccagacugcagcugagcaacgacaacagaacccugacccugcugagcgugaccagaaacgacgugggccccuacgagugcggcauccagaacgagcugagcguggaccacagcgaccccgugauccugaacgugcuguacggccccgacgaccccaccaucagccccagcuacaccuacuacagacccggcgugaaccugagccugagcugccacgccgccagcaacccccccgcccaguacagcuggcugaucgacggcaacauccagcagcacacccaggagcuguucaucagcaacaucaccgagaagaacagcggccuguacaccugccaggccaacaacagcgccagcggccacagcagaaccaccgugaagaccaucaccgugagcgccgagcugcccaagcccagcaucagcagcaacaacagcaagcccguggaggacaaggacgccguggccuucaccugcgagcccgaggcccagaacaccaccuaccuguggugggugaacggccagagccugcccgugagccccagacugcagcugagcaacggcaacagaacccugacccuguucaacgugaccagaaacgacgccagagccuacgugugcggcauccagaacagcgugagcgccaacagaagcgaccccgugacccuggacgugcuguacggccccgacacccccaucaucagcccccccgacagcagcuaccugagcggcgccaaccugaaccugagcugccacagcgccagcaaccccagcccccaguacagcuggagaaucaacggcaucccccagcagcacacccaggugcuguucaucgccaagaucacccccaacaacaacggcaccuacgccugcuucgugagcaaccuggccaccggcagaaacaacagcaucgugaagagcaucaccgugagcgccagcggcaccagccccggccugagcgccggcgccaccgugggcaucaugaucggcgugcuggugggcguggcccugaucuga

SEQ ID NO: 1062 - RNA, 2109 nt, Artificial Sequence
  derived and/or modified sequence opt5 from CEA__Homo_sapiens__CCDS12584.1
auggagagccccuccgccccuccgcacagauggugcauccccuggcagcggcugcuccugaccgcuucucuucugacauucuggaacccucccacgaccgccaagcucacaauugaaagcaccccuuuuaauguggcggagggcaaagaaguccugcuucugguucauaaccucccccaacaccuguucggguacuccugguauaagggagagcgcguggacggcaauagacagaucauuggguacgugaucggaacacagcaggcuaccccuggcccggccuauucugggcgggaaauuaucuaccccaacgccagccugcucauccaaaauauuauccagaacgauacaggauuuuauacccugcaugucauuaaauccgaccuugugaaugaggaggcuacgggccaguuccgcguuuacccugaacugcccaagccuucuaucagcuccaacaauagcaaacccguggaggauaaggacgccgucgcuuuuaccugugaaccggagacacaggaugccaccuaucucuggugggugaacaaucaaucucugccuguuucccccagacuucagcugagcaacggcaaucggacacucacccuguucaacgugacgcgcaaugacacagcgucuuacaagugcgagacccagaacccugucuccgccagacggagcgauucugugauucugaacgugcucuacgggcccgacgcucccacaaucuccccucugaauaccagcuaucgcuccggagaaaaccuuaaucugucuugucacgccgcuagcaacccgcccgcccaguacuccugguuugucaauggcaccuuccaacagagcacacaggagcucuuuauuccuaacaucacgguuaauaacucuggguccuauaccugccaagcgcauaauagcgauacaggacugaacagaaccacagugaccacgaucacaguguacgccgaacccccuaaacccuucauuaccucuaauaacagcaauccggucgaggacgaagaugcuguggcccuuaccugugagccugagauccagaacacaaccuaucugugguggguuaauaaccagucccuccccgugucuccucggcugcagcugagcaacgacaaucgcacacucacgcugcuuuccgucaccagaaacgaugugggccccuacgaaugcgggauucaaaaugagcugagcguugaccacucugacccugugauccucaacguccuguauggacccgaugacccgacaauuuccccuagcuacaccuacuaucggcccggcgugaaucuuucucuguccugucacgcugccagcaaucccccugcccaguacuccuggcucaucgauggcaauauccagcagcauacacaagaacuguuuauuucuaacaucaccgagaagaauagcgggcuguauacgugccaggcuaacaauuccgcgucuggacacagccgcaccacagucaaaaccauuacaguguccgccgaacucccgaagcccagcaucucuuccaacaauagcaaaccuguugaggacaaggaugcuguggccuucaccugugagcccgaagcccagaacacgacauaccuguggugggucaauggccagucucuuccugugucccccagacugcaacucagcaacgggaaccggacccugacacuguuuaauguuaccagaaacgacgcucgcgccuaugugugcggcauucagaacucugucagcgcgaaccgguccgauccugugacccuugacgugcucuacggacccgauacaccgaucaucagcccucccgacucuuccuaucugagcggggcuaaucugaaccucuccugucauucugccagcaauccuucuccccaguacuccuggagaauuaacggaaucccgcagcaacacacgcagguucuguucauugccaagaucaccccuaauaacaauggcacauacgcuugcuucgucagcaaccuugccaccggccgcaauaacuccauugugaaaucuaucacagugagcgcuuccgggaccagccccggacugucugccggcgcgacggucgggauuaugaucggagugcucguuggcguggcccugaucuga

SEQ ID NO: 1063 - protein, 344 aa, Artificial Sequence
  CEAM6__Homo_sapiens__P40199
MGPPSAPPCRLHVPWKEVLLTASLLTFWNPPTTAKLTIESTPFNVAEGKEVLLLAHNLPQNRIGYSWYKGERVDGNSLIVGYVIGTQQATPGPAYSGRETIYPNASLLIQNVTQNDTGFYTLQVIKSDLVNEEATGQFHVYPELPKPSISSNNSNPVEDKDAVAFTCEPEVQNTTYLWWVNGQSLPVSPRLQLSNGNMTLTLLSVKRNDAGSYECEIQNPASANRSDPVTLNVLYGPDGPTISPSKANYRPGENLNLSCHAASNPPAQYSWFINGTFQQSTQELFIPNITVNNSGSYMCQAHNSATGLNRTTVTMITVSGSAPVLSAVATVGITIGVLARVALI

SEQ ID NO: 1064 - RNA, 1035 nt, Artificial Sequence
  CEAM6__Homo_sapiens__AAA51739
augggaccccccucagccccucccugcagauugcauguccccuggaaggagguccugcucacagccucacuucuaaccuucuggaacccacccaccacugccaagcucacuauugaauccacgccauucaaugucgcagaggggaaggagguucuucuacucgcccacaaccugccccagaaucguauugguuacagcugguacaaaggcgaaagaguggauggcaacagucuaauuguaggauauguaauaggaacucaacaagcuaccccagggcccgcauacaguggucgagagacaauauaccccaaugcaucccugcugauccagaacgucacccagaaugacacaggauucuauacccuacaagucauaaagucagaucuugugaaugaagaagcaaccggacaguuccauguauacccggagcugcccaagcccuccaucuccagcaacaacuccaaccccguggaggacaaggaugcuguggccuucaccugugaaccugagguucagaacacaaccuaccugugguggguaaauggucagagccucccggucagucccaggcugcagcuguccaauggcaacaugacccucacucuacucagcgucaaaaggaacgaugcaggauccuaugaaugugaaauacagaacccagcgagugccaaccgcagugacccagucacccugaauguccucuauggcccagauggccccaccauuucccccucaaaggccaauuaccguccaggggaaaaucugaaccucuccugccacgcagccucuaacccaccugcacaguacucuugguuuaucaaugggacguuccagcaauccacacaagagcucuuuauccccaacaucacugugaauaauagcggauccuauaugugccaagcccauaacucagccacuggccucaauaggaccacagucacgaugaucacagucucuggaagugcuccuguccucucagcuguggccaccgucggcaucacgauuggagugcuggccagggucgcucugauauag

SEQ ID NO: 1065 - RNA, 1035 nt, Artificial Sequence
  derived and/or modified sequence opt1 from CEAM6__Homo_sapiens__AAA51739
auggggcccccgagcgccccgcccugccgccugcacgugcccuggaaggagguccuccugaccgccucccugcucaccuucuggaacccgcccacgaccgcgaagcugaccaucgagagcacccccuucaacguggccgagggcaaggaggugcugcuccuggcccacaaccugccccagaaccggaucggcuacuccugguacaagggggagcgcgucgacggcaacagccucaucgugggguacgugaucggcacgcagcaggccacccccggccccgccuacuccgggcgggagaccaucuaccccaacgcgagccugcugauccagaacgucacccagaacgacacgggcuucuacacccuccaggugaucaaguccgaccuggugaacgaggaggccaccgggcaguuccacgucuaccccgagcugccgaagcccagcaucuccagcaacaacuccaaccccguggaggacaaggacgccguggccuucacgugcgagcccgagguccagaacaccaccuaccucuggugggugaacggccagagccugccggugagcccccgccugcagcucuccaacgggaacaugacccugacccugcucuccgucaagcggaacgacgcgggcagcuacgagugcgagauccagaaccccgccuccgccaaccgcagcgaccccgugacgcugaacgugcuguacggcccggacgggcccaccaucucccccagcaaggccaacuaccggcccggcgagaaccucaaccugagcugccacgccgcguccaacccgcccgcccaguacagcugguucaucaacgggaccuuccagcaguccacccaggagcuguucauccccaacaucacggucaacaacagcggcuccuacaugugccaggcccacaacagcgccaccggccucaaccgcaccaccgugacgaugaucaccguguccgggagcgcccccguccuguccgcgguggccaccgugggcaucaccaucgggguccuggcccggguggcccucaucuga

SEQ ID NO: 1066 - RNA, 1035 nt, Artificial Sequence
  derived and/or modified sequence opt2 from CEAM6__Homo_sapiens__AAA51739
augggcccccccuccgccccccccugccgccuccacguccccuggaaggagguccuccucaccgccucccuccucaccuucuggaacccccccaccaccgccaagcucaccaucgaguccacccccuucaacgucgccgagggcaaggagguccuccuccucgcccacaaccucccccagaaccgcaucggcuacuccugguacaagggcgagcgcgucgacggcaacucccucaucgucggcuacgucaucggcacccagcaggccacccccggccccgccuacuccggccgcgagaccaucuaccccaacgccucccuccucauccagaacgucacccagaacgacaccggcuucuacacccuccaggucaucaaguccgaccucgucaacgaggaggccaccggccaguuccacgucuaccccgagcuccccaagcccuccaucuccuccaacaacuccaaccccgucgaggacaaggacgccgucgccuucaccugcgagcccgagguccagaacaccaccuaccucuggugggucaacggccagucccuccccgucuccccccgccuccagcucuccaacggcaacaugacccucacccuccucuccgucaagcgcaacgacgccggcuccuacgagugcgagauccagaaccccgccuccgccaaccgcuccgaccccgucacccucaacguccucuacggccccgacggccccaccaucucccccuccaaggccaacuaccgccccggcgagaaccucaaccucuccugccacgccgccuccaacccccccgcccaguacuccugguucaucaacggcaccuuccagcaguccacccaggagcucuucauccccaacaucaccgucaacaacuccggcuccuacaugugccaggcccacaacuccgccaccggccucaaccgcaccaccgucaccaugaucaccgucuccggcuccgcccccguccucuccgccgucgccaccgucggcaucaccaucggcguccucgcccgcgucgcccucaucuga

SEQ ID NO: 1067 - RNA, 1035 nt, Artificial Sequence
  derived and/or modified sequence opt3 from CEAM6__Homo_sapiens__AAA51739
auggggcccccuagcgccccaccgugcagacugcacgugcccuggaaggagguccuccuuaccgcuucccuguugacauucuggaacccuccaacuacggcaaaauuaaccaucgaaucuacacccuuuaauguugccgagggcaaggaagugcugcuacucgcgcauaaccugccucagaauaggauuggauacucaugguauaaaggugagcggguagacggcaacagucuuauagugggguacgucaucggaacucaacaggcuaccccaggccccgccuauagcggucgcgaaacaauuuacccuaaugcaucccuguugauccagaacgugacccagaaugauacuggguucuauacacuccaaguuauuaagucugaccuggugaacgaggaggccaccggacaguuucacgucuacccagaacugccgaaacccucgaucucaagcaauaacaguaauccuguggaggauaaggacgcuguagcauucacgugugaaccagagguucagaacacuaccuaucucuggugggugaauggccaguccuuacccgucucuccucgacugcaacuuagcaacggcaauaugacauugacucugcuauccgugaagcguaacgaugccgggucauacgagugcgaaauacagaacccagcuagugccaauagaagcgaccccgugacccucaacguccuguacggaccggaugguccuacaaucucucccuccaaagcgaauuauaggccaggcgagaaccuuaaucugucaugucaugcagccagcaacccucccgcucaguacaguugguuuauuaaugggaccuuccagcaaucuacgcaggaauuguuuaucccaaacauuacuguuaauaacuccggaagcuauaugugccaggcccacaauucggcaacaggccucaaccggaccacugugacaaugaucaccguaucugguuccgcucccgugcugucagccgucgcgacgguggggauaaccauuggaguuuuagcccgcguggcacugaucuga

SEQ ID NO: 1068 - RNA, 1035 nt, Artificial Sequence
  derived and/or modified sequence opt4 from CEAM6__Homo_sapiens__AAA51739
augggcccccccagcgccccccccugcagacugcacgugcccuggaaggaggugcugcugaccgccagccugcugaccuucuggaacccccccaccaccgccaagcugaccaucgagagcacccccuucaacguggccgagggcaaggaggugcugcugcuggcccacaaccugccccagaacagaaucggcuacagcugguacaagggcgagagaguggacggcaacagccugaucgugggcuacgugaucggcacccagcaggccacccccggccccgccuacagcggcagagagaccaucuaccccaacgccagccugcugauccagaacgugacccagaacgacaccggcuucuacacccugcaggugaucaagagcgaccuggugaacgaggaggccaccggccaguuccacguguaccccgagcugcccaagcccagcaucagcagcaacaacagcaaccccguggaggacaaggacgccguggccuucaccugcgagcccgaggugcagaacaccaccuaccuguggugggugaacggccagagccugcccgugagccccagacugcagcugagcaacggcaacaugacccugacccugcugagcgugaagagaaacgacgccggcagcuacgagugcgagauccagaaccccgccagcgccaacagaagcgaccccgugacccugaacgugcuguacggccccgacggccccaccaucagccccagcaaggccaacuacagacccggcgagaaccugaaccugagcugccacgccgccagcaacccccccgcccaguacagcugguucaucaacggcaccuuccagcagagcacccaggagcuguucauccccaacaucaccgugaacaacagcggcagcuacaugugccaggcccacaacagcgccaccggccugaacagaaccaccgugaccaugaucaccgugagcggcagcgcccccgugcugagcgccguggccaccgugggcaucaccaucggcgugcuggccagaguggcccugaucuga

SEQ ID NO: 1069 - RNA, 1035 nt, Artificial Sequence
  derived and/or modified sequence opt5 from CEAM6__Homo_sapiens__AAA51739
auggggcccccuagcgccccgcccugcagacugcacgugccuuggaaggagguccuccugaccgcuucccuucugacauucuggaaucccccuacgaccgccaaacucacaaucgaaucuacccccuuuaacguugcggagggcaaggaagugcugcuucuggcucauaaccucccucagaaucggauuggauacagcugguauaaaggcgagcgcguggacgggaacucccugaucgucggauacgugauuggcacacaacaggccaccccggggcccgccuauucuggaagagaaacaaucuacccuaaugcuagccugcucauucagaacguuacccagaaugauacgggcuucuauacccugcaagugaucaaguccgaccuugucaacgaggaggccacaggccaguuucacguguaccccgaacugccuaaacccucuaucagcuccaauaacagcaauccgguugaggauaaggacgcuguggccuucaccugugaaccugagguccagaacacaaccuaucucuggugggugaaugggcagucucugcccguguccccucggcuucaacugagcaacggaaauaugacgcucacacugcugucugucaagcgcaacgaugcgggcuccuacgagugcgaaauucagaaccccgccagcgcuaauagaucugaccccguuacccucaacgugcuguacgggccugauggaccgacaaucucccccagcaaagccaauuaucggccuggcgagaaccuuaaucuguccugucaugcugccucuaaucccccugcgcaguacagcugguuuauuaacgggaccuuccagcaauccacccaggaacucuuuauccccaacauuacagugaauaacagcggaucuuauaugugccaggcccacaauuccgcuacgggccugaaccgcaccacagucaccaugaucacagugagcggcucugccccgguucuuagcgcuguggccaccgucgggauuacgaucggagugcuggccagaguugcucucaucuga

SEQ ID NO: 1070 - protein, 390 aa, Artificial Sequence
  CH3L2__Homo_sapiens__Q15782
MGATTMDQKSLWAGVVVLLLLQGGSAYKLVCYFTNWSQDRQEPGKFTPENIDPFLCSHLIYSFASIENNKVIIKDKSEVMLYQTINSLKTKNPKLKILLSIGGYLFGSKGFHPMVDSSTSRLEFINSIILFLRNHNFDGLDVSWIYPDQKENTHFTVLIHELAEAFQKDFTKSTKERLLLTAGVSAGRQMIDNSYQVEKLAKDLDFINLLSFDFHGSWEKPLITGHNSPLSKGWQDRGPSSYYNVEYAVGYWIHKGMPSEKVVMGIPTYGHSFTLASAETTVGAPASGPGAAGPITESSGFLAYYEICQFLKGAKITRLQDQQVPYAVKGNQWVGYDDVKSMETKVQFLKNLNLGGAMIWSIDMDDFTGKSCNQGPYPLVQAVKRSLGSL

SEQ ID NO: 1071 - RNA, 1173 nt, Artificial Sequence
  CH3L2__Homo_sapiens__AAB04533
augggagcaaccaccauggaccagaagucucucugggcagguguaguggucuugcugcuucuccagggaggaucugccuacaaacugguuugcuacuuuaccaacuggucccaggaccggcaggaaccaggaaaauucaccccugagaauauugaccccuuccuaugcucucaucucaucuauucauucgccagcaucgaaaacaacaagguuaucaucaaggacaagagugaagugaugcucuaccagaccaucaacagucucaaaaccaagaaucccaaacugaaaauucucuuguccauuggaggguaccuguuugguuccaaaggguuccacccuaugguggauucuucuacaucacgcuuggaauucauuaacuccauaauccuguuucugaggaaccauaacuuugauggacuggauguaagcuggaucuacccagaucagaaagaaaacacucauuucacugugcugauucaugaguuagcagaagccuuucagaaggacuucacaaaauccaccaaggaaaggcuucucuugacugcgggcguaucugcagggaggcaaaugauugauaacagcuaucaaguugagaaacuggcaaaagaucuggauuucaucaaccuccuguccuuugacuuccaugggucuugggaaaagccccuuaucacuggccacaacagcccucugagcaagggguggcaggacagagggccaagcuccuacuacaauguggaauaugcugugggguacuggauacauaagggaaugccaucagagaagguggucaugggcauccccacauaugggcacuccuucacacuggccucugcagaaaccaccgugggggccccugccucuggcccuggagcugcuggacccaucacagagucuucaggcuuccuggccuauuaugagaucugccaguuccugaaaggagccaagaucacgcggcuccaggaucagcagguucccuacgcagucaaggggaaccagugggugggcuaugaugaugugaagaguauggagaccaagguucaguucuuaaagaauuuaaaccugggaggagccaugaucuggucuauugacauggaugacuucacuggcaaauccugcaaccagggcccuuacccucuuguccaagcagucaagagaagccuuggcucccuguga

SEQ ID NO: 1072 - RNA, 1173 nt, Artificial Sequence
  derived and/or modified sequence opt1 from CH3L2__Homo_sapiens__AAB04533
augggcgccaccaccauggaccagaagucccugugggccgggguggucgugcuccugcugcuccagggcgggagcgcguacaagcuggugugcuacuucacgaacuggagccaggaccgccaggagcccggcaaguucaccccggagaacaucgaccccuuccugugcucccaccucaucuacagcuucgccuccaucgagaacaacaaggucaucaucaaggacaagagcgaggugaugcuguaccagaccaucaacucccugaagaccaagaaccccaagcucaagauccugcugagcaucgggggcuaccucuucggcuccaagggguuccaccccaugguggacagcuccacgagccggcuggaguucaucaacuccaucauccuguuccuccgcaaccacaacuucgacggccuggacgucagcuggaucuacccggaccagaaggagaacacccacuucaccgugcugauccacgagcucgccgaggccuuccagaaggacuucaccaaguccacgaaggagcggcugcugcucaccgccggggugagcgcgggccgccagaugaucgacaacuccuaccaggucgagaagcuggccaaggaccuggacuucaucaaccuccugagcuucgacuuccacggguccugggagaagccccugaucaccggccacaacagcccccucagcaagggcuggcaggaccgggggcccuccagcuacuacaacguggaguacgccgugggcuacuggauccacaaggggaugccguccgagaaggucgugaugggcauccccaccuacggccacagcuucacgcuggccuccgcggagaccaccgugggggcccccgccagcggccccggggccgccggcccgaucaccgaguccagcggguuccuggcguacuacgagaucugccaguuccucaagggcgccaagaucacgcgccugcaggaccagcagguccccuacgccgugaagggcaaccagugggugggguacgacgacgucaaguccauggagaccaaggugcaguuccugaagaaccucaaccugggcggggccaugaucuggagcaucgacauggacgacuucaccggcaaguccugcaaccaggggcccuacccccuggugcaggccgucaagcggagccucggcucccuguga

SEQ ID NO: 1073 - RNA, 1173 nt, Artificial Sequence
  derived and/or modified sequence opt2 from CH3L2__Homo_sapiens__AAB04533
augggcgccaccaccauggaccagaagucccucugggccggcgucgucguccuccuccuccuccagggcggcuccgccuacaagcucgucugcuacuucaccaacuggucccaggaccgccaggagcccggcaaguucacccccgagaacaucgaccccuuccucugcucccaccucaucuacuccuucgccuccaucgagaacaacaaggucaucaucaaggacaaguccgaggucaugcucuaccagaccaucaacucccucaagaccaagaaccccaagcucaagauccuccucuccaucggcggcuaccucuucggcuccaagggcuuccaccccauggucgacuccuccaccucccgccucgaguucaucaacuccaucauccucuuccuccgcaaccacaacuucgacggccucgacgucuccuggaucuaccccgaccagaaggagaacacccacuucaccguccucauccacgagcucgccgaggccuuccagaaggacuucaccaaguccaccaaggagcgccuccuccucaccgccggcgucuccgccggccgccagaugaucgacaacuccuaccaggucgagaagcucgccaaggaccucgacuucaucaaccuccucuccuucgacuuccacggcuccugggagaagccccucaucaccggccacaacuccccccucuccaagggcuggcaggaccgcggccccuccuccuacuacaacgucgaguacgccgucggcuacuggauccacaagggcaugcccuccgagaaggucgucaugggcauccccaccuacggccacuccuucacccucgccuccgccgagaccaccgucggcgcccccgccuccggccccggcgccgccggccccaucaccgaguccuccggcuuccucgccuacuacgagaucugccaguuccucaagggcgccaagaucacccgccuccaggaccagcagguccccuacgccgucaagggcaaccagugggucggcuacgacgacgucaaguccauggagaccaagguccaguuccucaagaaccucaaccucggcggcgccaugaucugguccaucgacauggacgacuucaccggcaaguccugcaaccagggccccuacccccucguccaggccgucaagcgcucccucggcucccucuga

SEQ ID NO: 1074 - RNA, 1173 nt, Artificial Sequence
  derived and/or modified sequence opt3 from CH3L2__Homo_sapiens__AAB04533
augggcgccaccacaauggaccaaaagagccugugggcugggguggucguucuccuucuguugcagggagguuccgcauacaaauuagugugcuauuucacuaacuggucucaggauagacaggagcccggcaaguuuacgccugaaaauaucgacccauuccuguguucacaccuaauuuacaguuuugccagcauagagaacaauaaaguaaucauuaaggauaaauccgaagugaugcucuaucagaccaucaacucucugaagacaaagaauccgaaacuuaagauucuguugucgaucgggggauaccucuucggcucaaaagguuuucaucccauggucgacagcaguacuuccaggcuggaguucauaaacucuaucauucuguuucuccggaaucacaacuucgauggguuagacgugagcuggaucuauccugaucaaaaggaaaauacccauuuuacaguucugauucacgagcuugcggaggcuuuccagaaagacuuuaccaaguccacuaaggaacgcuugcugcuaacagccggagugucagcaggccgacagaugaucgauaacaguuaccaggucgagaaacucgccaaggaccuggauuucauaaaucuucugagcuuugacuuccauggcucuugggaaaaaccauugauuaccgggcacaacuccccacucucaaagggauggcaagaucgugguccuagcaguuauuacaauguggaguacgcuguaggcuauuggauccacaaagggaugccaucugagaagguugugaugggcauucccacguacggacauuccuucacucuggcaagcgccgaaaccacagucggugcuccugccucggggccaggagcggcaggcccgaucacugagucuuccggcuuuuuagccuauuacgaaaucugccaguuccugaaaggggcuaagauuaccagacuccaggaccagcaagugcccuaugccgugaagggaaaccagugggucgguuacgacgauguuaaaucaauggagacaaaggugcaguuucuuaaaaaucugaacuugggcggggcaaugauauggaguaucgacauggaugacuucaccggaaagagcuguaaccaaggcccuuauccccuaguacaggcugugaaaaggucccuggguucucucuga

SEQ ID NO: 1075 - RNA, 1173 nt, Artificial Sequence
  derived and/or modified sequence opt4 from CH3L2__Homo_sapiens__AAB04533
augggcgccaccaccauggaccagaagagccugugggccggcgugguggugcugcugcugcugcagggcggcagcgccuacaagcuggugugcuacuucaccaacuggagccaggacagacaggagcccggcaaguucacccccgagaacaucgaccccuuccugugcagccaccugaucuacagcuucgccagcaucgagaacaacaaggugaucaucaaggacaagagcgaggugaugcuguaccagaccaucaacagccugaagaccaagaaccccaagcugaagauccugcugagcaucggcggcuaccuguucggcagcaagggcuuccaccccaugguggacagcagcaccagcagacuggaguucaucaacagcaucauccuguuccugagaaaccacaacuucgacggccuggacgugagcuggaucuaccccgaccagaaggagaacacccacuucaccgugcugauccacgagcuggccgaggccuuccagaaggacuucaccaagagcaccaaggagagacugcugcugaccgccggcgugagcgccggcagacagaugaucgacaacagcuaccagguggagaagcuggccaaggaccuggacuucaucaaccugcugagcuucgacuuccacggcagcugggagaagccccugaucaccggccacaacagcccccugagcaagggcuggcaggacagaggccccagcagcuacuacaacguggaguacgccgugggcuacuggauccacaagggcaugcccagcgagaagguggugaugggcauccccaccuacggccacagcuucacccuggccagcgccgagaccaccgugggcgcccccgccagcggccccggcgccgccggccccaucaccgagagcagcggcuuccuggccuacuacgagaucugccaguuccugaagggcgccaagaucaccagacugcaggaccagcaggugcccuacgccgugaagggcaaccagugggugggcuacgacgacgugaagagcauggagaccaaggugcaguuccugaagaaccugaaccugggcggcgccaugaucuggagcaucgacauggacgacuucaccggcaagagcugcaaccagggccccuacccccuggugcaggccgugaagagaagccugggcagccuguga

SEQ ID NO: 1076 - RNA, 1173 nt, Artificial Sequence
  derived and/or modified sequence opt5 from CH3L2__Homo_sapiens__AAB04533
augggcgccaccacaauggaccaaaagagccugugggcugggguggucguucuccugcuucugcagggaggcuccgccuacaaacucgugugcuauuucacgaacuggucucaggauagacaggagcccgggaaguuuaccccugaaaauaucgacccguuccuguguagccaccuuauuuacuccuuugcgucuaucgagaacaauaaagugauuaucaaggauaaaagcgaagucaugcuguaucagacaauuaacucccucaagaccaagaaucccaaacugaagauccugcucucuaucggaggcuaccuguucgggagcaaaggauuucauccuaugguggacuccagcacaucucggcuugaguucauuaacuccaucauucuguuucuccgcaaucacaacuucgauggccuggacguuagcuggaucuaucccgaucaaaaggaaaauacccauuuuacagugcuuauucacgagcuggcugaggccuuccagaaagacuuuaccaagucuacgaaggaaagacuccugcugaccgccggcgucuccgcugggcggcagaugaucgauaacagcuaccagguggagaaacucgccaaggaccuggauuucauuaaucuucugucuuuugacuuccauggauccugggaaaaaccucucaucacaggccacaacagcccccuguccaagggguggcaagaucgcggaccuucuagcuauuacaauguugaguacgcugugggcuauuggauccacaaagggaugccguccgagaaggucgugaugggcauucccaccuacggacauagcuucacacuugccucugcggaaaccacggugggcgccccugcuuccgggcccggagccgcuggcccuaucacagagagcucuggguuucuggccuauuacgaaauuugccaguuccucaaaggagcgaagaucaccagacugcaggaccagcaaguccccuaugccguuaagggcaaccagugggugggguacgacgaugugaaaagcauggagacaaagguccaguuucugaaaaaucucaaccugggaggcgcuaugauuugguccaucgacauggaugacuucaccggcaagucuuguaaccaagggccguauccucuugugcaggccguuaaacggagccugggaucccucuga

SEQ ID NO: 1077 - protein, 943 aa, Artificial Sequence
  CLCA2__Homo_sapiens__Q9UQC9
MTQRSIAGPICNLKFVTLLVALSSELPFLGAGVQLQDNGYNGLLIAINPQVPENQNLISNIKEMITEASFYLFNATKRRVFFRNIKILIPATWKANNNSKIKQESYEKANVIVTDWYGAHGDDPYTLQYRGCGKEGKYIHFTPNFLLNDNLTAGYGSRGRVFVHEWAHLRWGVFDEYNNDKPFYINGQNQIKVTRCSSDITGIFVCEKGPCPQENCIISKLFKEGCTFIYNSTQNATASIMFMQSLSSVVEFCNASTHNQEAPNLQNQMCSLRSAWDVITDSADFHHSFPMNGTELPPPPTFSLVQAGDKVVCLVLDVSSKMAEADRLLQLQQAAEFYLMQIVEIHTFVGIASFDSKGEIRAQLHQINSNDDRKLLVSYLPTTVSAKTDISICSGLKKGFEVVEKLNGKAYGSVMILVTSGDDKLLGNCLPTVLSSGSTIHSIALGSSAAPNLEELSRLTGGLKFFVPDISNSNSMIDAFSRISSGTGDIFQQHIQLESTGENVKPHHQLKNTVTVDNTVGNDTMFLVTWQASGPPEIILFDPDGRKYYTNNFITNLTFRTASLWIPGTAKPGHWTYTLNNTHHSLQALKVTVTSRASNSAVPPATVEAFVERDSLHFPHPVMIYANVKQGFYPILNATVTATVEPETGDPVTLRLLDDGAGADVIKNDGIYSRYFFSFAANGRYSLKVHVNHSPSISTPAHSIPGSHAMYVPGYTANGNIQMNAPRKSVGRNEEERKWGFSRVSSGGSFSVLGVPAGPHPDVFPPCKIIDLEAVKVEEELTLSWTAPGEDFDQGQATSYEIRMSKSLQNIQDDFNNAILVNTSKRNPQQAGIREIFTFSPQISTNGPEHQPNGETHESHRIYVAIRAMDRNSLQSAVSNIAQAPLFIPPNSDPVPARDYLILKGVLTAMGLIGIICLIIVVTHHTLSRKKRADKKENGTKLL

SEQ ID NO: 1078 - RNA, 2832 nt, Artificial Sequence
  CLCA2__Homo_sapiens__AAD40367
augacccaaaggagcauugcagguccuauuugcaaccugaaguuugugacucuccugguugccuuaaguucagaacucccauuccugggagcuggaguacagcuucaagacaauggguauaauggauugcucauugcaauuaauccucagguaccugagaaucagaaccucaucucaaacauuaaggaaaugauaacugaagcuucauuuuaccuauuuaaugcuaccaagagaagaguauuuuucagaaauauaaagauuuuaauaccugccacauggaaagcuaauaauaacagcaaaauaaaacaagaaucauaugaaaaggcaaaugucauagugacugacugguauggggcacauggagaugauccauacacccuacaauacagaggguguggaaaagagggaaaauacauucauuucacaccuaauuuccuacugaaugauaacuuaacagcuggcuacggaucacgaggccgaguguuuguccaugaaugggcccaccuccguugggguguguucgaugaguauaacaaugacaaaccuuucuacauaaaugggcaaaaucaaauuaaagugacaagguguucaucugacaucacaggcauuuuugugugugaaaaagguccuugcccccaagaaaacuguauuauuaguaagcuuuuuaaagaaggaugcaccuuuaucuacaauagcacccaaaaugcaacugcaucaauaauguucaugcaaaguuuaucuucugugguugaauuuuguaaugcaaguacccacaaccaagaagcaccaaaccuacagaaccagaugugcagccucagaagugcaugggauguaaucacagacucugcugacuuucaccacagcuuucccaugaaugggacugagcuuccaccuccucccacauucucgcuuguacaggcuggugacaaaguggucuguuuagugcuggauguguccagcaagauggcagaggcugacagacuccuucaacuacaacaagccgcagaauuuuauuugaugcagauuguugaaauucauaccuucgugggcauugccaguuucgacagcaaaggagagaucagagcccagcuacaccaaauuaacagcaaugaugaucgaaaguugcugguuucauaucugcccaccacuguaucagcuaaaacagacaucagcauuuguucagggcuuaagaaaggauuugaggugguugaaaaacugaauggaaaagcuuauggcucugugaugauauuagugaccagcggagaugauaagcuucuuggcaauugcuuacccacugugcucagcagugguucaacaauucacuccauugcccuggguucaucugcagccccaaaucuggaggaauuaucacgucuuacaggagguuuaaaguucuuuguuccagauauaucaaacuccaauagcaugauugaugcuuucaguagaauuuccucuggaacuggagacauuuuccagcaacauauucagcuugaaaguacaggugaaaaugucaaaccucaccaucaauugaaaaacacagugacuguggauaauacugugggcaacgacacuauguuucuaguuacguggcaggccagugguccuccugagauuauauuauuugauccugauggacgaaaauacuacacaaauaauuuuaucaccaaucuaacuuuucggacagcuagucuuuggauuccaggaacagcuaagccugggcacuggacuuacacccugaacaauacccaucauucucugcaagcccugaaagugacagugaccucucgcgccuccaacucagcugugcccccagccacuguggaagccuuuguggaaagagacagccuccauuuuccucauccugugaugauuuaugccaaugugaaacagggauuuuaucccauucuuaaugccacugucacugccacaguugagccagagacuggagauccuguuacgcugagacuccuugaugauggagcaggugcugauguuauaaaaaaugauggaauuuacucgagguauuuuuucuccuuugcugcaaaugguagauauagcuugaaagugcaugucaaucacucucccagcauaagcaccccagcccacucuauuccagggagucaugcuauguauguaccagguuacacagcaaacgguaauauucagaugaaugcuccaaggaaaucaguaggcagaaaugaggaggagcgaaaguggggcuuuagccgagucagcucaggaggcuccuuuucagugcugggaguuccagcuggcccccacccugauguguuuccaccaugcaaaauuauugaccuggaagcuguaaaaguagaagaggaauugacccuaucuuggacagcaccuggagaagacuuugaucagggccaggcuacaagcuaugaaauaagaaugaguaaaagucuacagaauauccaagaugacuuuaacaaugcuauuuuaguaaauacaucaaagcgaaauccucagcaagcuggcaucagggagauauuuacguucucaccccagauuuccacgaauggaccugaacaucagccaaauggagaaacacaugaaagccacagaauuuauguugcaauacgagcaauggauaggaacuccuuacagucugcuguaucuaacauugcccaggcgccucuguuuauuccccccaauucugauccuguaccugccagagauuaucuuauauugaaaggaguuuuaacagcaauggguuugauaggaaucauuugccuuauuauaguugugacacaucauacuuuaagcaggaaaaagagagcagacaagaaagagaauggaacaaaauuauuauaa

SEQ ID NO: 1079 - RNA, 2832 nt, Artificial Sequence
  derived and/or modified sequence opt1 from CLCA2__Homo_sapiens__AAD40367
augacccagcgcagcaucgccggccccaucugcaaccugaaguucgugacccuccuggucgcccuguccagcgagcucccguuccugggggcgggcgugcagcugcaggacaacggguacaacggccuccugaucgccaucaacccccaggugcccgagaaccagaaccugaucuccaacaucaaggagaugaucacggaggccagcuucuaccucuucaacgccaccaagcggcgcgucuucuuccggaacaucaagauccugauccccgccaccuggaaggcgaacaacaacuccaagaucaagcaggagagcuacgagaaggccaacgugaucgugaccgacugguacggggcccacggcgacgacccguacacgcugcaguaccgcggcugcgggaaggagggcaaguacauccacuucacccccaacuuccuccugaacgacaaccugaccgccggguacggcucccgggggcgcgucuucgugcacgagugggcgcaccuccgguggggcguguucgacgaguacaacaacgacaagcccuucuacaucaacggccagaaccagaucaaggucacccgcugcagcuccgacaucacggggaucuucgugugcgagaagggccccugcccgcaggagaacugcaucaucagcaagcuguucaaggaggggugcaccuucaucuacaacuccacccagaacgccaccgccagcaucauguucaugcagucccugagcuccguggucgaguucugcaacgccagcacgcacaaccaggaggcccccaaccuccagaaccagaugugcucccugcggagcgcgugggacgugaucaccgacuccgccgacuuccaccacagcuuccccaugaacggcaccgagcugcccccgccgcccaccuucagccucgugcaggccggcgacaaggucgugugccuggugcuggacgucuccagcaagauggccgaggccgaccgccuccugcagcugcagcaggcggccgaguucuaccucaugcagaucguggagauccacacguucguggggaucgccuccuucgacagcaagggcgagauccgggcccagcugcaccagaucaacuccaacgacgaccgcaagcugcucgucagcuaccugcccaccaccguguccgccaagaccgacaucagcaucugcuccgggcugaagaagggcuucgagguggucgagaagcucaacgggaaggcguacggcagcgugaugauccuggucacguccggcgacgacaagcugcucgggaacugccugcccaccgugcugagcuccggcagcaccauccacuccaucgcccucgggagcuccgccgcccccaaccuggaggagcugagccggcucaccggcgggcugaaguucuucgugcccgacaucuccaacagcaacagcaugaucgacgccuucucccgcaucagcuccggcacgggcgacaucuuccagcagcacauccagcuggagagcaccggggagaacgucaagccccaccaccagcucaagaacaccgugaccguggacaacacggucggcaacgacaccauguuccuggugaccuggcaggcguccgggccgcccgagaucauccuguucgaccccgacggccggaaguacuacaccaacaacuucaucacgaaccucaccuuccgcaccgccagccuguggauccccgggaccgccaagccgggccacuggacguacacccugaacaacacccaccacucccugcaggcccucaaggugaccgucaccagccgggcguccaacagcgccgugccgcccgccacgguggaggccuucgucgagcgcgacucccugcacuucccccaccccgugaugaucuacgccaacgugaagcagggcuucuaccccauccugaacgcgaccgucaccgccaccguggagcccgagacgggggacccggugacccuccggcugcuggacgacggcgccggggccgacgucaucaagaacgacggcaucuacagccgcuacuucuucuccuucgccgcgaacggccgguacagccucaaggugcacgugaaccacucccccagcaucuccacccccgcccacagcauccccgggagccacgccauguacgucccgggcuacaccgccaacgggaacauccagaugaacgcgccccgcaaguccgugggccgcaacgaggaggagcggaaguggggguucagccgcguguccagcggcggcuccuucagcguccugggggugcccgccggcccccacccggacguguucccgcccugcaagaucaucgaccuggaggccgucaagguggaggaggagcucacgcuguccuggaccgcccccggggaggacuucgaccagggccaggccaccagcuacgagauccggauguccaagagccugcagaacauccaggacgacuucaacaacgcgauccucgugaacaccuccaagcgcaacccccagcaggccgggauccgggagaucuucacguucagcccccagaucuccaccaacggccccgagcaccagcccaacggcgagacccacgagagccaccgcaucuacgucgccauccgggccauggaccgcaacucccugcagagcgccguguccaacaucgcgcaggccccgcuguucaucccgcccaacagcgaccccgugcccgcccgggacuaccucauccugaaggggguccugaccgccaugggccucaucgggaucaucugccugaucaucguggugacgcaccacacccugucccgcaagaagcgggccgacaagaaggagaacggcaccaagcuccuguga

SEQ ID NO: 1080 - RNA, 2832 nt, Artificial Sequence
  derived and/or modified sequence opt2 from CLCA2__Homo_sapiens__AAD40367
augacccagcgcuccaucgccggccccaucugcaaccucaaguucgucacccuccucgucgcccucuccuccgagcuccccuuccucggcgccggcguccagcuccaggacaacggcuacaacggccuccucaucgccaucaacccccagguccccgagaaccagaaccucaucuccaacaucaaggagaugaucaccgaggccuccuucuaccucuucaacgccaccaagcgccgcgucuucuuccgcaacaucaagauccucauccccgccaccuggaaggccaacaacaacuccaagaucaagcaggaguccuacgagaaggccaacgucaucgucaccgacugguacggcgcccacggcgacgaccccuacacccuccaguaccgcggcugcggcaaggagggcaaguacauccacuucacccccaacuuccuccucaacgacaaccucaccgccggcuacggcucccgcggccgcgucuucguccacgagugggcccaccuccgcuggggcgucuucgacgaguacaacaacgacaagcccuucuacaucaacggccagaaccagaucaaggucacccgcugcuccuccgacaucaccggcaucuucgucugcgagaagggccccugcccccaggagaacugcaucaucuccaagcucuucaaggagggcugcaccuucaucuacaacuccacccagaacgccaccgccuccaucauguucaugcagucccucuccuccgucgucgaguucugcaacgccuccacccacaaccaggaggcccccaaccuccagaaccagaugugcucccuccgcuccgccugggacgucaucaccgacuccgccgacuuccaccacuccuuccccaugaacggcaccgagcucccccccccccccaccuucucccucguccaggccggcgacaaggucgucugccucguccucgacgucuccuccaagauggccgaggccgaccgccuccuccagcuccagcaggccgccgaguucuaccucaugcagaucgucgagauccacaccuucgucggcaucgccuccuucgacuccaagggcgagauccgcgcccagcuccaccagaucaacuccaacgacgaccgcaagcuccucgucuccuaccuccccaccaccgucuccgccaagaccgacaucuccaucugcuccggccucaagaagggcuucgaggucgucgagaagcucaacggcaaggccuacggcuccgucaugauccucgucaccuccggcgacgacaagcuccucggcaacugccuccccaccguccucuccuccggcuccaccauccacuccaucgcccucggcuccuccgccgcccccaaccucgaggagcucucccgccucaccggcggccucaaguucuucguccccgacaucuccaacuccaacuccaugaucgacgccuucucccgcaucuccuccggcaccggcgacaucuuccagcagcacauccagcucgaguccaccggcgagaacgucaagccccaccaccagcucaagaacaccgucaccgucgacaacaccgucggcaacgacaccauguuccucgucaccuggcaggccuccggcccccccgagaucauccucuucgaccccgacggccgcaaguacuacaccaacaacuucaucaccaaccucaccuuccgcaccgccucccucuggauccccggcaccgccaagcccggccacuggaccuacacccucaacaacacccaccacucccuccaggcccucaaggucaccgucaccucccgcgccuccaacuccgccgucccccccgccaccgucgaggccuucgucgagcgcgacucccuccacuucccccaccccgucaugaucuacgccaacgucaagcagggcuucuaccccauccucaacgccaccgucaccgccaccgucgagcccgagaccggcgaccccgucacccuccgccuccucgacgacggcgccggcgccgacgucaucaagaacgacggcaucuacucccgcuacuucuucuccuucgccgccaacggccgcuacucccucaagguccacgucaaccacucccccuccaucuccacccccgcccacuccauccccggcucccacgccauguacguccccggcuacaccgccaacggcaacauccagaugaacgccccccgcaaguccgucggccgcaacgaggaggagcgcaaguggggcuucucccgcgucuccuccggcggcuccuucuccguccucggcguccccgccggcccccaccccgacgucuucccccccugcaagaucaucgaccucgaggccgucaaggucgaggaggagcucacccucuccuggaccgcccccggcgaggacuucgaccagggccaggccaccuccuacgagauccgcauguccaagucccuccagaacauccaggacgacuucaacaacgccauccucgucaacaccuccaagcgcaacccccagcaggccggcauccgcgagaucuucaccuucuccccccagaucuccaccaacggccccgagcaccagcccaacggcgagacccacgagucccaccgcaucuacgucgccauccgcgccauggaccgcaacucccuccaguccgccgucuccaacaucgcccaggccccccucuucaucccccccaacuccgaccccguccccgcccgcgacuaccucauccucaagggcguccucaccgccaugggccucaucggcaucaucugccucaucaucgucgucacccaccacacccucucccgcaagaagcgcgccgacaagaaggagaacggcaccaagcuccucuga

SEQ ID NO: 1081 - RNA, 2832 nt, Artificial Sequence
  derived and/or modified sequence opt3 from CLCA2__Homo_sapiens__AAD40367
augacccagagaagcaucgccggccccauuugcaaccugaaguucgugacacuccuugucgcucuguccucugaguugccauuuuuaggggcaggaguucaacugcaggacaaugguuacaacggccuacucauagccaucaauccucaggugccggaaaaccagaaucugauuucaaacaucaaagagaugauuacugaagcgaguuucuaucuuuuuaaugcuacgaagaggcggguauucuuucgcaacaucaaaauacugauccccgccaccuggaaggcaaauaacaauagcaaaauuaagcaagaguccuacgaaaaggccaacgugaucgucacagauugguauggggcucacggagacgauccuuacacuuugcaguaucgaggcugugguaaagaggggaaguacauucauuucaccccaaauuuucuccugaacgacaaucugacagcaggauauggcucucguggcagaguguucguucacgagugggcccaucucagguggggaguguuugaugaauacaacaacgacaaacccuucuacaucaaugggcagaaccagauaaaggucacccggugcucgucagauauuacugguaucuuugugugugagaaaggcccuugcccacaagaaaauuguauuaucagcaaguuauucaaggaggggugcacauuuaucuauaacaguacccagaaugcuacggccuccauuauguucaugcagucucugagcuccguaguugaguucuguaacgcgucaacucacaaucaggaagcacccaaccuucaaaaucagaugugcaguuugcgcagcgccugggacgugauaaccgauucugcugacuuucaucacuccuucccuaugaacggaacagagcugccaccgcccccuacuuuuagucuaguccaggccggcgauaaaguggugugucucguccuggacguuagcaguaagauggcagaagcugauagacuucugcaauugcagcaggccgcggaguucuaccucaugcagaucguggaaauucacaccuuuguagguaucgccucuuucgacuccaaaggggagauaagggcacaacugcaucagauuaauagcaacgacgaucggaaguuacuggugucguaucucccaacaaccgucucugcuaaaacggacaucuccaucugcucaggacuuaagaaaggcuuugaggugguugaaaagcugaauggcaaggccuacgggagugugaugauuuuggucacuagcggagaugacaaacuacuggguaacugucuccccacagugcuguccucuggcagcaccauccacucaauugcucuugggaguuccgccgcaccuaaucuggaggaauugagccgccucacuggaggccugaaguucuuuguaccagauauaucuaacucaaacaguaugaucgacgccuucagccgaauuuccucugguacaggggauaucuuucagcagcauauccaauuagagucgaccggcgaaaauguuaaaccccaccaccagcugaagaacacggugaccgucgacaauacagugggaaacgauacuauguuccuagucaccuggcaggcuagcggcccgccugagauuauacucuuugaccccgaugggagaaaauauuacacaaauaacuucaucacuaaucugaccuucaggacagcgucccuuuggauuccaggaaccgcaaagccuggucauuggacuuauacguugaacaauacacaccauucacugcaggcccucaaggugaccguuacuucacgggcuucuaacagcgccgugcccccagcaaccguagaggccuuugucgaacgugacucccugcacuucccccauccugugaugaucuacgcuaauguuaaacaaggcuuuuacccaauucuuaacgccacagugaccgcaacugucgagccggaaacaggggaccccgugacgcugcgcuugcucgaugacggagcgggcgcugauguaaucaagaaugacgguauauauucaagauacuucuuuagcuucgccgcaaacgggagguauucucugaaagugcacguuaaucacuccccuaguaucagcaccccagcccauucuauucccggcucccacgcuauguacgucccuggauauacugccaacggcaacauccagaugaaugcaccacggaagucaguggggcgaaacgaggaggaacgcaaauggggauuuaguagagugagcucggguggcuccuucucugucuuagggguucccgcuggaccgcauccugauguguuuccacccugcaagauuaucgaccuggaggccgugaagguagaagaggaacuaacacucagcuggaccgcgccuggcgaggauuucgaccagggucaggccacaucauacgagauaaggaugaguaaaucccugcaaaauauucaggaugacuuuaacaaugcuauccuugucaacacuucuaagcggaauccccagcaagcagggauucgcgaaaucuucaccuuuagcccacagauauccacgaacggcccugagcaccagcccaauggagaaacccacgagucacauagaaucuauguggccauuagggcuauggaucguaacagcuugcagagugccguuucuaauaucgcacaagcgccacuguucauuccgccuaacuccgaccccgugccagcccgggauuaccucauccugaaaggcgucuuaacagcuauggggcugauaggaauuaucugccuuaucauugugguuacucaccauaccuugagccgaaagaaaagagccgacaagaaggaaaauggcacaaaacuccuguga

SEQ ID NO: 1082 - RNA, 2832 nt, Artificial Sequence
  derived and/or modified sequence opt4 from CLCA2__Homo_sapiens__AAD40367
augacccagagaagcaucgccggccccaucugcaaccugaaguucgugacccugcugguggcccugagcagcgagcugcccuuccugggcgccggcgugcagcugcaggacaacggcuacaacggccugcugaucgccaucaacccccaggugcccgagaaccagaaccugaucagcaacaucaaggagaugaucaccgaggccagcuucuaccuguucaacgccaccaagagaagaguguucuucagaaacaucaagauccugauccccgccaccuggaaggccaacaacaacagcaagaucaagcaggagagcuacgagaaggccaacgugaucgugaccgacugguacggcgcccacggcgacgaccccuacacccugcaguacagaggcugcggcaaggagggcaaguacauccacuucacccccaacuuccugcugaacgacaaccugaccgccggcuacggcagcagaggcagaguguucgugcacgagugggcccaccugagauggggcguguucgacgaguacaacaacgacaagcccuucuacaucaacggccagaaccagaucaaggugaccagaugcagcagcgacaucaccggcaucuucgugugcgagaagggccccugcccccaggagaacugcaucaucagcaagcuguucaaggagggcugcaccuucaucuacaacagcacccagaacgccaccgccagcaucauguucaugcagagccugagcagcgugguggaguucugcaacgccagcacccacaaccaggaggcccccaaccugcagaaccagaugugcagccugagaagcgccugggacgugaucaccgacagcgccgacuuccaccacagcuuccccaugaacggcaccgagcugccccccccccccaccuucagccuggugcaggccggcgacaagguggugugccuggugcuggacgugagcagcaagauggccgaggccgacagacugcugcagcugcagcaggccgccgaguucuaccugaugcagaucguggagauccacaccuucgugggcaucgccagcuucgacagcaagggcgagaucagagcccagcugcaccagaucaacagcaacgacgacagaaagcugcuggugagcuaccugcccaccaccgugagcgccaagaccgacaucagcaucugcagcggccugaagaagggcuucgaggugguggagaagcugaacggcaaggccuacggcagcgugaugauccuggugaccagcggcgacgacaagcugcugggcaacugccugcccaccgugcugagcagcggcagcaccauccacagcaucgcccugggcagcagcgccgcccccaaccuggaggagcugagcagacugaccggcggccugaaguucuucgugcccgacaucagcaacagcaacagcaugaucgacgccuucagcagaaucagcagcggcaccggcgacaucuuccagcagcacauccagcuggagagcaccggcgagaacgugaagccccaccaccagcugaagaacaccgugaccguggacaacaccgugggcaacgacaccauguuccuggugaccuggcaggccagcggcccccccgagaucauccuguucgaccccgacggcagaaaguacuacaccaacaacuucaucaccaaccugaccuucagaaccgccagccuguggauccccggcaccgccaagcccggccacuggaccuacacccugaacaacacccaccacagccugcaggcccugaaggugaccgugaccagcagagccagcaacagcgccgugccccccgccaccguggaggccuucguggagagagacagccugcacuucccccaccccgugaugaucuacgccaacgugaagcagggcuucuaccccauccugaacgccaccgugaccgccaccguggagcccgagaccggcgaccccgugacccugagacugcuggacgacggcgccggcgccgacgugaucaagaacgacggcaucuacagcagauacuucuucagcuucgccgccaacggcagauacagccugaaggugcacgugaaccacagccccagcaucagcacccccgcccacagcauccccggcagccacgccauguacgugcccggcuacaccgccaacggcaacauccagaugaacgcccccagaaagagcgugggcagaaacgaggaggagagaaaguggggcuucagcagagugagcagcggcggcagcuucagcgugcugggcgugcccgccggcccccaccccgacguguucccccccugcaagaucaucgaccuggaggccgugaagguggaggaggagcugacccugagcuggaccgcccccggcgaggacuucgaccagggccaggccaccagcuacgagaucagaaugagcaagagccugcagaacauccaggacgacuucaacaacgccauccuggugaacaccagcaagagaaacccccagcaggccggcaucagagagaucuucaccuucagcccccagaucagcaccaacggccccgagcaccagcccaacggcgagacccacgagagccacagaaucuacguggccaucagagccauggacagaaacagccugcagagcgccgugagcaacaucgcccaggccccccuguucaucccccccaacagcgaccccgugcccgccagagacuaccugauccugaagggcgugcugaccgccaugggccugaucggcaucaucugccugaucaucguggugacccaccacacccugagcagaaagaagagagccgacaagaaggagaacggcaccaagcugcuguga

SEQ ID NO: 1083 - RNA, 2832 nt, Artificial Sequence
  derived and/or modified sequence opt5 from CLCA2__Homo_sapiens__AAD40367
augacccagagaagcaucgccggccccauuugcaaccugaaguucgugacacuccuggucgcucuuuccucugagcugccuuuucucggggccggaguucaacugcaggacaauggcuacaacgggcuucugaucgcgauuaauccccaggugcccgaaaaccagaaucucaucagcaacauuaaagagaugaucacggaagcuagcuucuaucuguuuaaugccaccaagcggcgcguguucuuuagaaacaucaaaauucugaucccugccacauggaaggcuaauaacaauucuaaaauuaagcaagagagcuacgaaaaggccaacgucaucgugaccgauugguauggagcucacggcgacgaucccuacacacuccaguaucggggguguggaaaagagggcaaguacauucauuucaccccuaauuuucugcuuaacgacaaucugacagccggcuaugggucccgcggaagaguuuucgugcacgagugggcgcaucuccgguggggcgucuuugaugaauacaacaacgacaaacccuucuacaucaaugggcagaaccagauuaaggugacccgcugcucuagcgauaucacgggaaucuuuguuugugagaaaggcccuugcccgcaagaaaauuguauuaucuccaagcuguucaaggaggggugcaccuuuauuuauaacagcacacagaaugccaccgcuucuaucauguucaugcagucccuuagcucuguggucgaguucuguaacgccuccacacacaaucaggaagcucccaaccugcaaaaucagaugugcagccucagaucugccugggacgugauuaccgauuccgcggacuuucaucacagcuucccuaugaacggaacggagcugcccccucccccgacauuuucccuggugcaggccggcgauaaagucguuugucucgugcuggacgugucuagcaagauggcugaagccgaucggcuucugcaacuccagcaggcugccgaguucuaccugaugcagaucgucgaaauccacaccuuugugggcauugccuccuucgacagcaaaggggagauccgcgcucaacuucaucagauuaauucuaacgacgauagaaagcugcucguuuccuaucugccuacaaccgugagcgcgaaaaccgacaucucuauuugcagcggacugaagaaaggcuuugaggucguggaaaagcucaaugggaaggccuacggauccguuaugauccuggugacaucuggcgaugacaaacuucuggggaacugucuccccacgguccugagcuccggaagcaccauccacucuauugcucuuggcuccagcgccgccccuaaucuggaggaacucucucggcugacaggcgggcugaaguucuuugugcccgauaucuccaacagcaacuccaugauugacgcuuucucucgcaucagcuccggaaccggcgauauuuuucagcagcauauccaacucgagucuacaggggaaaaugucaaaccccaccaccagcugaagaacaccgugacgguugacaauacagugggaaacgauaccauguuccuugucaccuggcaggccagcggcccuccggagauuauccuguuugaccccgaugggagaaaauauuacacaaauaacuucaucaccaaucucacauuccggacggcgucccuguggauuccuggcaccgcuaagcccggacauuggacauauacccugaacaauacacaccauagccuucaggcccucaaggugaccguuacgucucgcgccuccaacagcgcugugccucccgccaccgucgaggcuuuuguggaaagagacucucugcacuucccgcauccugugaugaucuacgccaauguuaaacaaggcuuuuaccccauucugaacgcgacagucaccgccacaguggagccugaaaccggggaccccgugacgcuccggcugcuugaugacggagcuggcgccgaugucaucaagaaugacgggauuuauuccagauacuucuuuagcuucgcugccaacggacgcuauucucugaaagugcacguuaaucacagcccuuccaucagcacacccgcgcauucuaucccgggcucccacgccauguacgugccuggguauaccgcuaacggcaacauucagaugaaugccccgcggaaguccgucggaagaaacgaggaggaacgcaaauggggcuuuucccgggugucuagcgggggauccuucucuguucucggcgugcccgcugggccucauccggaugucuuucccccuugcaagaucauugaccuggaggccgugaagguugaagaggaacugacacuuagcuggaccgcccccggagaggauuucgaccagggccaggcuaccuccuacgagaucagaaugucuaaaagccuccaaaauauucaggaugacuuuaacaaugcgauccuggugaacacauccaagcgcaauccucagcaagccgggauccgggaaauuuucacguuuagcccccagaucucuaccaacggcccugagcaccagcccaauggagaaacacacgagucccauagaauuuaugucgcuauccgcgccauggaucggaacagccugcagucugccguguccaauauugcucaagccccucucuucaucccgcccaacagcgacccugugcccgcgagagauuaccugauccuuaaaggcguccugaccgcuauggggcucauuggaaucauuugccugaucauuguugugacacaccauacccugucucgcaagaaacgggccgacaagaaggaaaauggcacgaaacuucucuga

SEQ ID NO: 1084 - protein, 235 aa, Artificial Sequence
  CML28__Homo_sapiens__Q9NQT4
MEEETHTDAKIRAENGTGSSPRGPGCSLRHFACEQNLLSRPDGSASFLQGDTSVLAGVYGPAEVKVSKEIFNKATLEVILRPKIGLPGVAEKSRERLIRNTCEAVVLGTLHPRTSITVVLQVVSDAGSLLACCLNAACMALVDAGVPMRALFCGVACALDSDGTLVLDPTSKQEKEARAVLTFALDSVERKLLMSSTKGLYSDTELQQCLAAAQAASQHVFRFYRESLQRRYSKS

SEQ ID NO: 1085 - RNA, 708 nt, Artificial Sequence
  CML28__Homo_sapiens__AAF82135
auggaggaggagacgcauacugacgccaaaauccgugcugaaaauggaacaggguccagcccucgggguccuggcugcagccuccggcacuuugccugcgaacagaaccugcugucgcggccagauggcucugcuuccuuccugcaaggugacaccucuguccuggcggguguguacgggccggccgaggugaaggucagcaaagagauuuucaacaaggccacacucgaagugauccugaggccgaagauugggcugccugguguugcagagaagagccgggagcggcugaucaggaacacgugcgaggcgguggugcugggcacguugcacccccgcaccuccaucaccguggugcugcagguugucagcgaugccggcucucuccuggccuguugucugaaugccgccugcauggcauugguggaugcaggugugcccaugcgggcucucuucuguggggucgccugcgcccuggacucugaugggacccucgugcuggauccuacauccaagcaagaaaaggaggcccgggcaguccugaccuuugcccuggacagcguggaacggaagcugcugauguccagcaccaaggggcucuacucagacacugagcuccagcagugccuggcugcggcccaggccgcuucgcaacacgucuuccguuucuaccgggaaucgcugcagaggcguuacuccaagagcuga

SEQ ID NO: 1086 - RNA, 708 nt, Artificial Sequence
  derived and/or modified sequence opt1 from CML28__Homo_sapiens__AAF82135
auggaggaggagacccacaccgacgccaagauccgcgccgagaacggcacggggagcagcccccggggcccggggugcagccugcgccacuucgcgugcgagcagaaccuccugucccggcccgacggcagcgccuccuuccugcagggggacaccagcgugcucgccggcgucuacggccccgccgaggugaagguguccaaggagaucuucaacaaggccacccuggaggucauccugcgccccaagaucgggcucccgggcguggcggagaagucccgggagcgccugauccggaacacgugcgaggccgugguccuggggacccuccacccccgcaccuccaucaccguggugcugcaggucgugagcgacgccggcucccugcucgccugcugccugaacgcggccugcauggcccugguggacgccgggguccccaugcgggcccucuucugcggcguggcgugcgcccuggacagcgacggcacccuggugcucgaccccacguccaagcaggagaaggaggcccgcgccguccugaccuucgcccuggacagcguggagcggaagcuccugauguccagcaccaaggggcuguacuccgacaccgagcuccagcagugccuggcggccgcccaggccgccagccagcacguguuccgcuucuaccgggagucccugcagcgccgguacagcaagagcuga

SEQ ID NO: 1087 - RNA, 708 nt, Artificial Sequence
  derived and/or modified sequence opt2 from CML28__Homo_sapiens__AAF82135
auggaggaggagacccacaccgacgccaagauccgcgccgagaacggcaccggcuccuccccccgcggccccggcugcucccuccgccacuucgccugcgagcagaaccuccucucccgccccgacggcuccgccuccuuccuccagggcgacaccuccguccucgccggcgucuacggccccgccgaggucaaggucuccaaggagaucuucaacaaggccacccucgaggucauccuccgccccaagaucggccuccccggcgucgccgagaagucccgcgagcgccucauccgcaacaccugcgaggccgucguccucggcacccuccacccccgcaccuccaucaccgucguccuccaggucgucuccgacgccggcucccuccucgccugcugccucaacgccgccugcauggcccucgucgacgccggcguccccaugcgcgcccucuucugcggcgucgccugcgcccucgacuccgacggcacccucguccucgaccccaccuccaagcaggagaaggaggcccgcgccguccucaccuucgcccucgacuccgucgagcgcaagcuccucauguccuccaccaagggccucuacuccgacaccgagcuccagcagugccucgccgccgcccaggccgccucccagcacgucuuccgcuucuaccgcgagucccuccagcgccgcuacuccaaguccuga

SEQ ID NO: 1088 - RNA, 708 nt, Artificial Sequence
  derived and/or modified sequence opt3 from CML28__Homo_sapiens__AAF82135
auggaggaagagacccacacagacgccaagaucagagcugaaaacggcacugggagcucccccaggggaccugguugcucucugcggcauuucgcaugugagcagaaucuccuuucacgcccagauggcagugccagcuuucugcaaggggacacguccguguuggcgggagucuacggcccggcugaaguuaaagugucuaaggagauuuucaacaaagccaccuuagagguaauacugcgacccaagaucggucuaccugggguggcagaaaaaucgcgugagagacucauuaggaauacaugcgaagccgucgugcugggaacucuucacccacggaccucaaucacaguugugcugcaggucgugagcgaugcuggcaguuugcucgcauguugccugaacgccgcuuguauggcccugguagacgcgggcguucccaugcgcgcacucuuuugcgggguggccugugcuuuagauuccgacggaacccugguccuugauccuacuucuaagcaggagaaggaggccagagcaguguugacauucgcucuggacagcguggaaaggaaacuacucauguccucaaccaagggucuguauagugauacggagcuucagcaaugccuggccgcggcccaggcagcuagccagcaugucuuucgguucuaccgcgaaucuuugcagcgaagauauuccaaaucauga

SEQ ID NO: 1089 - RNA, 708 nt, Artificial Sequence
  derived and/or modified sequence opt4 from CML28__Homo_sapiens__AAF82135
auggaggaggagacccacaccgacgccaagaucagagccgagaacggcaccggcagcagccccagaggccccggcugcagccugagacacuucgccugcgagcagaaccugcugagcagacccgacggcagcgccagcuuccugcagggcgacaccagcgugcuggccggcguguacggccccgccgaggugaaggugagcaaggagaucuucaacaaggccacccuggaggugauccugagacccaagaucggccugcccggcguggccgagaagagcagagagagacugaucagaaacaccugcgaggccguggugcugggcacccugcaccccagaaccagcaucaccguggugcugcagguggugagcgacgccggcagccugcuggccugcugccugaacgccgccugcauggcccugguggacgccggcgugcccaugagagcccuguucugcggcguggccugcgcccuggacagcgacggcacccuggugcuggaccccaccagcaagcaggagaaggaggccagagccgugcugaccuucgcccuggacagcguggagagaaagcugcugaugagcagcaccaagggccuguacagcgacaccgagcugcagcagugccuggccgccgcccaggccgccagccagcacguguucagauucuacagagagagccugcagagaagauacagcaagagcuga

SEQ ID NO: 1090 - RNA, 708 nt, Artificial Sequence
  derived and/or modified sequence opt5 from CML28__Homo_sapiens__AAF82135
auggaggaagagacccacacagacgccaagaucagagcugaaaacggcacggggagcucuccccggggaccuggcugcucccugcgccauuucgccugugagcagaaucuccugagcagaccggauggguccgcgucuuuucuucaaggagacaccagcgugcuggcuggcgucuacgggcccgccgaaguuaaaguguccaaggagauuuucaacaaagccacacucgaggugauccugcggccuaagauuggacuucccggcgucgcugaaaaaucucgcgagagacugauccggaauaccugcgaagccgugguucucggcacacugcacccucgcaccagcauuacagugguccuccaggugguuuccgaugcugggagccugcuggccuguugccuuaacgcggccuguauggcucugguggacgccggaguccccaugagagcucucuuuugcggcguggccugugcgcuggauucugacgggacccuugugcuggauccuacguccaagcaggagaaggaggcccgggcuguccucaccuucgcccuggacagcguugaacgcaaacugcucaugucuuccacaaagggacuguauagcgauaccgagcuucagcaaugccuggcugccgcccaggcugcgucucagcauguguuuagauucuaccgggaaucccuccagcgcagauauagcaaauccuga

SEQ ID NO: 1091 - protein, 583 aa, Artificial Sequence
  CML66__Homo_sapiens__Q96RS6
MEVAANCSLRVKRPLLDPRFEGYKLSLEPLPCYQLELDAAVAEVKLRDDQYTLEHMHAFGMYNYLHCDSWYQDSVYYIDTLGRIMNLTVMLDTALGKPREVFRLPTDLTACDNRLCASIHFSSSTWVTLSDGTGRLYVIGTGERGNSASEKWEIMFNEELGDPFIIIHSISLLNAEEHSIATLLLRIEKEELDMKGSGFYVSLEWVTISKKNQDNKKYEIIKRDILRGKSVPHYAAIEPDGNGLMIVSYKSLTFVQAGQDLEENMDEDISEKIKEPLYYWQQTEDDLTVTIRLPEDSTKEDIQIQFLPDHINIVLKDHQFLEGKLYSSIDHESSTWIIKESNSLEISLIKKNEGLTWPELVIGDKQGELIRDSAQCAAIAERLMHLTSEELNPNPDKEKPPCNAQELEECDIFFEESSSLCRFDGNTLKTTHVVNLGSNQYLFSVIVDPKEMPCFCLRHDVDALLWQPHSSKQDDMWEHIATFNALGYVQASKRDKKFFACAPNYSYAALCECLRRVFIYRQPAPMSTVLYNRKEGRQVGQVAKQQVASLETNDPILGFQATNERLFVLTTKNLFLIKVNTEN

SEQ ID NO: 1092 - RNA, 1752 nt, Artificial Sequence
  CML66__Homo_sapiens__CCDS6312.1
auggagguggcggcuaauugcucccuacgggugaagagaccucuguuggauccccgcuucgaggguuacaagcucucucuugagccgcugccuuguuaccagcuggagcuugacgcagcuguggcagagguaaaacuucgagaugaucaauauacacuggaacacaugcaugcuuuuggaauguauaauuaccugcacugugauucaugguaucaagacagugucuacuauauugauacccuuggaagaauuaugaauuuaacaguaaugcuggacacugccuuaggaaaaccacgagagguguuucgacuuccuacagauuugacagcaugugacaaccgucuuugugcaucuauccauuucucaucuucuaccuggguuaccuugucagauggaacuggaagauuguaugucauuggaacaggugaacguggaaauagcgcuucugaaaaaugggagauuauguuuaaugaagaacuuggggauccuuuuauuauaauucacaguaucucacugcuaaaugcugaagaacauucuauagcuacccuacuucuucgaauagagaaagaggaauuggauaugaaaggaagugguuucuauguuucucuggagugggucacuaucaguaagaaaaaucaagauaauaaaaaauaugaaauuauuaagcgugauauucuccguggaaagucagugccacauuaugcugcuauugagccugauggaaauggucuaaugauuguauccuacaagucuuuaacauuuguucaggcuggucaagaucuugaagaaaauauggaugaagacauaucagagaaaaucaaagaaccucuguauuacuggcaacagacugaagaugauuugacaguaaccauacggcuuccagaagacaguacuaaggaggacauucaaauacaguuuuugccugaucacaucaacauuguacugaaggaucaccaguuuuuagaaggaaaacucuauucaucuauugaucaugaaagcaguacauggauaauuaaagagaguaauagcuuggagauuuccuugauuaagaagaaugaaggacugaccuggccagagcuaguaauuggagauaaacaaggggaacuuauaagagauucagcccagugugcugcaauagcugaacguuugaugcauuugaccucugaagaacugaauccaaauccagauaaagaaaaaccaccuugcaaugcucaagaguuagaagaaugugauauuuucuuugaagagagcuccaguuuaugcagauuugauggcaauacauuaaaaacuacucauguggugaaucuuggaagcaaccaguaccuuuucucugucauaguggauccuaaagaaaugcccugcuucuguuugcgccaugauguugaugcccuacucuggcaaccacacuccagcaaacaagaugauaugugggagcacaucgcaacuuucaaugcuuuaggcuauguccaagcaucaaagagagacaaaaaauuuuuugccugugcuccaaauuacucguaugcagcccuuugugagugccuucgucgaguauucaucuaucgucagccugcucccauguccacuguacuuuacaacagaaaggaaggcaggcaaguaggacagguugcuaagcagcaaguagcaagccuagaaaccaaugauccuauuuuaggauuucaggcaacaaaugagagauuauuuguucuuacuaccaaaaaccucuuuuuaauaaaaguaaauacagagaauuaa

SEQ ID NO: 1093 - RNA, 1752 nt, Artificial Sequence
  derived and/or modified sequence opt1 from CML66__Homo_sapiens__CCDS6312.1
auggagguggccgccaacugcagccugcgcgucaagcggccccuccuggacccgcgcuucgagggcuacaagcugucccucgagccccugcccugcuaccagcuggagcucgacgcggccguggccgaggugaagcugcgggacgaccaguacacccuggagcacaugcacgccuucgggauguacaacuaccuccacugcgacagcugguaccaggacuccgucuacuacaucgacacccugggccgcaucaugaaccugacggugaugcucgacaccgcccuggggaagccccgggagguguuccgccugccgaccgaccucaccgcgugcgacaaccggcugugcgccagcauccacuucuccagcuccacgugggucacccugagcgacggcaccgggcgccucuacgugaucggcaccggcgagcgggggaacuccgccagcgagaagugggagaucauguucaacgaggagcugggcgaccccuucaucaucauccacuccaucagccugcucaacgccgaggagcacuccaucgcgacgcugcugcuccgcaucgagaaggaggagcuggacaugaaggggagcggcuucuacgugucccuggagugggucaccaucagcaagaagaaccaggacaacaagaaguacgagaucaucaagcgggacauccuccgcgggaaguccgugccccacuacgccgccaucgagcccgacggcaacggccugaugaucgugagcuacaagucccugaccuucguccaggccgggcaggaccucgaggagaacauggacgaggacaucagcgagaagaucaaggagccgcuguacuacuggcagcagaccgaggacgaccugacggugaccauccggcuccccgaggacagcaccaaggaggacauccagauccaguuccugcccgaccacaucaacaucgugcugaaggaccaccaguuccucgagggcaagcuguacuccagcaucgaccacgaguccagcaccuggaucaucaaggaguccaacagccuggagaucucccucaucaagaagaacgaggggcugacguggcccgagcuggucaucggcgacaagcagggcgagcucauccgcgacagcgcccagugcgcggccaucgccgagcggcugaugcaccugaccuccgaggagcucaacccgaaccccgacaaggagaagccgcccugcaacgcccaggagcuggaggagugcgacaucuucuucgaggagagcuccagccugugccgcuucgacgggaacacccucaagaccacgcacguggugaaccugggcuccaaccaguaccuguucagcgucaucguggaccccaaggagaugcccugcuucugccugcggcacgacguggacgcccuccuguggcagccccacuccagcaagcaggacgacaugugggagcacaucgcgaccuucaacgcccugggguacguccaggccuccaagcgcgacaagaaguucuucgccugcgcccccaacuacagcuacgcggcccucugcgagugccugcggcgcguguucaucuaccggcagccggcccccauguccaccgugcuguacaaccgcaaggagggccgccaggucggccagguggccaagcagcaggucgccagccucgagaccaacgaccccauccugggguuccaggcgacgaacgagcggcuguucgugcucaccaccaagaaccuguuccugaucaaggugaacaccgagaacuga

SEQ ID NO: 1094 - RNA, 1752 nt, Artificial Sequence
  derived and/or modified sequence opt2 from CML66__Homo_sapiens__CCDS6312.1
auggaggucgccgccaacugcucccuccgcgucaagcgcccccuccucgacccccgcuucgagggcuacaagcucucccucgagccccuccccugcuaccagcucgagcucgacgccgccgucgccgaggucaagcuccgcgacgaccaguacacccucgagcacaugcacgccuucggcauguacaacuaccuccacugcgacuccugguaccaggacuccgucuacuacaucgacacccucggccgcaucaugaaccucaccgucaugcucgacaccgcccucggcaagccccgcgaggucuuccgccuccccaccgaccucaccgccugcgacaaccgccucugcgccuccauccacuucuccuccuccaccugggucacccucuccgacggcaccggccgccucuacgucaucggcaccggcgagcgcggcaacuccgccuccgagaagugggagaucauguucaacgaggagcucggcgaccccuucaucaucauccacuccaucucccuccucaacgccgaggagcacuccaucgccacccuccuccuccgcaucgagaaggaggagcucgacaugaagggcuccggcuucuacgucucccucgagugggucaccaucuccaagaagaaccaggacaacaagaaguacgagaucaucaagcgcgacauccuccgcggcaaguccgucccccacuacgccgccaucgagcccgacggcaacggccucaugaucgucuccuacaagucccucaccuucguccaggccggccaggaccucgaggagaacauggacgaggacaucuccgagaagaucaaggagccccucuacuacuggcagcagaccgaggacgaccucaccgucaccauccgccuccccgaggacuccaccaaggaggacauccagauccaguuccuccccgaccacaucaacaucguccucaaggaccaccaguuccucgagggcaagcucuacuccuccaucgaccacgaguccuccaccuggaucaucaaggaguccaacucccucgagaucucccucaucaagaagaacgagggccucaccuggcccgagcucgucaucggcgacaagcagggcgagcucauccgcgacuccgcccagugcgccgccaucgccgagcgccucaugcaccucaccuccgaggagcucaaccccaaccccgacaaggagaagccccccugcaacgcccaggagcucgaggagugcgacaucuucuucgaggaguccuccucccucugccgcuucgacggcaacacccucaagaccacccacgucgucaaccucggcuccaaccaguaccucuucuccgucaucgucgaccccaaggagaugcccugcuucugccuccgccacgacgucgacgcccuccucuggcagccccacuccuccaagcaggacgacaugugggagcacaucgccaccuucaacgcccucggcuacguccaggccuccaagcgcgacaagaaguucuucgccugcgcccccaacuacuccuacgccgcccucugcgagugccuccgccgcgucuucaucuaccgccagcccgcccccauguccaccguccucuacaaccgcaaggagggccgccaggucggccaggucgccaagcagcaggucgccucccucgagaccaacgaccccauccucggcuuccaggccaccaacgagcgccucuucguccucaccaccaagaaccucuuccucaucaaggucaacaccgagaacuga

SEQ ID NO: 1095 - RNA, 1752 nt, Artificial Sequence
  derived and/or modified sequence opt3 from CML66__Homo_sapiens__CCDS6312.1
auggagguggccgcuaacugcagccugagagucaagaggccccuccuugacccucgguucgaaggcuacaaacuguccuuggagccauuaccguguuaucagcuggaacuagaugcagccguugcggaggugaagcuccgcgacgaucaauacacccuggaacacaugcaugcuuuugggauguauaauuaccuucacugcgacucuugguaucaggauucaguauacuauaucgacacacugggacgaauuaugaacuugacugugaugcucgauacggcccuggguaaaccccgugaggucuucagacugccuaccgaccucacagcaugugauaauagguuaugcgccaguauacauuuuagcuccucuacuugggugacccugucggacggcacagggcggcuuuacguuaucggaaccggcgagcgcgguaacucagcuagcgaaaagugggagauuauguucaaugaagaguugggggauccauuuaucauuauccacaguauaucccugcuaaacgcagaggaacauucuaucgccacucuccugcuuagaauugagaaagaagaacuggacaugaagggaagcggcuucuacguguccuuggaaugggucacaaucucaaagaaaaaucaggauaacaagaaauaugagauuaucaagagggacauacuccggggcaaaagugugccccacuacgcugccauugagccugacgggaauggacugaugaucguaagcuauaagucuuuaaccuuuguucaggcgggucaagaucuggaagagaacauggacgaagauauuuccgagaagaucaaagaaccacucuacuauuggcagcagacggaggacgaucuuacugugaccauccgccugcccgaggacucaacaaaggaagauauucagauacaauucuugccugaccacaucaauauuguccuaaaagaucaucaguuucuggagggcaagcucuacagcaguaucgaccacgaaucuuccacuuggauaauuaaagagagcaacucgcuggaaaucucucuuaucaagaaaaaugaggggcugaccuggccagaguuggugauuggagauaagcagggcgaacucauccgagacuccgcacagugugccgcuauugccgagagacugaugcauuuaacaucagaggagcugaacccgaaucccgacaaggagaaaccuccaugcaacgcacaagaacuagaggaaugugauauauucuuugaggaaaguagcucccucugcagguucgacgguaacacccugaagacgacucacguggucaaucuugggucuaaccaguauuuguuuagcguuaucguggaucccaaagagaugccuuguuucugccugcggcacgacguagaugcucuccuguggcagccacauucaaguaagcaagacgauaugugggagcacauugccacauucaaugcgcuuggauacgugcaggccuccaaacgugacaagaaguuuuucgcaugugcucccaacuacagcuaugccgcucugugcgaaugcuugcgcagagucuuuaucuacaggcagccggccccuaugucuaccgugcucuauaaucggaaagagggccgacagguuggccaaguggcaaagcagcaggucgccucacuggaaacuaacgaucccaucuuaggguuccaggcuacaaaugagcgccuguuugugcuaaccacgaaaaaccucuuccugauuaagguaaauaccgaaaacuga

SEQ ID NO: 1096 - RNA, 1752 nt, Artificial Sequence
  derived and/or modified sequence opt4 from CML66__Homo_sapiens__CCDS6312.1
auggagguggccgccaacugcagccugagagugaagagaccccugcuggaccccagauucgagggcuacaagcugagccuggagccccugcccugcuaccagcuggagcuggacgccgccguggccgaggugaagcugagagacgaccaguacacccuggagcacaugcacgccuucggcauguacaacuaccugcacugcgacagcugguaccaggacagcguguacuacaucgacacccugggcagaaucaugaaccugaccgugaugcuggacaccgcccugggcaagcccagagagguguucagacugcccaccgaccugaccgccugcgacaacagacugugcgccagcauccacuucagcagcagcaccugggugacccugagcgacggcaccggcagacuguacgugaucggcaccggcgagagaggcaacagcgccagcgagaagugggagaucauguucaacgaggagcugggcgaccccuucaucaucauccacagcaucagccugcugaacgccgaggagcacagcaucgccacccugcugcugagaaucgagaaggaggagcuggacaugaagggcagcggcuucuacgugagccuggagugggugaccaucagcaagaagaaccaggacaacaagaaguacgagaucaucaagagagacauccugagaggcaagagcgugccccacuacgccgccaucgagcccgacggcaacggccugaugaucgugagcuacaagagccugaccuucgugcaggccggccaggaccuggaggagaacauggacgaggacaucagcgagaagaucaaggagccccuguacuacuggcagcagaccgaggacgaccugaccgugaccaucagacugcccgaggacagcaccaaggaggacauccagauccaguuccugcccgaccacaucaacaucgugcugaaggaccaccaguuccuggagggcaagcuguacagcagcaucgaccacgagagcagcaccuggaucaucaaggagagcaacagccuggagaucagccugaucaagaagaacgagggccugaccuggcccgagcuggugaucggcgacaagcagggcgagcugaucagagacagcgcccagugcgccgccaucgccgagagacugaugcaccugaccagcgaggagcugaaccccaaccccgacaaggagaagccccccugcaacgcccaggagcuggaggagugcgacaucuucuucgaggagagcagcagccugugcagauucgacggcaacacccugaagaccacccacguggugaaccugggcagcaaccaguaccuguucagcgugaucguggaccccaaggagaugcccugcuucugccugagacacgacguggacgcccugcuguggcagccccacagcagcaagcaggacgacaugugggagcacaucgccaccuucaacgcccugggcuacgugcaggccagcaagagagacaagaaguucuucgccugcgcccccaacuacagcuacgccgcccugugcgagugccugagaagaguguucaucuacagacagcccgcccccaugagcaccgugcuguacaacagaaaggagggcagacaggugggccagguggccaagcagcagguggccagccuggagaccaacgaccccauccugggcuuccaggccaccaacgagagacuguucgugcugaccaccaagaaccuguuccugaucaaggugaacaccgagaacuga

SEQ ID NO: 1097 - RNA, 1752 nt, Artificial Sequence
  derived and/or modified sequence opt5 from CML66__Homo_sapiens__CCDS6312.1
auggagguggccgcuaacugcagccugagagucaagcggccccuccuggacccucgcuucgaaggcuacaaacuuucccuggagccgcuccccuguuaucagcuggaacuugaugccgcgguugcugaggugaagcugagagacgaucaguacacccucgaacacaugcaugccuuugggauguauaauuaccugcacugcgacucuugguaucaggauagcguguacuauaucgacacacugggacggauuaugaaccucacggucaugcuggauaccgcccuuggcaaaccucgcgagguguucagacugcccacagaccucaccgcuugugauaaucggcugugcgccuccauccauuuuucuagcuccacauggguuacccuuucugacgggacaggacgccuguacgugauuggcaccggggagagaggaaacagcgcuuccgaaaagugggagaucauguucaaugaagaacucggcgauccuuuuauuaucauccacagcauuucucugcugaacgccgaggaacauuccaucgcgacgcuccugcuucggauugagaaagaggagcuggacaugaagggcagcggguucuacgucucucucgaaugggugaccaucuccaagaaaaaucaggauaacaagaaauaugagauuaucaagcgcgacauucugagaggaaaaagcguuccccacuacgccgcuaucgagccugacggcaaugggcuuaugaucgugucuuauaagucccugacauuuguccaggccggacaagaucucgaagagaacauggacgaagauauuagcgagaagaucaaagaaccgcuguacuauuggcagcagaccgaggacgaucugacagugaccauucggcuccccgaggacuccacgaaggaagauauccagauucaauuccugccugaccacaucaauaucgugcuuaaagaucaucaguuucuggagggcaagcucuacucuagcauugaccacgaauccagcacauggaucauuaaagagucuaacucccuggaaaucagccuuauuaagaaaaaugaggggcugaccuggcccgagcucgucaucggagauaagcagggcgaacugauccgcgacucugcucagugugccgcgauugccgagagacugaugcaucucacaagcgaggaacugaacccuaaucccgacaaggagaaaccgccuugcaacgcucaagaacuugaggaaugugauaucuucuuugaggaauccucuagccugugccgguucgacggcaacacccucaagaccacacacguugugaaucugggguccaaccaguaucuguuuagcgugauugucgaucccaaagagaugccuuguuucugccuucgccacgacguggaugcccuccuguggcagccccauucuuccaagcaagacgauaugugggagcacaucgcuacguucaaugcccugggauacguucaggccagcaaaagagacaagaaguuuuucgcuugugcgcccaacuacucuuaugccgcucucugcgaaugccugcggagaguguuuauuuaccgccagccugccccgauguccaccguccuuuauaaucggaaagagggcagacagguggggcaaguugccaagcaacagguggcuagccuggaaacaaacgaucccauccucggauuccaggccaccaaugagcgccuguuuguccugacaaccaaaaaccuuuuccucauuaaggugaauacggaaaacuga

SEQ ID NO: 1098 - protein, 520 aa, Artificial Sequence
  COA-1/m__Homo_sapiens__Q5T124
MSSPLASLSKTRKVPLPSEPMNPGRRGIRIYGDEDEVDMLSDGCGSEEKISVPSCYGGIGAPVSRQVPASHDSELMAFMTRKLWDLEQQVKAQTDEILSKDQKIAALEDLVQTLRPHPAEATLQRQEELETMCVQLQRQVREMERFLSDYGLQWVGEPMDQEDSESKTVSEHGERDWMTAKKFWKPGDSLAPPEVDFDRLLASLQDLSELVVEGDTQVTPVPGGARLRTLEPIPLKLYRNGIMMFDGPFQPFYDPSTQRCLRDILDGFFPSELQRLYPNGVPFKVSDLRNQVYLEDGLDPFPGEGRVVGRQLMHKALDRVEEHPGSRMTAEKFLNRLPKFVIRQGEVIDIRGPIRDTLQNCCPLPARIQEIVVETPTLAAERERSQESPNTPAPPLSMLRIKSENGEQAFLLMMQPDNTIGDVRALLAQARVMDASAFEIFSTFPPTLYQDDTLTLQAAGLVPKAALLLRARRAPKSSLKFSPGPCPGPGPGPSPGPGPGPSPGPGPGPSPCPGPSPSPQ

SEQ ID NO: 1099 - RNA, 1563 nt, Artificial Sequence
  COA-1/m__Homo_sapiens__CCDS41288.1
augagcucaccuuuggccucccuuagcaagacccgaaaagugccccugcccucggagccuaugaauccugggaggcgaggaauccgcaucuauggagaugaagaugagguggacauguugagugauggguguggcucagaagaaaagaucucagucccuuccugcuauggcggcauaggugccccugugagucggcaagucccugcaucccaugacucggagcugauggccuucaugacgaggaaguugugggaccuggagcagcaggugaaggcccagacugaugagauacuguccaaggaucagaagauagcggcccuagaggaccuggugcagacccuccggccacacccagccgaggcaacccugcagcggcaggaggaacuggagacgaugugugugcagcugcagcggcaggucagggagauggagcgguuccucagugacuauggccugcagugggugggcgagcccauggaccaggaggacucagagagcaagacagucucagagcauggcgagagggacuggaugacagccaagaaguucuggaagccaggggacucauuggcgcccccugagguggacuuugacaggcugcuggccagccugcaggaucuuagugagcuggugguagagggugacacccaagugacaccagugcccggcggggcacggcugcguacccucgagcccaucccgcugaagcucuaccggaauggcaucaugauguucgacgggcccuuccagcccuucuacgaucccuccacacagcgcugccuccgagacauauuggauggcuucuuucccucagagcuccagcgacuguaccccaaugggguccccuuuaaggugagugacuugcgcaaucaggucuaccuggaggauggacuggaccccuucccaggcgagggccguguggugggcaggcagcugaugcacaaggccuuggacaggguggaggagcacccaggcuccaggaugacugcugagaaauuucugaacaggcuccccaaguuugugauccggcaaggcgaggugauugacauccggggccccaucagggacaccuugcagaacugcugcccauugccugcccggauccaggagauugugguggagacgcccaccuuggccgcugagcgagagaggagccaggagucacccaacacgccggcacccccgcucuccaugcugcgcaucaagucugagaauggggaacaggccuuccuacugaugaugcagccugacaacaccauuggggacgugcgagcucugcuagcgcaggccagggucauggaugccucugccuuugagaucuucagcacauucccgcccacccucuaccaggacgauacacucacgcugcaggcugcaggccuugugcccaaagcagcacugcugcugcgggcacgccgagccccgaaguccagccugaaauucaguccuggucccugucccggucccggucccggccccagucccggucccggucccggccccagucccggucccggucccggccccagucccuguccuggacccagucccagcccccaauaa

SEQ ID NO: 1100 - RNA, 1563 nt, Artificial Sequence
  derived and/or modified sequence opt1 from COA-1/m__Homo_sapiens__CCDS41288.1
augagcagcccccuggccucccucuccaagacccgcaaggugccgcugcccagcgagcccaugaaccccggccggcgcgggauccggaucuacggcgacgaggacgaggucgacaugcuguccgacgggugcggcagcgaggagaagaucuccgugccgagcugcuacgggggcaucggcgcccccgugucccgccagguccccgcgagccacgacuccgagcucauggccuucaugacccggaagcugugggaccuggagcagcaggucaaggcccagacggacgagauccucagcaaggaccagaagaucgccgcccuggaggaccuggugcagacccuccgcccccacccggcggaggccacccugcagcggcaggaggagcuggagaccaugugcgugcagcuccagcgccaggugcgggagauggagcgcuuccuguccgacuacgggcugcagugggugggcgagcccauggaccaggaggacagcgaguccaagacggucagcgagcacggggagcgggacuggaugaccgccaagaaguucuggaagcccggcgacucccucgcgcccccggagguggacuucgaccgccugcuggccagccuccaggaccuguccgagcugguggucgagggggacacccaggugacccccgugcccggcggcgcccggcuccgcacgcuggagcccaucccgcugaagcucuaccggaacgggaucaugauguucgacggccccuuccagcccuucuacgaccccagcacccagcgcugccugcgggacauccuggacggguucuucccgagcgagcuccagcgccuguaccccaacggcguccccuucaagguguccgaccugcggaaccagguguaccucgaggacggccuggaccccuucccgggggagggccgcgucguggggcggcagcugaugcacaaggcccucgaccgcguggaggagcaccccggcagccgcaugaccgccgagaaguuccugaaccggcugcccaaguucgucauccgccagggggaggugaucgacauccggggccccauccgcgacacccuccagaacugcugcccgcugcccgcccggauccaggagaucguggucgagacgcccacccuggcggccgagcgcgagcggucccaggagagcccgaacacccccgccccgccccucuccaugcugcgcaucaagagcgagaacggcgagcaggccuuccugcucaugaugcagcccgacaacaccaucggggacgugcgggcccugcuggcgcaggcccgcgucauggacgccuccgccuucgagaucuucagcacguucccgcccacccucuaccaggacgacacccugacccugcaggccgcgggccucgugcccaaggccgcccugcugcugcgggcccgccgggcccccaaguccagccucaaguucucccccgggcccugccccggcccggggcccggccccagccccggcccggggcccggccccucccccgggccgggccccgggcccagccccugcccgggccccucccccagcccgcaguga

SEQ ID NO: 1101 - RNA, 1563 nt, Artificial Sequence
  derived and/or modified sequence opt2 from COA-1/m__Homo_sapiens__CCDS41288.1
auguccuccccccucgccucccucuccaagacccgcaaggucccccuccccuccgagcccaugaaccccggccgccgcggcauccgcaucuacggcgacgaggacgaggucgacaugcucuccgacggcugcggcuccgaggagaagaucuccguccccuccugcuacggcggcaucggcgcccccgucucccgccagguccccgccucccacgacuccgagcucauggccuucaugacccgcaagcucugggaccucgagcagcaggucaaggcccagaccgacgagauccucuccaaggaccagaagaucgccgcccucgaggaccucguccagacccuccgcccccaccccgccgaggccacccuccagcgccaggaggagcucgagaccaugugcguccagcuccagcgccagguccgcgagauggagcgcuuccucuccgacuacggccuccagugggucggcgagcccauggaccaggaggacuccgaguccaagaccgucuccgagcacggcgagcgcgacuggaugaccgccaagaaguucuggaagcccggcgacucccucgccccccccgaggucgacuucgaccgccuccucgccucccuccaggaccucuccgagcucgucgucgagggcgacacccaggucacccccguccccggcggcgcccgccuccgcacccucgagcccaucccccucaagcucuaccgcaacggcaucaugauguucgacggccccuuccagcccuucuacgaccccuccacccagcgcugccuccgcgacauccucgacggcuucuuccccuccgagcuccagcgccucuaccccaacggcguccccuucaaggucuccgaccuccgcaaccaggucuaccucgaggacggccucgaccccuuccccggcgagggccgcgucgucggccgccagcucaugcacaaggcccucgaccgcgucgaggagcaccccggcucccgcaugaccgccgagaaguuccucaaccgccuccccaaguucgucauccgccagggcgaggucaucgacauccgcggccccauccgcgacacccuccagaacugcugcccccuccccgcccgcauccaggagaucgucgucgagacccccacccucgccgccgagcgcgagcgcucccaggagucccccaacacccccgcccccccccucuccaugcuccgcaucaaguccgagaacggcgagcaggccuuccuccucaugaugcagcccgacaacaccaucggcgacguccgcgcccuccucgcccaggcccgcgucauggacgccuccgccuucgagaucuucuccaccuucccccccacccucuaccaggacgacacccucacccuccaggccgccggccucguccccaaggccgcccuccuccuccgcgcccgccgcgcccccaaguccucccucaaguucucccccggccccugccccggccccggccccggccccucccccggccccggccccggccccucccccggccccggccccggccccucccccugccccggccccucccccuccccccaguga

SEQ ID NO: 1102 - RNA, 1563 nt, Artificial Sequence
  derived and/or modified sequence opt3 from COA-1/m__Homo_sapiens__CCDS41288.1
augagcuccccucuggccucucucucaaagaccagaaaagugccucuuccaagugagccgaugaaccccggcaggcgggggauccgcauuuacggagacgaagaugaggucgacaugcugagcgaugguugcggcuccgaagagaagauaucuguuccuucguguuaugggggaaucggcgcuccagugucacgacagguacccgcaagccacgacagugaauugauggccuucaugacacguaaauuaugggaucuggagcaacaggugaaggcgcagacugacgagauucuauccaaagaucagaagaucgcugcccucgaagaccugguccaaacgcuuagaccucauccagcagaggccacccugcagaggcaggaagaguuggagacaaugugcgugcagcuccaacggcagguucgcgaaauggagagauuucugucugauuacggucugcagugggugggggaacccauggaccaggaggauagcgaauccaagacugucucagagcacggagagagggacuggaugaccgcuaaaaaguucuggaaaccuggcgauagucucgcaccaccggaaguggacuuugaccgguuacuggccagccuucaagauuugucugagcugguaguugaaggcgacacacaggugacccccgucccugggggagcucgccuacgaacucucgagccaauuccccugaaacuuuauagaaaugguaucaugauguucgauggcccuuuucagccauucuacgaccccuccacacaaaggugucugcgggauauauuggacggguuuuucccgucagaacuccagcgucuguauccuaacggagugcccuuuaaggugagcgauuuacgcaaucaggucuaccuggaggacggccucgauccauucccuggugaggggagaguugugggaaggcagcuuaugcauaaggcccuggaccggguagaggaacaccccggcagucgaaugaccgcggaaaaguuuuugaaccgccuaccaaaauucgugaucagacaaggcgaggucauugauaucagggggcccauucgggacacgcugcagaauugcuguccucucccagcacgcauccaggaaauagugguugagacuccgacccuggccgcugagagagaaaggucucaggagucccccaacacacccgccccaccccuuagcaugcugcguauuaagucggaaaauggagagcaagcauuuuugcucaugaugcagccugacaacacuaucggugaugugcgggcucuguuagcccaggcgcgagucauggacgccucugcauucgagauuuucuccaccuuuccacccacacuguaucaggaugacacccuaacgcuccaagcugccggccuggugccgaaagcugcccuuuugcugagagcaaggcgcgccccuaagucaagucucaaauucagcccagggcccugcccuggacccggcccagguccuucccccgggccaggcccgggaccuucucccggcccagggcccggaccuagcccaugucccgguccuucaccgaguccacaguga

SEQ ID NO: 1103 - RNA, 1563 nt, Artificial Sequence
  derived and/or modified sequence opt4 from COA-1/m__Homo_sapiens__CCDS41288.1
augagcagcccccuggccagccugagcaagaccagaaaggugccccugcccagcgagcccaugaaccccggcagaagaggcaucagaaucuacggcgacgaggacgagguggacaugcugagcgacggcugcggcagcgaggagaagaucagcgugcccagcugcuacggcggcaucggcgcccccgugagcagacaggugcccgccagccacgacagcgagcugauggccuucaugaccagaaagcugugggaccuggagcagcaggugaaggcccagaccgacgagauccugagcaaggaccagaagaucgccgcccuggaggaccuggugcagacccugagaccccaccccgccgaggccacccugcagagacaggaggagcuggagaccaugugcgugcagcugcagagacaggugagagagauggagagauuccugagcgacuacggccugcagugggugggcgagcccauggaccaggaggacagcgagagcaagaccgugagcgagcacggcgagagagacuggaugaccgccaagaaguucuggaagcccggcgacagccuggccccccccgagguggacuucgacagacugcuggccagccugcaggaccugagcgagcuggugguggagggcgacacccaggugacccccgugcccggcggcgccagacugagaacccuggagcccaucccccugaagcuguacagaaacggcaucaugauguucgacggccccuuccagcccuucuacgaccccagcacccagagaugccugagagacauccuggacggcuucuuccccagcgagcugcagagacuguaccccaacggcgugcccuucaaggugagcgaccugagaaaccagguguaccuggaggacggccuggaccccuuccccggcgagggcagaguggugggcagacagcugaugcacaaggcccuggacagaguggaggagcaccccggcagcagaaugaccgccgagaaguuccugaacagacugcccaaguucgugaucagacagggcgaggugaucgacaucagaggccccaucagagacacccugcagaacugcugcccccugcccgccagaauccaggagaucgugguggagacccccacccuggccgccgagagagagagaagccaggagagccccaacacccccgcccccccccugagcaugcugagaaucaagagcgagaacggcgagcaggccuuccugcugaugaugcagcccgacaacaccaucggcgacgugagagcccugcuggcccaggccagagugauggacgccagcgccuucgagaucuucagcaccuucccccccacccuguaccaggacgacacccugacccugcaggccgccggccuggugcccaaggccgcccugcugcugagagccagaagagcccccaagagcagccugaaguucagccccggccccugccccggccccggccccggccccagccccggccccggccccggccccagccccggccccggccccggccccagccccugccccggccccagccccagcccccaguga

SEQ ID NO: 1104 - RNA, 1563 nt, Artificial Sequence
  derived and/or modified sequence opt5 from COA-1/m__Homo_sapiens__CCDS41288.1
augagcucuccccuggccucccucagcaagaccagaaaagugccucugccguccgagcccaugaacccuggccggcgcgggaucagaauuuacggagacgaagaugaggucgacaugcuuucugauggcugcgggagcgaagagaagaucuccguucccucuuguuauggaggcauuggggcuccugugagccgccaggugcccgccucccacgacagcgaacugauggcguucaugacacggaaacucugggaucuggagcaacaggucaaggcucagacggacgagauccuuucuaaagaucagaagauugccgcccuggaagaccucgugcaaacccugagaccucauccggcugaggccacacugcagcggcaggaggaacucgagaccaugugcguucagcugcaacgccaggugagagaaauggagcgguuucuuuccgauuacggacugcagugggucggcgaacccauggaccaggaggauagcgaaucuaagacaguguccgagcacggcgagcgcgacuggaugaccgcuaaaaaguucuggaaaccuggggauagccucgcucccccugaaguugacuuugacagacugcuugcgucucugcaagaucucuccgagcugguggucgaaggagacacacaggugacccccgugccgggcggggcccggcugcgcacgcucgagccuaucccccugaaacuuuauagaaauggaaucaugauguucgauggcccuuuucagcccuucuacgaccccagcacccaacggugucugcgcgauauucucgacggguuuuucccuuccgaacugcagagacuuuauccgaacggaguccccuuuaagguuucugaucugcggaaucagguguaccucgaggacggccuggauccuuuccccggcgaggggagaguggucggacgccagcugaugcauaaggcucucgaccggguggaggaacacccuggcagcagaaugacagccgaaaaguuucugaaccgccuucccaaauucguuauccggcaaggggaggugauugauaucagaggaccgauucgcgacacccugcagaauugcuguccucuccccgcucggauccaggaaauugucguggagacaccuacccuggccgcggagagagaacgcucccaggagagccccaacacgccugcucccccgcuuucuaugcugcggaucaaguccgaaaauggcgagcaagccuuucuccugaugaugcagccugacaacacaaucggggauguuagagcccugcucgcccaggcccgcgugauggacgccagcgcuuucgagauuuucucuaccuuuccgcccacacuguaucaggaugacacccuuacccugcaagcggccggacucgucccuaaagcugcccugcugcuucgggccagacgggcucccaagagcucccucaaauucucucccggcccuugccccggcccugggcccggaccuagccccggcccggggccuggacccuccccuggccccgggccgggcccuagccccuguccuggacccucucccuccccucaguga

SEQ ID NO: 1105 - protein, 142 aa, Artificial Sequence
  coactosin-like_protein__Homo_sapiens__Q14019
MATKIDKEACRAAYNLVRDDGSAVIWVTFKYDGSTIVPGEQGAEYQHFIQQCTDDVRLFAFVRFTTGDAMSKRSKFALITWIGENVSGLQRAKTGTDKTLVKEVVQNFAKEFVISDRKELEEDFIKSELKKAGGANYDAQTE

SEQ ID NO: 1106 - RNA, 429 nt, Artificial Sequence
  coactosin-like_protein__Homo_sapiens__AAA88022
auggccaccaagaucgacaaagaggcuugccgggcggcguacaaccuggugcgcgacgacggcucggccgucaucugggugacuuuuaaauaugacggcuccaccaucguccccggcgagcagggagcggaguaccagcacuucauccagcagugcacagaugacguccgguuguuugccuucgugcgcuucaccaccggggaugccaugagcaagagguccaaguuugcccucaucacguggaucggugagaacgucagcgggcugcagcgcgccaaaaccgggacggacaagacccuggugaaggaggucguacagaauuucgcuaaggaguuugugaucagugaucggaaggagcuggaggaagauuucaucaagagcgagcugaagaaggcggggggagccaauuacgacgcccagacggaguaa

SEQ ID NO: 1107 - RNA, 429 nt, Artificial Sequence
  derived and/or modified sequence opt1 from coactosin-like_protein__Homo_sapiens__AAA88022
auggccaccaagaucgacaaggaggccugccgcgcggccuacaaccuggugcgggacgacggcagcgccgucaucugggugaccuucaaguacgacggguccacgaucgugcccggcgagcagggggccgaguaccagcacuucauccagcagugcaccgacgacguccgccucuucgccuucgugcgguucaccaccggcgacgcgaugagcaagcgcuccaaguucgcccugaucacguggaucggggagaacgugagcggccugcagcgggccaagaccggcaccgacaagacccucgucaaggagguggugcagaacuucgccaaggaguucgucaucuccgaccgcaaggagcuggaggaggacuucaucaagagcgagcugaagaaggccgggggcgcgaacuacgacgcccagacggaguga

SEQ ID NO: 1108 - RNA, 429 nt, Artificial Sequence
  derived and/or modified sequence opt2 from coactosin-like_protein__Homo_sapiens__AAA88022
auggccaccaagaucgacaaggaggccugccgcgccgccuacaaccucguccgcgacgacggcuccgccgucaucugggucaccuucaaguacgacggcuccaccaucguccccggcgagcagggcgccgaguaccagcacuucauccagcagugcaccgacgacguccgccucuucgccuucguccgcuucaccaccggcgacgccauguccaagcgcuccaaguucgcccucaucaccuggaucggcgagaacgucuccggccuccagcgcgccaagaccggcaccgacaagacccucgucaaggaggucguccagaacuucgccaaggaguucgucaucuccgaccgcaaggagcucgaggaggacuucaucaaguccgagcucaagaaggccggcggcgccaacuacgacgcccagaccgaguga

SEQ ID NO: 1109 - RNA, 429 nt, Artificial Sequence
  derived and/or modified sequence opt3 from coactosin-like_protein__Homo_sapiens__AAA88022
auggccaccaagaucgacaaagaggcuugcagagcagccuacaaccuggugagggaugacggcagcgcggucauuuggguuacauucaaguaugauggguccacuauagugcccggagaacagggugcugaguaccaacacuuuauccagcaguguacggacgauguacgccucuucgccuuugugcgguucaccacaggcgacgcaaugucuaaacgaucaaaguuugcccuuauuacuuggaucggggaaaaugucaguggacugcagcgugcuaaaaccggcacagauaagaccuuggugaaggagguugugcaaaacuucgcaaaagaauuugucauuagcgacagaaaggaguuagaggaagauuucaucaaauccgagcugaagaaagccgguggggcuaauuaugacgcccagacugaauga

SEQ ID NO: 1110 - RNA, 429 nt, Artificial Sequence
  derived and/or modified sequence opt4 from coactosin-like_protein__Homo_sapiens__AAA88022
auggccaccaagaucgacaaggaggccugcagagccgccuacaaccuggugagagacgacggcagcgccgugaucugggugaccuucaaguacgacggcagcaccaucgugcccggcgagcagggcgccgaguaccagcacuucauccagcagugcaccgacgacgugagacuguucgccuucgugagauucaccaccggcgacgccaugagcaagagaagcaaguucgcccugaucaccuggaucggcgagaacgugagcggccugcagagagccaagaccggcaccgacaagacccuggugaaggagguggugcagaacuucgccaaggaguucgugaucagcgacagaaaggagcuggaggaggacuucaucaagagcgagcugaagaaggccggcggcgccaacuacgacgcccagaccgaguga

SEQ ID NO: 1111 - RNA, 429 nt, Artificial Sequence
  derived and/or modified sequence opt5 from coactosin-like_protein__Homo_sapiens__AAA88022
auggccaccaagaucgacaaagaggcuugcagagccgcguacaaccuggugcgggaugacggcagcgcugucauuuggguuacauucaaguaugauggguccacgaucgugcccggagaacagggcgccgaguaccaacacuuuauucagcaguguaccgacgaugugcgccucuucgccuuugucagauucacaaccggggacgcuaugucuaaacggagcaaguuugcccugaucacauggauuggagaaaauguguccggccuucagcgcgcuaaaaccgggacagauaagacccugguuaaggaggugguccaaaacuucgccaaagaauuugugaucucugacagaaaggagcucgaggaagauuucaucaaaagcgagcugaagaaagcgggaggcgccaauuaugacgcucagacggaauga

SEQ ID NO: 1112 - protein, 164 aa, Artificial Sequence
  collagen_XXIII__Homo_sapiens__L8EAS4
MATRDPWVWMASPDFQARKGKRVHQETLAPGETKDKMELLGLRGPLDLLGPGALLATLGKMAPGEHKAQRAPKESPDKTARWAQRDPQGPRVSLEYLERRATMGHQASLDHQGPRASQGAWGLGERTVWTVPQDRRGSLATEARMELQGPGVPQASRASRETQW

SEQ ID NO: 1113 - RNA, 495 nt, Artificial Sequence
  collagen_XXIII__Homo_sapiens__CCQ43891
auggcuacccgggaccccuggguuuggauggcaagcccggacuuccaggcccgaaaggggaaaagggugcaccaggagacuuuggcccccggggagaccaaggacaagauggagcugcugggccuccggggcccccuggaccuccuggggcccggggcccuccuggcgacacugggaaagauggccccaggggagcacaaggcccagcgggccccaaaggagagcccggacaagacggcgagaugggcccaaagggacccccagggcccaagggugagccuggaguaccuggaaagaagggcgacgaugggacaccaagccagccuggaccaccagggcccaagggcgagccagggagcauggggccucggggagagaacgguguggacggugccccaggaccgaagggggagccuggccaccgaggcacggauggagcugcagggccccggggugccccaggccucaagggcgagcagggagacacagugguga

SEQ ID NO: 1114 - RNA, 495 nt, Artificial Sequence
  derived and/or modified sequence opt1 from collagen_XXIII__Homo_sapiens__CCQ43891
auggccacccgcgaccccuggguguggauggccagcccggacuuccaggcgcggaagggcaagcgcguccaccaggagacccuggcccccggggagacgaaggacaagauggagcuccugggccugcgggggccccucgaccugcugggccccggggcccuccuggccacccugggcaagauggccccgggcgagcacaaggcgcagcgcgcccccaaggagucccccgacaagaccgcccggugggcccagcgcgacccccaggggccgcgggugagccucgaguaccuggagcgccgggcgaccaugggccaccaggccucccuggaccaccaggggccccgcgccagccagggcgccugggggcucggcgagcggacgguguggaccgucccccaggaccgccggggcucccuggccaccgaggcgcgcauggagcugcaggggcccggcgugccgcaggccagccgggccucccgcgagacccagugguga

SEQ ID NO: 1115 - RNA, 495 nt, Artificial Sequence
  derived and/or modified sequence opt2 from collagen_XXIII__Homo_sapiens__CCQ43891
auggccacccgcgaccccugggucuggauggccucccccgacuuccaggcccgcaagggcaagcgcguccaccaggagacccucgcccccggcgagaccaaggacaagauggagcuccucggccuccgcggcccccucgaccuccucggccccggcgcccuccucgccacccucggcaagauggcccccggcgagcacaaggcccagcgcgcccccaaggagucccccgacaagaccgcccgcugggcccagcgcgacccccagggcccccgcgucucccucgaguaccucgagcgccgcgccaccaugggccaccaggccucccucgaccaccagggcccccgcgccucccagggcgccuggggccucggcgagcgcaccgucuggaccgucccccaggaccgccgcggcucccucgccaccgaggcccgcauggagcuccagggccccggcgucccccaggccucccgcgccucccgcgagacccagugguga

SEQ ID NO: 1116 - RNA, 495 nt, Artificial Sequence
  derived and/or modified sequence opt3 from collagen_XXIII__Homo_sapiens__CCQ43891
auggccaccagagaccccuggguguggauggcuagcccugauuuccaggcaaggaagggcaaacggguccaccaagagacacuggccccaggggaaacuaaggacaaaauggagcuccuuggacugcgcgguccguuggauuuacugggccccggggcgcuacucgcuacgcugggaaagauggccccuggcgaacauaaagcacagcgagccccaaaggagucccccgacaagaccgcucguugggcacagagagauccucaggguccaaggguuucucuugaauaccuggagcggcgcgccacaauggggcaccaggcuucauuggaccaucaaggacccagagccagucagggcgcguggggccucggggagaggacuguguggaccguaccucaggaucggcgcggaagccuggcaacagaagcccgaauggagcugcaagguccaggcgugccgcaggcuuccagagccucuagggaaacccagugguga

SEQ ID NO: 1117 - RNA, 495 nt, Artificial Sequence
  derived and/or modified sequence opt4 from collagen_XXIII__Homo_sapiens__CCQ43891
auggccaccagagaccccuggguguggauggccagccccgacuuccaggccagaaagggcaagagagugcaccaggagacccuggcccccggcgagaccaaggacaagauggagcugcugggccugagaggcccccuggaccugcugggccccggcgcccugcuggccacccugggcaagauggcccccggcgagcacaaggcccagagagcccccaaggagagccccgacaagaccgccagaugggcccagagagacccccagggccccagagugagccuggaguaccuggagagaagagccaccaugggccaccaggccagccuggaccaccagggccccagagccagccagggcgccuggggccugggcgagagaaccguguggaccgugccccaggacagaagaggcagccuggccaccgaggccagaauggagcugcagggccccggcgugccccaggccagcagagccagcagagagacccagugguga

SEQ ID NO: 1118 - RNA, 495 nt, Artificial Sequence
  derived and/or modified sequence opt5 from collagen_XXIII__Homo_sapiens__CCQ43891
auggccaccagagaccccuggguguggauggcuagcccugauuuccaggcccggaagggcaaacgcguccaccaagagacacuggcgccgggggaaacgaaggacaaaauggagcuccugggacuuagaggcccccuggaucuccuggggccuggagcccuucuggcuacccucggcaagauggcccccggggaacauaaagcucagcgggccccuaaggagucccccgacaagacagcucgcugggcccagagagauccucagggaccgcggguuucucuggaauaccuggagcgcagagcgaccaugggccaccaagccagccucgaccaucagggcccccgggcuucccagggggccuggggacugggcgagcgcacaguguggaccgugccucaggauagacgggggucucuugcuacagaagcccgcauggagcugcaaggacccggcgucccucaggcgagcagagccucccgggaaacccagugguga

SEQ ID NO: 1119 - protein, 540 aa, Artificial Sequence
  collagen_XXIII__Homo_sapiens__Q86Y22
MGPGERAGGGGDAGKGNAAGGGGGGRSATTAGSRAVSALCLLLSVGSAAACLLLGVQAAALQGRVAALEEERELLRRAGPPGALDAWAEPHLERLLREKLDGLAKIRTAREAPSECVCPPGPPGRRGKPGRRGDPGPPGQSGRDGYPGPLGLDGKPGLPGPKGEKGAPGDFGPRGDQGQDGAAGPPGPPGPPGARGPPGDTGKDGPRGAQGPAGPKGEPGQDGEMGPKGPPGPKGEPGVPGKKGDDGTPSQPGPPGPKGEPGSMGPRGENGVDGAPGPKGEPGHRGTDGAAGPRGAPGLKGEQGDTVVIDYDGRILDALKGPPGPQGPPGPPGIPGAKGELGLPGAPGIDGEKGPKGQKGDPGEPGPAGLKGEAGEMGLSGLPGADGLKGEKGESASDSLQESLAQLIVEPGPPGPPGPPGPMGLQGIQGPKGLDGAKGEKGASGERGPSGLPGPVGPPGLIGLPGTKGEKGRPGEPGLDGFPGPRGEKGDRSERGEKGERGVPGRKGVKGQKGEPGPPGLDQPCPVGPDGLPVPGCWHK

SEQ ID NO: 1120 - RNA, 1623 nt, Artificial Sequence
  collagen_XXIII__Homo_sapiens__AAO18361
augggcccaggcgagcgcgccgguggcggcggcgacgcggggaagggcaaugcggcgggcggcggcggcggagggcgcucggcgacgacggccgggucccgggcggugagcgcgcugugccugcugcucuccgugggcucggcggcugccugccugcugcuggguguccaggcggccgcgcugcagggccggguggcggcgcucgaggaggagcgggagcugcugcggcgcgcggggccgccaggcgcccuggacgccugggccgagccgcaccuggagcgccugcugcgggagaaguuggacggacuagcgaagauccggacugcucgggaagcuccauccgaaugugucugccccccagggcccccuggacggcgcggcaagccugggagaagaggcgacccugguccuccagggcaaucaggacgagauggcuacccgggaccccuggguuuggauggcaagcccggacuuccaggcccgaaaggggaaaagggugcaccaggagacuuuggcccccggggagaccaaggacaagauggagcugcugggccuccggggcccccuggaccuccuggggcccggggcccuccuggcgacacugggaaagauggccccaggggagcacaaggcccagcgggccccaaaggagagcccggacaagacggcgagaugggcccaaagggacccccagggcccaagggugagccuggaguaccuggaaagaagggcgacgaugggacaccaagccagccuggaccaccagggcccaagggcgagccagggagcauggggccucggggagagaacgguguggacggugccccaggaccgaagggggagccuggccaccgaggcacggauggagcugcagggccccggggugccccaggccucaagggcgagcagggagacacaguggugaucgacuaugauggcaggaucuuggaugcccucaaggggccucccggaccacaggggcccccagggccaccagggaucccuggagccaagggcgagcuuggauugcccggugccccaggaaucgauggagagaagggccccaaaggacagaaaggagacccaggagagccugggccagcaggacucaaaggggaagcaggcgagaugggcuuguccggccucccgggcgcugacggccucaagggggagaagggggagucggcgucugacagccuacaggagagccuggcucagcucauaguggagccagggcccccuggccccccuggccccccaggcccgaugggccuccagggaauccagggucccaagggcuuggauggagcaaagggagagaagggugcgucgggugagagaggccccagcggccugccugggccaguuggcccaccgggccuuauugggcugccaggaaccaaaggagagaagggcagacccggggagccaggacuagaugguuucccuggaccccgaggagagaaaggugaucggagcgagcguggagagaagggagaacgagggguccccggccggaaaggagugaagggccagaagggcgagccgggaccaccaggccuggaccagccgugucccgugggccccgacgggcugccugugccuggcugcuggcauaaguga

SEQ ID NO: 1121 - RNA, 1623 nt, Artificial Sequence
  derived and/or modified sequence opt1 from collagen_XXIII__Homo_sapiens__AAO18361
augggccccggggagcgcgccggcgggggcggggacgccggcaagggcaacgcggccgggggcgggggcgggggccggagcgccaccaccgccggcucccgcgccgugagcgcgcugugccuccugcuguccgucgggagcgccgccgccugccuccugcugggcgugcaggcggccgcccuccaggggcggguggccgcccuggaggaggagcgcgagcugcuccggcgcgcgggcccgcccggcgcccuggacgccugggccgagccccaccuggagcggcuccugcgcgagaagcuggacgggcucgccaagauccggacggcgcgcgaggcccccuccgagugcgucugcccgcccggcccgcccgggcggcgcggcaagcccgggcggcgcggcgaccccggcccgcccgggcagagcggccgggacggguaccccggcccccuggggcuggacggcaagcccggccuccccgggccgaagggcgagaagggggcccccggcgacuucgggccccgcggcgaccagggccaggacggggccgccgggcccccgggcccgcccggcccgcccggcgcgcgggggccgcccggcgacaccgggaaggacggcccccgcggggcccagggccccgccggccccaagggggagcccggccaggacggggagaugggccccaaggggccgcccggccccaagggcgagcccggggugcccggcaagaagggggacgacggcacccccucccagcccgggccgcccggccccaagggcgagcccgggagcaugggcccgcgcggggagaacggcguggacggggcccccggccccaagggcgagcccgggcaccggggcaccgacggggccgcgggcccgcggggcgcccccgggcugaagggcgagcagggggacacggucgugaucgacuacgacggccgcauccuggacgcccucaaggggccgcccggcccccagggcccgcccgggccgcccggcauccccggggccaagggcgagcuggggcugcccggcgcgcccggcaucgacggggagaagggccccaaggggcagaagggcgaccccggggagcccggcccggccggccucaagggggaggccggcgagauggggcuguccggccugcccggcgccgacgggcucaagggcgagaagggggagagcgccuccgacagccugcaggagucccuggcgcagcucaucguggagcccgggcccccgggcccgcccggcccgcccggccccauggggcugcagggcauccaggggcccaagggccuggacggggccaagggcgagaagggcgccagcggggagcgcggccccuccgggcuccccggccccgucgggccgcccggccugaucggccugcccgggaccaagggcgagaaggggcggcccggcgagcccgggcucgacggcuuccccggcccgcgcggggagaagggcgaccggagcgagcgcggggagaagggcgagcggggcgugcccgggcgcaagggcgugaaggggcagaagggcgagcccgggcccccgggccuggaccagcccugccccgucggcccggacgggcugcccgugcccggcugcuggcacaaguga

SEQ ID NO: 1122 - RNA, 1623 nt, Artificial Sequence
  derived and/or modified sequence opt2 from collagen_XXIII__Homo_sapiens__AAO18361
augggccccggcgagcgcgccggcggcggcggcgacgccggcaagggcaacgccgccggcggcggcggcggcggccgcuccgccaccaccgccggcucccgcgccgucuccgcccucugccuccuccucuccgucggcuccgccgccgccugccuccuccucggcguccaggccgccgcccuccagggccgcgucgccgcccucgaggaggagcgcgagcuccuccgccgcgccggcccccccggcgcccucgacgccugggccgagccccaccucgagcgccuccuccgcgagaagcucgacggccucgccaagauccgcaccgcccgcgaggcccccuccgagugcgucugcccccccggcccccccggccgccgcggcaagcccggccgccgcggcgaccccggcccccccggccaguccggccgcgacggcuaccccggcccccucggccucgacggcaagcccggccuccccggccccaagggcgagaagggcgcccccggcgacuucggcccccgcggcgaccagggccaggacggcgccgccggcccccccggcccccccggcccccccggcgcccgcggcccccccggcgacaccggcaaggacggcccccgcggcgcccagggccccgccggccccaagggcgagcccggccaggacggcgagaugggccccaagggcccccccggccccaagggcgagcccggcguccccggcaagaagggcgacgacggcacccccucccagcccggcccccccggccccaagggcgagcccggcuccaugggcccccgcggcgagaacggcgucgacggcgcccccggccccaagggcgagcccggccaccgcggcaccgacggcgccgccggcccccgcggcgcccccggccucaagggcgagcagggcgacaccgucgucaucgacuacgacggccgcauccucgacgcccucaagggcccccccggcccccagggcccccccggcccccccggcauccccggcgccaagggcgagcucggccuccccggcgcccccggcaucgacggcgagaagggccccaagggccagaagggcgaccccggcgagcccggccccgccggccucaagggcgaggccggcgagaugggccucuccggccuccccggcgccgacggccucaagggcgagaagggcgaguccgccuccgacucccuccaggagucccucgcccagcucaucgucgagcccggcccccccggcccccccggcccccccggccccaugggccuccagggcauccagggccccaagggccucgacggcgccaagggcgagaagggcgccuccggcgagcgcggccccuccggccuccccggccccgucggcccccccggccucaucggccuccccggcaccaagggcgagaagggccgccccggcgagcccggccucgacggcuuccccggcccccgcggcgagaagggcgaccgcuccgagcgcggcgagaagggcgagcgcggcguccccggccgcaagggcgucaagggccagaagggcgagcccggcccccccggccucgaccagcccugccccgucggccccgacggccuccccguccccggcugcuggcacaaguga

SEQ ID NO: 1123 - RNA, 1623 nt, Artificial Sequence
  derived and/or modified sequence opt3 from collagen_XXIII__Homo_sapiens__AAO18361
augggccccggggagagagccggagguggcggggacgcuggaaagggcaacgcagccggugggggaggcggcgggaggagcgcgaccacagcuggaucccgggccgugucugcacugugccuccuucugucagucgguagugccgcugcauguuuguuacugggcguucaggccgcugcccuacaagggcgcguggcggcacucgaagaggaacgagagcugcuucguagagccggaccuccaggcgcucuggaugccugggcagaaccgcacuuggagaggcuccugcgggagaaacuggacggucucgcuaagauccgcacugccagagaagcgcccagcgagugcguauguccuccagggcccccuggaaggcggggcaaaccaggccgccgaggggaucccggaccuccaggucaguccggcagagacggguacccgggacccuuaggccuggaugguaagccugggcuuccaggccccaaaggagaaaagggcgccccuggggacuucggaccaaggggugaucagggccaggacggggcagcuggacccccgggcccucccgguccaccuggggcccggggacccccaggcgauacgggcaaggacgggccccguggagcucaagguccugccggcccaaaaggggagccgggacaggauggcgagaugggucccaaggggccuccaggccccaaaggagaaccuggcgugccagggaagaaaggagacgauggcacccccucucagccggguccuccagggcccaagggagagccuggcucgauggguccccgcggcgaaaauggggucgacggagcaccaggcccuaagggggagcccggacauagaggcacagacggugccgcugggccaaggggagcgccgggcuugaaaggugaacagggcgauacugugguuauugacuaugaugggcggauacuggacgcacuaaagggaccucccggcccacaagggcccccuggaccacccggcaucccuggugccaaaggggagcucggacugccgggcgcuccagguauugauggcgagaaggggcccaaaggacagaagggcgacccuggggaaccaggacccgccggccuuaaaggugaggcaggggaaaugggacugucaggcuugccuggcgccgaugggcucaagggagagaagggugaaagcgcuagugacucccugcaggagucuuuagcccagcugaucguggagccggggcccccaggcccucccggaccaccuggccccaugggucuccaagggauucagggaccaaaaggccuugauggcgcaaagggggaaaaaggagcgagcggugagcgaggcccguccgggcugccuggacccgucggcccacccgguuugaucgggcuaccuggaaccaagggcgaaaaaggccgcccaggggagcccggacuggacgguuuuccuggcccgagaggggaaaagggagauaggucagagcggggcgagaagggugaacgcggggugccaggaagaaaaggcguaaagggccagaaaggggagcccggaccucccggucucgaccaaccaugcccuguuggccccgacgggcugccagugccuggauguuggcacaaguga

SEQ ID NO: 1124 - RNA, 1623 nt, Artificial Sequence
  derived and/or modified sequence opt4 from collagen_XXIII__Homo_sapiens__AAO18361
augggccccggcgagagagccggcggcggcggcgacgccggcaagggcaacgccgccggcggcggcggcggcggcagaagcgccaccaccgccggcagcagagccgugagcgcccugugccugcugcugagcgugggcagcgccgccgccugccugcugcugggcgugcaggccgccgcccugcagggcagaguggccgcccuggaggaggagagagagcugcugagaagagccggcccccccggcgcccuggacgccugggccgagccccaccuggagagacugcugagagagaagcuggacggccuggccaagaucagaaccgccagagaggcccccagcgagugcgugugcccccccggcccccccggcagaagaggcaagcccggcagaagaggcgaccccggcccccccggccagagcggcagagacggcuaccccggcccccugggccuggacggcaagcccggccugcccggccccaagggcgagaagggcgcccccggcgacuucggccccagaggcgaccagggccaggacggcgccgccggcccccccggcccccccggcccccccggcgccagaggcccccccggcgacaccggcaaggacggccccagaggcgcccagggccccgccggccccaagggcgagcccggccaggacggcgagaugggccccaagggcccccccggccccaagggcgagcccggcgugcccggcaagaagggcgacgacggcacccccagccagcccggcccccccggccccaagggcgagcccggcagcaugggccccagaggcgagaacggcguggacggcgcccccggccccaagggcgagcccggccacagaggcaccgacggcgccgccggccccagaggcgcccccggccugaagggcgagcagggcgacaccguggugaucgacuacgacggcagaauccuggacgcccugaagggcccccccggcccccagggcccccccggcccccccggcauccccggcgccaagggcgagcugggccugcccggcgcccccggcaucgacggcgagaagggccccaagggccagaagggcgaccccggcgagcccggccccgccggccugaagggcgaggccggcgagaugggccugagcggccugcccggcgccgacggccugaagggcgagaagggcgagagcgccagcgacagccugcaggagagccuggcccagcugaucguggagcccggcccccccggcccccccggcccccccggccccaugggccugcagggcauccagggccccaagggccuggacggcgccaagggcgagaagggcgccagcggcgagagaggccccagcggccugcccggccccgugggcccccccggccugaucggccugcccggcaccaagggcgagaagggcagacccggcgagcccggccuggacggcuuccccggccccagaggcgagaagggcgacagaagcgagagaggcgagaagggcgagagaggcgugcccggcagaaagggcgugaagggccagaagggcgagcccggcccccccggccuggaccagcccugccccgugggccccgacggccugcccgugcccggcugcuggcacaaguga

SEQ ID NO: 1125 - RNA, 1623 nt, Artificial Sequence
  derived and/or modified sequence opt5 from collagen_XXIII__Homo_sapiens__AAO18361
augggccccggggagagagccggaggcgggggagacgcuggcaaggggaacgccgcgggaggcggcgggggaggccggagcgcuaccacagccgggucccgcgccgugucugcucugugccuccugcuuagcgucggauccgccgcugccugucugcuccugggcguucaggcggccgcccuucaagggagaguggcugcucuggaagaggaacgggagcuccugcgcagagccggaccuccgggcgcgcuggaugccugggcugaaccccaccucgagcggcugcuucgcgagaaacuggacggccucgccaagaucagaacggcucgggaagccccuucugagugcgugugucccccugggcccccuggacgcagaggcaaaccggggcggcgcggagaucccggcccucccgggcagagcggaagagacggcuacccuggcccccuggggcuugauggaaagccgggccugccugggcccaaaggagaaaagggcgccccuggggacuucggcccccggggagaucagggccaggacggggcugcgggacccccuggcccgcccgggccucccggagcccgcggcccucccggggauaccggcaaggacggaccgagaggcgcucaagggccugccggacccaaaggcgagccugggcaggauggagagaugggccccaaggggccucccggcccgaaaggagaaccuggcguccccgggaagaaaggagacgauggcacacccucccagccugggccgcccggaccuaagggcgagcccgggucuaugggcccucggggagaaaauggcguggacggggcccccggaccuaagggcgagcccgggcauagaggaaccgacggcgcugccggcccgcgcggggcgccuggacucaaaggcgaacagggggauacaguugugauugacuaugauggacggauccuggacgcucugaaggggcccccuggcccccaaggaccgccugggcccccuggcauucccggcgccaaaggagagcucggccugcccggggccccuggaaucgauggcgagaaggggccgaaaggacagaagggcgaccccggcgaaccugggcccgcuggacuuaaaggcgaggccggggaaaugggacugagcggccucccuggggcugauggacugaagggcgagaagggcgaauccgccagcgacucucuucaggagucccuggcgcagcucauugucgagcccgggccuccgggacccccugggcccccuggccccaugggacugcaaggcauccaggggccgaaaggacuggauggcgccaagggcgaaaaaggggcuagcggagagagaggcccuucugggcuccccggacccgugggcccucccgggcugaucggacuuccuggcaccaagggcgaaaaagggcgcccgggagagcccggccuggacggguuuccuggaccccggggcgaaaagggggauagauccgagcgcggagagaagggcgaacggggcguuccugggagaaaaggagugaagggccagaaaggggagcccggaccgccuggccucgaccaacccugcccugucgggcccgacggccugccugugcccggauguuggcacaaguga

SEQ ID NO: 1126 - protein, 163 aa, Artificial Sequence
  COX-2__Homo_sapiens__Q6ZYK7
MLARALLLCAVLALSHTANPCCSHPCQNRGVCMSVGFDQYKCDCTRTGFYGENCSTPEFLTRIKLFLKPTPNTVHYILTHFKGFWNVVNNIPFLRNAIMSYVLTSRSHLIDSPPTYNADYGYKSWEAFSNLSYYTRALPPVPDDCPTPLGVKALHASVFQDRS

SEQ ID NO: 1127 - RNA, 492 nt, Artificial Sequence
  COX-2__Homo_sapiens__CAG25548
augcucgcccgcgcccugcugcugugcgcgguccuggcgcucagccauacagcaaauccuugcuguucccacccaugucaaaaccgagguguauguaugagugugggauuugaccaguauaagugcgauuguacccggacaggauucuauggagaaaacugcucaacaccggaauuuuugacaagaauaaaauuauuucugaaacccacuccaaacacagugcacuacauacuuacccacuucaagggauuuuggaacguugugaauaacauucccuuccuucgaaaugcaauuaugaguuauguguugacauccagaucacauuugauugacaguccaccaacuuacaaugcugacuauggcuacaaaagcugggaagccuucucuaaccucuccuauuauacuagagcccuuccuccugugccugaugauugcccgacucccuugggugucaaagcacuucacgcaucaguuuuucaagacagaucauaa

SEQ ID NO: 1128 - RNA, 492 nt, Artificial Sequence
  derived and/or modified sequence opt1 from COX-2__Homo_sapiens__CAG25548
augcuggcccgcgcccuccugcugugcgcggugcucgcccugagccacaccgccaaccccugcugcucccaccccugccagaaccggggcgucugcaugagcgugggguucgaccaguacaagugcgacugcacccgcaccggcuucuacggggagaacugcuccacccccgaguuccugacccggaucaagcuguuccucaagcccacccccaacacggugcacuacauccugacccacuucaagggcuucuggaacgucgugaacaacaucccguuccuccgcaacgccaucaugagcuacgugcugaccucccggagccaccugaucgacuccccgcccaccuacaacgccgacuacggguacaagagcugggaggcguucuccaaccucagcuacuacacgcgcgcccugccgcccguccccgacgacugccccacgccccugggcgugaaggcccuccacgccuccguguuccaggaccggagcuga

SEQ ID NO: 1129 - RNA, 492 nt, Artificial Sequence
  derived and/or modified sequence opt2 from COX-2__Homo_sapiens__CAG25548
augcucgcccgcgcccuccuccucugcgccguccucgcccucucccacaccgccaaccccugcugcucccaccccugccagaaccgcggcgucugcauguccgucggcuucgaccaguacaagugcgacugcacccgcaccggcuucuacggcgagaacugcuccacccccgaguuccucacccgcaucaagcucuuccucaagcccacccccaacaccguccacuacauccucacccacuucaagggcuucuggaacgucgucaacaacauccccuuccuccgcaacgccaucauguccuacguccucaccucccgcucccaccucaucgacuccccccccaccuacaacgccgacuacggcuacaaguccugggaggccuucuccaaccucuccuacuacacccgcgcccucccccccguccccgacgacugccccaccccccucggcgucaaggcccuccacgccuccgucuuccaggaccgcuccuga

SEQ ID NO: 1130 - RNA, 492 nt, Artificial Sequence
  derived and/or modified sequence opt3 from COX-2__Homo_sapiens__CAG25548
augcuggccagagcucuccuucugugcgcaguguuggccuuaagccacaccgcgaaccccuguugcucccauccuugucagaauaggggcgucugcaugucuguuggguucgaccaauacaagugugauugcacacggacuggauuuuauggugagaacuguucaacgccagaguuccugacccgcaucaaacuauuucucaagccgacacccaauacugugcacuacauucugacccauuucaaaggcuuuuggaacguagugaauaacauaccuuuccuucgaaaugcuaucaugaguuauguccugacaagccguucccacuugauugacucuccacccaccuacaacgccgauuauggguacaagucgugggaagcauuuucaaaucucagcuauuacacuagagcccugccuccagugcccgacgauugcccuacaccacugggaguuaaagcucuccaugcaaguguguuccaggacagguccuga

SEQ ID NO: 1131 - RNA, 492 nt, Artificial Sequence
  derived and/or modified sequence opt4 from COX-2__Homo_sapiens__CAG25548
augcuggccagagcccugcugcugugcgccgugcuggcccugagccacaccgccaaccccugcugcagccaccccugccagaacagaggcgugugcaugagcgugggcuucgaccaguacaagugcgacugcaccagaaccggcuucuacggcgagaacugcagcacccccgaguuccugaccagaaucaagcuguuccugaagcccacccccaacaccgugcacuacauccugacccacuucaagggcuucuggaacguggugaacaacauccccuuccugagaaacgccaucaugagcuacgugcugaccagcagaagccaccugaucgacagcccccccaccuacaacgccgacuacggcuacaagagcugggaggccuucagcaaccugagcuacuacaccagagcccugccccccgugcccgacgacugccccaccccccugggcgugaaggcccugcacgccagcguguuccaggacagaagcuga

SEQ ID NO: 1132 - RNA, 492 nt, Artificial Sequence
  derived and/or modified sequence opt5 from COX-2__Homo_sapiens__CAG25548
augcuggccagagcucuccugcuuugcgccgugcuggcgcucagccacaccgcuaaccccuguugcucccauccuugucagaaucggggcgucugcaugucuguuggguucgaccaauacaagugugauugcacccgcacgggauuuuauggcgagaacuguagcaccccggaauuucugacaagaaucaaacuuuuccugaagcccaccccuaauacagugcacuacauucucacccauuucaaaggguuuuggaacguggucaauaacauccccuuccugcggaaugccauuauguccuaugugcugacaucucgcagccaccucaucgacuccccucccaccuacaacgccgauuauggauacaagucuugggaggcuuuuagcaaucuguccuauuacacgagagcccuuccuccgguucccgacgauugcccuacaccccugggcgugaaagcucuccaugccagcgucuuccaggaccggucuuga

SEQ ID NO: 1133 - protein, 543 aa, Artificial Sequence
  CP1B1__Homo_sapiens__Q16678
MGTSLSPNDPWPLNPLSIQQTTLLLLLSVLATVHVGQRLLRQRRRQLRSAPPGPFAWPLIGNAAAVGQAAHLSFARLARRYGDVFQIRLGSCPIVVLNGERAIHQALVQQGSAFADRPAFASFRVVSGGRSMAFGHYSEHWKVQRRAAHSMMRNFFTRQPRSRQVLEGHVLSEARELVALLVRGSADGAFLDPRPLTVVAVANVMSAVCFGCRYSHDDPEFRELLSHNEEFGRTVGAGSLVDVMPWLQYFPNPVRTVFREFEQLNRNFSNFILDKFLRHCESLRPGAAPRDMMDAFILSAEKKAAGDSHGGGARLDLENVPATITDIFGASQDTLSTALQWLLLLFTRYPDVQTRVQAELDQVVGRDRLPCMGDQPNLPYVLAFLYEAMRFSSFVPVTIPHATTANTSVLGYHIPKDTVVFVNQWSVNHDPLKWPNPENFDPARFLDKDGLINKDLTSRVMIFSVGKRRCIGEELSKMQLFLFISILAHQCDFRANPNEPAKMNFSYGLTIKPKSFKVNVTLRESMELLDSAVQNLQAKETCQ

SEQ ID NO: 1134 - RNA, 1632 nt, Artificial Sequence
  CP1B1__Homo_sapiens__AAC50809
augggcaccagccucagcccgaacgacccuuggccgcuaaacccgcuguccauccagcagaccacgcuccugcuacuccugucggugcuggccacugugcaugugggccagcggcugcugaggcaacggaggcggcagcuccgguccgcgcccccgggcccguuugcguggccacugaucggaaacgcggcggcggugggccaggcggcucaccucucguucgcucgccuggcgcggcgcuacggcgacguuuuccagauccgccugggcagcugccccauaguggugcugaauggcgagcgcgccauccaccaggcccuggugcagcagggcucggccuucgccgaccggccggccuucgccuccuuccgugugguguccggcggccgcagcauggcuuucggccacuacucggagcacuggaaggugcagcggcgcgcagcccacagcaugaugcgcaacuucuucacgcgccagccgcgcagccgccaaguccucgagggccacgugcugagcgaggcgcgcgagcugguggcgcugcuggugcgcggcagcgcggacggcgccuuccucgacccgaggccgcugaccgucguggccguggccaacgucaugagugccguguguuucggcugccgcuacagccacgacgaccccgaguuccgugagcugcucagccacaacgaagaguucgggcgcacggugggcgcgggcagccugguggacgugaugcccuggcugcaguacuuccccaacccggugcgcaccguuuuccgcgaauucgagcagcucaaccgcaacuucagcaacuucauccuggacaaguucuugaggcacugcgaaagccuucggcccggggccgccccccgcgacaugauggacgccuuuauccucucugcggaaaagaaggcggccggggacucgcacggugguggcgcgcggcuggauuuggagaacguaccggccacuaucacugacaucuucggcgccagccaggacacccuguccaccgcgcugcaguggcugcuccuccucuucaccagguauccugaugugcagacucgagugcaggcagaauuggaucaggucguggggagggaccgucugccuuguaugggugaccagcccaaccugcccuauguccuggccuuccuuuaugaagccaugcgcuucuccagcuuugugccugucacuauuccucaugccaccacugccaacaccucugucuugggcuaccacauucccaaggacacugugguuuuugucaaccaguggucugugaaucaugacccacugaaguggccuaacccggagaacuuugauccagcucgauucuuggacaaggacggccucaucaacaaggaccugaccagcagagugaugauuuuuucagugggcaaaaggcggugcauuggcgaagaacuuucuaagaugcagcuuuuucucuucaucuccauccuggcucaccagugcgauuucagggccaacccaaaugagccugcgaaaaugaauuucaguuauggucuaaccauuaaacccaagucauuuaaagucaaugucacucucagagaguccauggagcuccuugauagugcuguccaaaauuuacaagccaaggaaacuugccaauaa

SEQ ID NO: 1135 - RNA, 1632 nt, Artificial Sequence
  derived and/or modified sequence opt1 from CP1B1__Homo_sapiens__AAC50809
augggcaccagccugucccccaacgacccguggccccucaacccccugagcauccagcagaccacgcugcuccugcugcucuccgugcuggccaccguccacguggggcagcgccugcuccggcagcgccggcgccagcugcggagcgcgcccccgggccccuucgccuggccccugaucgggaacgccgccgccgugggccaggccgcgcaccucuccuucgcccgccuggcccggcgcuacggggacgucuuccagauccggcugggcagcugccccaucguggugcucaacggcgagcgcgccauccaccaggcgcugguccagcagggguccgccuucgccgaccggccggccuucgccagcuuccgcgugguguccggcgggcggagcauggcguucggccacuacuccgagcacuggaagguccagcgccgggccgcccacagcaugaugcgcaacuucuucacccggcagccccgcucccgccaggugcuggaggggcacgugcucagcgaggcccgggagcuggucgcccugcucgugcggggcuccgcggacggcgccuuccuggacccccgcccccugaccguggucgccguggccaacgugaugagcgccgucugcuucgggugccgcuacucccacgacgacccggaguuccgggagcuccugagccacaacgaggaguucggccgcacggugggggcgggcucccugguggacgucaugcccuggcuccaguacuuccccaaccccgugcggaccguguuccgcgaguucgagcagcugaaccggaacuucagcaacuucauccuggacaaguuccuccgccacugcgagagccugcggccgggcgccgcgccccgcgacaugauggacgccuucauccuguccgccgagaagaaggccgccggggacagccacggcgggggcgcccggcucgaccuggagaacguccccgccaccaucaccgacaucuucggggcgucccaggacacgcugagcaccgcccuccaguggcugcugcuccuguucacccgcuaccccgacgugcagacccggguccaggccgagcuggaccagguggugggccgcgaccggcucccgugcaugggcgaccagcccaaccugcccuacguccuggccuuccucuacgaggccaugcgcuucuccagcuucgugcccgugacgaucccgcacgcgaccaccgccaacaccuccguccugggguaccacauccccaaggacacggugguguucgucaaccaguggagcgugaaccacgacccccugaaguggcccaacccggagaacuucgaccccgcccgguuccucgacaaggacggccugaucaacaaggaccugaccucccgcgugaugaucuucagcgucgggaagcggcgcugcaucggcgaggagcuguccaagaugcagcuguuccucuucaucagcauccuggcccaccagugcgacuuccgggccaaccccaacgagccggcgaagaugaacuucuccuacgggcucaccaucaagcccaagagcuucaaggugaacgugacccugcgcgaguccauggagcugcucgacagcgccguccagaaccugcaggccaaggagacgugccaguga

SEQ ID NO: 1136 - RNA, 1632 nt, Artificial Sequence
  derived and/or modified sequence opt2 from CP1B1__Homo_sapiens__AAC50809
augggcaccucccucucccccaacgaccccuggccccucaacccccucuccauccagcagaccacccuccuccuccuccucuccguccucgccaccguccacgucggccagcgccuccuccgccagcgccgccgccagcuccgcuccgccccccccggccccuucgccuggccccucaucggcaacgccgccgccgucggccaggccgcccaccucuccuucgcccgccucgcccgccgcuacggcgacgucuuccagauccgccucggcuccugccccaucgucguccucaacggcgagcgcgccauccaccaggcccucguccagcagggcuccgccuucgccgaccgccccgccuucgccuccuuccgcgucgucuccggcggccgcuccauggccuucggccacuacuccgagcacuggaagguccagcgccgcgccgcccacuccaugaugcgcaacuucuucacccgccagccccgcucccgccagguccucgagggccacguccucuccgaggcccgcgagcucgucgcccuccucguccgcggcuccgccgacggcgccuuccucgacccccgcccccucaccgucgucgccgucgccaacgucauguccgccgucugcuucggcugccgcuacucccacgacgaccccgaguuccgcgagcuccucucccacaacgaggaguucggccgcaccgucggcgccggcucccucgucgacgucaugcccuggcuccaguacuuccccaaccccguccgcaccgucuuccgcgaguucgagcagcucaaccgcaacuucuccaacuucauccucgacaaguuccuccgccacugcgagucccuccgccccggcgccgccccccgcgacaugauggacgccuucauccucuccgccgagaagaaggccgccggcgacucccacggcggcggcgcccgccucgaccucgagaacguccccgccaccaucaccgacaucuucggcgccucccaggacacccucuccaccgcccuccaguggcuccuccuccucuucacccgcuaccccgacguccagacccgcguccaggccgagcucgaccaggucgucggccgcgaccgccuccccugcaugggcgaccagcccaaccuccccuacguccucgccuuccucuacgaggccaugcgcuucuccuccuucguccccgucaccaucccccacgccaccaccgccaacaccuccguccucggcuaccacauccccaaggacaccgucgucuucgucaaccagugguccgucaaccacgacccccucaaguggcccaaccccgagaacuucgaccccgcccgcuuccucgacaaggacggccucaucaacaaggaccucaccucccgcgucaugaucuucuccgucggcaagcgccgcugcaucggcgaggagcucuccaagaugcagcucuuccucuucaucuccauccucgcccaccagugcgacuuccgcgccaaccccaacgagcccgccaagaugaacuucuccuacggccucaccaucaagcccaaguccuucaaggucaacgucacccuccgcgaguccauggagcuccucgacuccgccguccagaaccuccaggccaaggagaccugccaguga

SEQ ID NO: 1137 - RNA, 1632 nt, Artificial Sequence
  derived and/or modified sequence opt3 from CP1B1__Homo_sapiens__AAC50809
augggcaccagccugucccccaacgacccuuggccacucaauccgcuuucuauccagcaaacaacucuguuguuacugcuaucagugcucgccacgguccacguugggcagagacugcuuaggcagcggcgccgacagcugcguagugcucccccuggaccauucgcauggcccuugauugguaacgccgcggcugugggccaagccgcacaucucagcuuugccagacuggcuaggcgguacggggauguauuccagauacgccugggauccugcccuaucgugguccucaauggcgagagagcaauucaccaggccuuagugcagcaagguucugcuuuugccgacaggccagcguucgcaucguuucggguugugucagggggacgcagcauggccuucggccauuauagugaacacuggaagguccagagacgagcugcccauuccaugaugaggaacuuuuucacccggcagccccguucucgccaggugcuggagggccacguacuuagcgaagcaagagaguugguugcucugcuagugaggggguccgccgauggagcguuucucgacccucggccacugacagucguggccguggcaaaugucaugucagcuguuuguuucgguugccgauacagucacgaugacccggaauuucgcgagcuucugagccauaacgaggaguucggcagaacugugggggccggaucuuugguagaugugaugcccuggcuccaauauuuuccuaauccagucaggaccguguuccgggaguucgaacagcugaaccgcaauuuuuccaacuucaucuuagacaaauuucugagacacugugagucacucaggcccggcgcugccccucgugauaugauggacgcauucauucuuagcgccgagaagaaagcugcgggugauagucaugggggaggcgcacggcuggacuuggaaaauguuccagccacaaucaccgauauauuuggcgcuucucaggacacucuauccacagcccugcaauggcuccugcuucuguucacccgauaccccgacgugcagacgagaguccaggcagaguuggaucaggugguagggagggaccgccucccgugcaugggagaucaaccuaaccugcccuauguuuuagccuuucuguacgaagcuaugcgguucagcucguuugugccagucacuaucccucacgccaccacagcaaauacuucugugcuagguuaucacauucccaaggacaccgucguguucguuaaccagugguccgugaaucaugauccacucaaauggcccaacccugagaacuuugacccagcgagauuccuggauaaggacggccuuaucaauaaggauuugacaucaaggguaaugauuuuuagugucgggaaacgccgauguaucggagaagaacugagcaagaugcaacucuuccuguucauauccauucuugcucaccagugcgacuuucgggccaacccgaaugagcccgcaaaaaugaacuucucuuacggccugaccaucaagccuaagagcuuuaaagugaauguuacguugcgugaaucaauggagcuccuggauagugccgugcagaacuuacaggcuaaggaaacuugucaguga

SEQ ID NO: 1138 - RNA, 1632 nt, Artificial Sequence
  derived and/or modified sequence opt4 from CP1B1__Homo_sapiens__AAC50809
augggcaccagccugagccccaacgaccccuggccccugaacccccugagcauccagcagaccacccugcugcugcugcugagcgugcuggccaccgugcacgugggccagagacugcugagacagagaagaagacagcugagaagcgccccccccggccccuucgccuggccccugaucggcaacgccgccgccgugggccaggccgcccaccugagcuucgccagacuggccagaagauacggcgacguguuccagaucagacugggcagcugccccaucguggugcugaacggcgagagagccauccaccaggcccuggugcagcagggcagcgccuucgccgacagacccgccuucgccagcuucagaguggugagcggcggcagaagcauggccuucggccacuacagcgagcacuggaaggugcagagaagagccgcccacagcaugaugagaaacuucuucaccagacagcccagaagcagacaggugcuggagggccacgugcugagcgaggccagagagcugguggcccugcuggugagaggcagcgccgacggcgccuuccuggaccccagaccccugaccgugguggccguggccaacgugaugagcgccgugugcuucggcugcagauacagccacgacgaccccgaguucagagagcugcugagccacaacgaggaguucggcagaaccgugggcgccggcagccugguggacgugaugcccuggcugcaguacuuccccaaccccgugagaaccguguucagagaguucgagcagcugaacagaaacuucagcaacuucauccuggacaaguuccugagacacugcgagagccugagacccggcgccgcccccagagacaugauggacgccuucauccugagcgccgagaagaaggccgccggcgacagccacggcggcggcgccagacuggaccuggagaacgugcccgccaccaucaccgacaucuucggcgccagccaggacacccugagcaccgcccugcaguggcugcugcugcuguucaccagauaccccgacgugcagaccagagugcaggccgagcuggaccagguggugggcagagacagacugcccugcaugggcgaccagcccaaccugcccuacgugcuggccuuccuguacgaggccaugagauucagcagcuucgugcccgugaccaucccccacgccaccaccgccaacaccagcgugcugggcuaccacauccccaaggacaccgugguguucgugaaccaguggagcgugaaccacgacccccugaaguggcccaaccccgagaacuucgaccccgccagauuccuggacaaggacggccugaucaacaaggaccugaccagcagagugaugaucuucagcgugggcaagagaagaugcaucggcgaggagcugagcaagaugcagcuguuccuguucaucagcauccuggcccaccagugcgacuucagagccaaccccaacgagcccgccaagaugaacuucagcuacggccugaccaucaagcccaagagcuucaaggugaacgugacccugagagagagcauggagcugcuggacagcgccgugcagaaccugcaggccaaggagaccugccaguga

SEQ ID NO: 1139 - RNA, 1632 nt, Artificial Sequence
  derived and/or modified sequence opt5 from CP1B1__Homo_sapiens__AAC50809
augggcaccagccugucccccaacgacccuuggccgcucaauccccugucuauccagcaaacaacgcuucugcuccugcuuagcgugcuggccaccguccacguugggcagagacuccugcggcagcgcagacggcagcugcgcuccgcuccucccggaccuuucgccuggccccucauuggcaacgcggcugccguggggcaagccgcucaucugucuuuugccagacuugcucggcgcuacggagauguguuccagaucagacugggcagcugcccuauugucgugcucaauggggagcgggccauccaccaggcgcugguucagcaaggauccgccuuugcugaccgcccggccuucgcuucuuuuagaguggucagcggcggccgguccauggccuucgggcauuauagcgaacacuggaaggugcagcgcagagcggcccauucuaugaugcggaacuuuuucacacgccagcccagaucccggcagguucuugagggacacgugcugagcgaagcuagagagcucgucgcccugcuggugcgcggcucugcugauggggccuuucucgacccucggccccugaccguggucgccguugcuaaugugauguccgcgguguguuucggaugcagauacagccacgaugacccugaauuucgcgagcuucugucucauaacgaggaguucggccggacagucggggccggaucccucguggauguuaugcccuggcugcaauauuuuccgaauccugugagaaccgucuuccgcgaguucgaacagcuuaaccggaauuuuagcaacuucauucuggacaaauuucucagacacugugagucccugcgccccggcgcugccccucgggauaugauggacgccuucauccugucugcugagaagaaagccgcgggcgauagccaugggggaggcgcuagacucgaccuggaaaaugugcccgccacaaucaccgauauuuuuggggccucccaggacacgcuuagcaccgcucugcaauggcuccugcuucuguucacacgcuaccccgacguucagacccgggugcaggccgagcucgaucaggucgugggaagagaccggcugccuugcaugggcgaucaaccgaaccugcccuauguccucgcuuuucuguacgaagccaugcgcuucucuuccuuugugccuguuacaaucccccacgcgaccacggccaauacaagcgugcuuggguaucacauuccuaaggacaccgucguguucguuaaccaguggucugugaaucaugauccccugaaauggccgaacccugagaacuuugaccccgcuagauuccucgauaaggacggacugaucaauaaggaucugacaagccgggucaugauuuuuagcgugggcaaaagacgcuguaucggcgaagaacuuucuaagaugcaacucuuccuguucauuagcauccuggcccaccagugcgacuuucgggcuaacccuaaugagcccgccaaaaugaacuucuccuacgggcucaccaucaagccuaaauccuuuaaggugaauguuacccugagagaaucuauggagcuucuggauuccgcgguccagaaccuccaggccaaggaaacaugucaguga

SEQ ID NO: 1140 - protein, 110 aa, Artificial Sequence
  CSAG2__Homo_sapiens__Q9Y5P2-2
MWMGLIQLVEGVKRKDQGFLEKEFYHKTNIKMRCEFLACWPAFTVLGEAWRDQVDWSRLLRDAGLVKMSRKPRASSPLSNNHPPTPKRFPRQPGREKGPIKEVPGTKGSP

SEQ ID NO: 1141 - RNA, 333 nt, Artificial Sequence
  CSAG2__Homo_sapiens__NM_001129828
auguggaugggccucauccaauuaguugaagguguuaagagaaaagaccaagguuuccuggaaaaggaauucuaccacaagacuaacauaaaaaugcgcugugaguuucuagccugcuggccugccuucacuguccugggggaggcuuggagagaccagguggacuggaguagacuguugagagacgcuggucuggugaagauguccaggaaaccacgagccuccagcccauuguccaacaaccacccaccaacaccaaagagguucccaagacaacccggaagggaaaagggacccaucaaggaaguuccaggaacaaaaggcucucccuaa

SEQ ID NO: 1142 - RNA, 333 nt, Artificial Sequence
  derived and/or modified sequence opt1 from CSAG2__Homo_sapiens__NM_001129828
auguggaugggccugauccagcucguggagggggucaagcgcaaggaccagggcuuccuggagaaggaguucuaccacaagaccaacaucaagaugcggugcgaguuccuggccugcuggcccgccuucaccgugcucggggaggcguggcgcgaccagguggacuggagccggcugcugcgcgacgccggccucgucaagaugucccggaagccgcgcgccagcagcccccuguccaacaaccacccgcccacgcccaagcgguucccccgccagcccgggcgggagaagggccccaucaaggaggugccgggcaccaaggggucccccuga

SEQ ID NO: 1143 - RNA, 333 nt, Artificial Sequence
  derived and/or modified sequence opt2 from CSAG2__Homo_sapiens__NM_001129828
auguggaugggccucauccagcucgucgagggcgucaagcgcaaggaccagggcuuccucgagaaggaguucuaccacaagaccaacaucaagaugcgcugcgaguuccucgccugcuggcccgccuucaccguccucggcgaggccuggcgcgaccaggucgacuggucccgccuccuccgcgacgccggccucgucaagaugucccgcaagccccgcgccuccuccccccucuccaacaaccacccccccacccccaagcgcuucccccgccagcccggccgcgagaagggccccaucaaggagguccccggcaccaagggcucccccuga

SEQ ID NO: 1144 - RNA, 333 nt, Artificial Sequence
  derived and/or modified sequence opt3 from CSAG2__Homo_sapiens__NM_001129828
auguggaugggccugauccagcucguggagggggucaagagaaaagaccaaggauuccuugaaaaggaguuuuaccacaaaaccaacauuaagaugaggugcgaguuccuggccuguuggcccgcuuuuacaguuuugggugaagcauggcgggaucagguggacuggagccgcuuacugcgagaugccggccuaguaaaaaugucccguaagccuagagcgucuucaccacucaguaauaaccauccgcccacuccuaagagguucccacggcagcccgggcgcgaaaaaggaccuauaaaggaggugccaggcacgaaagguagccccuga

SEQ ID NO: 1145 - RNA, 333 nt, Artificial Sequence
  derived and/or modified sequence opt4 from CSAG2__Homo_sapiens__NM_001129828
auguggaugggccugauccagcugguggagggcgugaagagaaaggaccagggcuuccuggagaaggaguucuaccacaagaccaacaucaagaugagaugcgaguuccuggccugcuggcccgccuucaccgugcugggcgaggccuggagagaccagguggacuggagcagacugcugagagacgccggccuggugaagaugagcagaaagcccagagccagcagcccccugagcaacaaccacccccccacccccaagagauuccccagacagcccggcagagagaagggccccaucaaggaggugcccggcaccaagggcagccccuga

SEQ ID NO: 1146 - RNA, 333 nt, Artificial Sequence
  derived and/or modified sequence opt5 from CSAG2__Homo_sapiens__NM_001129828
auguggaugggccugauccagcucguggagggggucaagagaaaagaccaaggauuccuggaaaaggaguuuuaccacaaaaccaacauuaagaugcggugcgaguuccuugccuguuggcccgcuuuuacaguucugggcgaagccuggcgcgaucagguggacuggagcagacuccugcgggaugcggggcuugugaaaaugucccgcaagccuagagcuucuagcccgcuguccaauaaccaucccccuacgcccaagcgguucccucgccagcccggaagagaaaaaggcccuaucaaggaggucccggggaccaaaggaucucccuga

SEQ ID NO: 1147 - protein, 127 aa, Artificial Sequence
  CSAG2__Homo_sapiens__Q9Y5P2
MWMGLIQLVEGVKRKDQGFLEKEFYHKTNIKMRCEFLACWPAFTVLGEAWRDQVDWSRLLRDAGLVKMSRKPRASSPLSNNHPPTPKRRGSGRHPLNPGPEALSKFPRQPGREKGPIKEVPGTKGSP

SEQ ID NO: 1148 - RNA, 384 nt, Artificial Sequence
  CSAG2__Homo_sapiens__NM_001129826
auguggaugggccucauccaauuaguugaagguguuaagagaaaagaccaagguuuccuggaaaaggaauucuaccacaagacuaacauaaaaaugcgcugugaguuucuagccugcuggccugccuucacuguccugggggaggcuuggagagaccagguggacuggaguagacuguugagagacgcuggucuggugaagauguccaggaaaccacgagccuccagcccauuguccaacaaccacccaccaacaccaaagaggcgaggaaguggaaggcauccucucaacccuggcccagaagcccuaucaaaguucccaagacaacccggaagggaaaagggacccaucaaggaaguuccaggaacaaaaggcucucccuaa

SEQ ID NO: 1149 - RNA, 384 nt, Artificial Sequence
  derived and/or modified sequence opt1 from CSAG2__Homo_sapiens__NM_001129826
auguggaugggccugauccagcucguggagggggucaagcgcaaggaccagggcuuccuggagaaggaguucuaccacaagaccaacaucaagaugcggugcgaguuccuggccugcuggcccgccuucaccgugcucggggaggcguggcgcgaccagguggacuggagccggcugcugcgcgacgccggccucgucaagaugucccggaagccgcgcgccagcagcccccuguccaacaaccacccgcccacgcccaagcggcgcggguccggccggcacccccugaaccccggccccgaggcccucagcaaguucccgcgccagcccgggcgggagaagggccccaucaaggaggugcccgggaccaagggcuccccguga

SEQ ID NO: 1150 - RNA, 384 nt, Artificial Sequence
  derived and/or modified sequence opt2 from CSAG2__Homo_sapiens__NM_001129826
auguggaugggccucauccagcucgucgagggcgucaagcgcaaggaccagggcuuccucgagaaggaguucuaccacaagaccaacaucaagaugcgcugcgaguuccucgccugcuggcccgccuucaccguccucggcgaggccuggcgcgaccaggucgacuggucccgccuccuccgcgacgccggccucgucaagaugucccgcaagccccgcgccuccuccccccucuccaacaaccacccccccacccccaagcgccgcggcuccggccgccacccccucaaccccggccccgaggcccucuccaaguucccccgccagcccggccgcgagaagggccccaucaaggagguccccggcaccaagggcucccccuga

SEQ ID NO: 1151 - RNA, 384 nt, Artificial Sequence
  derived and/or modified sequence opt3 from CSAG2__Homo_sapiens__NM_001129826
auguggaugggccugauccagcucguggagggggucaagagaaaagaccaaggauuccuugaaaaggaguuuuaccacaaaaccaacauuaagaugaggugcgaguuccuggccuguuggcccgcuuuuacaguuuugggugaagcauggcgggaucagguggacuggagccgcuuacugcgagaugccggccuaguaaaaaugucccguaagccuagagcgucuucaccacucaguaauaaccauccgcccacuccuaagaggcgggggagcggacgccacccacugaaucccggcccugaagcucuuuccaaauucccaagacagcccgguagggagaaggggccuauaaaagaggugccaggaacgaagggcucuccguga

SEQ ID NO: 1152 - RNA, 384 nt, Artificial Sequence
  derived and/or modified sequence opt4 from CSAG2__Homo_sapiens__NM_001129826
auguggaugggccugauccagcugguggagggcgugaagagaaaggaccagggcuuccuggagaaggaguucuaccacaagaccaacaucaagaugagaugcgaguuccuggccugcuggcccgccuucaccgugcugggcgaggccuggagagaccagguggacuggagcagacugcugagagacgccggccuggugaagaugagcagaaagcccagagccagcagcccccugagcaacaaccacccccccacccccaagagaagaggcagcggcagacacccccugaaccccggccccgaggcccugagcaaguuccccagacagcccggcagagagaagggccccaucaaggaggugcccggcaccaagggcagccccuga

SEQ ID NO: 1153 - RNA, 384 nt, Artificial Sequence
  derived and/or modified sequence opt5 from CSAG2__Homo_sapiens__NM_001129826
auguggaugggccugauccagcucguggagggggucaagagaaaagaccaaggauuccuggaaaaggaguuuuaccacaaaaccaacauuaagaugcggugcgaguuccuugccuguuggcccgcuuuuacaguucugggcgaagccuggcgcgaucagguggacuggagcagacuccugcgggaugcggggcuugugaaaaugucccgcaagccuagagcuucuagcccgcuguccaauaaccaucccccuacgcccaagcggcgcggaucuggcagacacccucucaaucccgggccugaagcccugagcaaauucccgcggcagcccggacgcgagaagggcccuaucaaagagguccccggcaccaagggguccccuuga

SEQ ID NO: 1154 - protein, 189 aa, Artificial Sequence
  CT45A1__Homo_sapiens__Q5HYN5
MTDKTEKVAVDPETVFKRPRECDSPSYQKRQRMALLARKQGAGDSLIAGSAMSKAKKLMTGHAIPPSQLDSQIDDFTGFSKDRMMQKPGSNAPVGGNVTSSFSGDDLECRETASSPKSQREINADIKRKLVKELRCVGQKYEKIFEMLEGVQGPTAVRKRFFESIIKEAARCMRRDFVKHLKKKLKRMI

SEQ ID NO: 1155 - RNA, 570 nt, Artificial Sequence
  CT45A1__Homo_sapiens__AAI40914
augaccgauaaaacagagaagguggcuguagauccugaaacuguguuuaaacgucccagggaaugugacaguccuucguaucagaaaaggcagaggauggcccuguuggcaaggaaacaaggagcaggagacagccuuauugcaggcucugccauguccaaagcaaagaagcuuaugacaggacaugcuauuccacccagccaauuggauucucagauugaugacuucacugguuucagcaaagauaggaugaugcagaaaccugguagcaaugcaccugugggaggaaacguuaccagcaguuucucuggagaugaccuagaaugcagagaaacagccuccucucccaaaagccaacgagaaauuaaugcugauauaaaacguaaauuagugaaggaacuccgaugcguuggacaaaaauaugaaaaaaucuucgaaaugcuugaaggagugcaaggaccuacugcagucaggaagcgauuuuuugaauccaucaucaaggaagcagcaagauguaugagacgagacuuuguuaagcaccuuaagaagaaacugaaacguaugauuuga

SEQ ID NO: 1156 - RNA, 570 nt, Artificial Sequence
  derived and/or modified sequence opt1 from CT45A1__Homo_sapiens__AAI40914
augaccgacaagaccgagaagguggccgucgaccccgagacgguguucaagcgcccgcgggagugcgacagccccuccuaccagaagcgccagcggauggcccugcucgcgcgcaagcagggcgccggggacagccugaucgccggcuccgccaugagcaaggccaagaagcugaugaccgggcacgcgaucccgcccucccagcucgacagccagaucgacgacuucaccggcuucuccaaggaccggaugaugcagaagcccgggagcaacgcccccgugggcggcaacgucaccuccagcuucuccggggacgaccuggagugccgcgagacggccagcucccccaagagccagcgggagaucaacgccgacaucaagcgcaagcuggugaaggagcuccggugcgugggccagaaguacgagaagaucuucgagaugcuggaggggguccagggccccaccgcggugcgcaagcgguucuucgaguccaucaucaaggaggccgcccgcugcaugcggcgcgacuucgugaagcaccugaagaagaagcucaagcggaugaucuga

SEQ ID NO: 1157 - RNA, 570 nt, Artificial Sequence
  derived and/or modified sequence opt2 from CT45A1__Homo_sapiens__AAI40914
augaccgacaagaccgagaaggucgccgucgaccccgagaccgucuucaagcgcccccgcgagugcgacucccccuccuaccagaagcgccagcgcauggcccuccucgcccgcaagcagggcgccggcgacucccucaucgccggcuccgccauguccaaggccaagaagcucaugaccggccacgccaucccccccucccagcucgacucccagaucgacgacuucaccggcuucuccaaggaccgcaugaugcagaagcccggcuccaacgcccccgucggcggcaacgucaccuccuccuucuccggcgacgaccucgagugccgcgagaccgccuccucccccaagucccagcgcgagaucaacgccgacaucaagcgcaagcucgucaaggagcuccgcugcgucggccagaaguacgagaagaucuucgagaugcucgagggcguccagggccccaccgccguccgcaagcgcuucuucgaguccaucaucaaggaggccgcccgcugcaugcgccgcgacuucgucaagcaccucaagaagaagcucaagcgcaugaucuga

SEQ ID NO: 1158 - RNA, 570 nt, Artificial Sequence
  derived and/or modified sequence opt3 from CT45A1__Homo_sapiens__AAI40914
augaccgacaagacagagaaaguggccgucgaucccgaaacuguuuucaagagaccuagggagugcgacagcccauccuaccagaaacggcaacgcauggcucugcucgcacgaaagcagggcgccggggauucucuuaucgcgggaucagcuaugaguaaagccaagaagcugaugacgggucacgcaauuccgcccagccaguuggacucccagauagaugacuuuaccggcuucucuaaagaucguaugaugcaaaagccugggucgaacgccccagugggaggcaauguaacaagcucauuuaguggugacgauuuagaauguagagagacugcuuccucucccaaaagccagagggaaaucaacgcagacauuaagcggaaacuggugaaggagcuacgcugcgucgggcagaaguaugagaaaaucuucgaaaugcucgagggagugcagggcccuaccgccguuagaaagagguuuuucgaauccauuaucaaagaggcugcccgguguaugcgccgagauuuugugaagcaucugaaaaagaaacuuaagagaaugauauga

SEQ ID NO: 1159 - RNA, 570 nt, Artificial Sequence
  derived and/or modified sequence opt4 from CT45A1__Homo_sapiens__AAI40914
augaccgacaagaccgagaagguggccguggaccccgagaccguguucaagagacccagagagugcgacagccccagcuaccagaagagacagagaauggcccugcuggccagaaagcagggcgccggcgacagccugaucgccggcagcgccaugagcaaggccaagaagcugaugaccggccacgccaucccccccagccagcuggacagccagaucgacgacuucaccggcuucagcaaggacagaaugaugcagaagcccggcagcaacgcccccgugggcggcaacgugaccagcagcuucagcggcgacgaccuggagugcagagagaccgccagcagccccaagagccagagagagaucaacgccgacaucaagagaaagcuggugaaggagcugagaugcgugggccagaaguacgagaagaucuucgagaugcuggagggcgugcagggccccaccgccgugagaaagagauucuucgagagcaucaucaaggaggccgccagaugcaugagaagagacuucgugaagcaccugaagaagaagcugaagagaaugaucuga

SEQ ID NO: 1160 - RNA, 570 nt, Artificial Sequence
  derived and/or modified sequence opt5 from CT45A1__Homo_sapiens__AAI40914
augaccgacaagacagagaaaguggccgucgaucccgaaacgguuuucaagagaccucgggagugcgacagcccguccuaccagaaacgccaaagaauggcucugcucgcccggaagcagggcgcgggggauucucugaucgcuggaagcgccauguccaaagccaagaaacuuaugaccggccacgcuauucccccuucucagcuggacagccagaucgaugacuuuacaggguucuccaaggaucgcaugaugcaaaagcccggaucuaacgccccugugggcgggaaugugaccagcuccuuuagcggagacgaucucgaauguagagagacagcuucuucccccaaaagccagcgggaaauuaacgccgacaucaagcgcaaacuggucaaggagcuuagaugcgugggccagaaguaugagaaaauuuucgaaaugcuggagggcguucaggggccuaccgcggugcggaagcgcuuuuucgaaucuaucaucaaagaggccgcuagauguaugcggcgcgauuuugucaagcaucucaaaaagaaacugaagagaaugauuuga

SEQ ID NO: 1161 - protein, 264 aa, Artificial Sequence
  CT55__Homo_sapiens__Q8WUE5
MLRLLRLALAFYGRTADPAERQGPQQQGLPQGDTQLTTVQGVVTSFCGDYGMIDESIYFSSDVVTGNVPLKVGQKVNVVVEEDKPHYGLRAIKVDVVPRHLYGAGPSDSGTRVLIGCVTSINEDNIYISNSIYFSIAIVSEDFVPYKGDLLEVEYSTEPGISNIKATSVKPIRCIHTEEVCITSVHGRNGVIDYTIFFTLDSVKLPDGYVPQVDDIVNVVMVESIQFCFIWRAISITPVHKSSSGFQDDGGLGRPKRERRSQSI

SEQ ID NO: 1162 - RNA, 795 nt, Artificial Sequence
  CT55__Homo_sapiens__AAH20662
augcucaggcuucugagacuugcuuuggccuucuacgggaggacggccgacccugcagagcgacagggcccacagcagcagggccucccacaaggugacacccaguugacaacugugcagggaguugucacaaguuucuguggugauuauggcaugauugaugagucgaucuacuucaguagugauguugugacuggcaacgugccucuaaaaguuggacaaaaaguuaaugugguuguggaagaagauaaaccacauuauggauugagagcaaucaagguggauguugugccucgccaucuuuauggugcuggacccucagacucaggaaccagaguuuuaauuggauguguuacuucuauaaaugaagauaauauuuauauuaguaacagcauuuauuuuuccauagccauuguuucugaagauuuugugccuuauaagggugacuuguuagaaguugaauauuccacugagccaggcaucucaaacaucaaggcaacuucugugaagcccauccguuguauucauacggaagaggucugcauuacuagcguacauggaagaaauggggugauagauuauacuauuuuuuucaccuuggauucugugaaacuuccugauggauacguaccucaaguagaugauaucgucaauguggucaugguggagagcauucaguucugcuuuauuuggagagcgauuucuaucaccccagugcauaaauccagcagcggauuccaggaugacggaggccugggacggcccaaaagggaacgucggagccaaagcauuuaa

SEQ ID NO: 1163 - RNA, 795 nt, Artificial Sequence
  derived and/or modified sequence opt1 from CT55__Homo_sapiens__AAH20662
augcugcgccuccugcggcuggcccucgccuucuacggccgcaccgcggaccccgccgagcggcaggggccgcagcagcagggccugccccagggggacacccagcugacgaccgugcagggcgucgugaccagcuucugcggggacuacggcaugaucgacgaguccaucuacuucagcuccgacguggucaccggcaacgugccccucaagguggggcagaaggucaacgugguggucgaggaggacaagccccacuacggccugcgcgccaucaagguggacguggucccgcggcaccuguacggggccggccccagcgacuccgggacgcgcgugcucaucggcugcgugaccagcaucaacgaggacaacaucuacaucuccaacagcaucuacuucuccaucgccaucgucagcgaggacuucgugcccuacaagggcgaccugcuggagguggaguacuccaccgagcccgggaucagcaacaucaaggcgaccuccgucaagccgauccggugcauccacacggaggaggugugcaucaccagcgugcacggccgcaacggggucaucgacuacaccaucuucuucacccucgacuccgugaagcugcccgacggcuacgugccccaggucgacgacaucgugaacgucgugaugguggagagcauccaguucugcuucaucuggcgggccaucuccaucacgcccguccacaagagcuccagcggcuuccaggacgacgggggccuggggcgcccgaagcgggagcgccggagccaguccaucuga

SEQ ID NO: 1164 - RNA, 795 nt, Artificial Sequence
  derived and/or modified sequence opt2 from CT55__Homo_sapiens__AAH20662
augcuccgccuccuccgccucgcccucgccuucuacggccgcaccgccgaccccgccgagcgccagggcccccagcagcagggccucccccagggcgacacccagcucaccaccguccagggcgucgucaccuccuucugcggcgacuacggcaugaucgacgaguccaucuacuucuccuccgacgucgucaccggcaacgucccccucaaggucggccagaaggucaacgucgucgucgaggaggacaagccccacuacggccuccgcgccaucaaggucgacgucgucccccgccaccucuacggcgccggccccuccgacuccggcacccgcguccucaucggcugcgucaccuccaucaacgaggacaacaucuacaucuccaacuccaucuacuucuccaucgccaucgucuccgaggacuucguccccuacaagggcgaccuccucgaggucgaguacuccaccgagcccggcaucuccaacaucaaggccaccuccgucaagcccauccgcugcauccacaccgaggaggucugcaucaccuccguccacggccgcaacggcgucaucgacuacaccaucuucuucacccucgacuccgucaagcuccccgacggcuacgucccccaggucgacgacaucgucaacgucgucauggucgaguccauccaguucugcuucaucuggcgcgccaucuccaucacccccguccacaaguccuccuccggcuuccaggacgacggcggccucggccgccccaagcgcgagcgccgcucccaguccaucuga

SEQ ID NO: 1165 - RNA, 795 nt, Artificial Sequence
  derived and/or modified sequence opt3 from CT55__Homo_sapiens__AAH20662
augcugagacuccuuaggcuggccuuggcuuucuacggccggaccgcagaccccgccgagcgccaggggccucaacagcagggauuaccacagggugauacacaacugacuacggugcagggcgucguuaccagcuuuugcggggacuauggaaugaucgaugaauccauuuacuucucuucagacgugguaacaggcaacgugccgcuaaaggucggucagaaagugaauguuguggucgaggaagauaagccccacuaugggcuccgagcgauaaaaguggacguaguuccucgucaucuguacggagcuggcccaagugauagcggcacuagagugcuuaucgggugugucaccuccauuaacgaggacaauaucuauauuucuaacucgaucuacuuuucaauagccaucgugagcgaagauuucgugcccuauaagggagaccuguuggaggucgaguacaguacagaaccugguauuuccaauaucaaagcaaccucuguuaagccaauuaggugcauccacacugaggaaguguguauaacaagcguacauggccggaacggggugauugauuacaccaucuuuuucacgcucgacuccgucaagcugcccgauggauaugugccucagguugacgacauugugaaugucgugaugguagagucaauccaauuuugcuucaucuggcgcgccauuaguauaacuccaguucacaaaucuagcuccggcuuucaggaugacggugggcugggaagaccgaagagggagcggcgcucacagagcaucuga

SEQ ID NO: 1166 - RNA, 795 nt, Artificial Sequence
  derived and/or modified sequence opt4 from CT55__Homo_sapiens__AAH20662
augcugagacugcugagacuggcccuggccuucuacggcagaaccgccgaccccgccgagagacagggcccccagcagcagggccugccccagggcgacacccagcugaccaccgugcagggcguggugaccagcuucugcggcgacuacggcaugaucgacgagagcaucuacuucagcagcgacguggugaccggcaacgugccccugaaggugggccagaaggugaacguggugguggaggaggacaagccccacuacggccugagagccaucaagguggacguggugcccagacaccuguacggcgccggccccagcgacagcggcaccagagugcugaucggcugcgugaccagcaucaacgaggacaacaucuacaucagcaacagcaucuacuucagcaucgccaucgugagcgaggacuucgugcccuacaagggcgaccugcuggagguggaguacagcaccgagcccggcaucagcaacaucaaggccaccagcgugaagcccaucagaugcauccacaccgaggaggugugcaucaccagcgugcacggcagaaacggcgugaucgacuacaccaucuucuucacccuggacagcgugaagcugcccgacggcuacgugccccagguggacgacaucgugaacguggugaugguggagagcauccaguucugcuucaucuggagagccaucagcaucacccccgugcacaagagcagcagcggcuuccaggacgacggcggccugggcagacccaagagagagagaagaagccagagcaucuga

SEQ ID NO: 1167 - RNA, 795 nt, Artificial Sequence
  derived and/or modified sequence opt5 from CT55__Homo_sapiens__AAH20662
augcugagacuccugcggcuugcccuggcuuucuacggccgcaccgccgaccccgcggagagacaggggccucaacagcagggacucccgcagggcgauacacaacugacgaccgugcagggggucguuaccagcuuuugcggagacuauggcaugaucgaugaauccauuuacuucucuagcgacguggugacagggaacgucccccuuaaggugggacagaaaguuaauguggucguggaggaagauaagccucacuauggccugcgggcuaucaaaguugacguggucccccgccaucucuacggcgccgggccuuccgauucuggaacaagagugcugauuggcugugugaccagcaucaacgaggacaauauuuauaucuccaacucuaucuacuuuagcauugccaucgucuccgaagauuucguucccuauaagggggaccugcucgagguggaguacagcacagaaccuggaauuucuaauaucaaagcuaccuccgugaagccgauucggugcauccacacggaggaagucuguauuaccagcgugcauggccgcaacgggguuaucgauuacacaaucuuuuucacccuggacucugugaaacuucccgauggauaugucccucagguggacgacauuguuaauguggucaugguggaguccauccaauuuugcuucauuuggagagccaucagcauuacacccguccacaagucuuccagcggcuuucaggaugacggcgggcugggacggccuaagcgcgagagacggucccagucuaucuga

SEQ ID NO: 1168 - protein, 947 aa, Artificial Sequence
  CT-_9/BRD6__Homo_sapiens__Q58F21
MSLPSRQTAIIVNPPPPEYINTKKNGRLTNQLQYLQKVVLKDLWKHSFSWPFQRPVDAVKLQLPDYYTIIKNPMDLNTIKKRLENKYYAKASECIEDFNTMFSNCYLYNKPGDDIVLMAQALEKLFMQKLSQMPQEEQVVGVKERIKKGTQQNIAVSSAKEKSSPSATEKVFKQQEIPSVFPKTSISPLNVVQGASVNSSSQTAAQVTKGVKRKADTTTPATSAVKASSEFSPTFTEKSVALPPIKENMPKNVLPDSQQQYNVVKTVKVTEQLRHCSEILKEMLAKKHFSYAWPFYNPVDVNALGLHNYYDVVKNPMDLGTIKEKMDNQEYKDAYKFAADVRLMFMNCYKYNPPDHEVVTMARMLQDVFETHFSKIPIEPVESMPLCYIKTDITETTGRENTNEASSEGNSSDDSEDERVKRLAKLQEQLKAVHQQLQVLSQVPFRKLNKKKEKSKKEKKKEKVNNSNENPRKMCEQMRLKEKSKRNQPKKRKQQFIGLKSEDEDNAKPMNYDEKRQLSLNINKLPGDKLGRVVHIIQSREPSLSNSNPDEIEIDFETLKASTLRELEKYVSACLRKRPLKPPAKKIMMSKEELHSQKKQELEKRLLDVNNQLNSRKRQTKSDKTQPSKAVENVSRLSESSSSSSSSSESESSSSDLSSSDSSDSESEMFPKFTEVKPNDSPSKENVKKMKNECIPPEGRTGVTQIGYCVQDTTSANTTLVHQTTPSHVMPPNHHQLAFNYQELEHLQTVKNISPLQILPPSGDSEQLSNGITVMHPSGDSDTTMLESECQAPVQKDIKIKNADSWKSLGKPVKPSGVMKSSDELFNQFRKAAIEKEVKARTQELIRKHLEQNTKELKASQENQRDLGNGLTVESFSNKIQNKCSGEEQKEHQQSSEAQDKSKLWLLKDRDLARQKEQERRRREAMVGTIDMTLQSDIMTMFENNFD

SEQ ID NO: 1169 - RNA, 2844 nt, Artificial Sequence
  CT-_9/BRD6__Homo_sapiens__CCDS735.1
augucucugccaagucgacaaacagcuauuauuguuaacccuccuccaccagaauauauaaauacuaagaaaaaugggcgauugacaaaucaacuucaguaucuacaaaaaguuguccuaaaggauuuauggaagcauaguuuuucauggcccuuucaacguccuguggaugcugugaaacuacaguugccugauuauuauaccauuauaaaaaacccaauggauuuaaauacaauuaagaagcgcuuggagaauaaauauuaugcgaaggcuucagaauguauagaagacuucaauacaauguucucaaauuguuauuuauauaacaagccuggagaugacauuguucuuauggcacaagcucuagagaagcuguuuaugcagaaauuaucucagaugccacaagaagagcaaguuguggguguuaaggaaagaaucaagaaaggcacucaacagaauauagcuguuucuucugcuaaagaaaaaucaucacccagcgcaacagaaaaaguauuuaagcagcaagaaauuccuucuguauuuccuaagacaucuauuucucccuugaacgugguacagggagcuucagucaacuccaguucacaaacugcggcccaaguuacaaaaggugugaagaggaaagcagauacaacaacuccugcaacuucagcaguuaaagcaaguagugaauuuucuccaacauucacagaaaaaucaguggcacugccaccuauaaaagaaaauaugccaaagaauguuuugccagauucucagcaacaauauaauguugugaagacuguuaaaguaacugaacaauuaaggcacuguagugagauucuuaaagaaaugcuugcaaagaaacauuuuucauaugcauggcccuuuuauaauccuguugacguuaaugcuuugggacuccauaacuacuaugacguugucaaaaauccgauggaucuuggaacuauuaaggagaaaauggauaaccaagaauauaaggaugcauacaaauuugcggcagauguuagauuaauguucaugaauugcuacaaguacaauccuccagaucacgaaguugugacaauggcaagaaugcuucaggauguuuucgaaacgcauuuuucaaagaucccgauugaaccuguugagaguaugccuuuauguuacaucaaaacagauaucacagaaaccacugguagagagaacacuaaugaagccuccucugaagggaacucuucugaugauucugaagaugagcgaguuaagcgucuugcaaagcuucaggagcagcuuaaagcuguacaucaacagcuccagguuuugucccaaguaccuuuccguaagcuaaauaaaaagaaagagaagucuaaaaaggaaaagaaaaaagaaaagguuaauaacagcaaugaaaauccaagaaaaaugugugagcaaaugaggcuaaaggaaaaguccaagagaaaucagccaaagaaaaggaaacaacaguucauuggucuaaaaucugaagaugaagauaaugcuaaaccuaugaacuaugaugagaaaaggcaguuaagucugaauauaaacaaacucccuggagauaaacuugggcgaguaguucacauaauacaaucaagagagccuucucugagcaauuccaauccugaugagauagagauagacuuugaaacacugaaagcaucaacacuaagagaauuagaaaaauauguuucggcaugucuaagaaagagaccauuaaaaccuccugcuaagaaaauaaugauguccaaagaagaacuucacucacagaaaaaacaggaauuggaaaagcgguuacuggauguuaauaaucaguuaaauucuagaaaacgucaaacaaaaucugauaaaacgcaaccauccaaagcuguugaaaauguuucccgacugagugagagcagcagcagcagcagcagcucaucagagucugaaaguagcagcagugacuuaagcucuucagacagcagugauucugaaucagaaauguucccuaaguuuacagaaguaaaaccaaaugauucuccuucuaaagagaauguaaagaaaaugaagaaugaaugcauaccgccugaaggaagaacaggcgucacacagauaggauauugugugcaagacacaaccucugccaauacuacccuuguucaucagaccacaccuucacauguaaugccaccaaaucaccaccaauuagcauuuaauuaucaagaauuagaacauuuacagacugugaaaaacauuucaccuuuacaaauucugccucccucaggugauucugaacagcucucaaauggcauaacugugaugcauccaucuggugauagugacacaacgauguuagaaucugaaugucaagcuccuguacagaaggauauaaagauuaagaaugcagauucauggaaaaguuuaggcaaaccagugaaaccaucagguguaaugaaauccucagaugagcucuucaaccaauuuagaaaagcagccauagaaaaggaaguaaaagcucggacacaggaacucauacggaagcauuuggaacaaaauacaaaggaacuaaaagcaucucaagaaaaucagagggaucuugggaauggauugacuguagaaucuuuuucaaauaaaauacaaaacaagugcucuggagaagagcagaaagaacaucagcagucaucagaagcucaagauaaauccaaacucuggcuucucaaagaccgugauuuagcaaggcagaaagaacaagagaggaggaggagagaagcaaugguggguaccauugauaugacccuucaaagugacauuaugacaauguuugaaaacaacuuugauuaa

SEQ ID NO: 1170 - RNA, 2844 nt, Artificial Sequence
  derived and/or modified sequence opt1 from CT-_9/BRD6__Homo_sapiens__CCDS735.1
augagccugcccucccgccagaccgccaucaucgugaacccgcccccccccgaguacaucaacaccaagaagaacggccggcucacgaaccagcugcaguaccugcagaaggucgugcucaaggaccuguggaagcacagcuucuccuggccguuccagcgccccguggacgccgucaagcugcagcuccccgacuacuacaccaucaucaagaaccccauggaccugaacaccaucaagaagcggcuggagaacaaguacuacgcgaaggccagcgagugcaucgaggacuucaacaccauguucuccaacugcuaccucuacaacaagccgggggacgacaucgugcugauggcccaggcccuggagaagcucuucaugcagaagcugagccagaugccccaggaggagcagguggucggcgugaaggagcgcaucaagaaggggacgcagcagaacaucgccguguccagcgcgaaggagaaguccagccccuccgccaccgagaaggucuucaagcagcaggagauccccagcguguucccgaagaccuccaucagcccccugaacgugguccagggcgccuccgugaacagcuccagccagaccgccgcgcaggugacgaagggggucaagcggaaggccgacaccaccacccccgccacguccgccgugaaggccagcagcgaguucucccccaccuucaccgagaagagcguggcgcucccgcccaucaaggagaacaugcccaagaacguccugcccgacucccagcagcaguacaacguggugaagaccgucaaggugacggagcagcugcgccacugcagcgagauccucaaggagaugcuggccaagaagcacuucuccuacgccuggccguucuacaaccccguggacgucaacgcccugggccuccacaacuacuacgacguggucaagaaccccauggaccugggcaccaucaaggagaagauggacaaccaggaguacaaggacgccuacaaguucgcggccgacgugcggcugauguucaugaacugcuacaaguacaaccccccggaccacgagguggucaccauggcccgcaugcuccaggacguguucgagacccacuucagcaagauccccaucgagcccguggaguccaugccccugugcuacaucaagacggacaucaccgagaccaccgggcgggagaacacgaacgaggccagcuccgagggcaacagcuccgacgacagcgaggacgagcgcgucaagcggcuggccaagcuccaggagcagcugaaggcggugcaccagcagcugcaggugcucucccaggucccguuccgcaagcugaacaagaagaaggagaagagcaagaaggagaagaagaaggagaaggugaacaacuccaacgagaacccccggaagaugugcgagcagaugcgccugaaggagaagagcaagcggaaccagcccaagaagcgcaagcagcaguucaucgggcucaaguccgaggacgaggacaacgccaagccgaugaacuacgacgagaagcggcagcugagccugaacaucaacaagcuccccggcgacaagcuggggcgcgugguccacaucauccagucccgggagcccagccugagcaacuccaaccccgacgagaucgagaucgacuucgagacccucaaggccagcacccugcgcgagcuggagaaguacguguccgccugccuccggaagcgcccgcugaagccccccgccaagaagaucaugaugagcaaggaggagcugcacucccagaagaagcaggagcucgagaagcgccugcuggacgugaacaaccagcucaacagccggaagcgccagaccaaguccgacaagacgcagcccagcaaggcggucgagaacgugucccggcugagcgaguccagcuccagcuccagcuccagcagcgaguccgagagcuccagcuccgaccugagcuccagcgacuccagcgacuccgagagcgagauguucccgaaguucaccgaggugaagcccaacgacucccccagcaaggagaacgucaagaagaugaagaacgagugcauccccccggagggccgcaccggcgugacccagaucggguacugcgugcaggacacgaccuccgccaacaccacccugguccaccagacgacccccagccacgugaugccccccaaccaccaccagcucgccuucaacuaccaggagcuggagcaccugcagaccgugaagaacaucuccccgcuccagauccugccccccagcggcgacuccgagcagcugagcaacgggaucaccgucaugcaccccagcggcgacuccgacaccacgaugcucgagagcgagugccaggccccggugcagaaggacaucaagaucaagaacgcggacuccuggaagagccugggcaagcccgugaagcccuccggggucaugaagagcuccgacgagcuguucaaccaguuccggaaggccgccaucgagaaggaggugaaggcccgcacccaggagcucauccggaagcaccuggagcagaacaccaaggagcugaaggccagccaggagaaccagcgcgaccucggcaacgggcugaccguggaguccuucagcaacaagauccagaacaagugcuccggcgaggagcagaaggagcaccagcagagcuccgaggcgcaggacaagagcaagcuguggcuccugaaggaccgggaccuggcccgccagaaggagcaggagcggcgccggcgcgaggccauggucgggacgaucgacaugacccuccaguccgacaucaugaccauguucgagaacaacuucgacuga

SEQ ID NO: 1171 - RNA, 2844 nt, Artificial Sequence
  derived and/or modified sequence opt2 from CT-_9/BRD6__Homo_sapiens__CCDS735.1
augucccuccccucccgccagaccgccaucaucgucaacccccccccccccgaguacaucaacaccaagaagaacggccgccucaccaaccagcuccaguaccuccagaaggucguccucaaggaccucuggaagcacuccuucuccuggcccuuccagcgccccgucgacgccgucaagcuccagcuccccgacuacuacaccaucaucaagaaccccauggaccucaacaccaucaagaagcgccucgagaacaaguacuacgccaaggccuccgagugcaucgaggacuucaacaccauguucuccaacugcuaccucuacaacaagcccggcgacgacaucguccucauggcccaggcccucgagaagcucuucaugcagaagcucucccagaugccccaggaggagcaggucgucggcgucaaggagcgcaucaagaagggcacccagcagaacaucgccgucuccuccgccaaggagaaguccucccccuccgccaccgagaaggucuucaagcagcaggagauccccuccgucuuccccaagaccuccaucuccccccucaacgucguccagggcgccuccgucaacuccuccucccagaccgccgcccaggucaccaagggcgucaagcgcaaggccgacaccaccacccccgccaccuccgccgucaaggccuccuccgaguucucccccaccuucaccgagaaguccgucgcccucccccccaucaaggagaacaugcccaagaacguccuccccgacucccagcagcaguacaacgucgucaagaccgucaaggucaccgagcagcuccgccacugcuccgagauccucaaggagaugcucgccaagaagcacuucuccuacgccuggcccuucuacaaccccgucgacgucaacgcccucggccuccacaacuacuacgacgucgucaagaaccccauggaccucggcaccaucaaggagaagauggacaaccaggaguacaaggacgccuacaaguucgccgccgacguccgccucauguucaugaacugcuacaaguacaacccccccgaccacgaggucgucaccauggcccgcaugcuccaggacgucuucgagacccacuucuccaagauccccaucgagcccgucgaguccaugccccucugcuacaucaagaccgacaucaccgagaccaccggccgcgagaacaccaacgaggccuccuccgagggcaacuccuccgacgacuccgaggacgagcgcgucaagcgccucgccaagcuccaggagcagcucaaggccguccaccagcagcuccagguccucucccagguccccuuccgcaagcucaacaagaagaaggagaaguccaagaaggagaagaagaaggagaaggucaacaacuccaacgagaacccccgcaagaugugcgagcagaugcgccucaaggagaaguccaagcgcaaccagcccaagaagcgcaagcagcaguucaucggccucaaguccgaggacgaggacaacgccaagcccaugaacuacgacgagaagcgccagcucucccucaacaucaacaagcuccccggcgacaagcucggccgcgucguccacaucauccagucccgcgagcccucccucuccaacuccaaccccgacgagaucgagaucgacuucgagacccucaaggccuccacccuccgcgagcucgagaaguacgucuccgccugccuccgcaagcgcccccucaagccccccgccaagaagaucaugauguccaaggaggagcuccacucccagaagaagcaggagcucgagaagcgccuccucgacgucaacaaccagcucaacucccgcaagcgccagaccaaguccgacaagacccagcccuccaaggccgucgagaacgucucccgccucuccgaguccuccuccuccuccuccuccuccuccgaguccgaguccuccuccuccgaccucuccuccuccgacuccuccgacuccgaguccgagauguuccccaaguucaccgaggucaagcccaacgacucccccuccaaggagaacgucaagaagaugaagaacgagugcaucccccccgagggccgcaccggcgucacccagaucggcuacugcguccaggacaccaccuccgccaacaccacccucguccaccagaccacccccucccacgucaugccccccaaccaccaccagcucgccuucaacuaccaggagcucgagcaccuccagaccgucaagaacaucuccccccuccagauccucccccccuccggcgacuccgagcagcucuccaacggcaucaccgucaugcaccccuccggcgacuccgacaccaccaugcucgaguccgagugccaggcccccguccagaaggacaucaagaucaagaacgccgacuccuggaagucccucggcaagcccgucaagcccuccggcgucaugaaguccuccgacgagcucuucaaccaguuccgcaaggccgccaucgagaaggaggucaaggcccgcacccaggagcucauccgcaagcaccucgagcagaacaccaaggagcucaaggccucccaggagaaccagcgcgaccucggcaacggccucaccgucgaguccuucuccaacaagauccagaacaagugcuccggcgaggagcagaaggagcaccagcaguccuccgaggcccaggacaaguccaagcucuggcuccucaaggaccgcgaccucgcccgccagaaggagcaggagcgccgccgccgcgaggccauggucggcaccaucgacaugacccuccaguccgacaucaugaccauguucgagaacaacuucgacuga

SEQ ID NO: 1172 - RNA, 2844 nt, Artificial Sequence
  derived and/or modified sequence opt3 from CT-_9/BRD6__Homo_sapiens__CCDS735.1
augagccugcccuccagacagaccgccaucauugugaacccuccaccgcccgaguacauaaauacaaagaaaaacggcaggcucacuaaucaacuucaguaucugcagaaggucguuuugaaagacuuauggaagcacucuuucucauggccuuuucagcggccaguggaugcuguaaaacugcaacuacccgacuacuauacgaucauuaagaacccuauggaucucaauaccaucaagaaacgccuggaaaacaaguacuaugcaaaagccagugagugcauugaagacuucaauacaauguuuagcaacuguuaccuuuauaauaagccaggggaugacaucgugcugauggcgcaggcuuuggagaaacucuucaugcagaagcugucccagaugccccaagaagaacaggucgugggaguuaaggagcgaaucaaaaaggguacucagcagaacauagccgugucuucggcaaaagaaaagucaagcccuagugccaccgagaaagucuuuaagcaacaggaaauuccauccguguucccgaaaacaucuaucagcccccugaauguaguucagggcgcuuccgugaacucaaguagccaaaccgcagcccaggucacuaagggggugaagcguaaagcugauacaaccacgccugccacuucugcggugaaggcauccucagaguuuagcccaaccuucacagagaaaagugucgcccucccaccuauuaaggaaaauaugcccaaaaacguuuuacccgacucucagcagcaauacaaugugguaaagacugugaaggucaccgagcagcugagacauugcuccgaaauccuuaaagagauguuggcuaagaaacacuuuagcuacgccuggccguucuauaacccuguggauguuaacgcacugggacuacauaauuacuaugacguggucaagaaccccauggaucucggcacaauaaaagaaaagauggacaaucaggaguacaaggaugcuuauaaauuugccgcggacgugaggcugauguucaugaacuguuacaaguauaauccaccugaccacgagguaguuaccauggcccggaugcuucaggauguguuugaaacgcauuucucgaaaauucccaucgagccagucgaaucuaugccccugugcuacauuaagacugacaucacagagaccacuggucgcgaaaacacaaaugaggcauccucagaggggaacaguagcgaugacuccgaagaugagagagugaaaagguuggcuaagcuccaagaacagcugaaggccguccaccagcaguuacaagugcugucucagguuccuuuccggaaacucaauaagaaaaaggagaaaagcaagaaagaaaagaagaaagagaaggugaacaauucaaacgagaauccacgcaaaaugugugaacagaugcgacuuaaggagaaaaguaagagaaaccagccgaagaaaaggaagcaacaguuuaucggacugaaauccgaagacgaggauaaugcuaagcccaugaacuacgacgagaaacggcaguugagccuaaacauuaauaagcugccuggcgauaagcucggccguguaguccacauaauccaaucucgcgaaccaucacugaguaacagcaaucccgacgagauugaaaucgauuucgagacccuuaaagccuccacgcugagagaauuggagaaguaugugucugcaugccucaggaaacggccucugaagccacccgccaaaaagauaaugaugucgaaggaggaauuacauagccagaaaaagcaggagcuggaaaaacgacuacucgacguuaacaaucagcugaacucccgcaagagacaaaccaaaucagacaagacacagccgaguaaagcuguggagaaugucucuaggcuuagcgaauccucaagcagcuccaguucuucuuccgagucagagaguagcucguccgauuugucuagcucagacaguuccgauucugaaagcgagauguuuccuaaguucacugaagugaagccaaacgacucccccucaaaagagaauguaaagaaaaugaagaacgaauguauuccucccgaggggcggaccggagugacacagaucgguuacugcguucaggauacuaccagcgcgaauacaacccugguccaccaaacuacgccaagucaugugaugccucccaaccaccaccagcucgcauuuaauuaucaggagcuggaacaucuucagacagugaaaaacaucucuccacugcaaauuuugccgccuuccggcgacagcgagcagcucucgaaugggaucaccgucaugcaccccucaggagauucugacacuaccaugcuggaaagugagugucaggccccaguucaaaaggauauuaagaucaaaaacgcugacuccuggaagucuuuaggcaaacccgugaagccuagcggugugaugaaaagcuccgaugagcuguucaaccaguuucgcaaggccgcaauagaaaaggagguaaaagccagaacacaggaacuaauuaggaagcaucucgagcagaauaccaaagaacugaaggcuucacaagagaaccagcgugaccuugggaauggauugacugucgagaguuucagcaacaaaauccagaauaagugcucuggcgaggagcagaaggaacaccaacaguccucagaggcccaggauaaaaguaagcuguggcuccugaaagaccgggacuuagcacgacagaaggaacaagagagaaggcgccgggaggcgauggugggcacaaucgauaugacgcugcagagcgacauuaugaccauguuugaaaacaauuucgauuga

SEQ ID NO: 1173 - RNA, 2844 nt, Artificial Sequence
  derived and/or modified sequence opt4 from CT-_9/BRD6__Homo_sapiens__CCDS735.1
augagccugcccagcagacagaccgccaucaucgugaacccccccccccccgaguacaucaacaccaagaagaacggcagacugaccaaccagcugcaguaccugcagaagguggugcugaaggaccuguggaagcacagcuucagcuggcccuuccagagacccguggacgccgugaagcugcagcugcccgacuacuacaccaucaucaagaaccccauggaccugaacaccaucaagaagagacuggagaacaaguacuacgccaaggccagcgagugcaucgaggacuucaacaccauguucagcaacugcuaccuguacaacaagcccggcgacgacaucgugcugauggcccaggcccuggagaagcuguucaugcagaagcugagccagaugccccaggaggagcagguggugggcgugaaggagagaaucaagaagggcacccagcagaacaucgccgugagcagcgccaaggagaagagcagccccagcgccaccgagaagguguucaagcagcaggagauccccagcguguuccccaagaccagcaucagcccccugaacguggugcagggcgccagcgugaacagcagcagccagaccgccgcccaggugaccaagggcgugaagagaaaggccgacaccaccacccccgccaccagcgccgugaaggccagcagcgaguucagccccaccuucaccgagaagagcguggcccugccccccaucaaggagaacaugcccaagaacgugcugcccgacagccagcagcaguacaacguggugaagaccgugaaggugaccgagcagcugagacacugcagcgagauccugaaggagaugcuggccaagaagcacuucagcuacgccuggcccuucuacaaccccguggacgugaacgcccugggccugcacaacuacuacgacguggugaagaaccccauggaccugggcaccaucaaggagaagauggacaaccaggaguacaaggacgccuacaaguucgccgccgacgugagacugauguucaugaacugcuacaaguacaacccccccgaccacgagguggugaccauggccagaaugcugcaggacguguucgagacccacuucagcaagauccccaucgagcccguggagagcaugccccugugcuacaucaagaccgacaucaccgagaccaccggcagagagaacaccaacgaggccagcagcgagggcaacagcagcgacgacagcgaggacgagagagugaagagacuggccaagcugcaggagcagcugaaggccgugcaccagcagcugcaggugcugagccaggugcccuucagaaagcugaacaagaagaaggagaagagcaagaaggagaagaagaaggagaaggugaacaacagcaacgagaaccccagaaagaugugcgagcagaugagacugaaggagaagagcaagagaaaccagcccaagaagagaaagcagcaguucaucggccugaagagcgaggacgaggacaacgccaagcccaugaacuacgacgagaagagacagcugagccugaacaucaacaagcugcccggcgacaagcugggcagaguggugcacaucauccagagcagagagcccagccugagcaacagcaaccccgacgagaucgagaucgacuucgagacccugaaggccagcacccugagagagcuggagaaguacgugagcgccugccugagaaagagaccccugaagccccccgccaagaagaucaugaugagcaaggaggagcugcacagccagaagaagcaggagcuggagaagagacugcuggacgugaacaaccagcugaacagcagaaagagacagaccaagagcgacaagacccagcccagcaaggccguggagaacgugagcagacugagcgagagcagcagcagcagcagcagcagcagcgagagcgagagcagcagcagcgaccugagcagcagcgacagcagcgacagcgagagcgagauguuccccaaguucaccgaggugaagcccaacgacagccccagcaaggagaacgugaagaagaugaagaacgagugcaucccccccgagggcagaaccggcgugacccagaucggcuacugcgugcaggacaccaccagcgccaacaccacccuggugcaccagaccacccccagccacgugaugccccccaaccaccaccagcuggccuucaacuaccaggagcuggagcaccugcagaccgugaagaacaucagcccccugcagauccugccccccagcggcgacagcgagcagcugagcaacggcaucaccgugaugcaccccagcggcgacagcgacaccaccaugcuggagagcgagugccaggcccccgugcagaaggacaucaagaucaagaacgccgacagcuggaagagccugggcaagcccgugaagcccagcggcgugaugaagagcagcgacgagcuguucaaccaguucagaaaggccgccaucgagaaggaggugaaggccagaacccaggagcugaucagaaagcaccuggagcagaacaccaaggagcugaaggccagccaggagaaccagagagaccugggcaacggccugaccguggagagcuucagcaacaagauccagaacaagugcagcggcgaggagcagaaggagcaccagcagagcagcgaggcccaggacaagagcaagcuguggcugcugaaggacagagaccuggccagacagaaggagcaggagagaagaagaagagaggccauggugggcaccaucgacaugacccugcagagcgacaucaugaccauguucgagaacaacuucgacuga

SEQ ID NO: 1174 - RNA, 2844 nt, Artificial Sequence
  derived and/or modified sequence opt5 from CT-_9/BRD6__Homo_sapiens__CCDS735.1
augagccugcccuccagacagaccgccaucauugugaacccuccgcccccugaguacaucaauacaaagaaaaacggccggcucacgaaucaacugcaguaucuucagaaggucguucugaaagaccucuggaagcacucuuucagcuggcccuuucagcgcccuguggaugcugugaaacugcaacuucccgacuacuauaccauuaucaagaacccuauggaucugaauacaauuaagaaaagacucgaaaacaaguacuaugccaaagcguccgagugcaucgaagacuucaauaccauguuuucuaacuguuaccuguauaauaagccgggggaugacaucguccugauggcucaggcccucgagaaacuguucaugcagaagcucagccagaugccccaagaagaacaggugguuggagugaaggagcggauuaaaaagggcacacagcagaacaucgccgucuccucugcuaaagaaaagagcuccccuagcgccaccgagaaaguguuuaagcaacaggaaauucccucuguuuucccuaaaacauccaucagcccccugaaugugguccagggggcuucugugaacuccagcucucaaaccgccgcccaggugacgaagggagucaagcgcaaagcggauaccacaaccccggcuacauccgccguuaaggcuagcuccgaguuuucuccuaccuucacggagaaaagcguggcccuucccccuauuaaggaaaauaugcccaaaaacgugcugcccgacucccagcagcaauacaaugucgugaagacaguuaaggugaccgagcagcuuagacauugcagcgaaauccugaaagagaugcucgcgaagaaacacuuuucuuacgccuggccuuucuauaacccggucgaugugaacgcucugggccugcauaauuacuaugacguugugaagaaccccauggaucucgggacaauuaaagaaaagauggacaaucaggaguacaaggaugccuauaaauuugcugccgacguccggcugauguucaugaacuguuacaaguauaauccucccgaccacgagguggucaccauggcccgcaugcuucaggauguguuugaaacccauuucuccaaaaucccuaucgagcccguugaaagcaugccgcugugcuacauuaagacagacaucacggagaccacaggaagagaaaacaccaaugaggcuucuagcgagggcaacuccucugaugacagcgaagaugagcgggugaaacgccucgcgaagcugcaagaacagcuuaaggccguccaccagcagcugcaagugcucucccagguuccuuucagaaaacugaauaagaaaaaggagaaaagcaagaaagaaaagaagaaagagaaggugaacaauucuaacgagaauccccggaaaaugugugaacagaugcgccugaaggagaaauccaagagaaaccagccuaagaaacggaagcaacaguuuauuggccucaaaagcgaagacgaggauaaugcuaagcccaugaacuacgacgagaaacgccagcugucucuuaacaucaauaagcugccuggggauaagcucggaagagucgugcacauuauccaaucccgggaacccagccuguccaacucuaauccggacgagaucgaaauugauuucgagacacuuaaagccagcacccugagagaacucgagaaguauguguccgccugccugcgcaaacggccucugaagccucccgcuaaaaagaucaugaugucuaaggaggaacuccauagccagaaaaagcaggagcuggaaaagagacuucuggacguuaacaaucagcucaacucccgcaagcggcaaacgaaaagcgacaagacacagcccucuaaagccgucgagaauguguccagacugagcgaaucuuccagcucuagcuccucuagcuccgagagcgaguccucuagcuccgaucugucuagcuccgacucuagcgauuccgaaagcgagauguuuccgaaguucaccgaagugaagcccaacgacucuccuuccaaagagaaugucaagaaaaugaagaacgaauguauucccccugagggccgcaccggggugacacagaucggauacugcguucaggauaccacaagcgcgaauacgacccuugugcaccaaacaacccccucucaugucaugccucccaaccaccaccagcucgcuuuuaauuaucaggagcuggaacaucugcagacagugaaaaacauuuccccgcuccaaauccugccucccagcggcgacucugagcagcuuuccaaugggaucaccguuaugcacccuagcggagauuccgacacgaccaugcuggaaagcgagugucaggcccccgugcaaaaggauauuaagaucaaaaacgccgacucuuggaaaagccucggcaaaccggucaagccuuccggcgugaugaaaucuagcgaugagcuguucaaccaguuucggaaggcugccauugaaaaggagguuaaagcuagaacacaggaacugauccgcaagcaucuugagcagaauaccaaagaacucaaggccucccaagagaaccagcgggaccuggggaauggacugacaguggagucuuucagcaacaaaauucagaauaagugcuccggcgaggagcagaaggaacaccaacagucuagcgaggcgcaggauaaauccaagcucuggcugcuuaaagacagagaccuggcccgccagaaggaacaagagcggagacggcgcgaggcuauggucgggaccaucgauaugacgcuccagagcgacauuaugacaauguuugaaaacaauuucgauuga

SEQ ID NO: 1175 - protein, 180 aa, Artificial Sequence
  CTAG2_Isoform_LAGE-1A__Homo_sapiens__O75638-2
MQAEGRGTGGSTGDADGPGGPGIPDGPGGNAGGPGEAGATGGRGPRGAGAARASGPRGGAPRGPHGGAASAQDGRCPCGARRPDSRLLELHITMPFSSPMEAELVRRILSRDAAPLPRPGAVLKDFTVSGNLLFIRLTAADHRQLQLSISSCLQQLSLLMWITQCFLPVFLAQAPSGQRR

SEQ ID NO: 1176 - RNA, 543 nt, Artificial Sequence
  CTAG2_Isoform_LAGE-1A__Homo_sapiens__CCDS35455.1
augcaggccgaaggccggggcacaggggguucgacgggcgaugcugauggcccaggaggcccuggcauuccugauggcccagggggcaaugcuggcggcccaggagaggcgggugccacgggcggcagagguccccggggcgcaggggcagcaagggccucggggccgagaggaggcgccccgcgggguccgcauggcggugccgcuucugcgcaggauggaaggugccccugcggggccaggaggccggacagccgccugcuugaguugcacaucacgaugccuuucucgucgcccauggaagcggagcugguccgcaggauccugucccgggaugccgcaccgcucccccgaccaggggcgguucugaaggacuucaccguguccggcaaccuacuguuuauccgacugacugcugcagaccaccgccaacugcagcucuccaucagcuccugucuccagcagcuuucccuguugauguggaucacgcagugcuuucugcccguguuuuuggcucaggcucccucagggcagaggcgcuaa

SEQ ID NO: 1177 - RNA, 543 nt, Artificial Sequence
  derived and/or modified sequence opt1 from CTAG2_Isoform_LAGE-1A__Homo_sapiens__CCDS35455.1
augcaggccgagggccgcgggaccggcgggagcaccggcgacgccgacgggcccggcggcccggggauccccgacggccccgggggcaacgccgggggccccggcgaggccggggccacgggcgggcggggcccgcgcggcgccggggccgcgcgggccuccggcccccgcgggggcgcgccccgggggccccacggcggcgccgcgagcgcccaggacgggcgcugcccgugcggcgcccggcgccccgacucccggcugcucgagcugcacaucaccaugcccuucagcucccccauggaggccgagcuggugcgccggauccucagccgcgacgccgcgccgcugccccggcccggggccguccugaaggacuucaccguguccggcaaccuccuguucauccgccugaccgccgccgaccaccggcagcuccagcugagcaucuccagcugccugcagcagcucucccugcugauguggaucacgcagugcuuccuccccguguuccuggcccaggcgccgagcgggcagcgccgguga

SEQ ID NO: 1178 - RNA, 543 nt, Artificial Sequence
  derived and/or modified sequence opt2 from CTAG2_Isoform_LAGE-1A__Homo_sapiens__CCDS35455.1
augcaggccgagggccgcggcaccggcggcuccaccggcgacgccgacggccccggcggccccggcauccccgacggccccggcggcaacgccggcggccccggcgaggccggcgccaccggcggccgcggcccccgcggcgccggcgccgcccgcgccuccggcccccgcggcggcgccccccgcggcccccacggcggcgccgccuccgcccaggacggccgcugccccugcggcgcccgccgccccgacucccgccuccucgagcuccacaucaccaugcccuucuccucccccauggaggccgagcucguccgccgcauccucucccgcgacgccgccccccucccccgccccggcgccguccucaaggacuucaccgucuccggcaaccuccucuucauccgccucaccgccgccgaccaccgccagcuccagcucuccaucuccuccugccuccagcagcucucccuccucauguggaucacccagugcuuccuccccgucuuccucgcccaggcccccuccggccagcgccgcuga

SEQ ID NO: 1179 - RNA, 543 nt, Artificial Sequence
  derived and/or modified sequence opt3 from CTAG2_Isoform_LAGE-1A__Homo_sapiens__CCDS35455.1
augcaggccgagggcagagggaccggagguagcacaggcgacgcugaugggcccggaggcccugguaucccagacgggccgggaggcaacgcaggcgggcccggagaagccggugcgacuggcgggaggggaccucggggcgcuggugccgcacgcgccuccgggccacgaggaggcgcuccccguggcccucacgggggagcagccucugcucaagaugguagaugcccauguggcgccaggcggcccgacucacgccugcucgagcuucauauuacgaugccuuucaguagcccaauggaagcggagcuggugagaaggauauugucccgggaugcagccccguuaccccgcccuggggcuguccugaaggacuuuaccguuucuggaaaucuacucuucauccgacugacagccgcagaucacagacagcuucagcugucgauuucaagcugcuugcagcaacucagucugcugauguggaucacucaguguuuucucccaguguucuuagcucaggcccccuccggccagaggcgguga

SEQ ID NO: 1180 - RNA, 543 nt, Artificial Sequence
  derived and/or modified sequence opt4 from CTAG2_Isoform_LAGE-1A__Homo_sapiens__CCDS35455.1
augcaggccgagggcagaggcaccggcggcagcaccggcgacgccgacggccccggcggccccggcauccccgacggccccggcggcaacgccggcggccccggcgaggccggcgccaccggcggcagaggccccagaggcgccggcgccgccagagccagcggccccagaggcggcgcccccagaggcccccacggcggcgccgccagcgcccaggacggcagaugccccugcggcgccagaagacccgacagcagacugcuggagcugcacaucaccaugcccuucagcagccccauggaggccgagcuggugagaagaauccugagcagagacgccgccccccugcccagacccggcgccgugcugaaggacuucaccgugagcggcaaccugcuguucaucagacugaccgccgccgaccacagacagcugcagcugagcaucagcagcugccugcagcagcugagccugcugauguggaucacccagugcuuccugcccguguuccuggcccaggcccccagcggccagagaagauga

SEQ ID NO: 1181 - RNA, 543 nt, Artificial Sequence
  derived and/or modified sequence opt5 from CTAG2_Isoform_LAGE-1A__Homo_sapiens__CCDS35455.1
augcaggccgagggcagagggaccggaggcagcacaggggacgcugauggacccggcgggccuggaaucccggacggccccggcgggaacgccggaggcccuggggaagcgggagcuacgggcgggcggggaccccgcggcgccggcgccgcuagagccuccgggccucggggaggcgcuccccgcgggccucacggaggcgccgcgucugcccaagaugggagaugcccguguggagcucggcgccccgacagcagacugcucgagcugcauauuaccaugccuuucuccucucccauggaagccgagcuugugcggcgcauccugagcagagaugcugccccucucccccggccgggcgcgguccugaaggacuuuacaguuuccggcaaucuucuguucauucgccucaccgccgcugaucacagacagcugcagcugucuaucagcuccugccuccagcaacugagccuucugauguggauuacacaguguuuucucccuguguuccuggcccaggcucccucugggcagcggcgcuga

SEQ ID NO: 1182 - protein, 210 aa, Artificial Sequence
  CTAG2_Isoform_LAGE-1B__Homo_sapiens__O75638
MQAEGQGTGGSTGDADGPGGPGIPDGPGGNAGGPGEAGATGGRGPRGAGAARASGPRGGAPRGPHGGAASAQDGRCPCGARRPDSRLLQLHITMPFSSPMEAELVRRILSRDAAPLPRPGAVLKDFTVSGNLLFMSVRDQDREGAGRMRVVGWGLGSASPEGQKARDLRTPKHKVSEQRPGTPGPPPPEGAQGDGCRGVAFNVMFSAPHI

SEQ ID NO: 1183 - RNA, 633 nt, Artificial Sequence
  CTAG2_Isoform_LAGE-1B__Homo_sapiens__CAA10196
augcaggccgaaggccagggcacaggggguucgacgggcgaugcugauggcccaggaggcccuggcauuccugauggcccagggggcaaugcuggcggcccaggagaggcgggugccacgggcggcagagguccccggggcgcaggggcagcaagggccucggggccgagaggaggcgccccgcgggguccgcauggcggugccgcuucugcgcaggauggaaggugccccugcggggccaggaggccggacagccgccugcuucaguugcacaucacgaugccuuucucgucgcccauggaagcggagcugguccgcaggauccugucccgggaugccgcaccucucccccgaccaggggcgguucugaaggacuucaccguguccggcaaccuacuguuuaugucaguucgggaccaggacagggaaggcgcugggcggaugagggugguggguugggggcugggauccgccuccccggaggggcagaaagcuagagaucucagaacacccaaacacaaggucucagaacagagaccugguacaccaggcccgccgccacccgagggagcccagggagaugggugcagaggugucgccuuuaaugugauguucucugccccucacauuuag

SEQ ID NO: 1184 - RNA, 633 nt, Artificial Sequence
  derived and/or modified sequence opt1 from CTAG2_Isoform_LAGE-1B__Homo_sapiens__CAA10196
augcaggccgagggccaggggaccggcgggagcaccggcgacgccgacgggcccggcggccccgggauccccgacggccccgggggcaacgccgggggccccggcgaggccggggccacgggcgggcgcggcccgcggggcgccggggccgcccgcgccuccggcccccgcgggggcgcgccccgggggccccacggcggcgccgcgagcgcccaggacgggcggugcccgugcggcgcccgccggcccgacucccgccugcuccagcugcacaucaccaugcccuucagcucccccauggaggccgagcuggugcggcgcauccucagccgggacgccgcgccgcugccccgccccggggccguccugaaggacuucaccguguccggcaaccuccuguucaugagcgugcgggaccaggaccgcgagggggccggccggaugcgcgucgugggcugggggcugggcuccgccagccccgaggggcagaaggcccgggaccuccgcaccccgaagcacaagguguccgagcagcggcccggcacgcccgggcccccgccgcccgagggcgcgcagggcgacgggugccgcggcgucgccuucaacgugauguucagcgcgccccacaucuga

SEQ ID NO: 1185 - RNA, 633 nt, Artificial Sequence
  derived and/or modified sequence opt2 from CTAG2_Isoform_LAGE-1B__Homo_sapiens__CAA10196
augcaggccgagggccagggcaccggcggcuccaccggcgacgccgacggccccggcggccccggcauccccgacggccccggcggcaacgccggcggccccggcgaggccggcgccaccggcggccgcggcccccgcggcgccggcgccgcccgcgccuccggcccccgcggcggcgccccccgcggcccccacggcggcgccgccuccgcccaggacggccgcugccccugcggcgcccgccgccccgacucccgccuccuccagcuccacaucaccaugcccuucuccucccccauggaggccgagcucguccgccgcauccucucccgcgacgccgccccccucccccgccccggcgccguccucaaggacuucaccgucuccggcaaccuccucuucauguccguccgcgaccaggaccgcgagggcgccggccgcaugcgcgucgucggcuggggccucggcuccgccucccccgagggccagaaggcccgcgaccuccgcacccccaagcacaaggucuccgagcagcgccccggcacccccggcccccccccccccgagggcgcccagggcgacggcugccgcggcgucgccuucaacgucauguucuccgccccccacaucuga

SEQ ID NO: 1186 - RNA, 633 nt, Artificial Sequence
  derived and/or modified sequence opt3 from CTAG2_Isoform_LAGE-1B__Homo_sapiens__CAA10196
augcaggccgagggccaagggaccggagguagcacaggcgacgcugaugggcccggaggcccugguaucccagacgggccgggaggcaacgcaggcgggcccggagaagccggugcgacuggcgggagaggaccuaggggcgcuggugccgcacgggccuccgggccacgcggaggcgcuccccgaggcccucacgggggagcagccucugcucaggauggucguugcccauguggcgccagaaggcccgacucacggcugcuccagcuucauauuacgaugccuuucaguagcccaauggaggcggaacuggugcgcagaauauuguccagggaugcagccccguuaccccggccuggggcuguccugaaggacuuuaccguuucuggaaaucuacucuucaugucggugcgcgaucaggaccgagagggcgccgguagaaugaggguagugggguggggccugggaucagcaagcccagaaggccaaaaagcucgggaucuucguacacccaagcacaaagucagugagcagcgcccugggacuccaggacccccgccucccgagggugcccagggcgacgggugcagaggaguggcguuuaacguuauguucuccgccccacauaucuga

SEQ ID NO: 1187 - RNA, 633 nt, Artificial Sequence
  derived and/or modified sequence opt4 from CTAG2_Isoform_LAGE-1B__Homo_sapiens__CAA10196
augcaggccgagggccagggcaccggcggcagcaccggcgacgccgacggccccggcggccccggcauccccgacggccccggcggcaacgccggcggccccggcgaggccggcgccaccggcggcagaggccccagaggcgccggcgccgccagagccagcggccccagaggcggcgcccccagaggcccccacggcggcgccgccagcgcccaggacggcagaugccccugcggcgccagaagacccgacagcagacugcugcagcugcacaucaccaugcccuucagcagccccauggaggccgagcuggugagaagaauccugagcagagacgccgccccccugcccagacccggcgccgugcugaaggacuucaccgugagcggcaaccugcuguucaugagcgugagagaccaggacagagagggcgccggcagaaugagaguggugggcuggggccugggcagcgccagccccgagggccagaaggccagagaccugagaacccccaagcacaaggugagcgagcagagacccggcacccccggcccccccccccccgagggcgcccagggcgacggcugcagaggcguggccuucaacgugauguucagcgccccccacaucuga

SEQ ID NO: 1188 - RNA, 633 nt, Artificial Sequence
  derived and/or modified sequence opt5 from CTAG2_Isoform_LAGE-1B__Homo_sapiens__CAA10196
augcaggccgagggccaagggaccggaggcagcacaggggacgcugauggacccggcgggccuggaaucccggacggccccggcgggaacgccggaggcccuggggaagcgggagcuacgggcgggagaggaccccggggcgccggcgccgcucgcgccuccgggccuagaggaggcgcuccccgggggccucacggaggcgccgcgucugcccaggaugggcgcugcccguguggagcuagacggcccgacagccgccugcuccagcugcauauuaccaugccuuucuccucucccauggaggccgaacuugugagacggauccugagccgcgaugcugccccucuccccagaccgggcgcgguccugaaggacuuuacaguuuccggcaaucuucuguucaugucugugcgggaucaggaccgcgagggggccggaagaaugcggguggucggcugggggcucggaagcgcuuccccugaaggccaaaaagcccgcgaucugagaacccccaagcacaaagugagcgagcagcggccugggacacccggacccccuccgcccgagggcgcucagggcgacgggugcagaggaguugccuuuaacgugauguucucugccccucauauuuga

SEQ ID NO: 1189 - protein, 663 aa, Artificial Sequence
  CTCFL__Homo_sapiens__Q8NI51
MAATEISVLSEQFTKIKELELMPEKGLKEEEKDGVCREKDHRSPSELEAERTSGAFQDSVLEEEVELVLAPSEESEKYILTLQTVHFTSEAVELQDMSLLSIQQQEGVQVVVQQPGPGLLWLEEGPRQSLQQCVAISIQQELYSPQEMEVLQFHALEENVMVASEDSKLAVSLAETTGLIKLEEEQEKNQLLAERTKEQLFFVETMSGDERSDEIVLTVSNSNVEEQEDQPTAGQADAEKAKSTKNQRKTKGAKGTFHCDVCMFTSSRMSSFNRHMKTHTSEKPHLCHLCLKTFRTVTLLRNHVNTHTGTRPYKCNDCNMAFVTSGELVRHRRYKHTHEKPFKCSMCKYASVEASKLKRHVRSHTGERPFQCCQCSYASRDTYKLKRHMRTHSGEKPYECHICHTRFTQSGTMKIHILQKHGENVPKYQCPHCATIIARKSDLRVHMRNLHAYSAAELKCRYCSAVFHERYALIQHQKTHKNEKRFKCKHCSYACKQERHMTAHIRTHTGEKPFTCLSCNKCFRQKQLLNAHFRKYHDANFIPTVYKCSKCGKGFSRWINLHRHSEKCGSGEAKSAASGKGRRTRKRKQTILKEATKGQKEAAKGWKEAANGDEAAAEEASTTKGEQFPGEMFPVACRETTARVKEEVDEGVTCEMLLNTMDK

SEQ ID NO: 1190 - RNA, 1992 nt, Artificial Sequence
  CTCFL__Homo_sapiens__CCDS13459.1
auggcagccacugagaucucuguccuuucugagcaauucaccaagaucaaagaacucgaguugaugccggaaaaaggccugaaggaggaggaaaaagacggagugugcagagagaaagaccaucggagcccuagugaguuggaggccgagcguaccucuggggccuuccaggacagcguccuggaggaagaaguggagcuggugcuggcccccucggaggagagcgagaaguacauccugacccugcagacggugcacuucacuucugaagcuguggaguugcaggauaugagcuugcugagcauacagcagcaagaaggggugcaggugguggugcaacagccuggcccuggguugcuguggcuugaggaagggccccggcagagccugcagcaguguguggccauuaguauccagcaagagcuguacuccccgcaagagauggagguguugcaguuccacgcucuagaggagaaugugaugguggccagugaagacaguaaguuagcggugagccuggcugaaacuacuggacugaucaagcucgaggaagagcaggagaagaaccaguuauuggcugaaagaacaaaggagcagcucuuuuuuguggaaacaaugucaggagaugaaagaagugacgaaauuguucucacaguuucaaauucaaauguggaagaacaagaggaucaaccuacagcuggucaagcagaugcugaaaaggccaaaucuacaaaaaaucaaagaaagacaaagggagcaaaaggaaccuuccacugugaugucugcauguucaccucuucuagaaugucaaguuuuaaucgucauaugaaaacucacaccagugagaagccucaccugugucaccucugccugaaaaccuuccguacggucacucugcugcggaaccauguuaacacccacacaggaaccaggcccuacaaguguaacgacugcaacauggcauuugucaccaguggagaacucguccgacacaggcgcuauaaacauacucaugagaaacccuuuaaauguuccaugugcaaguaugccaguguggaggcaaguaaauugaagcgccauguccgaucccacacuggggagcgccccuuucaguguugccagugcagcuaugccagcagagauaccuacaagcugaaacgccacaugagaacgcacucaggugagaagccuuacgaaugccacaucugccacacccgcuucacccagagcgggaccaugaaaauacauauucugcagaaacacggcgaaaauguccccaaauaccaguguccccauugugccaccaucauugcacggaaaagcgaccuacgugugcauaugcgcaacuugcaugcuuacagcgcugcagagcugaaaugccgcuacuguucugcugucuuccaugaacgcuaugcccucauucagcaccagaaaacucauaagaaugagaagagguucaagugcaaacacugcaguuaugccugcaagcaggaacgucauaugaccgcucacauucguacccacacuggagagaaaccauucaccugccuuucuugcaauaaauguuuccgacagaagcaacuucuaaacgcucacuucaggaaauaccacgaugcaaauuucaucccgacuguuuacaaaugcuccaaguguggcaaaggcuuuucccgcuggauuaaccugcacagacauucggagaaguguggaucaggggaagcaaagucggcugcuucaggaaagggaagaagaacaagaaagaggaagcagaccauccugaaggaagccacaaagggucagaaggaagcugcgaagggauggaaggaagccgcgaacggagacgaagcugcugcugaggaggcuuccaccacgaagggagaacaguucccaggagagauguuuccugucgccugcagagaaaccacagccagagucaaagaggaaguggaugaaggcgugaccugugaaaugcuccucaacacgauggauaaguga

SEQ ID NO: 1191 - RNA, 1992 nt, Artificial Sequence
  derived and/or modified sequence opt1 from CTCFL__Homo_sapiens__CCDS13459.1
auggccgccaccgagaucagcgugcuguccgagcaguucaccaagaucaaggagcucgagcugaugcccgagaagggccugaaggaggaggagaaggacggggucugccgcgagaaggaccaccggagcccguccgagcucgaggcggagcgcacgagcggcgccuuccaggacuccgugcuggaggaggagguggagcugguccucgcccccagcgaggaguccgagaaguacauccugacccugcagaccgugcacuucaccagcgaggccguggagcuccaggacaugucccugcugagcauccagcagcaggaggggguccagguggugguccagcagcccggccccgggcuccuguggcuggaggagggcccgcggcagucccuccagcagugcguggccaucagcauccagcaggagcuguacagcccccaggagauggaggugcugcaguuccacgcgcucgaggagaacgucaugguggccuccgaggacuccaagcuggccgugagccuggccgagacgaccggccucaucaagcuggaggaggagcaggagaagaaccagcugcucgcggagcgcaccaaggagcagcuguucuucgucgagaccauguccggggacgagcggagcgacgagaucgugcugacgguguccaacagcaacgucgaggagcaggaggaccagcccaccgccggccaggccgacgccgagaaggccaagagcaccaagaaccagcgcaagaccaagggggcgaagggcacguuccacugcgacgugugcauguucaccuccagccggauguccagcuucaaccgccacaugaagacccacaccuccgagaagccccaccucugccaccugugccugaagacguuccggaccgugacccuccugcgcaaccacgucaacacccacacggggacccggccguacaagugcaacgacugcaacauggccuucgugaccagcggcgagcuggugcgccaccggcgcuacaagcacacccacgagaagcccuucaagugcuccaugugcaaguacgccagcgucgaggccuccaagcucaagcggcacgugcgcagccacacgggcgagcggcccuuccagugcugccagugcuccuacgccagccgcgacaccuacaagcugaagcggcacaugcgcacccacuccggggagaagcccuacgagugccacaucugccacacccgguucacgcagagcggcaccaugaagauccacauccugcagaagcacggggagaacgucccgaaguaccagugcccccacugcgcgaccaucaucgcccgcaaguccgaccuccgcgugcacaugcggaaccugcacgccuacagcgccgccgagcugaagugccgcuacugcuccgcgguguuccacgagcgguacgcccucauccagcaccagaagacccacaagaacgagaagcgcuucaagugcaagcacugcagcuacgccugcaagcaggagcggcacaugacggcccacauccgcacccacaccggcgagaagcccuucacgugccuguccugcaacaagugcuuccggcagaagcagcugcucaacgcccacuuccgcaaguaccacgacgcgaacuucauccccaccgucuacaagugcagcaagugcggcaagggguucagccgguggaucaaccugcaccgccacuccgagaagugcggcagcggggaggccaaguccgccgccagcggcaaggggcggcgcacccggaagcgcaagcagaccauccugaaggaggcgaccaagggccagaaggaggccgccaagggcuggaaggaggccgccaacggggacgaggcggccgccgaggaggccuccaccacgaagggcgagcaguucccgggggagauguuccccguggccugccgggagaccaccgcgcgcgugaaggaggaggucgacgagggcgugaccugcgagaugcuccugaacacgauggacaaguga

SEQ ID NO: 1192 - RNA, 1992 nt, Artificial Sequence
  derived and/or modified sequence opt2 from CTCFL__Homo_sapiens__CCDS13459.1
auggccgccaccgagaucuccguccucuccgagcaguucaccaagaucaaggagcucgagcucaugcccgagaagggccucaaggaggaggagaaggacggcgucugccgcgagaaggaccaccgcucccccuccgagcucgaggccgagcgcaccuccggcgccuuccaggacuccguccucgaggaggaggucgagcucguccucgcccccuccgaggaguccgagaaguacauccucacccuccagaccguccacuucaccuccgaggccgucgagcuccaggacaugucccuccucuccauccagcagcaggagggcguccaggucgucguccagcagcccggccccggccuccucuggcucgaggagggcccccgccagucccuccagcagugcgucgccaucuccauccagcaggagcucuacuccccccaggagauggagguccuccaguuccacgcccucgaggagaacgucauggucgccuccgaggacuccaagcucgccgucucccucgccgagaccaccggccucaucaagcucgaggaggagcaggagaagaaccagcuccucgccgagcgcaccaaggagcagcucuucuucgucgagaccauguccggcgacgagcgcuccgacgagaucguccucaccgucuccaacuccaacgucgaggagcaggaggaccagcccaccgccggccaggccgacgccgagaaggccaaguccaccaagaaccagcgcaagaccaagggcgccaagggcaccuuccacugcgacgucugcauguucaccuccucccgcauguccuccuucaaccgccacaugaagacccacaccuccgagaagccccaccucugccaccucugccucaagaccuuccgcaccgucacccuccuccgcaaccacgucaacacccacaccggcacccgccccuacaagugcaacgacugcaacauggccuucgucaccuccggcgagcucguccgccaccgccgcuacaagcacacccacgagaagcccuucaagugcuccaugugcaaguacgccuccgucgaggccuccaagcucaagcgccacguccgcucccacaccggcgagcgccccuuccagugcugccagugcuccuacgccucccgcgacaccuacaagcucaagcgccacaugcgcacccacuccggcgagaagcccuacgagugccacaucugccacacccgcuucacccaguccggcaccaugaagauccacauccuccagaagcacggcgagaacguccccaaguaccagugcccccacugcgccaccaucaucgcccgcaaguccgaccuccgcguccacaugcgcaaccuccacgccuacuccgccgccgagcucaagugccgcuacugcuccgccgucuuccacgagcgcuacgcccucauccagcaccagaagacccacaagaacgagaagcgcuucaagugcaagcacugcuccuacgccugcaagcaggagcgccacaugaccgcccacauccgcacccacaccggcgagaagcccuucaccugccucuccugcaacaagugcuuccgccagaagcagcuccucaacgcccacuuccgcaaguaccacgacgccaacuucauccccaccgucuacaagugcuccaagugcggcaagggcuucucccgcuggaucaaccuccaccgccacuccgagaagugcggcuccggcgaggccaaguccgccgccuccggcaagggccgccgcacccgcaagcgcaagcagaccauccucaaggaggccaccaagggccagaaggaggccgccaagggcuggaaggaggccgccaacggcgacgaggccgccgccgaggaggccuccaccaccaagggcgagcaguuccccggcgagauguuccccgucgccugccgcgagaccaccgcccgcgucaaggaggaggucgacgagggcgucaccugcgagaugcuccucaacaccauggacaaguga

SEQ ID NO: 1193 - RNA, 1992 nt, Artificial Sequence
  derived and/or modified sequence opt3 from CTCFL__Homo_sapiens__CCDS13459.1
auggccgcuaccgagaucagcgugcuguccgaacaguucacaaagauuaaagagcucgaacuuaugcccgagaagggccugaaagaagaggagaaggacggggucugcagagaaaaagaucacaggucuccuucagaguuggaagcagagcggacgaguggagccuuucaagacagcguuuuagaggaagagguggaacugguacuagcgccauccgaggaaucugagaaguacauacucacucugcagaccgugcauuucacaucggaggcugucgaacuucaggauaugucacuguugagcauccagcaacaggagggugugcagguugugguccagcaaccgggccccgggcuccuguggcuggaagagggaccucgccagagucuccagcaguguguggccauuuccauccaacaggaauuauauucuccacaggagauggagguacugcaauuucacgcacuugaagagaacguuaugguggccagcgaagacuccaaguuggcugucucacuggcagagacuaccggccuaauuaaacucgaagaggagcaggaaaagaaucagcugcuugccgagcgaacaaaagaacagcuguucuuuguggagaccaugaguggugaugagcguagcgacgaaaucguguugacugucucuaacuccaauguugaggaacaagaggaucagcccacagcugggcaggccgacgcggaaaaggcaaaaucaaccaagaaccagagaaagacgaaaggagccaagggcacuuuccauugcgauguguguauguuuaccagcaguaggaugucuuccuucaaucggcacaugaaaacacauacuagcgagaagccucaccucugccaccuguguuuaaaaaccuuucgcacaguaacccugcucagaaaccaugugaauacgcacacuggcacaaggccauacaagugcaacgacuguaauauggcuuucgucaccucgggggagcuugugcggcaucgccgauauaaacacacucacgaaaagcccuuuaagugcucuauguguaaauacgccuccguugaggcaucaaagcugaaaagacaugugaggagucacacaggagaacggccuuuccaaugcugucagugcagcuaugcuucccgugauaccuacaaguugaaacgccauaugagaacgcacucuggugagaagccauaugaaugccauauaugucacaccagguuuacacagagcggcacuaugaagauccacauucuacagaaacauggggagaacgucccgaaguaccaaugcccccacugugccaccaucauugcgcggaaaucagaccugcgagugcauaugcgcaaucuccacgccuacagugcagcugagcugaagugcagauauuguuccgccguauuccacgaaagguacgcucuuauccagcaucagaaaacacacaagaacgagaagcgguucaaaugcaagcauuguagcuaugccugcaaacaggaacgccacaugacugcacauauaagaacccacacaggagagaagccuuuuaccugucugucuugcaauaaauguuucaggcaaaagcaguugcucaacgcccacuuucguaaguaccaugaugcuaauuucauuccaacuguuuauaaaugcucaaagugcggcaaagguuuuagucgguggaucaaccugcaccgacauagcgaaaaguguggguccggagaggcgaaaucugcagccucgggcaagggcagaaggacgcgcaaacggaagcagacaauuuuaaaggaggcuaccaaagggcaaaaggaagccgcaaaaggauggaaggaggccgcuaacggugacgaagccgcagcggaggaggcuagcacuaccaaaggcgaacaguuccccggggagauguuuccuguggccugcagagaaacaaccgcaagggucaaggaggaaguggacgagggagucacuugugagaugcugcuaaauacaauggauaaguga

SEQ ID NO: 1194 - RNA, 1992 nt, Artificial Sequence
  derived and/or modified sequence opt4 from CTCFL__Homo_sapiens__CCDS13459.1
auggccgccaccgagaucagcgugcugagcgagcaguucaccaagaucaaggagcuggagcugaugcccgagaagggccugaaggaggaggagaaggacggcgugugcagagagaaggaccacagaagccccagcgagcuggaggccgagagaaccagcggcgccuuccaggacagcgugcuggaggaggagguggagcuggugcuggcccccagcgaggagagcgagaaguacauccugacccugcagaccgugcacuucaccagcgaggccguggagcugcaggacaugagccugcugagcauccagcagcaggagggcgugcaggugguggugcagcagcccggccccggccugcuguggcuggaggagggccccagacagagccugcagcagugcguggccaucagcauccagcaggagcuguacagcccccaggagauggaggugcugcaguuccacgcccuggaggagaacgugaugguggccagcgaggacagcaagcuggccgugagccuggccgagaccaccggccugaucaagcuggaggaggagcaggagaagaaccagcugcuggccgagagaaccaaggagcagcuguucuucguggagaccaugagcggcgacgagagaagcgacgagaucgugcugaccgugagcaacagcaacguggaggagcaggaggaccagcccaccgccggccaggccgacgccgagaaggccaagagcaccaagaaccagagaaagaccaagggcgccaagggcaccuuccacugcgacgugugcauguucaccagcagcagaaugagcagcuucaacagacacaugaagacccacaccagcgagaagccccaccugugccaccugugccugaagaccuucagaaccgugacccugcugagaaaccacgugaacacccacaccggcaccagacccuacaagugcaacgacugcaacauggccuucgugaccagcggcgagcuggugagacacagaagauacaagcacacccacgagaagcccuucaagugcagcaugugcaaguacgccagcguggaggccagcaagcugaagagacacgugagaagccacaccggcgagagacccuuccagugcugccagugcagcuacgccagcagagacaccuacaagcugaagagacacaugagaacccacagcggcgagaagcccuacgagugccacaucugccacaccagauucacccagagcggcaccaugaagauccacauccugcagaagcacggcgagaacgugcccaaguaccagugcccccacugcgccaccaucaucgccagaaagagcgaccugagagugcacaugagaaaccugcacgccuacagcgccgccgagcugaagugcagauacugcagcgccguguuccacgagagauacgcccugauccagcaccagaagacccacaagaacgagaagagauucaagugcaagcacugcagcuacgccugcaagcaggagagacacaugaccgcccacaucagaacccacaccggcgagaagcccuucaccugccugagcugcaacaagugcuucagacagaagcagcugcugaacgcccacuucagaaaguaccacgacgccaacuucauccccaccguguacaagugcagcaagugcggcaagggcuucagcagauggaucaaccugcacagacacagcgagaagugcggcagcggcgaggccaagagcgccgccagcggcaagggcagaagaaccagaaagagaaagcagaccauccugaaggaggccaccaagggccagaaggaggccgccaagggcuggaaggaggccgccaacggcgacgaggccgccgccgaggaggccagcaccaccaagggcgagcaguuccccggcgagauguuccccguggccugcagagagaccaccgccagagugaaggaggagguggacgagggcgugaccugcgagaugcugcugaacaccauggacaaguga

SEQ ID NO: 1195 - RNA, 1992 nt, Artificial Sequence
  derived and/or modified sequence opt5 from CTCFL__Homo_sapiens__CCDS13459.1
auggccgcuaccgagaucagcgugcuguccgaacaguucacaaagauuaaagagcucgaacugaugcccgagaagggccuuaaagaagaggagaaggacggggucugcagagaaaaagaucaccggucuccuagcgagcuggaagccgagcgcacguccggagcguuucaagacucuguucucgaggaagagguggaacuggugcuugcuccgagcgaggaauccgagaaguacauccugacccuccagacaguccauuucaccucugaggccguggaacugcaggauaugagccugcucuccauucagcaacaggagggcguucagguggucgugcagcaacccgggccuggacugcuuuggcuggaagagggccccagacagagccuccagcaguguguugccaucucuauucaacaggaacuguauuccccucaggagauggaggugcuucaauuucacgcucuggaagagaacgucaugguggccagcgaagacucuaagcucgcugugucccuggccgagacaaccgggcugaucaaacucgaagaggagcaggaaaagaaucagcugcuugcggagcggacaaaagaacagcuguucuuugucgagaccaugagcggagaugagcgcucugacgaaaucguucucacgguguccaacagcaauguggaggaacaagaggaucagcccaccgccggccaggcugacgccgaaaaggcuaaauccacaaagaaccagagaaagaccaaaggcgccaaggggacauuccauugcgaugucuguauguuuaccucuagccggauguccagcuucaaucgccacaugaaaacgcauacaucugagaagccucaccugugccaccuuugucugaaaaccuuuagaacagugacccuccugcggaaccauguuaauacccacacaggaacgcgcccguacaagugcaacgacuguaauauggcguucgugaccuccggcgagcuggucagacaucggcgcuauaaacacacacacgaaaagcccuuuaagugcagcauguguaaauacgccucuguggaggcuagcaagcucaaaagacauguucggucccacaccggggaacgcccuuuccaaugcugucagugcucuuaugccagcagagauacauacaagcugaaacggcauaugagaacccacuccggagagaagcccuaugaaugccauauuugucacacgcgcuuuacacagagcggcaccaugaagauccacauucuucagaaacauggggagaacgugccuaaguaccaaugcccccacugugcuaccaucauugcccggaaaucugaccugagaguccauaugcgcaaucuccacgccuacuccgcugcggagcugaagugccgguauuguagcgccguguuccacgaaagauacgcucuuauccagcaucagaaaacacacaagaacgagaagcgcuucaaaugcaagcauuguucuuaugccugcaaacaggaacggcacaugaccgcccauauuagaacacacacgggagagaagccguuuaccugucuguccugcaauaaauguuuccgccaaaagcagcuccugaacgcucacuuucggaaguaccaugaugccaauuucaucccuacagucuauaaaugcagcaagugcggcaaaggcuuuuccagauggaucaaccugcaccgccauucugaaaagugugggagcggagaggcgaaauccgcugccucuggcaaggggcggagaacccggaaacgcaagcagacaauucucaaggaggccaccaaaggacaaaaggaagcugccaaaggcuggaaggaggcugccaacggggacgaagcggccgcugaggaggccagcacgaccaaaggagaacaguuccccggcgagauguuuccuguggcuugcagagaaacaaccgcccggguuaaggaggaaguggacgagggcgucacaugugagaugcugcuuaauaccauggauaaguga

SEQ ID NO: 1196 - protein, 715 aa, Artificial Sequence
  Cten__Homo_sapiens__Q8IZW8
MSQVMSSPLLAGGHAVSLAPCDEPRRTLHPAPSPSLPPQCSYYTTEGWGAQALMAPVPCMGPPGRLQQAPQVEAKATCFLPSPGEKALGTPEDLDSYIDFSLESLNQMILELDPTFQLLPPGTGGSQAELAQSTMSMRKKEESEALDIKYIEVTSARSRCHDGPQHCSSPSVTPPFGSLRSGGLLLSRDVPRETRSSSESLIFSGNQGRGHQRPLPPSEGLSPRPPNSPSISIPCMGSKASSPHGLGSPLVASPRLEKRLGGLAPQRGSRISVLSASPVSDVSYMFGSSQSLLHSSNSSHQSSSRSLESPANSSSSLHSLGSVSLCTRPSDFQAPRNPTLTMGQPRTPHSPPLAKEHASSCPPSITNSMVDIPIVLINGCPEPGSSPPQRTPGHQNSVQPGAASPSNPCPATRSNSQTLSDAPFTTCPEGPARDMQPTMKFVMDTSKYWFKPNITREQAIELLRKEEPGAFVIRDSSSYRGSFGLALKVQEVPASAQSRPGEDSNDLIRHFLIESSAKGVHLKGADEEPYFGSLSAFVCQHSIMALALPCKLTIPQRELGGADGASDSTDSPASCQKKSAGCHTLYLSSVSVETLTGALAVQKAISTTFERDILPTPTVVHFKVTEQGITLTDVQRKVFFRRHYPLTTLRFCGMDPEQRKWQKYCKPSWIFGFVAKSQTEPQENVCHLFAEYDMVQPASQVIGLVTALLQDAERM

SEQ ID NO: 1197 - RNA, 2148 nt, Artificial Sequence
  Cten__Homo_sapiens__CCDS11368.1
augucccaggugauguccagcccacugcuggcaggaggccaugcugucagcuuggcgccuugugaugagcccaggaggacccugcacccagcacccagccccagccugccaccccaguguucuuacuacaccacggaaggcuggggagcccaggcccugauggcccccgugcccugcauggggcccccuggccgacuccagcaagccccacagguggaggccaaagccaccugcuuccugccguccccuggugagaaggccuuggggaccccagaggaccuugacuccuacauugacuucucacuggagagccucaaucagaugauccuggaacuggaccccaccuuccagcugcuucccccagggacugggggcucccaggcugagcuggcccagagcaccaugucaaugagaaagaaggaggaaucugaagccuuggacauaaaguacaucgaggugaccuccgccagaucaaggugccacgauggcccccagcacugcuccagccccucugucaccccgcccuucggcucccuucgcagugguggccuccuccuuuccagagacgucccccgagagacacgaagcagcagugagagccucaucuucucugggaaccagggcagggggcaccagcgcccucugccccccucagagggucucuccccucgacccccaaauucccccagcaucucaaucccuugcauggggagcaaggccucgagcccccaugguuugggcuccccgcugguggcuucuccaagacuggagaagcggcugggaggccuggccccacagcggggcagcaggaucucugugcugucagccagcccagugucugaugucagcuauauguuuggaagcagccagucccuccugcacuccagcaacuccagccaucagucaucuuccagauccuuggaaaguccagccaacucuuccuccagccuccacagccuuggcucagugucccuguguacaagacccagugacuuccaggcucccagaaaccccacccuaaccaugggccaacccagaacaccccacucuccaccacuggccaaagaacaugccagcagcugccccccauccaucaccaacuccaugguggacauacccauugugcugaucaacggcugcccagaaccagggucuucuccaccccagcggaccccaggacaccagaacuccguucaaccuggagcugcuucucccagcaaccccuguccagccaccaggagcaacagccagacccugucagaugcccccuuuaccacaugcccagagggucccgccagggacaugcagcccaccaugaaguucgugauggacacaucuaaauacugguuuaagccaaacaucacccgagagcaagcaaucgagcugcugaggaaggaggagccaggggcuuuugucauaagggacagcucuucauaccgaggcuccuucggccuggcccugaaggugcaggagguucccgcgucugcucagagucgaccaggugaggacagcaaugaccucauccgacacuuccucaucgagucgucugccaaaggagugcaucucaaaggagcagaugaggagcccuacuuugggagccucucugccuucgugugccagcauuccaucauggcccuggcccugcccugcaaacucaccaucccacagagagaacugggaggugcagauggggccucggacucuacagacagcccagccuccugccagaagaaaucugcgggcugccacacccuguaccugagcucagugagcguggagacccugacuggagcccuggccgugcagaaagccaucuccaccaccuuugagagggacauccuccccacgcccaccgugguccacuucaaagucacagagcagggcaucacucugacugauguccagaggaagguguuuuuccggcgccauuacccacucaccacccuccgcuucugugguauggacccugagcaacggaaguggcagaaguacugcaaacccuccuggaucuuuggguuuguggccaagagccagacagagccucaggagaacguaugccaccucuuugcggaguaugacaugguccagccagccucgcaggucaucggccuggugacugcucugcugcaggacgcagaaaggauguag

SEQ ID NO: 1198 - RNA, 2148 nt, Artificial Sequence
  derived and/or modified sequence opt1 from Cten__Homo_sapiens__CCDS11368.1
augagccaggugauguccagcccccugcucgccggcgggcacgccgucucccuggcgccgugcgacgagccccgccggacccugcaccccgcccccagcccgucccuccccccccagugcagcuacuacaccacggagggcuggggggcccaggcccugauggcccccgugccgugcaugggcccccccgggcgccugcagcaggcgccccagguggaggccaaggccaccugcuuccucccgucccccggcgagaaggcccugggcacccccgaggaccuggacagcuacaucgacuucucccucgagagccugaaccagaugauccuggagcucgaccccaccuuccagcugcugccgcccgggacgggcgggucccaggcggagcucgcccagagcaccauguccaugcggaagaaggaggagagcgaggcccuggacaucaaguacaucgaggucaccuccgcccgcagccggugccacgacggcccccagcacugcuccagccccuccgugaccccgcccuucgggagccugcgcagcggcggccuccugcugucccgggacgugccccgcgagacgcggagcuccagcgagucccucaucuucagcgggaaccagggccgcgggcaccagcggccccugccgcccuccgagggccugagcccccgccccccgaacucccccagcaucuccauccccugcaugggcagcaaggccuccagcccgcacgggcucggcuccccccuggucgcgagcccccggcuggagaagcgccucgggggccuggccccccagcgggggucccgcaucagcgugcuguccgccagcccggugagcgacgucuccuacauguucggcagcucccagagccuccugcacuccagcaacuccagccaccaguccagcucccggagccuggagucccccgccaacagcuccagcucccuccacagccugggcagcgugucccugugcacccgccccagcgacuuccaggccccccggaacccgacccucaccauggggcagccccgcacgccccacucccccccgcuggcgaaggagcacgccagcuccugcccccccagcaucaccaacuccaugguggacauccccaucguccugaucaacggcugcccggagcccgggagcucccccccccagcggaccccgggccaccagaacagcgugcagcccggggccgccucccccagcaaccccugcccggccacccgcuccaacagccagacgcucuccgacgcgcccuucaccaccugccccgagggcccggcccgcgacaugcagcccaccaugaaguucgugauggacacgagcaaguacugguucaagcccaacaucacccgggagcaggccaucgagcugcugcgcaaggaggagcccggcgccuucgucauccgggacuccagcuccuaccgcgggagcuucggccucgcccugaaggugcaggaggugccggcgagcgcccagucccggcccggggaggacagcaacgaccugauccgccacuuccucaucgaguccagcgccaagggcguccaccugaagggggccgacgaggagcccuacuucggcucccugagcgcguucgugugccagcacuccaucauggcccucgcccugcccugcaagcugaccaucccgcagcgggagcugggcggggccgacggcgccagcgacuccaccgacagccccgcguccugccagaagaagagcgccgggugccacacgcucuaccuguccagcguguccgucgagacccugaccggcgcccucgccgugcagaaggccaucagcaccacguucgagcgcgacauccugcccacccccaccgugguccacuucaaggugaccgagcagggcaucacgcugaccgacguccagcggaagguguucuuccgccggcacuacccgcucaccacccugcgcuucugcgggauggaccccgagcagcggaaguggcagaaguacugcaagcccuccuggaucuucggcuucguggcgaagagccagacggagccccaggagaacgucugccaccuguucgccgaguacgacauggugcagccggccucccaggugaucgggcucgucaccgcccugcugcaggacgccgagcgcauguga

SEQ ID NO: 1199 - RNA, 2148 nt, Artificial Sequence
  derived and/or modified sequence opt2 from Cten__Homo_sapiens__CCDS11368.1
augucccaggucauguccuccccccuccucgccggcggccacgccgucucccucgcccccugcgacgagccccgccgcacccuccaccccgcccccucccccucccuccccccccagugcuccuacuacaccaccgagggcuggggcgcccaggcccucauggcccccguccccugcaugggcccccccggccgccuccagcaggccccccaggucgaggccaaggccaccugcuuccuccccucccccggcgagaaggcccucggcacccccgaggaccucgacuccuacaucgacuucucccucgagucccucaaccagaugauccucgagcucgaccccaccuuccagcuccucccccccggcaccggcggcucccaggccgagcucgcccaguccaccauguccaugcgcaagaaggaggaguccgaggcccucgacaucaaguacaucgaggucaccuccgcccgcucccgcugccacgacggcccccagcacugcuccucccccuccgucaccccccccuucggcucccuccgcuccggcggccuccuccucucccgcgacgucccccgcgagacccgcuccuccuccgagucccucaucuucuccggcaaccagggccgcggccaccagcgcccccucccccccuccgagggccucuccccccgcccccccaacucccccuccaucuccauccccugcaugggcuccaaggccuccuccccccacggccucggcuccccccucgucgccuccccccgccucgagaagcgccucggcggccucgccccccagcgcggcucccgcaucuccguccucuccgccucccccgucuccgacgucuccuacauguucggcuccucccagucccuccuccacuccuccaacuccucccaccaguccuccucccgcucccucgagucccccgccaacuccuccuccucccuccacucccucggcuccgucucccucugcacccgccccuccgacuuccaggccccccgcaaccccacccucaccaugggccagccccgcaccccccacucccccccccucgccaaggagcacgccuccuccugcccccccuccaucaccaacuccauggucgacauccccaucguccucaucaacggcugccccgagcccggcuccucccccccccagcgcacccccggccaccagaacuccguccagcccggcgccgccucccccuccaaccccugccccgccacccgcuccaacucccagacccucuccgacgcccccuucaccaccugccccgagggccccgcccgcgacaugcagcccaccaugaaguucgucauggacaccuccaaguacugguucaagcccaacaucacccgcgagcaggccaucgagcuccuccgcaaggaggagcccggcgccuucgucauccgcgacuccuccuccuaccgcggcuccuucggccucgcccucaagguccaggagguccccgccuccgcccagucccgccccggcgaggacuccaacgaccucauccgccacuuccucaucgaguccuccgccaagggcguccaccucaagggcgccgacgaggagcccuacuucggcucccucuccgccuucgucugccagcacuccaucauggcccucgcccuccccugcaagcucaccaucccccagcgcgagcucggcggcgccgacggcgccuccgacuccaccgacucccccgccuccugccagaagaaguccgccggcugccacacccucuaccucuccuccgucuccgucgagacccucaccggcgcccucgccguccagaaggccaucuccaccaccuucgagcgcgacauccuccccacccccaccgucguccacuucaaggucaccgagcagggcaucacccucaccgacguccagcgcaaggucuucuuccgccgccacuacccccucaccacccuccgcuucugcggcauggaccccgagcagcgcaaguggcagaaguacugcaagcccuccuggaucuucggcuucgucgccaagucccagaccgagccccaggagaacgucugccaccucuucgccgaguacgacaugguccagcccgccucccaggucaucggccucgucaccgcccuccuccaggacgccgagcgcauguga

SEQ ID NO: 1200 - RNA, 2148 nt, Artificial Sequence
  derived and/or modified sequence opt3 from Cten__Homo_sapiens__CCDS11368.1
augagccaggugauguccucuccccugcucgccggcgggcacgcugucucacuugcaccuugcgacgagccaagaaggacccugcauccggcccccaguccuagcuugccaccccaauguuccuacuauacaacugaaggauggggugcgcaggcuuuaauggccccuguuccaugcauggggcccccuggccggcugcagcaggcaccacaaguggaggccaaggcuacguguuuccuaccgucucccggagaaaaagcacucggcaccccugaggaucuggacucguacaucgauuuuucacuugaaagccugaaccagaugauuuuggagcucgacccaacauuccagcugcugcccccugguacugggggaagucaggccgagcucgcucaauccaccaugucuaugcgcaagaaagaagagagcgaagccuuagauauaaaguauaucgagguaacauccgcgcgaucacguugccacgacggcccacagcauuguaguagccccucugugaccccgccuuuuggcucccugagaucagggggacuuuugcugagcagggaugucccccgggagacucgcaguucuuccgaaagccuaauuuucucggguaaucagggcagagggcaccagaggccacucccucccucugagggacuguccccacggcccccuaacucaccaaguaucagcauuccgugcaugggcuccaaagcaucuagcccccauggucuugggucaccucugguggccaguccacgcuuggaaaagcgacucggaggccuggcuccccaaagaggcuccaggaucagcguuuuaucugccucaccugugagugacgucagcuacauguuuggguccucucagucgcugcuccacagcuccaauucaagucaccagucuagcucccggucacuugagagcccagcaaacucuuccaguagccugcauucuuugggauccgugucacuauguacacgucccagugauuuccaagcuccgcgcaauccuacccugacgaugggucagccaagaacuccccacagcccuccccucgccaaggaacaugcgucguccugcccaccuucuauaaccaacagcaugguagacauccccauuguucugaucaauggcuguccagagccggggucaaguccuccccagaggacaccaggacaccagaacuccgugcaacccggcgccgcaucuccuagcaauccaugccccgcuacucgguccaacucacagacccuuagcgaugccccuuuuacaaccuguccggaggguccagcucgagacaugcagcccacgaugaaauucgucauggauacaaguaaguauugguuuaaaccuaauauuacucgcgaacaggccaucgagcuguugagaaaggaagaaccaggggcauucgugauaagggacucuuccagcuaccggggcucguuuggacucgcccugaaagugcaagaaguccccgcuucagcgcagucucgcccuggcgaggacaguaacgauuuaauuagacacuuccugaucgaguccagcgcaaaggggguucaucuaaagggagccgacgaggagccguauuuugguucucucagcgcuuucgugugccagcacuccauuauggcccuggcacuucccugcaaauugaccaucccacagagggaacugggcggggccgauggagcuucagacaguacugauagcccugccucuugucaaaagaaauccgcaggcugccauacacucuaccugucaaguguaagcguggagacccuuacgggugcgcuggcuguccagaaggccaucuccaccacauucgaacgugacauuuugcccacuccaaccgugguucacuuuaaagugacagagcaggggauaacucucaccgauguccagcggaagguguucuuucgaagacauuacccucugacaaccuuaagguucuguggcauggaccccgagcaacgcaaauggcagaaguauugcaagccaucuuggaucuuuggauucguagcaaaaucgcagacugaaccgcaagagaauguuugucaccuguuugccgaauacgauauggugcagccugcuagccaggucauuggccuagugacggcccuccugcaggacgcagagcggauguga

SEQ ID NO: 1201 - RNA, 2148 nt, Artificial Sequence
  derived and/or modified sequence opt4 from Cten__Homo_sapiens__CCDS11368.1
augagccaggugaugagcagcccccugcuggccggcggccacgccgugagccuggcccccugcgacgagcccagaagaacccugcaccccgcccccagccccagccugcccccccagugcagcuacuacaccaccgagggcuggggcgcccaggcccugauggcccccgugcccugcaugggcccccccggcagacugcagcaggccccccagguggaggccaaggccaccugcuuccugcccagccccggcgagaaggcccugggcacccccgaggaccuggacagcuacaucgacuucagccuggagagccugaaccagaugauccuggagcuggaccccaccuuccagcugcugccccccggcaccggcggcagccaggccgagcuggcccagagcaccaugagcaugagaaagaaggaggagagcgaggcccuggacaucaaguacaucgaggugaccagcgccagaagcagaugccacgacggcccccagcacugcagcagccccagcgugaccccccccuucggcagccugagaagcggcggccugcugcugagcagagacgugcccagagagaccagaagcagcagcgagagccugaucuucagcggcaaccagggcagaggccaccagagaccccugccccccagcgagggccugagccccagaccccccaacagccccagcaucagcauccccugcaugggcagcaaggccagcagcccccacggccugggcagcccccugguggccagccccagacuggagaagagacugggcggccuggccccccagagaggcagcagaaucagcgugcugagcgccagccccgugagcgacgugagcuacauguucggcagcagccagagccugcugcacagcagcaacagcagccaccagagcagcagcagaagccuggagagccccgccaacagcagcagcagccugcacagccugggcagcgugagccugugcaccagacccagcgacuuccaggcccccagaaaccccacccugaccaugggccagcccagaaccccccacagccccccccuggccaaggagcacgccagcagcugcccccccagcaucaccaacagcaugguggacauccccaucgugcugaucaacggcugccccgagcccggcagcagccccccccagagaacccccggccaccagaacagcgugcagcccggcgccgccagccccagcaaccccugccccgccaccagaagcaacagccagacccugagcgacgcccccuucaccaccugccccgagggccccgccagagacaugcagcccaccaugaaguucgugauggacaccagcaaguacugguucaagcccaacaucaccagagagcaggccaucgagcugcugagaaaggaggagcccggcgccuucgugaucagagacagcagcagcuacagaggcagcuucggccuggcccugaaggugcaggaggugcccgccagcgcccagagcagacccggcgaggacagcaacgaccugaucagacacuuccugaucgagagcagcgccaagggcgugcaccugaagggcgccgacgaggagcccuacuucggcagccugagcgccuucgugugccagcacagcaucauggcccuggcccugcccugcaagcugaccaucccccagagagagcugggcggcgccgacggcgccagcgacagcaccgacagccccgccagcugccagaagaagagcgccggcugccacacccuguaccugagcagcgugagcguggagacccugaccggcgcccuggccgugcagaaggccaucagcaccaccuucgagagagacauccugcccacccccaccguggugcacuucaaggugaccgagcagggcaucacccugaccgacgugcagagaaagguguucuucagaagacacuacccccugaccacccugagauucugcggcauggaccccgagcagagaaaguggcagaaguacugcaagcccagcuggaucuucggcuucguggccaagagccagaccgagccccaggagaacgugugccaccuguucgccgaguacgacauggugcagcccgccagccaggugaucggccuggugaccgcccugcugcaggacgccgagagaauguga

SEQ ID NO: 1202 - RNA, 2148 nt, Artificial Sequence
  derived and/or modified sequence opt5 from Cten__Homo_sapiens__CCDS11368.1
augagccaggugauguccucuccccugcucgccggcgggcacgcugucagccuggccccuugcgacgagccgagacggacccuucaucccgcgccuucccccucucugccuccccaauguagcuacuauacaacggaaggauggggcgcucaggcccucauggccccuguuccgugcauggggcccccuggacgccugcagcaggcuccccaaguggaggccaaggcuaccuguuuccuuccuucccccggcgaaaaagcccuggggacaccggaggaucucgacucuuacaucgauuuuagccuggaaucccugaaccagaugauucucgagcuggacccuaccuuccagcuucugcccccuggaacaggcggcagccaggcggagcucgcccaaucuaccauguccaugagaaagaaagaagagagcgaagcucuggauaucaaguauauugaggugacaucugcccggucccgcugccacgacgggccccagcauuguagcucucccuccgucaccccuccguuuggaagccuuagauccggcgggcugcuccugucucgggaugugccccgcgagacgagaagcuccagcgaaucucugaucuucuccggaaaucagggccgggggcaccagcgcccucuucccccuagcgagggacugucucccagaccgccuaacagccccuccauuucuaucccuugcaugggcagcaaggcuuccagcccccauggccuugggucuccucugguugccagcccccggcucgaaaaacgccugggaggccuugcgccgcaaagagggucccggaucucugugcuguccgccagcccugucuccgacgugucuuacauguuuggaagcucccagucucuccugcacagcuccaauagcucucaccaguccagcucucgcucccuggagagccccgcuaacucuagcuccagccuccauucucugggcuccguuagccuuuguaccagacccuccgauuuccaagccccucggaauccgacacugaccauggggcagcccagaacaccucacucucccccucucgcuaaggaacaugccagcuccugucccccuucuauuaccaacagcaugguggacauccccauuguccugaucaauggaugcccggagccuggcuccucucccccucagcgcacgcccggccaccagaacagcgugcaaccgggggccgcuuccccuagcaaucccugcccugcgacacggucuaacucccagacccuuagcgaugcccccuuuacaaccugucccgagggaccugcuagagacaugcagccgaccaugaaauucgugauggauacaucuaaguauugguuuaaacccaauauuacgcgcgaacaggccaucgagcugcuccggaaggaagaaccuggcgccuucgucauuagagacuccagcucuuaccgcggguccuuuggacuggcucugaaaguucaagaagugcccgccagcgcgcagucccggccuggcgaggacagcaacgaucucaucagacacuuccugaucgagucuagcgcuaagggggugcaucuuaagggcgccgacgaggagcccuauuuuggaucccugucugccuucgucugccagcacagcauuauggcucucgcccugccuugcaaacugaccaucccgcagcgcgaacuuggcggggcugauggagccuccgacucuacagauagccccgcguccugucaaaagaaaucugccggcugccauacccucuaccugagcuccgugagcguugagacacugaccggggcucucgccgugcagaaggcuauuucuacgacauucgaacgggacauccugccuacccccaccgucgugcacuuuaaaguuacagagcagggaauuacccuuacagaugugcagagaaaggucuucuuucgccggcauuacccucugacgacccucagauucuguggcauggaccccgagcaacggaaauggcagaaguauugcaagccguccuggaucuuuggguucguggccaaaagccagacagaaccucaagagaaugucugucaccuguuugcggaauacgauauggugcagcccgccucucagguuaucggccuggugaccgcucuccuccaggacgccgagcgcauguga

SEQ ID NO: 1203 - protein, 433 aa, Artificial Sequence
  cyclin_B1__Homo_sapiens__P14635
MALRVTRNSKINAENKAKINMAGAKRVPTAPAATSKPGLRPRTALGDIGNKVSEQLQAKMPMKKEAKPSATGKVIDKKLPKPLEKVPMLVPVPVSEPVPEPEPEPEPEPVKEEKLSPEPILVDTASPSPMETSGCAPAEEDLCQAFSDVILAVNDVDAEDGADPNLCSEYVKDIYAYLRQLEEEQAVRPKYLLGREVTGNMRAILIDWLVQVQMKFRLLQETMYMTVSIIDRFMQNNCVPKKMLQLVGVTAMFIASKYEEMYPPEIGDFAFVTDNTYTKHQIRQMEMKILRALNFGLGRPLPLHFLRRASKIGEVDVEQHTLAKYLMELTMLDYDMVHFPPSQIAAGAFCLALKILDNGEWTPTLQHYLSYTEESLLPVMQHLAKNVVMVNQGLTKHMTVKNKYATSKHAKISTLPQLNSALVQDLAKAVAKV

SEQ ID NO: 1204 - RNA, 1302 nt, Artificial Sequence
  cyclin_B1__Homo_sapiens__AAH06510
auggcgcuccgagucaccaggaacucgaaaauuaaugcugaaaauaaggcgaagaucaacauggcaggcgcaaagcgcguuccuacggccccugcugcaaccuccaagcccggacugaggccaagaacagcucuuggggacauugguaacaaagucagugaacaacugcaggccaaaaugccuaugaagaaggaagcaaaaccuucagcuacuggaaaagucauugauaaaaaacuaccaaaaccucuugaaaagguaccuaugcuggugccagugccagugucugagccagugccagagccagaaccugagccagaaccugagccuguuaaagaagaaaaacuuucgccugagccuauuuugguugauacugccucuccaagcccaauggaaacaucuggaugugccccugcagaagaagaccugugucaggcuuucucugauguaauucuugcaguaaaugauguggaugcagaagauggagcugauccaaaccuuuguagugaauaugugaaagauauuuaugcuuaucugagacaacuugaggaagagcaagcagucagaccaaaauaccuacugggucgggaagucacuggaaacaugagagccauccuaauugacuggcuaguacagguucaaaugaaauucagguuguugcaggagaccauguacaugacugucuccauuauugaucgguucaugcagaauaauugugugcccaagaagaugcugcagcugguuggugucacugccauguuuauugcaagcaaauaugaagaaauguacccuccagaaauuggugacuuugcuuuugugacugacaacacuuauacuaagcaccaaaucagacagauggaaaugaagauucuaagagcuuuaaacuuuggucugggucggccucuaccuuugcacuuccuucggagagcaucuaagauuggagagguugaugucgagcaacauacuuuggccaaauaccugauggaacuaacuauguuggacuaugacauggugcacuuuccuccuucucaaauugcagcaggagcuuuuugcuuagcacugaaaauucuggauaauggugaauggacaccaacucuacaacauuaccugucauauacugaagaaucucuucuuccaguuaugcagcaccuggcuaagaauguagucaugguaaaucaaggacuuacaaagcacaugacugucaagaacaaguaugccacaucgaagcaugcuaagaucagcacucuaccacagcugaauucugcacuaguucaagauuuagccaaggcuguggcaaagguguaa

SEQ ID NO: 1205 - RNA, 1302 nt, Artificial Sequence
  derived and/or modified sequence opt1 from cyclin_B1__Homo_sapiens__AAH06510
auggcccugcgcgugacccggaacagcaagaucaacgccgagaacaaggcgaagaucaacauggccggcgccaagcgcguccccaccgccccggccgcgacguccaagcccgggcuccggccccgcaccgcccugggcgacaucgggaacaaggugagcgagcagcugcaggccaagaugcccaugaagaaggaggccaagccguccgcgaccggcaaggugaucgacaagaagcuccccaagccccuggagaagguccccaugcuggugccggugcccgucagcgagcccgugcccgagccggagcccgagcccgagcccgagccggugaaggaggagaagcucucccccgagcccauccuggucgacaccgccagccccuccccgauggagacgagcgggugcgcccccgccgaggaggaccugugccaggccuucuccgacgugauccucgcggugaacgacgucgacgccgaggacggcgccgaccccaaccugugcagcgaguacgugaaggacaucuacgccuaccugcggcagcucgaggaggagcaggccgugcgccccaaguaccugcugggccgggaggucaccgggaacaugcgcgcgauccucaucgacuggcugguccaggugcagaugaaguuccggcugcuccaggagaccauguacaugaccguguccaucaucgaccgcuucaugcagaacaacugcgugccgaagaagaugcugcagcuggugggcgucacggccauguucaucgccagcaaguacgaggagauguacccgcccgagaucggggacuucgccuucgugaccgacaacaccuacaccaagcaccagauccggcagauggagaugaagauccuccgcgcccugaacuucggccuggggcggccccucccccugcacuuccugcgccgggcguccaagaucggcgagguggacgucgagcagcacacgcucgccaaguaccugauggagcugaccaugcucgacuacgacauggugcacuucccgcccagccagaucgccgccggcgccuucugccuggcgcugaagauccucgacaacggggaguggacccccacccugcagcacuaccuguccuacacggaggagagccuccugcccgucaugcagcaccuggccaagaacguggugauggucaaccagggccucaccaagcacaugaccgugaagaacaaguacgccaccuccaagcacgccaagaucagcacgcugccccagcugaacuccgcgcucgugcaggaccuggccaaggccgucgccaagguguga

SEQ ID NO: 1206 - RNA, 1302 nt, Artificial Sequence
  derived and/or modified sequence opt2 from cyclin_B1__Homo_sapiens__AAH06510
auggcccuccgcgucacccgcaacuccaagaucaacgccgagaacaaggccaagaucaacauggccggcgccaagcgcguccccaccgcccccgccgccaccuccaagcccggccuccgcccccgcaccgcccucggcgacaucggcaacaaggucuccgagcagcuccaggccaagaugcccaugaagaaggaggccaagcccuccgccaccggcaaggucaucgacaagaagcuccccaagccccucgagaagguccccaugcucguccccguccccgucuccgagcccguccccgagcccgagcccgagcccgagcccgagcccgucaaggaggagaagcucucccccgagcccauccucgucgacaccgccucccccucccccauggagaccuccggcugcgcccccgccgaggaggaccucugccaggccuucuccgacgucauccucgccgucaacgacgucgacgccgaggacggcgccgaccccaaccucugcuccgaguacgucaaggacaucuacgccuaccuccgccagcucgaggaggagcaggccguccgccccaaguaccuccucggccgcgaggucaccggcaacaugcgcgccauccucaucgacuggcucguccagguccagaugaaguuccgccuccuccaggagaccauguacaugaccgucuccaucaucgaccgcuucaugcagaacaacugcguccccaagaagaugcuccagcucgucggcgucaccgccauguucaucgccuccaaguacgaggagauguacccccccgagaucggcgacuucgccuucgucaccgacaacaccuacaccaagcaccagauccgccagauggagaugaagauccuccgcgcccucaacuucggccucggccgcccccucccccuccacuuccuccgccgcgccuccaagaucggcgaggucgacgucgagcagcacacccucgccaaguaccucauggagcucaccaugcucgacuacgacaugguccacuucccccccucccagaucgccgccggcgccuucugccucgcccucaagauccucgacaacggcgaguggacccccacccuccagcacuaccucuccuacaccgaggagucccuccuccccgucaugcagcaccucgccaagaacgucgucauggucaaccagggccucaccaagcacaugaccgucaagaacaaguacgccaccuccaagcacgccaagaucuccacccucccccagcucaacuccgcccucguccaggaccucgccaaggccgucgccaaggucuga

SEQ ID NO: 1207 - RNA, 1302 nt, Artificial Sequence
  derived and/or modified sequence opt3 from cyclin_B1__Homo_sapiens__AAH06510
auggcccugagagugaccaggaacagcaagaucaaugcugagaacaaagcaaagauuaauauggccggcgcgaaacggguccccacagcuccugccgcaacuuccaagccagggcuccgcccgcgaacggcccuuggagacauagguaacaaaguuucugaacagcugcaagcuaagaugcccaugaagaaagaggcaaagccuucagccaccggcaaagugaucgauaagaaauugccaaagcccuuagaaaagguaccuaugcuggugccaguccccgugagugagccuguuccagaaccggagcccgagccugaaccagagcccgugaaagaagagaagcuaagcccugagccaauucucgucgacacagcuucccccucuccgauggaaacuucggggugcgccccugcggaggaagaucugugucaggcauucucagacgugauccuugccguaaaugauguugacgcugaggauggagccgaccccaaccugugcagcgaauacgugaaagauauuuaugcauacuugcgucagcucgaggaggaacaggcugucagaccaaaguaucugcugggcagggaggugaccgguaauaugcgggccauccucauagacugguuagugcaaguccagaugaaauuucgccugcuucaggaaacaauguacaugaccguuaguaucauugauagauucaugcagaacaauugugugccuaagaaaauguugcaacugguaggggugacugcgauguuuaucgccuccaaguaugaggaaauguaucccccagagauuggagacuucgcauuugucacagauaacaccuacacgaagcaccagaucaggcagauggagaugaaaauacuacgggcucucaauuucggccugggccgcccccuuccucugcacuuuuugagacgagccucuaagauuggggaaguggacguugagcagcauacucucgcuaaauaccugauggaauuaaccaugcuggacuacgauauggugcauuucccaccgagccaaaucgccgcaggagccuuuugccucgcucuuaagauucuggacaacggugaguggacacccacuuugcagcacuaucuauccuacaccgaagagucacugcucccugucaugcagcaucuggcgaaaaaugugguaaugguuaaccaaggccuuacaaagcacaugaccgugaagaauaaauaugcaacgaguaagcacgccaaaaucagcacucugccacaguugaacucugcucucguccaggaucuggccaaggcaguggccaaagucuga

SEQ ID NO: 1208 - RNA, 1302 nt, Artificial Sequence
  derived and/or modified sequence opt4 from cyclin_B1__Homo_sapiens__AAH06510
auggcccugagagugaccagaaacagcaagaucaacgccgagaacaaggccaagaucaacauggccggcgccaagagagugcccaccgcccccgccgccaccagcaagcccggccugagacccagaaccgcccugggcgacaucggcaacaaggugagcgagcagcugcaggccaagaugcccaugaagaaggaggccaagcccagcgccaccggcaaggugaucgacaagaagcugcccaagccccuggagaaggugcccaugcuggugcccgugcccgugagcgagcccgugcccgagcccgagcccgagcccgagcccgagcccgugaaggaggagaagcugagccccgagcccauccugguggacaccgccagccccagccccauggagaccagcggcugcgcccccgccgaggaggaccugugccaggccuucagcgacgugauccuggccgugaacgacguggacgccgaggacggcgccgaccccaaccugugcagcgaguacgugaaggacaucuacgccuaccugagacagcuggaggaggagcaggccgugagacccaaguaccugcugggcagagaggugaccggcaacaugagagccauccugaucgacuggcuggugcaggugcagaugaaguucagacugcugcaggagaccauguacaugaccgugagcaucaucgacagauucaugcagaacaacugcgugcccaagaagaugcugcagcuggugggcgugaccgccauguucaucgccagcaaguacgaggagauguacccccccgagaucggcgacuucgccuucgugaccgacaacaccuacaccaagcaccagaucagacagauggagaugaagauccugagagcccugaacuucggccugggcagaccccugccccugcacuuccugagaagagccagcaagaucggcgagguggacguggagcagcacacccuggccaaguaccugauggagcugaccaugcuggacuacgacauggugcacuucccccccagccagaucgccgccggcgccuucugccuggcccugaagauccuggacaacggcgaguggacccccacccugcagcacuaccugagcuacaccgaggagagccugcugcccgugaugcagcaccuggccaagaacguggugauggugaaccagggccugaccaagcacaugaccgugaagaacaaguacgccaccagcaagcacgccaagaucagcacccugccccagcugaacagcgcccuggugcaggaccuggccaaggccguggccaagguguga

SEQ ID NO: 1209 - RNA, 1302 nt, Artificial Sequence
  derived and/or modified sequence opt5 from cyclin_B1__Homo_sapiens__AAH06510
auggcccugagagugacccggaacagcaagaucaaugcugagaacaaagccaagauuaauauggcgggcgcuaaacgcguccccacagccccugccgcuacguccaagccggggcucagaccccggaccgcccugggagacaucggcaacaaaguuucugaacagcuucaagcuaagaugccuaugaagaaagaggccaagcccagcgcgacagggaaagugauugauaagaaacugccuaagccccucgaaaaggugccuaugcuggucccggugcccguuuccgagccugugcccgaaccugagcccgagccggaaccugagcccgucaaagaagagaaacuuucuccugagcccauccugguggacaccgccagccccuccccuauggaaacaucuggaugcgcuccggccgaggaagaucucugucaggcuuucagcgacguuauucuggccgugaaugaugucgacgcggaggauggcgccgaccccaaccugugcuccgaauacgugaaggauaucuaugcuuaccuccgccagcuggaggaggaacaggccgugagaccuaaguaucuucuggggcgggaggucaccggaaauaugcgcgcuauccucauugacuggcugguucaagugcagaugaaauuuagacuucugcaggaaacaauguacaugaccgugagcaucauugaucgguucaugcagaacaauuguguccccaagaaaaugcuccaacuggugggcguuacggccauguuuaucgccucuaaguaugaggaaauguacccucccgagauuggcgacuucgcuuuugugaccgauaacacauauaccaagcaccagauccgccagauggagaugaaaauucugagagcgcucaauuucgggcugggacggccgcuuccucugcauuuucuccgcagagccuccaagaucggcgaagucgacguggagcagcacacacuggcuaaauaccuuauggaacugaccaugcucgacuacgauaugguucauuuucccccuagccaaaucgccgccggggcuuucugccuggcccugaagauucucgacaacggagaguggacgcccacacugcagcacuaucuuucuuacaccgaagagucccugcucccugugaugcagcaucuggcgaaaaaugucgugauggucaaccaaggccuuacaaagcacaugaccgugaagaauaaauaugcuaccagcaagcacgccaaaaucucuacacugccccagcucaacuccgcccugguucaggaucuggcuaaggccguggcuaaagucuga

SEQ ID NO: 1210 - protein, 295 aa, Artificial Sequence
  cyclin_D1__Homo_sapiens__P24385
MEHQLLCCEVETIRRAYPDANLLNDRVLRAMLKAEETCAPSVSYFKCVQKEVLPSMRKIVATWMLEVCEEQKCEEEVFPLAMNYLDRFLSLEPVKKSRLQLLGATCMFVASKMKETIPLTAEKLCIYTDNSIRPEELLQMELLLVNKLKWNLAAMTPHDFIEHFLSKMPEAEENKQIIRKHAQTFVALCATDVKFISNPPSMVAAGSVVAAVQGLNLRSPNNFLSYYRLTRFLSRVIKCDPDCLRACQEQIEALLESSLRQAQQNMDPKAAEEEEEEEEEVDLACTPTDVRDVDI

SEQ ID NO: 1211 - RNA, 888 nt, Artificial Sequence
  cyclin_D1__Homo_sapiens__AAA58392
auggaacaccagcuccugugcugcgaaguggaaaccauccgccgcgcguaccccgaugccaaccuccucaacgaccgggugcugcgggccaugcugaaggcggaggagaccugcgcgcccucgguguccuacuucaaaugugugcagaaggagguccugccguccaugcggaagaucgucgccaccuggaugcuggaggucugcgaggaacagaagugcgaggaggaggucuucccgcuggccaugaacuaccuggaccgcuuccugucgcuggagcccgugaaaaagagccgccugcagcugcugggggccacuugcauguucguggccucuaagaugaaggagaccaucccccugacggccgagaagcugugcaucuacaccgacaacuccauccggcccgaggagcugcugcaaauggagcugcuccuggugaacaagcucaaguggaaccuggccgcaaugaccccgcacgauuucauugaacacuuccucuccaaaaugccagaggcggaggagaacaaacagaucauccgcaaacacgcgcagaccuucguugcccucugugccacagaugugaaguucauuuccaauccgcccuccaugguggcagcggggagcgugguggccgcagugcaaggccugaaccugaggagccccaacaacuuccuguccuacuaccgccucacacgcuuccucuccagagugaucaagugugacccggacugccuccgggccugccaggagcagaucgaagcccugcuggagucaagccugcgccaggcccagcagaacauggaccccaaggccgccgaggaggaggaagaggaggaggaggagguggaccuggcuugcacacccaccgacgugcgggacguggacaucuga

SEQ ID NO: 1212 - RNA, 888 nt, Artificial Sequence
  derived and/or modified sequence opt1 from cyclin_D1__Homo_sapiens__AAA58392
auggagcaccagcugcucugcugcgagguggagaccauccgccgggccuaccccgacgccaaccugcugaacgaccgcguccuccgggcgaugcugaaggccgaggagaccugcgccccgagcguguccuacuucaagugcgugcagaaggagguccugcccagcaugcgcaagaucguggccacguggaugcucgaggugugcgaggagcagaagugcgaggaggaggucuucccccuggccaugaacuaccuggaccgguuccucucccuggagcccgugaagaagucccgccugcagcuccugggcgcgaccugcauguucguggccagcaagaugaaggagaccaucccgcugaccgccgagaagcucugcaucuacacggacaacagcauccggcccgaggagcugcugcagauggagcuccugcuggucaacaagcucaaguggaaccuggccgcgaugacgccccacgacuucaucgagcacuuccuguccaagaugcccgaggccgaggagaacaagcagaucauccgcaagcacgcccagaccuucguggcccucugcgccaccgacgugaaguucaucagcaacccgcccuccauggucgcggccgggagcgugguggccgccguccagggccugaaccugcggucccccaacaacuuccucagcuacuaccgccugacccgguuccugucccgcgugaucaagugcgaccccgacugccuccgggccugccaggagcagaucgaggcgcugcuggagagcucccuccgccaggcccagcagaacauggacccgaaggccgccgaggaggaggaggaggaggaggaggagguggaccuggccugcacccccaccgacguccgggacguggacaucuga

SEQ ID NO: 1213 - RNA, 888 nt, Artificial Sequence
  derived and/or modified sequence opt2 from cyclin_D1__Homo_sapiens__AAA58392
auggagcaccagcuccucugcugcgaggucgagaccauccgccgcgccuaccccgacgccaaccuccucaacgaccgcguccuccgcgccaugcucaaggccgaggagaccugcgcccccuccgucuccuacuucaagugcguccagaaggagguccuccccuccaugcgcaagaucgucgccaccuggaugcucgaggucugcgaggagcagaagugcgaggaggaggucuucccccucgccaugaacuaccucgaccgcuuccucucccucgagcccgucaagaagucccgccuccagcuccucggcgccaccugcauguucgucgccuccaagaugaaggagaccaucccccucaccgccgagaagcucugcaucuacaccgacaacuccauccgccccgaggagcuccuccagauggagcuccuccucgucaacaagcucaaguggaaccucgccgccaugaccccccacgacuucaucgagcacuuccucuccaagaugcccgaggccgaggagaacaagcagaucauccgcaagcacgcccagaccuucgucgcccucugcgccaccgacgucaaguucaucuccaacccccccuccauggucgccgccggcuccgucgucgccgccguccagggccucaaccuccgcucccccaacaacuuccucuccuacuaccgccucacccgcuuccucucccgcgucaucaagugcgaccccgacugccuccgcgccugccaggagcagaucgaggcccuccucgaguccucccuccgccaggcccagcagaacauggaccccaaggccgccgaggaggaggaggaggaggaggaggaggucgaccucgccugcacccccaccgacguccgcgacgucgacaucuga

SEQ ID NO: 1214 - RNA, 888 nt, Artificial Sequence
  derived and/or modified sequence opt3 from cyclin_D1__Homo_sapiens__AAA58392
auggagcaccagcugcucugcugugaaguggagaccaucagaagggccuaccccgacgcuaaccuucugaaugaucgggucuugcgcgcaauguuaaaggccgaagagacaugcgcgccuagcguuuccuauuucaaaugugugcaaaaggaaguacugccaucuaugcgaaaaauuguggcuacuuggaugcuagaggucugcgaggaacagaagugugaggaagagguguuuccgcucgccaugaacuaccuggaccguuuccuuucacuggagcccguuaaaaagaguagauugcagcuccugggcgcaacgugcauguuuguggccagcaagaugaaagaaaccauaccucugacagcugagaagcucuguaucuauacugauaauuccauuaggccagaagaguuacugcagauggaacuuuugcuggucaacaaacuaaaguggaaucucgcagccaugacaccccaugacuucaucgagcacuuucugucuaaaaugccugaggcugaagagaacaagcaaauuauccggaagcaugcccagaccuucguggcgcuuugcgcaaccgauguaaaauuuauaucgaauccacccucaaugguugccgcugggagcguggucgccgcagugcagggacugaacuugcgcaguccuaauaacuuccucuccuacuauagacugacuagguuuuuaucucgggugaucaagugugacccagauugccugcgcgcuugucaggaacaaauugaggcccuccuugaaagcucccugcgacaggcgcagcagaauauggacccgaaagccgcagaggaggaagaggaagaggaagaggaggucgauuuggcuugcacacccaccgacguuagagauguggacaucuga

SEQ ID NO: 1215 - RNA, 888 nt, Artificial Sequence
  derived and/or modified sequence opt4 from cyclin_D1__Homo_sapiens__AAA58392
auggagcaccagcugcugugcugcgagguggagaccaucagaagagccuaccccgacgccaaccugcugaacgacagagugcugagagccaugcugaaggccgaggagaccugcgcccccagcgugagcuacuucaagugcgugcagaaggaggugcugcccagcaugagaaagaucguggccaccuggaugcuggaggugugcgaggagcagaagugcgaggaggagguguucccccuggccaugaacuaccuggacagauuccugagccuggagcccgugaagaagagcagacugcagcugcugggcgccaccugcauguucguggccagcaagaugaaggagaccaucccccugaccgccgagaagcugugcaucuacaccgacaacagcaucagacccgaggagcugcugcagauggagcugcugcuggugaacaagcugaaguggaaccuggccgccaugaccccccacgacuucaucgagcacuuccugagcaagaugcccgaggccgaggagaacaagcagaucaucagaaagcacgcccagaccuucguggcccugugcgccaccgacgugaaguucaucagcaacccccccagcaugguggccgccggcagcgugguggccgccgugcagggccugaaccugagaagccccaacaacuuccugagcuacuacagacugaccagauuccugagcagagugaucaagugcgaccccgacugccugagagccugccaggagcagaucgaggcccugcuggagagcagccugagacaggcccagcagaacauggaccccaaggccgccgaggaggaggaggaggaggaggaggagguggaccuggccugcacccccaccgacgugagagacguggacaucuga

SEQ ID NO: 1216 - RNA, 888 nt, Artificial Sequence
  derived and/or modified sequence opt5 from cyclin_D1__Homo_sapiens__AAA58392
auggagcaccagcugcucugcugugaaguggagaccaucagacgggccuaccccgacgcuaaccugcuuaaugaucgcguccugagagccaugcucaaggcggaagagacaugcgcuccuagcguuuccuauuucaaaugugugcaaaaggaagugcugccgucuaugcggaaaauugucgccacguggaugcuugaggugugcgaggaacagaagugugaggaagagguuuuuccccuggccaugaacuaccucgaccgcuuccugagccuggagccugugaaaaaguccagacuccagcugcuuggcgcuaccugcauguuugucgccucuaagaugaaagaaacaaucccccugaccgcugagaagcucuguauuuauacagauaauagcauccggccugaggaacugcuucagauggaacugcuccuggugaacaaacugaaguggaaucucgccgcgaugacaccccaugacuucauugagcacuuucuguccaaaaugccugaggccgaagagaacaagcaaaucauccgcaagcaugcucagaccuucguugcccuuugcgcuaccgaugugaaauuuauuucuaauccgcccagcauggucgccgcgggguccgugguggccgcuguccagggacugaaccucagaagcccuaauaacuuccugucuuacuaucggcuuacgcgcuuucuguccagaguuaucaagugugaccccgauugccuccgggccugucaggaacaaauugaggcucugcuggaaagcucucuccgccaggcccagcagaauauggacccuaaagccgcugaggaggaagaggaagaggaagaggagguggaucuggcgugcacccccacagacgugagagaugucgacaucuga

SEQ ID NO: 1217 - protein, 216 aa, Artificial Sequence
  cyp-B__Homo_sapiens__P23284
MLRLSERNMKVLLAAALIAGSVFFLLLPGPSAADEKKKGPKVTVKVYFDLRIGDEDVGRVIFGLFGKTVPKTVDNFVALATGEKGFGYKNSKFHRVIKDFMIQGGDFTRGDGTGGKSIYGERFPDENFKLKHYGPGWVSMANAGKDTNGSQFFITTVKTAWLDGKHVVFGKVLEGMEVVRKVESTKTDSRDKPLKDVIIADCGKIEVEKPFAIAKE

SEQ ID NO: 1218 - RNA, 651 nt, Artificial Sequence
  cyp-B__Homo_sapiens__AAA36601
augcugcgccucuccgaacgcaacaugaaggugcuccuugccgccgcccucaucgcgggguccgucuucuuccugcugcugccgggaccuucugcggccgaugagaagaagaaggggcccaaagucaccgucaagguguauuuugaccuacgaauuggagaugaagauguaggccgggugaucuuuggucucuucggaaagacuguuccaaaaacaguggauaauuuuguggccuuagcuacaggagagaaaggauuuggcuacaaaaacagcaaauuccaucguguaaucaaggacuucaugauccagggcggagacuucaccaggggagauggcacaggaggaaagagcaucuacggugagcgcuuccccgaugagaacuucaaacugaagcacuacgggccuggcugggugagcauggccaacgcaggcaaagacaccaacggcucccaguucuucaucacgacagucaagacagccuggcuagauggcaagcaugugguguuuggcaaaguucuagagggcauggagguggugcggaagguggagagcaccaagacagacagccgggauaaaccccugaaggaugugaucaucgcagacugcggcaagaucgagguggagaagcccuuugccaucgccaaggaguag

SEQ ID NO: 1219 - RNA, 651 nt, Artificial Sequence
  derived and/or modified sequence opt1 from cyp-B__Homo_sapiens__AAA36601
augcugcgccucagcgagcggaacaugaaggugcugcuggccgccgcgcucaucgccggcuccgucuucuuccugcugcuccccgggccgagcgccgccgacgagaagaagaagggccccaaggugaccgugaaggucuacuucgaccugcgcaucggggacgaggacgugggccgggugaucuucgggcuguucggcaagaccguccccaagacgguggacaacuucguggcccucgcgaccggcgagaagggguucggcuacaagaacuccaaguuccaccgcgucaucaaggacuucaugauccagggcggggacuucacccgcggggacggcaccggcggcaagagcaucuacggggagcgguuccccgacgagaacuucaagcugaagcacuacgggccgggcuggguguccauggccaacgccggcaaggacacgaacgggagccaguucuucaucaccaccgugaagaccgccuggcuggacggcaagcacgucguguucgggaaggugcucgagggcauggaggucgugcggaagguggaguccacgaagaccgacagccgcgacaagccccugaaggacgucaucaucgcggacugcgggaagaucgagguggagaagcccuucgccaucgccaaggaguga

SEQ ID NO: 1220 - RNA, 651 nt, Artificial Sequence
  derived and/or modified sequence opt2 from cyp-B__Homo_sapiens__AAA36601
augcuccgccucuccgagcgcaacaugaagguccuccucgccgccgcccucaucgccggcuccgucuucuuccuccuccuccccggccccuccgccgccgacgagaagaagaagggccccaaggucaccgucaaggucuacuucgaccuccgcaucggcgacgaggacgucggccgcgucaucuucggccucuucggcaagaccguccccaagaccgucgacaacuucgucgcccucgccaccggcgagaagggcuucggcuacaagaacuccaaguuccaccgcgucaucaaggacuucaugauccagggcggcgacuucacccgcggcgacggcaccggcggcaaguccaucuacggcgagcgcuuccccgacgagaacuucaagcucaagcacuacggccccggcugggucuccauggccaacgccggcaaggacaccaacggcucccaguucuucaucaccaccgucaagaccgccuggcucgacggcaagcacgucgucuucggcaagguccucgagggcauggaggucguccgcaaggucgaguccaccaagaccgacucccgcgacaagccccucaaggacgucaucaucgccgacugcggcaagaucgaggucgagaagcccuucgccaucgccaaggaguga

SEQ ID NO: 1221 - RNA, 651 nt, Artificial Sequence
  derived and/or modified sequence opt3 from cyp-B__Homo_sapiens__AAA36601
augcugagacucagcgagaggaacaugaaggugcuucuggccgcugcauugaucgccggcuccgucuucuuuuuacugcuacccgggccuucugcggcugacgagaaaaagaaaggaccaaagguuaccgugaaaguauacuucgaucuccggauuggugacgaagaugugggccgcgucauauuugggcuguucggaaagacagugccgaagacuguugacaauuuuguggcccuugcaacgggcgaaaaagguuucggguauaagaacucaaaauuucaccgagucaucaaggauuucaugauucagggaggcgacuuuacccguggcgaugggacaggagguaaaaguaucuacggcgagagauuccccgacgaaaauuuuaagcugaagcauuaugggccuggaugggugagcauggccaacgcuggcaaagauacuaaugguucccaauucuuuauuaccacaguaaagaccgcaugguuggacgggaaacacguuguguucggaaagguccucgagggcauggagguggugaggaaagucgaaucuacuaagacagauucgcgggacaaaccacugaaggauguuaucauagccgacugcggcaagaucgagguggaaaaacccuucgcuauugccaaggaguga

SEQ ID NO: 1222 - RNA, 651 nt, Artificial Sequence
  derived and/or modified sequence opt4 from cyp-B__Homo_sapiens__AAA36601
augcugagacugagcgagagaaacaugaaggugcugcuggccgccgcccugaucgccggcagcguguucuuccugcugcugcccggccccagcgccgccgacgagaagaagaagggccccaaggugaccgugaagguguacuucgaccugagaaucggcgacgaggacgugggcagagugaucuucggccuguucggcaagaccgugcccaagaccguggacaacuucguggcccuggccaccggcgagaagggcuucggcuacaagaacagcaaguuccacagagugaucaaggacuucaugauccagggcggcgacuucaccagaggcgacggcaccggcggcaagagcaucuacggcgagagauuccccgacgagaacuucaagcugaagcacuacggccccggcugggugagcauggccaacgccggcaaggacaccaacggcagccaguucuucaucaccaccgugaagaccgccuggcuggacggcaagcacgugguguucggcaaggugcuggagggcauggagguggugagaaagguggagagcaccaagaccgacagcagagacaagccccugaaggacgugaucaucgccgacugcggcaagaucgagguggagaagcccuucgccaucgccaaggaguga

SEQ ID NO: 1223 - RNA, 651 nt, Artificial Sequence
  derived and/or modified sequence opt5 from cyp-B__Homo_sapiens__AAA36601
augcugagacucagcgagcggaacaugaaggugcugcuugccgcugcccugaucgcgggcuccgucuucuuucuccugcuucccgggccuucugcugccgacgagaaaaagaaaggaccgaagguuaccgugaaaguguacuucgaucugcgcauuggcgacgaagaugucgggagagugaucuuuggacucuucggcaagacaguucccaagacgguggacaauuuugucgcccuggcuaccggggaaaaaggauucggcuauaagaacagcaaauuucaccgggugauuaaggauuucaugauccagggcggggacuuuacacgcggagauggcaccgggggaaaauccauuuacggcgagagauucccugacgaaaauuuuaagcugaagcauuaugggcccggauggguuucuauggccaacgcuggcaaagauacaaauggcagccaauucuuuaucaccacagugaagaccgccuggcucgacgggaaacacgucguguucggaaaggugcuggagggcauggaggucguucggaaaguggaauccacgaagaccgauucucgcgacaaaccucuuaaggaugugaucauugcggacugcgggaagaucgaggucgaaaaacccuucgccauugcuaaggaguga

SEQ ID NO: 1224 - protein, 347 aa, Artificial Sequence
  DAM-10__Homo_sapiens__P43366
MPRGQKSKLRAREKRRKAREETQGLKVAHATAAEKEECPSSSPVLGDTPTSSPAAGIPQKPQGAPPTTTAAAAVSCTESDEGAKCQGEENASFSQATTSTESSVKDPVAWEAGMLMHFILRKYKMREPIMKADMLKVVDEKYKDHFTEILNGASRRLELVFGLDLKEDNPSGHTYTLVSKLNLTNDGNLSNDWDFPRNGLLMPLLGVIFLKGNSATEEEIWKFMNVLGAYDGEEHLIYGEPRKFITQDLVQEKYLKYEQVPNSDPPRYQFLWGPRAYAETTKMKVLEFLAKMNGATPRDFPSHYEEALRDEEERAQVRSSVRARRRTTATTFRARSRAPFSRSSHPM

SEQ ID NO: 1225 - RNA, 1044 nt, Artificial Sequence
  DAM-10__Homo_sapiens__AAD10634
augccucggggucagaagaguaagcuccgugcucgugagaaacgccgcaaggcgcgagaggagacccagggucucaagguugcucacgccacugcagcagagaaagaggagugccccuccuccucuccuguuuuaggggauacucccacaagcuccccugcugcuggcauuccccagaagccucagggagcuccacccaccaccacugcugcugcagcugugucauguaccgaaucugacgaaggugccaaaugccaaggugaggaaaaugcaaguuucucccaggccacaacauccacugagagcucagucaaagauccuguagccugggaggcaggaaugcugaugcacuucauucuacguaaguauaaaaugagagagcccauuaugaaggcagauaugcugaagguuguugaugaaaaguacaaggaucacuucacugagauccucaauggagccucucgccgcuuggagcucgucuuuggccuugauuugaaggaagacaacccuaguggccacaccuacacccucgucaguaagcuaaaccucaccaaugauggaaaccugagcaaugauugggacuuucccaggaaugggcuucugaugccucuccugggugugaucuucuuaaagggcaacucugccaccgaggaagagaucuggaaauucaugaauguguugggagccuaugauggagaggagcacuuaaucuauggggaaccccguaaguucaucacccaagaucuggugcaggaaaaauaucugaaguacgagcaggugcccaacagugaucccccacgcuaucaauuccuaugggguccgagagccuaugcugaaaccaccaagaugaaaguccucgaguuuuuggccaagaugaauggugccacuccccgugacuucccaucccauuaugaagaggcuuugagagaugaggaagagagagcccaaguccgauccaguguuagagccaggcgucgcacuacugccacgacuuuuagagcgcguucuagagccccauucagcagguccucccaccccauguga

SEQ ID NO: 1226 - RNA, 1044 nt, Artificial Sequence
  derived and/or modified sequence opt1 from DAM-10__Homo_sapiens__AAD10634
augccccgcggccagaaguccaagcugcgggcccgcgagaagcggcgcaaggcccgggaggagacccaggggcucaagguggcgcacgccaccgccgccgagaaggaggagugcccgagcagcucccccguccugggcgacacgcccaccagcucccccgccgcggggaucccgcagaagccccagggcgccccgcccaccaccacggccgccgcggccgugagcugcaccgaguccgacgagggggccaagugccagggcgaggagaacgccagcuucucccaggccaccaccagcacggaguccagcgugaaggaccccgucgcgugggaggccggcaugcugaugcacuucauccuccgcaaguacaagaugcgggagcccaucaugaaggccgacaugcugaaggugguggacgagaaguacaaggaccacuucaccgagauccugaacggggccucccgccggcucgagcuggucuucggccuggaccucaaggaggacaaccccagcgggcacaccuacacccugguguccaagcugaaccucacgaacgacggcaaccugagcaacgacugggacuucccccgcaacgggcugcucaugccgcugcugggcgugaucuuccucaagggcaacuccgccaccgaggaggagaucuggaaguucaugaacguccugggggcguacgacggcgaggagcaccugaucuacggggagccccggaaguucaucacccaggaccucgugcaggagaaguaccugaaguacgagcagguccccaacagcgacccgccccgcuaccaguuccuguggggcccccgggccuacgccgagaccacgaagaugaaggugcucgaguuccuggccaagaugaacggcgccacgccccgcgacuuccccucccacuacgaggaggcgcugcgggacgaggaggagcgcgcccaggugcggagcagcgugcgcgcccggcgccggaccaccgccaccaccuuccgcgcccgcucccgggcgccguucagccgcuccagccaccccauguga

SEQ ID NO: 1227 - RNA, 1044 nt, Artificial Sequence
  derived and/or modified sequence opt2 from DAM-10__Homo_sapiens__AAD10634
augccccgcggccagaaguccaagcuccgcgcccgcgagaagcgccgcaaggcccgcgaggagacccagggccucaaggucgcccacgccaccgccgccgagaaggaggagugccccuccuccucccccguccucggcgacacccccaccuccucccccgccgccggcaucccccagaagccccagggcgccccccccaccaccaccgccgccgccgccgucuccugcaccgaguccgacgagggcgccaagugccagggcgaggagaacgccuccuucucccaggccaccaccuccaccgaguccuccgucaaggaccccgucgccugggaggccggcaugcucaugcacuucauccuccgcaaguacaagaugcgcgagcccaucaugaaggccgacaugcucaaggucgucgacgagaaguacaaggaccacuucaccgagauccucaacggcgccucccgccgccucgagcucgucuucggccucgaccucaaggaggacaaccccuccggccacaccuacacccucgucuccaagcucaaccucaccaacgacggcaaccucuccaacgacugggacuucccccgcaacggccuccucaugccccuccucggcgucaucuuccucaagggcaacuccgccaccgaggaggagaucuggaaguucaugaacguccucggcgccuacgacggcgaggagcaccucaucuacggcgagccccgcaaguucaucacccaggaccucguccaggagaaguaccucaaguacgagcagguccccaacuccgaccccccccgcuaccaguuccucuggggcccccgcgccuacgccgagaccaccaagaugaagguccucgaguuccucgccaagaugaacggcgccaccccccgcgacuuccccucccacuacgaggaggcccuccgcgacgaggaggagcgcgcccagguccgcuccuccguccgcgcccgccgccgcaccaccgccaccaccuuccgcgcccgcucccgcgcccccuucucccgcuccucccaccccauguga

SEQ ID NO: 1228 - RNA, 1044 nt, Artificial Sequence
  derived and/or modified sequence opt3 from DAM-10__Homo_sapiens__AAD10634
augcccagaggccaaaagagcaaacugagggcccgggagaagcgccgaaaagcucgugaagagacccaggggcucaagguggcacacgccacagcggcugaaaaagaggaaugcccuuccucuucaccaguccuuggagacacuccgacgaguagccccgccgcagguaucccucagaagccacagggcgcucccccuaccacaacugccgcagccgcuguuuccuguaccgagucugaugagggggccaagugccagggagaagagaacgcgucguucucacaagcaacaaccagcacugaaaguuccgugaaagacccaguagccugggaggcuggcaugcugaugcauuuuauuuugagaaaguacaaaaugagggagcccauaaugaaggccgauauguuaaaaguggucgacgaaaaguauaaggaucacuucacagagauccugaauggugcaucucggcgccuagaacucguguuugggcuggaccuuaaagaggauaacccuagcggacauaccuacacgcugguuuccaaguugaaucucacuaacgacggcaaucugucaaacgauugggacuucccaagaaauggccugcucaugccguuacugggggugauuuuucuuaaaggaaacagugcuaccgaagaggagaucuggaaguucaugaaugucuugggugccuaugauggcgaggaacaccugauuuacggggaacccaggaaauuuaucacacaggaccuagugcaggagaaguaucucaaauacgaacagguaccuaacagcgauccaccccgguaucaauuccuguggggaccucgcgcguacgccgagacuaccaagaugaagguucuugaguuucuggcaaaaaugaauggcgcuacaccacgagacuuccccucucauuacgaagaggccuugagagacgaagaggaaagggcucaggugcgguccucaguccgugcccgcagaaggaccacggcaacuacauuucgggcccgaagccgcgcuccguucaguagaucuucccacccuauguga

SEQ ID NO: 1229 - RNA, 1044 nt, Artificial Sequence
  derived and/or modified sequence opt4 from DAM-10__Homo_sapiens__AAD10634
augcccagaggccagaagagcaagcugagagccagagagaagagaagaaaggccagagaggagacccagggccugaagguggcccacgccaccgccgccgagaaggaggagugccccagcagcagccccgugcugggcgacacccccaccagcagccccgccgccggcaucccccagaagccccagggcgccccccccaccaccaccgccgccgccgccgugagcugcaccgagagcgacgagggcgccaagugccagggcgaggagaacgccagcuucagccaggccaccaccagcaccgagagcagcgugaaggaccccguggccugggaggccggcaugcugaugcacuucauccugagaaaguacaagaugagagagcccaucaugaaggccgacaugcugaaggugguggacgagaaguacaaggaccacuucaccgagauccugaacggcgccagcagaagacuggagcugguguucggccuggaccugaaggaggacaaccccagcggccacaccuacacccuggugagcaagcugaaccugaccaacgacggcaaccugagcaacgacugggacuuccccagaaacggccugcugaugccccugcugggcgugaucuuccugaagggcaacagcgccaccgaggaggagaucuggaaguucaugaacgugcugggcgccuacgacggcgaggagcaccugaucuacggcgagcccagaaaguucaucacccaggaccuggugcaggagaaguaccugaaguacgagcaggugcccaacagcgacccccccagauaccaguuccuguggggccccagagccuacgccgagaccaccaagaugaaggugcuggaguuccuggccaagaugaacggcgccacccccagagacuuccccagccacuacgaggaggcccugagagacgaggaggagagagcccaggugagaagcagcgugagagccagaagaagaaccaccgccaccaccuucagagccagaagcagagcccccuucagcagaagcagccaccccauguga

SEQ ID NO: 1230 - RNA, 1044 nt, Artificial Sequence
  derived and/or modified sequence opt5 from DAM-10__Homo_sapiens__AAD10634
augcccagaggccaaaagagcaaacugcgggcccgcgagaagagacggaaagcucgcgaagagacccaggggcucaagguggcccacgcgacagcugccgaaaaagaggaaugcccuuccucuagcccgguccugggagacacgcccaccuccucuccugccgcuggcaucccccagaagccucagggggcucccccuacaaccacagccgccgcggccguuagcuguaccgaguccgaugagggagcuaagugccagggcgaagagaacgccucuuucagccaagcuacaaccuccacggaaagcucugugaaagacccgguggccugggaggcggggaugcuuaugcauuuuauucugagaaaguacaaaaugcgggagcccaucaugaaggccgauaugcucaaagucguggacgaaaaguauaaggaucacuucaccgagauucugaauggagcuucccgcagacuugaacugguuuuuggccucgaccugaaagaggauaacccuagcggccauacauacacccuggugucuaagcucaaucugacaaacgacgggaaucuuuccaacgauugggacuucccccggaauggacugcucaugccucugcuuggcgucaucuuucugaaagggaacagcgccaccgaagaggagauuuggaaguucaugaaugugcucggagcuuaugauggcgaggaacaccugaucuacggggaaccccgcaaauuuaucacgcaggaccugguucaggagaaguaucucaaauacgaacaggugccgaacucugauccucccagauaucaauuccuguggggaccucgggccuacgccgagacaaccaagaugaagguccuugaguuucuggcuaaaaugaauggcgcgacaccccgcgacuuccccucccauuacgaagaggcccucagagacgaagaggaacgggcucaggugcgcagcuccgugagagcccggagacgcaccaccgccacaacguuucgggcuagaucucgcgccccuuucagccgguccagccacccgauguga

SEQ ID NO: 1231 - protein, 811 aa, Artificial Sequence
  DEP1A__Homo_sapiens__Q5TB30
MESQGVPPGPYRATKLWNEVTTSFRAGMPLRKHRQHFKKYGNCFTAGEAVDWLYDLLRNNSNFGPEVTRQQTIQLLRKFLKNHVIEDIKGRWGSENVDDNNQLFRFPATSPLKTLPRRYPELRKNNIENFSKDKDSIFKLRNLSRRTPKRHGLHLSQENGEKIKHEIINEDQENAIDNRELSQEDVEEVWRYVILIYLQTILGVPSLEEVINPKQVIPQYIMYNMANTSKRGVVILQNKSDDLPHWVLSAMKCLANWPRSNDMNNPTYVGFERDVFRTIADYFLDLPEPLLTFEYYELFVNILVVCGYITVSDRSSGIHKIQDDPQSSKFLHLNNLNSFKSTECLLLSLLHREKNKEESDSTERLQISNPGFQERCAKKMQLVNLRNRRVSANDIMGGSCHNLIGLSNMHDLSSNSKPRCCSLEGIVDVPGNSSKEASSVFHQSFPNIEGQNNKLFLESKPKQEFLLNLHSEENIQKPFSAGFKRTSTLTVQDQEELCNGKCKSKQLCRSQSLLLRSSTRRNSYINTPVAEIIMKPNVGQGSTSVQTAMESELGESSATINKRLCKSTIELSENSLLPASSMLTGTQSLLQPHLERVAIDALQLCCLLLPPPNRRKLQLLMRMISRMSQNVDMPKLHDAMGTRSLMIHTFSRCVLCCAEEVDLDELLAGRLVSFLMDHHQEILQVPSYLQTAVEKHLDYLKKGHIENPGDGLFAPLPTYSYCKQISAQEFDEQKVSTSQAAIAELLENIIKNRSLPLKEKRKKLKQFQKEYPLIYQKRFPTTESEAALFGDKPTIKQPMLILRKPKFRSLR

SEQ ID NO: 1232 - RNA, 2436 nt, Artificial Sequence
  DEP1A__Homo_sapiens__BAF91373
auggagagucagggugugccucccgggccuuaucgggccaccaagcuguggaaugaaguuaccacaucuuuucgagcaggaaugccucuaagaaaacacagacaacacuuuaaaaaauauggcaauuguuucacagcaggagaagcaguggauuggcuuuaugaccuauuaagaaauaauagcaauuuugguccugaaguuacaaggcaacagacuauccaacuguugaggaaauuucuuaagaaucauguaauugaagauaucaaagggagguggggaucagaaaauguugaugauaacaaccagcucuucagauuuccugcaacuucgccacuuaaaacucuaccacgaagguauccagaauugagaaaaaacaacauagagaacuuuuccaaagauaaagauagcauuuuuaaauuacgaaacuuaucucguagaacuccuaaaaggcauggauuacauuuaucucaggaaaauggcgagaaaauaaagcaugaaauaaucaaugaagaucaagaaaaugcaauugauaauagagaacuaagccaggaagauguugaagaaguuuggagauauguuauucugaucuaccugcaaaccauuuuaggugugccaucccuagaagaagucauaaauccaaaacaaguaauuccccaauauauaauguacaacauggccaauacaaguaaacguggaguaguuauacuacaaaacaaaucagaugaccucccucacuggguauuaucugccaugaagugccuagcaaauuggccaagaagcaaugauaugaauaauccaacuuauguuggauuugaacgagauguauucagaacaaucgcagauuauuuucuagaucucccugaaccucuacuuacuuuugaauauuacgaauuauuuguaaacauuuugguuguuuguggcuacaucacaguuucagauagauccagugggauacauaaaauucaagaugauccacagucuucaaaauuccuucacuuaaacaauuugaauuccuucaaaucaacugagugccuucuucucagucugcuucauagagaaaaaaacaaagaagaaucagauucuacugagagacuacagauaagcaauccaggauuucaagaaagaugugcuaagaaaaugcagcuaguuaauuuaagaaacagaagagugagugcuaaugacauaaugggaggaaguugucauaauuuaauaggguuaaguaauaugcaugaucuauccucuaacagcaaaccaaggugcuguucuuuggaaggaauuguagaugugccagggaauucaaguaaagaggcauccagugucuuucaucaaucuuuuccgaacauagaaggacaaaauaauaaacuguuuuuagagucuaagcccaaacaggaauuccuguugaaucuucauucagaggaaaauauucaaaagccauucagugcugguuuuaagagaaccucuacuuugacuguucaagaccaagaggaguuguguaaugggaaaugcaagucaaaacagcuuuguaggucucagaguuugcuuuuaagaaguaguacaagaaggaauaguuauaucaauacaccaguggcugaaauuaucaugaaaccaaauguuggacaaggcagcacaagugugcaaacagcuauggaaagugaacucggagagucuagugccacaaucaauaaaagacucugcaaaaguacaauagaacuuucagaaaauucuuuacuuccagcuucuucuauguugacuggcacacaaagcuugcugcaaccucauuuagagaggguugccaucgaugcucuacaguuauguuguuuguuacuucccccaccaaaucguagaaagcuucaacuuuuaaugcguaugauuucccgaaugagucaaaauguugauaugcccaaacuucaugaugcaauggguacgaggucacugaugauacauaccuuuucucgauguguguuaugcugugcugaagaaguggaucuugaugagcuucuugcuggaagauuaguuucuuucuuaauggaucaucaucaggaaauucuucaaguacccucuuacuuacagacugcaguggaaaaacaucuugacuacuuaaaaaagggacauauugaaaauccuggagauggacuauuugcuccuuugccaacuuacucauacuguaagcagauuagugcucaggaguuugaugagcaaaaaguuucuaccucucaagcugcaauugcagaacuuuuagaaaauauuauuaaaaacaggaguuuaccucuaaaggagaaaagaaaaaaacuaaaacaguuucagaaggaauauccuuugauauaucagaaaagauuuccaaccacggagagugaagcagcacuuuuuggugacaaaccuacaaucaagcaaccaaugcugauuuuaagaaaaccaaaguuccguagucuaagauaa

SEQ ID NO: 1233 - RNA, 2436 nt, Artificial Sequence
  derived and/or modified sequence opt1 from DEP1A__Homo_sapiens__BAF91373
auggagagccagggcgugcccccggggcccuaccgcgccaccaagcuguggaacgaggucaccacguccuuccgggccggcaugccccuccgcaagcaccggcagcacuucaagaaguacgggaacugcuucaccgcgggcgaggccguggacuggcuguacgaccugcuccgcaacaacagcaacuucgggcccgaggugacccggcagcagaccauccagcugcugcgcaaguuccucaagaaccacgucaucgaggacaucaagggccgguggggcuccgagaacguggacgacaacaaccagcuguuccgcuucccggccacgagcccccugaagacccucccccggcgcuaccccgagcugcggaagaacaacaucgagaacuucuccaaggacaaggacagcaucuucaagcugcgcaaccucucccggcgcaccccgaagcggcacgggcugcaccugagccaggagaacggcgagaagaucaagcacgagaucaucaacgaggaccaggagaacgccaucgacaaccgcgagcucucccaggaggacguggaggaggucuggcgguacgugauccugaucuaccugcagaccauccucggggugcccagccuggaggaggucaucaaccccaagcaggucaucccccaguacaucauguacaacauggccaacacguccaagcgcggcguggugauccugcagaacaagagcgacgaccucccgcacugggugcuguccgcgaugaagugccuggccaacuggccccggagcaacgacaugaacaaccccaccuacgugggguucgagcgcgacgucuuccggaccaucgccgacuacuuccucgaccugcccgagccgcugcucaccuucgaguacuacgagcuguucgugaacauccugguggucugcggcuacaucacgguguccgaccgcagcuccggcauccacaagauccaggacgacccccagagcuccaaguuccuccaccugaacaaccugaacagcuucaagagcaccgagugccuccugcugucccuccugcaccgcgagaagaacaaggaggagagcgacuccaccgagcggcugcagaucagcaaccccggguuccaggagcgcugcgccaagaagaugcagcucgugaaccugcggaaccgccgggucuccgcgaacgacaucaugggcgggagcugccacaaccugaucggccucuccaacaugcacgaccugagcuccaacagcaagccccgcugcugcucccuggagggcaucguggacgugccggggaacagcuccaaggaggccagcuccgucuuccaccagagcuuccccaacaucgagggccagaacaacaagcuguuccuggaguccaagcccaagcaggaguuccugcucaaccugcacagcgaggagaacauccagaagcccuucuccgccggguucaagcggaccagcacgcugaccgugcaggaccaggaggagcugugcaacggcaagugcaagagcaagcagcucugccgcucccagagccugcugcuccgguccagcacccgccggaacuccuacaucaacaccccggucgccgagaucaucaugaagcccaacguggggcagggcagcacguccgugcagaccgccauggagagcgagcugggcgaguccagcgcgaccaucaacaagcgccugugcaaguccaccaucgagcucagcgagaacucccugcugcccgccagcuccaugcucacggggacccagagccugcugcagccccaccucgagcgggucgccaucgacgcccugcagcugugcugccuccugcugccgccgcccaaccgccggaagcuccagcugcugaugcgcaugaucucccggaugagccagaacguggacaugcccaagcuccacgacgccaugggcacccgcagccugaugauccacaccuucucccggugcgugcugugcugcgcggaggaggucgaccucgacgagcugcuggccgggcgccucgugagcuuccugauggaccaccaccaggagauccuccaggugcccuccuaccuccagacggccgucgagaagcaccuggacuaccugaagaagggccacaucgagaaccccggggacggccucuucgcgccccugccgaccuacagcuacugcaagcagaucuccgcccaggaguucgacgagcagaaggugagcaccucccaggccgccaucgccgagcugcucgagaacaucaucaagaaccgcagccugccccugaaggagaagcggaagaagcucaagcaguuccagaaggaguacccccugaucuaccagaagcgcuuccccaccacggaguccgaggccgcccuguucggcgacaagccgaccaucaagcagcccaugcucauccugcggaagcccaaguuccgcagccugcgguga

SEQ ID NO: 1234 - RNA, 2436 nt, Artificial Sequence
  derived and/or modified sequence opt2 from DEP1A__Homo_sapiens__BAF91373
auggagucccagggcgucccccccggccccuaccgcgccaccaagcucuggaacgaggucaccaccuccuuccgcgccggcaugccccuccgcaagcaccgccagcacuucaagaaguacggcaacugcuucaccgccggcgaggccgucgacuggcucuacgaccuccuccgcaacaacuccaacuucggccccgaggucacccgccagcagaccauccagcuccuccgcaaguuccucaagaaccacgucaucgaggacaucaagggccgcuggggcuccgagaacgucgacgacaacaaccagcucuuccgcuuccccgccaccuccccccucaagacccucccccgccgcuaccccgagcuccgcaagaacaacaucgagaacuucuccaaggacaaggacuccaucuucaagcuccgcaaccucucccgccgcacccccaagcgccacggccuccaccucucccaggagaacggcgagaagaucaagcacgagaucaucaacgaggaccaggagaacgccaucgacaaccgcgagcucucccaggaggacgucgaggaggucuggcgcuacgucauccucaucuaccuccagaccauccucggcguccccucccucgaggaggucaucaaccccaagcaggucaucccccaguacaucauguacaacauggccaacaccuccaagcgcggcgucgucauccuccagaacaaguccgacgaccucccccacuggguccucuccgccaugaagugccucgccaacuggccccgcuccaacgacaugaacaaccccaccuacgucggcuucgagcgcgacgucuuccgcaccaucgccgacuacuuccucgaccuccccgagccccuccucaccuucgaguacuacgagcucuucgucaacauccucgucgucugcggcuacaucaccgucuccgaccgcuccuccggcauccacaagauccaggacgacccccaguccuccaaguuccuccaccucaacaaccucaacuccuucaaguccaccgagugccuccuccucucccuccuccaccgcgagaagaacaaggaggaguccgacuccaccgagcgccuccagaucuccaaccccggcuuccaggagcgcugcgccaagaagaugcagcucgucaaccuccgcaaccgccgcgucuccgccaacgacaucaugggcggcuccugccacaaccucaucggccucuccaacaugcacgaccucuccuccaacuccaagccccgcugcugcucccucgagggcaucgucgacguccccggcaacuccuccaaggaggccuccuccgucuuccaccaguccuuccccaacaucgagggccagaacaacaagcucuuccucgaguccaagcccaagcaggaguuccuccucaaccuccacuccgaggagaacauccagaagcccuucuccgccggcuucaagcgcaccuccacccucaccguccaggaccaggaggagcucugcaacggcaagugcaaguccaagcagcucugccgcucccagucccuccuccuccgcuccuccacccgccgcaacuccuacaucaacacccccgucgccgagaucaucaugaagcccaacgucggccagggcuccaccuccguccagaccgccauggaguccgagcucggcgaguccuccgccaccaucaacaagcgccucugcaaguccaccaucgagcucuccgagaacucccuccuccccgccuccuccaugcucaccggcacccagucccuccuccagccccaccucgagcgcgucgccaucgacgcccuccagcucugcugccuccuccuccccccccccaaccgccgcaagcuccagcuccucaugcgcaugaucucccgcaugucccagaacgucgacaugcccaagcuccacgacgccaugggcacccgcucccucaugauccacaccuucucccgcugcguccucugcugcgccgaggaggucgaccucgacgagcuccucgccggccgccucgucuccuuccucauggaccaccaccaggagauccuccagguccccuccuaccuccagaccgccgucgagaagcaccucgacuaccucaagaagggccacaucgagaaccccggcgacggccucuucgccccccuccccaccuacuccuacugcaagcagaucuccgcccaggaguucgacgagcagaaggucuccaccucccaggccgccaucgccgagcuccucgagaacaucaucaagaaccgcucccucccccucaaggagaagcgcaagaagcucaagcaguuccagaaggaguacccccucaucuaccagaagcgcuuccccaccaccgaguccgaggccgcccucuucggcgacaagcccaccaucaagcagcccaugcucauccuccgcaagcccaaguuccgcucccuccgcuga

SEQ ID NO: 1235 - RNA, 2436 nt, Artificial Sequence
  derived and/or modified sequence opt3 from DEP1A__Homo_sapiens__BAF91373
auggagagccagggcgugcccccugggccauacagagccaccaagcuguggaacgaagucacaacuuccuucagggcuggaaugccgcuccggaaacaccgccaacauuuuaagaaauaugguaauugcuucacggcaggcgaggccguugacuggcuuuacgaucuguugcgaaacaauucuaacuuugggcccgaagugacccgucagcagacaauccaguuacugagaaaguuccugaaaaaucacguaauugaggacauaaagggaagguggggcucagaaaacguggaugacaauaaccaacucuuucgguucccugcgaccaguccacugaagacucuuccccgcagauauccugagcugaggaaaaauaacaucgagaauuuuagcaaggauaaagacuccauuuucaaguugcggaaccucucucgccgaacaccaaaaagacauggucugcaccugucgcaggaaaauggggagaagaucaagcaugaaauuaucaacgaggaucaggagaaugcuauagacaacagggaacucucacaggaggaugucgaagagguguggcgguacguuaucuuaauuuaucugcaaaccauccuuggagugcccagcuuggaagaggucauuaacccuaaacaggugaucccacaguacauaauguauaauauggccaacacaaguaagcguggcguaguuauucugcagaauaaauccgacgaucuaccgcacugggugcucucugcaaugaagugucuggccaacuggccccgcagcaaugacaugaacaauccuacuuacgucggcuuugagagagauguguucaggaccaucgcugacuacuuucuugaccugccagaacccuugcucacguucgaguauuacgaacuguuugugaacauuuuagucguuugcggguauaucacuguguccgaucggucaaguggaauccacaaaauucaagacgauccucagagcucuaaguuccugcaucucaauaaccuuaauuccuucaaaucaaccgagugucuguugcuaagccugcuccaccgagaaaagaacaaggaggagagugacucuacagaacgccugcagauauccaauccagguuuucaagagagaugcgccaaaaagaugcagcuuguaaaccugaggaaucggcgcgugagcgcaaacgauaucaugggcgggucgugucauaacuugauuggacucucuaauaugcacgaccuguccucaaacaguaaacccagaugcuguagcuuagaaggcaucgucgaugugccggguaauuccucuaaggaggcuagcucaguuuuccaccagaguuuuccuaacauagaagggcagaauaacaaacuguuccuagaguccaagcccaagcaagaguuucuccugaaucuucauagcgaagagaacauucagaaaccauucucugccggauuuaagaggacuucaaccuugacagugcaggaccaggaggaacugugcaauggcaaauguaagaguaaacaacucugccguagccagucccugcuucugcggucuucgacccgaagaaacagcuacaucaauacgccugucgcggagaucauuaugaagcccaacgugggccagggguccacuucaguacagacagcaauggaaagugaguugggagaaucuagcgccaccaucaauaagaggcucuguaaauccacuauugagcugucagaaaacagcuuacugccagcuucuuccaugcuaacagguacccaaagucuccugcagccccaccuugagcgcguugccauagaugcauugcagcugugcugccuccuguuaccuccaccgaaucggagaaagcugcagcuuuugaugaggaugaucagccgcaugucucaaaacguggacaugcccaaacuccaugaugcuaugggcacgcgaucccugaugauucacaccuucucacgguguguccuaugcugugccgaggaaguggaccuggacgagcuccuggcggggcgucuugucagcuuuuugauggaucaucaccaggaaauccuacaggugccuaguuauuuacaaacagccguugagaagcaccucgacuaccugaaaaagggacauaucgaaaacccaggcgauggucuuuucgcaccccugccuacuuauucguacugcaagcagauuuccgcucaggaguuugacgagcagaaagugucuaccagccaagccgcuauagccgaauugcucgagaauaucauuaagaacagaucacugccacuaaaagaaaagaggaaaaagcugaaacaguuccagaaggaguacccccucaucuaucagaagcgcuuuccgacaacugaaagugaggcagcccuguucggggauaaaccuaccauuaagcaaccaaugcuuaucuugcggaaacccaaguucagaucccugagguga

SEQ ID NO: 1236 - RNA, 2436 nt, Artificial Sequence
  derived and/or modified sequence opt4 from DEP1A__Homo_sapiens__BAF91373
auggagagccagggcgugccccccggccccuacagagccaccaagcuguggaacgaggugaccaccagcuucagagccggcaugccccugagaaagcacagacagcacuucaagaaguacggcaacugcuucaccgccggcgaggccguggacuggcuguacgaccugcugagaaacaacagcaacuucggccccgaggugaccagacagcagaccauccagcugcugagaaaguuccugaagaaccacgugaucgaggacaucaagggcagauggggcagcgagaacguggacgacaacaaccagcuguucagauuccccgccaccagcccccugaagacccugcccagaagauaccccgagcugagaaagaacaacaucgagaacuucagcaaggacaaggacagcaucuucaagcugagaaaccugagcagaagaacccccaagagacacggccugcaccugagccaggagaacggcgagaagaucaagcacgagaucaucaacgaggaccaggagaacgccaucgacaacagagagcugagccaggaggacguggaggagguguggagauacgugauccugaucuaccugcagaccauccugggcgugcccagccuggaggaggugaucaaccccaagcaggugaucccccaguacaucauguacaacauggccaacaccagcaagagaggcguggugauccugcagaacaagagcgacgaccugccccacugggugcugagcgccaugaagugccuggccaacuggcccagaagcaacgacaugaacaaccccaccuacgugggcuucgagagagacguguucagaaccaucgccgacuacuuccuggaccugcccgagccccugcugaccuucgaguacuacgagcuguucgugaacauccugguggugugcggcuacaucaccgugagcgacagaagcagcggcauccacaagauccaggacgacccccagagcagcaaguuccugcaccugaacaaccugaacagcuucaagagcaccgagugccugcugcugagccugcugcacagagagaagaacaaggaggagagcgacagcaccgagagacugcagaucagcaaccccggcuuccaggagagaugcgccaagaagaugcagcuggugaaccugagaaacagaagagugagcgccaacgacaucaugggcggcagcugccacaaccugaucggccugagcaacaugcacgaccugagcagcaacagcaagcccagaugcugcagccuggagggcaucguggacgugcccggcaacagcagcaaggaggccagcagcguguuccaccagagcuuccccaacaucgagggccagaacaacaagcuguuccuggagagcaagcccaagcaggaguuccugcugaaccugcacagcgaggagaacauccagaagcccuucagcgccggcuucaagagaaccagcacccugaccgugcaggaccaggaggagcugugcaacggcaagugcaagagcaagcagcugugcagaagccagagccugcugcugagaagcagcaccagaagaaacagcuacaucaacacccccguggccgagaucaucaugaagcccaacgugggccagggcagcaccagcgugcagaccgccauggagagcgagcugggcgagagcagcgccaccaucaacaagagacugugcaagagcaccaucgagcugagcgagaacagccugcugcccgccagcagcaugcugaccggcacccagagccugcugcagccccaccuggagagaguggccaucgacgcccugcagcugugcugccugcugcugcccccccccaacagaagaaagcugcagcugcugaugagaaugaucagcagaaugagccagaacguggacaugcccaagcugcacgacgccaugggcaccagaagccugaugauccacaccuucagcagaugcgugcugugcugcgccgaggagguggaccuggacgagcugcuggccggcagacuggugagcuuccugauggaccaccaccaggagauccugcaggugcccagcuaccugcagaccgccguggagaagcaccuggacuaccugaagaagggccacaucgagaaccccggcgacggccuguucgccccccugcccaccuacagcuacugcaagcagaucagcgcccaggaguucgacgagcagaaggugagcaccagccaggccgccaucgccgagcugcuggagaacaucaucaagaacagaagccugccccugaaggagaagagaaagaagcugaagcaguuccagaaggaguacccccugaucuaccagaagagauuccccaccaccgagagcgaggccgcccuguucggcgacaagcccaccaucaagcagcccaugcugauccugagaaagcccaaguucagaagccugagauga

SEQ ID NO: 1237 - RNA, 2436 nt, Artificial Sequence
  derived and/or modified sequence opt5 from DEP1A__Homo_sapiens__BAF91373
auggagagccagggcgugcccccugggccguacagagccaccaagcuguggaacgaagucacaacguccuuccgggcuggaaugccccuccgcaaacacagacaacauuuuaagaaauauggcaauugcuucaccgccggggaggcgguugacuggcuguacgaucuucugcggaacaauucuaacuuuggaccugaagugacacgccagcagaccauccagcuccugagaaaguuccuuaaaaaucacgugauugaggacaucaagggccggugggggagcgaaaacgucgaugacaauaaccaacuguuucgcuuccccgcuacauccccucucaagacccugcccagacgguauccugagcugcgcaaaaauaacauugagaauuuuucuaaggauaaagacagcaucuucaagcucagaaaccugucccggcgcacaccgaaaagacauggacuucaccugucucaggaaaauggcgagaagauuaagcaugaaaucaucaacgaggaucaggagaaugccauugacaaccgggaacucagccaggaggauguggaagagguuuggcgcuacgugauccugauuuaucuucaaaccauccugggcguccccucccucgaagaggugauuaacccuaaacagguuaucccccaguacauuauguauaauauggccaacacgagcaagagagggguggucauccugcagaauaaaucugacgaucugccucacugggugcucuccgcuaugaagugucuggccaacuggccccggagcaaugacaugaacaauccgaccuacgugggauuugagagagaugucuuccgcacaaucgcugacuacuuucuugaccugccugaaccccuccugaccuucgaguauuacgaacuuuuuguuaacauucugguggugugcggcuauaucacagucucugaucgguccagcgggauucacaaaauccaagacgauccucagucuuccaaguuccuccaucugaauaaccugaauagcuucaaauccaccgagugucuccugcuuucucugcuccacagagaaaagaacaaggaggagagcgacuccacggaacgccugcagauuagcaaucccggauuucaagagcggugcgccaaaaagaugcagcuugugaaccugagaaaucgccggguuucugcgaacgauaucaugggcggguccugucauaaccucaucggacugagcaauaugcacgaccugucuagcaacuccaaacccagaugcuguucucucgaaggcauuguggaugucccuggcaauagcuccaaggaggccagcucuguguuccaccaguccuuuccgaacaucgaagggcagaauaacaaacuguuccuugagagcaagcccaagcaagaguuucugcucaaucugcauucugaagagaacauucagaaaccuuucuccgcuggauuuaagcgcacaagcacccugacaguucaggaccaggaggaacuuugcaauggcaaauguaaguccaaacaacucugccggucucagagccugcugcucagauccucuacccgccggaacagcuacaucaauacccccguggccgagauuaucaugaagccuaacgucgggcagggauccacaagcgugcagacggcuauggaaucugagcugggcgaauccagcgccaccaucaauaagagacuuuguaaaucuacaauugagcuguccgaaaacagccuccugcccgcgucuagcaugcugaccgggacacaaucccuucuccagccgcaccuggagcgggucgccaucgaugcucugcagcucugcugccugcuucugccucccccuaaucgcagaaagcuccagcugcugaugcggaugauuagcagaaugucucaaaacguggacaugcccaaacuucaugaugccaugggaacccgcucccucaugauccacacguucagccgguguguucugugcugugcugaggaaguggaccuggacgagcuccuggccggcagacuugucuccuuucugauggaucaucaccaggaaauucuccaggugccuucuuaucugcaaacagccguugagaagcaccuggacuaccuuaaaaagggccauaucgaaaaccccggggauggacucuucgcuccgcugccuaccuauagcuacugcaagcagauuuccgcgcaggaguuugacgagcagaaagugucuaccagccaagccgcuaucgccgaacugcucgagaauaucauuaagaaccgcucccugccccuuaaagaaaagcggaaaaagcugaaacaguuccagaaggaguacccccucaucuaucagaagagauuuccuacaaccgaaucugaggccgcucuguucggcgauaaaccgacaauuaagcaacccaugcugauccuucgcaaaccuaaguucagaagccugcgguga

SEQ ID NO: 1238 - protein, 98 aa, Artificial Sequence
  E7__Human_papillomavirus_type_16__P03129
MHGDTPTLHEYMLDLQPETTDLYCYEQLNDSSEEEDEIDGPAGQAEPDRAHYNIVTFCCKCDSTLRLCVQSTHVDIRTLEDLLMGTLGIVCPICSQKP

SEQ ID NO: 1239 - RNA, 297 nt, Artificial Sequence
  E7__Human_papillomavirus_type_16__AAA46940
augcauggagauacaccuacauugcaugaauauauguuagauuugcaaccagagacaacugaucucuacuguuaugagcaauuaaaugacagcucagaggaggaggaugaaauagaugguccagcuggacaagcagaaccggacagagcccauuacaauauuguaaccuuuuguugcaagugugacucuacgcuucgguugugcguacaaagcacacacguagacauucguacuuuggaagaccuguuaaugggcacacuaggaauugugugccccaucuguucucagaaaccauaa

SEQ ID NO: 1240 - RNA, 297 nt, Artificial Sequence
  derived and/or modified sequence opt1 from E7__Human_papillomavirus_type_16__AAA46940
augcacggcgacacccccacccugcacgaguacaugcucgaccugcagccggagacgaccgaccuguacugcuacgagcagcucaacgacagcuccgaggaggaggacgagaucgacgggcccgccggccaggccgagcccgaccgcgcgcacuacaacaucgugaccuucugcugcaagugcgacagcacccugcggcugugcguccaguccacgcacguggacauccgcacccucgaggaccugcugauggggacccucggcaucgugugccccaucugcagccagaagccguga

SEQ ID NO: 1241 - RNA, 297 nt, Artificial Sequence
  derived and/or modified sequence opt2 from E7__Human_papillomavirus_type_16__AAA46940
augcacggcgacacccccacccuccacgaguacaugcucgaccuccagcccgagaccaccgaccucuacugcuacgagcagcucaacgacuccuccgaggaggaggacgagaucgacggccccgccggccaggccgagcccgaccgcgcccacuacaacaucgucaccuucugcugcaagugcgacuccacccuccgccucugcguccaguccacccacgucgacauccgcacccucgaggaccuccucaugggcacccucggcaucgucugccccaucugcucccagaagcccuga

SEQ ID NO: 1242 - RNA, 297 nt, Artificial Sequence
  derived and/or modified sequence opt3 from E7__Human_papillomavirus_type_16__AAA46940
augcacggcgacacccccacacugcaugaguacaugcucgaucuucagccugaaacuacggaccuguauugcuacgagcaauugaacgauagcuccgaagaggaagacgagaucgaugggccagccggacaggcugagccggacagagcacacuauaauauugugaccuucuguugcaagugugauucuacauuaaggcugugcguccagucaacucauguugacauacggacccuagaagaucuccugauggguacacuuggcaucgugugucccauuugcagucagaaaccuuga

SEQ ID NO: 1243 - RNA, 297 nt, Artificial Sequence
  derived and/or modified sequence opt4 from E7__Human_papillomavirus_type_16__AAA46940
augcacggcgacacccccacccugcacgaguacaugcuggaccugcagcccgagaccaccgaccuguacugcuacgagcagcugaacgacagcagcgaggaggaggacgagaucgacggccccgccggccaggccgagcccgacagagcccacuacaacaucgugaccuucugcugcaagugcgacagcacccugagacugugcgugcagagcacccacguggacaucagaacccuggaggaccugcugaugggcacccugggcaucgugugccccaucugcagccagaagcccuga

SEQ ID NO: 1244 - RNA, 297 nt, Artificial Sequence
  derived and/or modified sequence opt5 from E7__Human_papillomavirus_type_16__AAA46940
augcacggcgacacccccacacugcaugaguacaugcucgaucugcagccugaaacgaccgaccuuuauugcuacgagcaacugaacgauagcuccgaagaggaagacgagaucgaugggccggccggacaggcugagcccgacagagcccacuauaauauugugacauucuguugcaagugugauucuacccuccggcugugcguccagagcacacauguugacauccgcacccuugaagaucugcucaugggcacacuggggauuguguguccuaucugcucccagaaacccuga

SEQ ID NO: 1245 - protein, 105 aa, Artificial Sequence
  E7__Human_papillomavirus_type_18__P06788
MHGPKATLQDIVLHLEPQNEIPVDLLCHEQLSDSEEENDEIDGVNHQHLPARRAEPQRHTMLCMCCKCEARIKLVVESSADDLRAFQQLFLNTLSFVCPWCASQQ

SEQ ID NO: 1246 - RNA, 318 nt, Artificial Sequence
  E7__Human_papillomavirus_type_18__AAA46947
augcauggaccuaaggcaacauugcaagacauuguauugcauuuagagccccaaaaugaaauuccgguugaccuucuaugucacgagcaauuaagcgacucagaggaagaaaacgaugaaauagauggaguuaaucaucaacauuuaccagcccgacgagcugaaccacaacgucacacaauguuguguauguguuguaagugugaagccagaauuaagcuaguaguagaaagcucagcagacgaccuucgagcauuccagcagcuguuucugaacacccuguccuuuguguguccguggugugcaucccagcaguaa

SEQ ID NO: 1247 - RNA, 318 nt, Artificial Sequence
  derived and/or modified sequence opt1 from E7__Human_papillomavirus_type_18__AAA46947
augcacggccccaaggccacccugcaggacaucgugcuccaccuggagccgcagaacgagauccccgucgaccugcucugccacgagcagcugagcgacuccgaggaggagaacgacgagaucgacggggugaaccaccagcaccuccccgcccgccgggcggagccccagcgccacaccaugcucugcaugugcugcaagugcgaggcccggaucaagcugguggucgagagcuccgccgacgaccugcgcgccuuccagcagcuguuccugaacacgcugagcuucgugugcccguggugcgccucccagcaguga

SEQ ID NO: 1248 - RNA, 318 nt, Artificial Sequence
  derived and/or modified sequence opt2 from E7__Human_papillomavirus_type_18__AAA46947
augcacggccccaaggccacccuccaggacaucguccuccaccucgagccccagaacgagauccccgucgaccuccucugccacgagcagcucuccgacuccgaggaggagaacgacgagaucgacggcgucaaccaccagcaccuccccgcccgccgcgccgagccccagcgccacaccaugcucugcaugugcugcaagugcgaggcccgcaucaagcucgucgucgaguccuccgccgacgaccuccgcgccuuccagcagcucuuccucaacacccucuccuucgucugccccuggugcgccucccagcaguga

SEQ ID NO: 1249 - RNA, 318 nt, Artificial Sequence
  derived and/or modified sequence opt3 from E7__Human_papillomavirus_type_18__AAA46947
augcacggccccaaggccacccugcaggacaucgugcuccaucuugagccucaaaacgaaauuccagucgaucuguugugccacgagcaguuaagcgacuccgaagaggaaaaugaugagauagacgggguuaaccaucagcaucugccggcuagaagggcagagccccagcggcacacaaugcuauguaugugcuguaaaugcgaagcccgcaucaagcucgugguagagucuucagcggaugaccugcgagcuuuccaacagcuuuuucugaauacuuugaguuucguguguccuuggugcgccagccagcaguga

SEQ ID NO: 1250 - RNA, 318 nt, Artificial Sequence
  derived and/or modified sequence opt4 from E7__Human_papillomavirus_type_18__AAA46947
augcacggccccaaggccacccugcaggacaucgugcugcaccuggagccccagaacgagauccccguggaccugcugugccacgagcagcugagcgacagcgaggaggagaacgacgagaucgacggcgugaaccaccagcaccugcccgccagaagagccgagccccagagacacaccaugcugugcaugugcugcaagugcgaggccagaaucaagcuggugguggagagcagcgccgacgaccugagagccuuccagcagcuguuccugaacacccugagcuucgugugccccuggugcgccagccagcaguga

SEQ ID NO: 1251 - RNA, 318 nt, Artificial Sequence
  derived and/or modified sequence opt5 from E7__Human_papillomavirus_type_18__AAA46947
augcacggccccaaggccacccugcaggacaucgugcuccaucuggagccucaaaacgaaauuccggucgaucuucugugccacgagcagcucagcgacuccgaagaggaaaaugaugagaucgacgggguuaaccaucagcaucugcccgcuagacgggccgagccucagcgccacacaaugcuuuguaugugcuguaaaugcgaagcgagaauuaagcuggugguggagucuagcgcugaugaccuccgggccuuccaacagcuguuucugaauacgcucuccuucgucugucccuggugcgccucucagcaguga

SEQ ID NO: 1252 - protein, 98 aa, Artificial Sequence
  E7__Human_papillomavirus_type_31__P17387
MRGETPTLQDYVLDLQPEATDLHCYEQLPDSSDEEDVIDSPAGQAEPDTSNYNIVTFCCQCKSTLRLCVQSTQVDIRILQELLMGSFGIVCPNCSTRL

SEQ ID NO: 1253 - RNA, 297 nt, Artificial Sequence
  E7__Human_papillomavirus_type_31__AAA46951
augcguggagaaacaccuacguugcaagacuauguguuagauuugcaaccugaggcaacugaccuccacuguuaugagcaauuacccgacagcucagaugaggaggaugucauagacaguccagcuggacaagcagaaccggacacauccaauuacaauaucguuaccuuuuguugucaguguaagucuacacuucguuuguguguacagagcacacaaguagauauucgcauauugcaagagcuguuaaugggcucauuuggaaucgugugccccaacuguucuacuagacuguaa

SEQ ID NO: 1254 - RNA, 297 nt, Artificial Sequence
  derived and/or modified sequence opt1 from E7__Human_papillomavirus_type_31__AAA46951
augcgcggcgagacccccacccugcaggacuacgugcucgaccugcagccggaggccacggaccugcacugcuacgagcagcuccccgacagcuccgacgaggaggacgucaucgacagccccgccgggcaggcggagcccgacaccuccaacuacaacaucgugaccuucugcugccagugcaagagcacccugcggcugugcgugcaguccacgcaggucgacauccgcauccuccaggagcugcugaugggcagcuucgggaucgugugcccgaacugcuccacccggcucuga

SEQ ID NO: 1255 - RNA, 297 nt, Artificial Sequence
  derived and/or modified sequence opt2 from E7__Human_papillomavirus_type_31__AAA46951
augcgcggcgagacccccacccuccaggacuacguccucgaccuccagcccgaggccaccgaccuccacugcuacgagcagcuccccgacuccuccgacgaggaggacgucaucgacucccccgccggccaggccgagcccgacaccuccaacuacaacaucgucaccuucugcugccagugcaaguccacccuccgccucugcguccaguccacccaggucgacauccgcauccuccaggagcuccucaugggcuccuucggcaucgucugccccaacugcuccacccgccucuga

SEQ ID NO: 1256 - RNA, 297 nt, Artificial Sequence
  derived and/or modified sequence opt3 from E7__Human_papillomavirus_type_31__AAA46951
augagaggcgagacccccacacugcaggacuacgugcucgaucuucaaccugaagccacugaccugcacugcuaugagcaguugccagauagcuccgacgaagaggaugucaucgacucuccggcugggcaggcagaacccgauacgucaaacuacaauauuguuaccuucuguugccaguguaagaguacauuaaggcugugcgugcaaagcacucagguagacauacggauccuacaggagcuccugaugggauccuuugguauuguguguccuaacugcucuacccgccuuuga

SEQ ID NO: 1257 - RNA, 297 nt, Artificial Sequence
  derived and/or modified sequence opt4 from E7__Human_papillomavirus_type_31__AAA46951
augagaggcgagacccccacccugcaggacuacgugcuggaccugcagcccgaggccaccgaccugcacugcuacgagcagcugcccgacagcagcgacgaggaggacgugaucgacagccccgccggccaggccgagcccgacaccagcaacuacaacaucgugaccuucugcugccagugcaagagcacccugagacugugcgugcagagcacccagguggacaucagaauccugcaggagcugcugaugggcagcuucggcaucgugugccccaacugcagcaccagacuguga

SEQ ID NO: 1258 - RNA, 297 nt, Artificial Sequence
  derived and/or modified sequence opt5 from E7__Human_papillomavirus_type_31__AAA46951
augagaggcgagacccccacacugcaggacuacgugcucgaucugcaaccugaagccacggaccuucacugcuaugagcagcugccggauagcuccgacgaagaggaugucaucgacucucccgcugggcaggccgaaccugauaccagcaacuacaauauuguuacauucuguugccaguguaaguccacccuccggcugugcgugcaaucuacacagguggacauccgcauucuucaggagcugcucaugggcagcuuuggaaucgucugucccaacugcuccaccagacuguga

SEQ ID NO: 1259 - protein, 97 aa, Artificial Sequence
  E7__Human_papillomavirus_type_33__P06429
MRGHKPTLKEYVLDLYPEPTDLYCYEQLSDSSDEDEGLDRPDGQAQPATADYYIVTCCHTCNTTVRLCVNSTASDLRTIQQLLMGTVNIVCPTCAQQ

SEQ ID NO: 1260 - RNA, 294 nt, Artificial Sequence
  E7__Human_papillomavirus_type_33__AAA46959
augagaggacacaagccaacguuaaaggaauauguuuuagauuuauauccugaaccaacugaccuauacugcuaugagcaauuaagugacagcucagaugaggaugaaggcuuggaccggccagauggacaagcacaaccagccacagcugauuacuacauuguaaccuguugucacacuuguaacaccacaguucguuuaugugucaacaguacagcaagugaccuacgaaccauacagcaacuacuuaugggcacagugaauauugugugcccuaccugugcacaacaauaa

SEQ ID NO: 1261 - RNA, 294 nt, Artificial Sequence
  derived and/or modified sequence opt1 from E7__Human_papillomavirus_type_33__AAA46959
augcgcggccacaagcccacccugaaggaguacgugcucgaccuguacccggagcccaccgaccuguacugcuacgagcagcucagcgacuccagcgacgaggacgaggggcuggaccggcccgacggccaggcccagcccgccacggcggacuacuacaucgugaccugcugccacacgugcaacaccaccguccgccugugcgugaacuccaccgccagcgaccuccggaccauccagcagcugcugauggggaccgucaacaucgugugcccgacgugcgcccagcaguga

SEQ ID NO: 1262 - RNA, 294 nt, Artificial Sequence
  derived and/or modified sequence opt2 from E7__Human_papillomavirus_type_33__AAA46959
augcgcggccacaagcccacccucaaggaguacguccucgaccucuaccccgagcccaccgaccucuacugcuacgagcagcucuccgacuccuccgacgaggacgagggccucgaccgccccgacggccaggcccagcccgccaccgccgacuacuacaucgucaccugcugccacaccugcaacaccaccguccgccucugcgucaacuccaccgccuccgaccuccgcaccauccagcagcuccucaugggcaccgucaacaucgucugccccaccugcgcccagcaguga

SEQ ID NO: 1263 - RNA, 294 nt, Artificial Sequence
  derived and/or modified sequence opt3 from E7__Human_papillomavirus_type_33__AAA46959
augagaggccacaagcccacccugaaagaguacgugcucgaccuuuauccugaaccaacagaucuguacugcuaugagcaguugagcgacuccucugaugaagacgagggguuagauaggccggacggacaagcccagcccgcuacugcagauuacuauaucgucacguguugccauaccuguaacacaacuguucggcugugcguaaauucaaccgccagugaccuacgcacaauucagcagcuccugauggguaccgugaacauaguguguccuacuugcgcgcaacaguga

SEQ ID NO: 1264 - RNA, 294 nt, Artificial Sequence
  derived and/or modified sequence opt4 from E7__Human_papillomavirus_type_33__AAA46959
augagaggccacaagcccacccugaaggaguacgugcuggaccuguaccccgagcccaccgaccuguacugcuacgagcagcugagcgacagcagcgacgaggacgagggccuggacagacccgacggccaggcccagcccgccaccgccgacuacuacaucgugaccugcugccacaccugcaacaccaccgugagacugugcgugaacagcaccgccagcgaccugagaaccauccagcagcugcugaugggcaccgugaacaucgugugccccaccugcgcccagcaguga

SEQ ID NO: 1265 - RNA, 294 nt, Artificial Sequence
  derived and/or modified sequence opt5 from E7__Human_papillomavirus_type_33__AAA46959
augagaggccacaagcccacccugaaagaguacgugcucgaccuguauccugaaccgacagaucuuuacugcuaugagcagcugagcgacuccucugaugaagacgaggggcucgaucggcccgacggacaagcccagccugcuacggccgauuacuauaucgucaccuguugccauacauguaacaccacaguucgccugugcgugaauagcaccgcguccgaccuuagaacaauucagcagcugcucaugggcaccgugaacaucgucugucccacgugcgcucaacaguga

SEQ ID NO: 1266 - protein, 99 aa, Artificial Sequence
  E7__Human_papillomavirus_type_35__P27230
MHGEITTLQDYVLDLEPEATDLYCYEQLCDSSEEEEDTIDGPAGQAKPDTSNYNIVTSCCKCEATLRLCVQSTHIDIRKLEDLLMGTFGIVCPGCSQRA

SEQ ID NO: 1267 - RNA, 300 nt, Artificial Sequence
  E7__Human_papillomavirus_type_35__AAA46967
augcauggagaaauaacuacauugcaagacuauguuuuagauuuggaacccgaggcaacugaccuauacuguuaugagcaauugugugacagcucagaggaggaggaagauacuauugacgguccagcuggacaagcaaaaccagacaccuccaauuauaauauuguaacguccuguuguaaaugugaggcgacacuacgucuguguguacagagcacacacauugacauacguaaauuggaagauuuauuaaugggcacauuuggaauagugugccccggcuguucacagagagcauaa

SEQ ID NO: 1268 - RNA, 300 nt, Artificial Sequence
  derived and/or modified sequence opt1 from E7__Human_papillomavirus_type_35__AAA46967
augcacggcgagaucaccacccugcaggacuacgugcucgaccuggagcccgaggccacggaccuguacugcuacgagcagcucugcgacagcuccgaggaggaggaggacaccaucgacgggccggccggccaggcgaagcccgacaccagcaacuacaacaucgucaccuccugcugcaagugcgaggccacgcugcgccugugcgugcagagcacccacaucgacauccggaagcucgaggaccugcugauggggaccuucggcaucgugugccccgggugcucccagcgcgccuga

SEQ ID NO: 1269 - RNA, 300 nt, Artificial Sequence
  derived and/or modified sequence opt2 from E7__Human_papillomavirus_type_35__AAA46967
augcacggcgagaucaccacccuccaggacuacguccucgaccucgagcccgaggccaccgaccucuacugcuacgagcagcucugcgacuccuccgaggaggaggaggacaccaucgacggccccgccggccaggccaagcccgacaccuccaacuacaacaucgucaccuccugcugcaagugcgaggccacccuccgccucugcguccaguccacccacaucgacauccgcaagcucgaggaccuccucaugggcaccuucggcaucgucugccccggcugcucccagcgcgccuga

SEQ ID NO: 1270 - RNA, 300 nt, Artificial Sequence
  derived and/or modified sequence opt3 from E7__Human_papillomavirus_type_35__AAA46967
augcacggcgagaucaccacacugcaggacuacgugcucgaucuugaacccgaggccacugaccuguauugcuacgaacaauugugugauagcuccgaggaagaggaggacacgauugaugggccugcuggacaggcaaagccagacaccucuaacuauaauauagucacaucaugcuguaaaugcgaagccacuuuaagacuguguguucagaguacccauaucgauauuaggaagcuagaggaccuccugauggguacauucggcaucgugugcccgggguguagccagcgggcguga

SEQ ID NO: 1271 - RNA, 300 nt, Artificial Sequence
  derived and/or modified sequence opt4 from E7__Human_papillomavirus_type_35__AAA46967
augcacggcgagaucaccacccugcaggacuacgugcuggaccuggagcccgaggccaccgaccuguacugcuacgagcagcugugcgacagcagcgaggaggaggaggacaccaucgacggccccgccggccaggccaagcccgacaccagcaacuacaacaucgugaccagcugcugcaagugcgaggccacccugagacugugcgugcagagcacccacaucgacaucagaaagcuggaggaccugcugaugggcaccuucggcaucgugugccccggcugcagccagagagccuga

SEQ ID NO: 1272 - RNA, 300 nt, Artificial Sequence
  derived and/or modified sequence opt5 from E7__Human_papillomavirus_type_35__AAA46967
augcacggcgagaucaccacacugcaggacuacgugcucgaucuggaacccgaggccacggaccuuuauugcuacgaacaacugugugauagcuccgaggaagaggaggacaccauugaugggccugcuggacaggccaagccggacacaucuaacuauaauaucgucaccagcugcuguaagugcgaagcgacacucagacuguguguucaguccacccauauugauauccggaaacuugaggaccugcucaugggcacauucgggauugugugccccggauguucucagcgcgcuuga

SEQ ID NO: 1273 - protein, 109 aa, Artificial Sequence
  E7__Human_papillomavirus_type_39__P24837
MRGPKPTLQEIVLDLCPYNEIQPVDLVCHEQLGESEDEIDEPDHAVNHQHQLLARRDEPQRHTIQCSCCKCNNTLQLVVEASRDTLRQLQQLFMDSLGFVCPWCATANQ

SEQ ID NO: 1274 - RNA, 330 nt, Artificial Sequence
  E7__Human_papillomavirus_type_39__AAA47051
augcguggaccaaagcccaccuugcaggaaauuguauuagauuuauguccuuacaaugaaauacagccgguugaccuuguaugucacgagcaauuaggagagucagaggaugaaauagaugaacccgaccaugcaguuaaucaccaacaucaacuacuagccagacgggaugaaccacagcgucacacaauacaguguucguguuguaaguguaacaacacacugcagcugguaguagaagccucacgggauacucugcgacaacuacagcagcuguuuauggacucacuaggauuuguguguccguggugugcaacugcaaaccaguaa

SEQ ID NO: 1275 - RNA, 330 nt, Artificial Sequence
  derived and/or modified sequence opt1 from E7__Human_papillomavirus_type_39__AAA47051
augcgcggccccaagccgacccugcaggagaucgugcucgaccugugccccuacaacgagauccagcccgucgaccuggugugccacgagcagcucggggagagcgaggacgagaucgacgagcccgaccacgccgugaaccaccagcaccagcugcuggcccggcgcgacgagccgcagcggcacaccauccagugcuccugcugcaagugcaacaacacgcuccagcuggucguggaggcgagccgcgacacccugcggcagcuccagcagcuguucauggacucccugggcuucgugugccccuggugcgccaccgccaaccaguga

SEQ ID NO: 1276 - RNA, 330 nt, Artificial Sequence
  derived and/or modified sequence opt2 from E7__Human_papillomavirus_type_39__AAA47051
augcgcggccccaagcccacccuccaggagaucguccucgaccucugccccuacaacgagauccagcccgucgaccucgucugccacgagcagcucggcgaguccgaggacgagaucgacgagcccgaccacgccgucaaccaccagcaccagcuccucgcccgccgcgacgagccccagcgccacaccauccagugcuccugcugcaagugcaacaacacccuccagcucgucgucgaggccucccgcgacacccuccgccagcuccagcagcucuucauggacucccucggcuucgucugccccuggugcgccaccgccaaccaguga

SEQ ID NO: 1277 - RNA, 330 nt, Artificial Sequence
  derived and/or modified sequence opt3 from E7__Human_papillomavirus_type_39__AAA47051
augagaggccccaagccuacccugcaggagaucgugcucgaccuuugcccauacaacgaaauucaaccggucgaucugguuugucacgagcaguugggggaaagcgaggacgaaauagaugagcccgaccaugccgugaaucaccagcaucaguuacuggcuaggcgggaugagccucaacgccacacaauccagugcuccuguugcaaauguaacaauacucuacagcucguaguggaagcaucucgagacacgcugcgucagcuucaacagcuguucauggauucauugggauuugucugcccauggugugccaccgcgaaccaguga

SEQ ID NO: 1278 - RNA, 330 nt, Artificial Sequence
  derived and/or modified sequence opt4 from E7__Human_papillomavirus_type_39__AAA47051
augagaggccccaagcccacccugcaggagaucgugcuggaccugugccccuacaacgagauccagcccguggaccuggugugccacgagcagcugggcgagagcgaggacgagaucgacgagcccgaccacgccgugaaccaccagcaccagcugcuggccagaagagacgagccccagagacacaccauccagugcagcugcugcaagugcaacaacacccugcagcuggugguggaggccagcagagacacccugagacagcugcagcagcuguucauggacagccugggcuucgugugccccuggugcgccaccgccaaccaguga

SEQ ID NO: 1279 - RNA, 330 nt, Artificial Sequence
  derived and/or modified sequence opt5 from E7__Human_papillomavirus_type_39__AAA47051
augagaggccccaagccuacccugcaggagaucgugcucgaccugugcccguacaacgaaauucaacccgucgaucuuguuugucacgagcagcugggggaaagcgaggacgaaaucgaugagccugaccaugccgugaaucaccagcaucagcuccuggcucggcgcgaugagccccaaagacacacaauucagugcuccuguugcaaauguaacaauacgcuucagcugguggucgaagccucucgggacacccuccgccagcugcaacagcuguucauggauagccucggauuugugugcccuuggugugcgacagcuaaccaguga

SEQ ID NO: 1280 - protein, 106 aa, Artificial Sequence
  E7__Human_papillomavirus_type_45__P21736
MHGPRETLQEIVLHLEPQNELDPVDLLCYEQLSESEEENDEADGVSHAQLPARRAEPQRHKILCVCCKCDGRIELTVESSAEDLRTLQQLFLSTLSFVCPWCATNQ

SEQ ID NO: 1281 - RNA, 321 nt, Artificial Sequence
  E7__Human_papillomavirus_type_45__CAA52574
augcauggaccccgggaaacacugcaagaaauuguauugcauuuggaaccucagaaugaauuagauccuguugaccuguuguguuacgagcaauuaagcgagucagaggaggaaaacgaugaagcagauggaguuagucaugcacaacuaccagcccgacgagccgaaccacagcgucacaaaauuuuguguguauguuguaagugugacggcagaauugagcuuacaguagagagcucggcagaggaccuuagaacacuacagcagcuguuuuugagcaccuuguccuuuguguguccguggugugcaacuaaccaauaa

SEQ ID NO: 1282 - RNA, 321 nt, Artificial Sequence
  derived and/or modified sequence opt1 from E7__Human_papillomavirus_type_45__CAA52574
augcacggcccccgcgagacccugcaggagaucgugcuccaccuggagccgcagaacgagcuggaccccgucgaccuccugugcuacgagcagcugagcgaguccgaggaggagaacgacgaggccgacggggugagccacgcccagcuccccgcgcggcgcgccgagccccagcggcacaagauccugugcgugugcugcaagugcgacggccgcaucgagcugaccgucgaguccagcgccgaggaccuccggacgcugcagcagcuguuccucuccacccugagcuucgugugcccguggugcgccaccaaccaguga

SEQ ID NO: 1283 - RNA, 321 nt, Artificial Sequence
  derived and/or modified sequence opt2 from E7__Human_papillomavirus_type_45__CAA52574
augcacggcccccgcgagacccuccaggagaucguccuccaccucgagccccagaacgagcucgaccccgucgaccuccucugcuacgagcagcucuccgaguccgaggaggagaacgacgaggccgacggcgucucccacgcccagcuccccgcccgccgcgccgagccccagcgccacaagauccucugcgucugcugcaagugcgacggccgcaucgagcucaccgucgaguccuccgccgaggaccuccgcacccuccagcagcucuuccucuccacccucuccuucgucugccccuggugcgccaccaaccaguga

SEQ ID NO: 1284 - RNA, 321 nt, Artificial Sequence
  derived and/or modified sequence opt3 from E7__Human_papillomavirus_type_45__CAA52574
augcacggccccagagagacccugcaggaaaucgugcuccaucuugagccucaaaacgaacuggacccagucgauuuguuaugcuacgagcagcugagcgaauccgaggaggaaaaugacgaggccgaugggguuucucacgcucagcuaccggcaaggcgggccgaaccccagcgccauaagauucucugugugugcuguaaaugcgacggacgaauagagcugacaguagagucaagugcggaagaucuucguacucugcaacaguuguuccucagcacgcuguccuuuguguguccuuggugcgcuaccaaccaguga

SEQ ID NO: 1285 - RNA, 321 nt, Artificial Sequence
  derived and/or modified sequence opt4 from E7__Human_papillomavirus_type_45__CAA52574
augcacggccccagagagacccugcaggagaucgugcugcaccuggagccccagaacgagcuggaccccguggaccugcugugcuacgagcagcugagcgagagcgaggaggagaacgacgaggccgacggcgugagccacgcccagcugcccgccagaagagccgagccccagagacacaagauccugugcgugugcugcaagugcgacggcagaaucgagcugaccguggagagcagcgccgaggaccugagaacccugcagcagcuguuccugagcacccugagcuucgugugccccuggugcgccaccaaccaguga

SEQ ID NO: 1286 - RNA, 321 nt, Artificial Sequence
  derived and/or modified sequence opt5 from E7__Human_papillomavirus_type_45__CAA52574
augcacggccccagagagacccugcaggaaaucgugcuccaucuggagccucagaacgaacuugacccggucgaucugcucugcuacgagcagcugagcgaauccgaggaggaaaaugacgaggccgaugggguuucucacgcucagcuucccgcccggcgcgcggaaccucagagacauaagauucugugugugugcuguaaaugcgacggacggaucgagcucacaguggagagcuccgcugaagaucugcgcacgcugcaacaacucuuccugucuacccuuagcuuugucugucccuggugcgccacaaaccaguga

SEQ ID NO: 1287 - protein, 101 aa, Artificial Sequence
  E7__Human_papillomavirus_type_51__P26558
MRGNVPQLKDVVLHLTPQTEIDLQCYEQFDSSEEEDEVDNMRDQLPERRAGQATCYRIEAPCCRCSSVVQLAVESSGDTLRVVQQMLMGELSLVCPCCANN

SEQ ID NO: 1288 - RNA, 306 nt, Artificial Sequence
  E7__Human_papillomavirus_type_51__M62877.1
augcgugguaauguaccacaauuaaaagauguaguauugcauuuaacaccacagacugaaauugacuugcaaugcuacgagcaauuugacagcucagaggaggaggaugaaguagauaauaugcgugaccagcuaccagaaagacgggcuggacaggcuacguguuacagaauugaagcuccguguugcagguguucaaguguaguacaacuggcaguggaaagcaguggagacacccuucgcguuguacagcagauguuaaugggcgaacuaagccugguuugcccguguugugcgaacaacuag

SEQ ID NO: 1289 - RNA, 306 nt, Artificial Sequence
  derived and/or modified sequence opt1 from E7__Human_papillomavirus_type_51__M62877.1
augcgcggcaacgugccccagcugaaggacgucgugcuccaccugaccccgcagaccgagaucgaccugcagugcuacgagcaguucgacagcuccgaggaggaggacgagguggacaacaugcgggaccagcuccccgagcgccgggccgggcaggccacgugcuaccgcaucgaggcgcccugcugccggugcagcuccgucgugcagcuggccguggagagcuccggcgacacccugcgcgucgugcagcagaugcucaugggggagcugagccuggugugccccugcugcgccaacaacuga

SEQ ID NO: 1290 - RNA, 306 nt, Artificial Sequence
  derived and/or modified sequence opt2 from E7__Human_papillomavirus_type_51__M62877.1
augcgcggcaacgucccccagcucaaggacgucguccuccaccucaccccccagaccgagaucgaccuccagugcuacgagcaguucgacuccuccgaggaggaggacgaggucgacaacaugcgcgaccagcuccccgagcgccgcgccggccaggccaccugcuaccgcaucgaggcccccugcugccgcugcuccuccgucguccagcucgccgucgaguccuccggcgacacccuccgcgucguccagcagaugcucaugggcgagcucucccucgucugccccugcugcgccaacaacuga

SEQ ID NO: 1291 - RNA, 306 nt, Artificial Sequence
  derived and/or modified sequence opt3 from E7__Human_papillomavirus_type_51__M62877.1
augagaggcaacgugccccagcugaaggacgucguucuccaccuuaccccucaaacagagaucgaucugcagugcuacgaacaguucgacagcuccgaggaagaggaugaaguggacaauaugagggaucaguugccagagcggcgcgccgggcaagcuacuuguuaucgaauugaggcaccgugcugucguuguucuucaguagugcaguuagccgucgaaaguagcggagacacgcugagagugguucagcagaugcuaaugggugagcucucccuggugugccccugcugugcgaacaauuga

SEQ ID NO: 1292 - RNA, 306 nt, Artificial Sequence
  derived and/or modified sequence opt4 from E7__Human_papillomavirus_type_51__M62877.1
augagaggcaacgugccccagcugaaggacguggugcugcaccugaccccccagaccgagaucgaccugcagugcuacgagcaguucgacagcagcgaggaggaggacgagguggacaacaugagagaccagcugcccgagagaagagccggccaggccaccugcuacagaaucgaggcccccugcugcagaugcagcagcguggugcagcuggccguggagagcagcggcgacacccugagaguggugcagcagaugcugaugggcgagcugagccuggugugccccugcugcgccaacaacuga

SEQ ID NO: 1293 - RNA, 306 nt, Artificial Sequence
  derived and/or modified sequence opt5 from E7__Human_papillomavirus_type_51__M62877.1
augagaggcaacgugccccagcugaaggacgucguucuccaccugaccccucaaacagagaucgaucuucagugcuacgaacaguucgacagcuccgaggaagaggaugaaguggacaauaugcgggaucagcugccggagcgcagagccgggcaagcuacguguuaucggauugaggcccccugcugucgcugcucuagcgugguccagcucgcgguggaauccucuggagacacccugagaguugugcagcagaugcuuaugggcgagcugagccucgucuguccuugcugugcuaacaauuga

SEQ ID NO: 1294 - protein, 99 aa, Artificial Sequence
  E7__Human_papillomavirus_type_52__P36831
MRGDKATIKDYILDLQPETTDLHCYEQLGDSSDEEDTDGVDRPDGQAEQATSNYYIVTYCHSCDSTLRLCIHSTATDLRTLQQMLLGTLQVVCPGCARL

SEQ ID NO: 1295 - RNA, 300 nt, Artificial Sequence
  E7__Human_papillomavirus_type_52__CAA52586
augcguggagacaaagcaacuauaaaagauuauauauuagaucugcaaccugaaacaacugaccuacacugcuaugagcaauuaggugacagcucagaugaggaggauacagaugguguggaccggccagauggacaagcagaacaagccacaagcaauuacuacauugugacauauugucacaguugugauagcacacuacggcuaugcauucauagcacugcgacggaccuucguacucuacagcaaaugcuguugggcacauuacaaguugugugccccggcugugcacggcuauaa

SEQ ID NO: 1296 - RNA, 300 nt, Artificial Sequence
  derived and/or modified sequence opt1 from E7__Human_papillomavirus_type_52__CAA52586
augcgcggcgacaaggccaccaucaaggacuacauccuggaccuccagcccgagaccacggaccugcacugcuacgagcagcugggggacagcuccgacgaggaggacaccgacggcguggaccggccggacgggcaggccgagcaggcgaccagcaacuacuacaucgucaccuacugccacuccugcgacagcacgcuccgccugugcauccacuccaccgccaccgaccugcggacccuccagcagaugcugcugggcacgcuccagguggugugccccgggugcgcccgccuguga

SEQ ID NO: 1297 - RNA, 300 nt, Artificial Sequence
  derived and/or modified sequence opt2 from E7__Human_papillomavirus_type_52__CAA52586
augcgcggcgacaaggccaccaucaaggacuacauccucgaccuccagcccgagaccaccgaccuccacugcuacgagcagcucggcgacuccuccgacgaggaggacaccgacggcgucgaccgccccgacggccaggccgagcaggccaccuccaacuacuacaucgucaccuacugccacuccugcgacuccacccuccgccucugcauccacuccaccgccaccgaccuccgcacccuccagcagaugcuccucggcacccuccaggucgucugccccggcugcgcccgccucuga

SEQ ID NO: 1298 - RNA, 300 nt, Artificial Sequence
  derived and/or modified sequence opt3 from E7__Human_papillomavirus_type_52__CAA52586
augagaggcgacaaggccaccaucaaagauuacauucuggaccuccagcccgagacaacugaucuucacugcuaugaacaacugggggacagcuccgaugaggaagacacggauggaguggacaggccugauggucaggcugagcaggcaaccucuaacuacuauauagucacauacugucauucaugcgacaguacuuugcgguuauguauccacagcaccgccacagaucugcgcacccuacagcaaaugcuccugggcacucuucagguugugugcccagggugugcgcgacuguga

SEQ ID NO: 1299 - RNA, 300 nt, Artificial Sequence
  derived and/or modified sequence opt4 from E7__Human_papillomavirus_type_52__CAA52586
augagaggcgacaaggccaccaucaaggacuacauccuggaccugcagcccgagaccaccgaccugcacugcuacgagcagcugggcgacagcagcgacgaggaggacaccgacggcguggacagacccgacggccaggccgagcaggccaccagcaacuacuacaucgugaccuacugccacagcugcgacagcacccugagacugugcauccacagcaccgccaccgaccugagaacccugcagcagaugcugcugggcacccugcagguggugugccccggcugcgccagacuguga

SEQ ID NO: 1300 - RNA, 300 nt, Artificial Sequence
  derived and/or modified sequence opt5 from E7__Human_papillomavirus_type_52__CAA52586
augagaggcgacaaggccaccaucaaagauuacauucuggaccuccagcccgagacaacggaucugcacugcuaugaacaacuuggggacagcuccgaugaggaagacaccgauggaguggaccggccugauggccaggcugagcaggccacaucuaacuacuauaucgucaccuacugucauagcugcgacuccacacugcgccucuguauucacucuaccgcgacagaucugagaacccuucagcaaaugcugcucgggacgcugcagguugugugcccgggaugugcucggcuguga

SEQ ID NO: 1301 - protein, 105 aa, Artificial Sequence
  E7__Human_papillomavirus_type_56__P36833
MHGKVPTLQDVVLELTPQTEIDLQCNEQLDSSEDEDEDEVDHLQERPQQARQAKQHTCYLIHVPCCECKFVVQLDIQSTKEDLRVVQQLLMGALTVTCPLCASSN

SEQ ID NO: 1302 - RNA, 318 nt, Artificial Sequence
  E7__Human_papillomavirus_type_56__CAA52597
augcaugguaaaguaccaacgcugcaagacguuguauuagaacuaacaccucaaacagaaauugaccuacagugcaaugagcaauuggacagcucagaggaugaggaugaggaugaaguagaccauuugcaggagcggccacagcaagcuagacaagcuaaacaacauacguguuaccuaauacacguaccuuguugugaguguaaguuuguggugcaguuggacauucagaguaccaaagaggaccugcguguuguacaacagcugcuuaugggugcguuaacaguaacgugcccacucugcgcaucaaguaacuaa

SEQ ID NO: 1303 - RNA, 318 nt, Artificial Sequence
  derived and/or modified sequence opt1 from E7__Human_papillomavirus_type_56__CAA52597
augcacggcaaggugcccacccugcaggacgucgugcucgagcugaccccgcagacggagaucgaccugcagugcaacgagcagcucgacagcuccgaggacgaggacgaggacgagguggaccaccuccaggagcgcccccagcaggcccggcaggccaagcagcacacgugcuaccugauccacguccccugcugcgagugcaaguucguggugcagcuggacauccagagcaccaaggaggaccugcgcgucgugcagcagcugcucaugggggcgcugaccgugaccugcccccugugcgccuccagcaacuga

SEQ ID NO: 1304 - RNA, 318 nt, Artificial Sequence
  derived and/or modified sequence opt2 from E7__Human_papillomavirus_type_56__CAA52597
augcacggcaagguccccacccuccaggacgucguccucgagcucaccccccagaccgagaucgaccuccagugcaacgagcagcucgacuccuccgaggacgaggacgaggacgaggucgaccaccuccaggagcgcccccagcaggcccgccaggccaagcagcacaccugcuaccucauccacguccccugcugcgagugcaaguucgucguccagcucgacauccaguccaccaaggaggaccuccgcgucguccagcagcuccucaugggcgcccucaccgucaccugcccccucugcgccuccuccaacuga

SEQ ID NO: 1305 - RNA, 318 nt, Artificial Sequence
  derived and/or modified sequence opt3 from E7__Human_papillomavirus_type_56__CAA52597
augcacggcaaggugcccacccugcaggacgucguucucgagcuuacaccucaaacugaaaucgaucugcagugcaacgagcaguuggacagcuccgaagaugaggacgaagaugagguggaccauuuacaggagagaccacaacaggccaggcaggcuaaacagcacacguguuaccugauucauguaccgugcugugaaugcaaguucgugguccaacuagauauacagucuaccaaagaggaccuccgggugguucagcagcugcuuaugggggcacugacagugacuugucccuugugcgccucaaguaauuga

SEQ ID NO: 1306 - RNA, 318 nt, Artificial Sequence
  derived and/or modified sequence opt4 from E7__Human_papillomavirus_type_56__CAA52597
augcacggcaaggugcccacccugcaggacguggugcuggagcugaccccccagaccgagaucgaccugcagugcaacgagcagcuggacagcagcgaggacgaggacgaggacgagguggaccaccugcaggagagaccccagcaggccagacaggccaagcagcacaccugcuaccugauccacgugcccugcugcgagugcaaguucguggugcagcuggacauccagagcaccaaggaggaccugagaguggugcagcagcugcugaugggcgcccugaccgugaccugcccccugugcgccagcagcaacuga

SEQ ID NO: 1307 - RNA, 318 nt, Artificial Sequence
  derived and/or modified sequence opt5 from E7__Human_papillomavirus_type_56__CAA52597
augcacggcaaggugcccacccugcaggacgucguucucgagcugacaccucaaacggaaaucgaucuucagugcaacgagcagcuggacagcuccgaagaugaggacgaagaugagguggaccaucuccaggagagaccgcaacaggcccggcaggcuaaacagcacaccuguuaccugauucaugugcccugcugugaaugcaaguucgucgugcaacuugauauccagucuacaaaagaggaccugcgcguugugcagcagcuccugaugggggcccugaccgucacauguccucucugcgcgagcuccaauuga

SEQ ID NO: 1308 - protein, 98 aa, Artificial Sequence
  E7__Human_papillomavirus_type_58__Q9QCZ1
MRGNNPTLREYILDLHPEPTDLFCYEQLCDSSDEDEIGLDRPDGQAQPATANYYIVTCCYTCDTTVRLCINSTTTDVRTLQQLLMGTCTIVCPSCAQQ

SEQ ID NO: 1309 - RNA, 297 nt, Artificial Sequence
  E7__Human_papillomavirus_type_58__AAF13691
augagaggaaacaacccaacgcuaagagaauauauuuuagauuuacauccugaaccaacugaccuauucugcuaugagcaauuaugugacagcucagacgaggaugaaauaggcuuggacaggccagauggacaagcacaaccggccacagcuaauuacuacauuguaacguguuguuacacuugugacaccacgguucguuuguguaucaacaguacaacaaccgacguacgaacccuacagcagcugcuuaugggcacauguaccauugugugcccuagcugugcacagcaauaa

SEQ ID NO: 1310 - RNA, 297 nt, Artificial Sequence
  derived and/or modified sequence opt1 from E7__Human_papillomavirus_type_58__AAF13691
augcgcggcaacaaccccacccugcgggaguacauccucgaccugcacccggagcccaccgaccuguucugcuacgagcagcucugcgacagcuccgacgaggacgagaucgggcuggaccgccccgacggccaggcccagcccgccacggcgaacuacuacaucgugaccugcugcuacacgugcgacaccaccguccggcugugcaucaacagcaccaccaccgacgugcgcacgcuccagcagcugcugauggggaccugcaccaucgugugcccguccugcgcccagcaguga

SEQ ID NO: 1311 - RNA, 297 nt, Artificial Sequence
  derived and/or modified sequence opt2 from E7__Human_papillomavirus_type_58__AAF13691
augcgcggcaacaaccccacccuccgcgaguacauccucgaccuccaccccgagcccaccgaccucuucugcuacgagcagcucugcgacuccuccgacgaggacgagaucggccucgaccgccccgacggccaggcccagcccgccaccgccaacuacuacaucgucaccugcugcuacaccugcgacaccaccguccgccucugcaucaacuccaccaccaccgacguccgcacccuccagcagcuccucaugggcaccugcaccaucgucugccccuccugcgcccagcaguga

SEQ ID NO: 1312 - RNA, 297 nt, Artificial Sequence
  derived and/or modified sequence opt3 from E7__Human_papillomavirus_type_58__AAF13691
augagaggcaacaaucccacccugagggaguacauccucgaccuucacccugaaccaacagaucuguucugcuacgagcaguugugugacagcuccgaugaagacgagauuggguuagaucggccggacggacaagcccagcccgcuacugcaaacuacuauauagugacgugcuguuauaccugcgauacaacuguccgccuguguaucaauucuaccacaaccgacguucgaacucuacagcagcuccugauggguacaugcaccauuguguguccuucaugcgcccaacaguga

SEQ ID NO: 1313 - RNA, 297 nt, Artificial Sequence
  derived and/or modified sequence opt4 from E7__Human_papillomavirus_type_58__AAF13691
augagaggcaacaaccccacccugagagaguacauccuggaccugcaccccgagcccaccgaccuguucugcuacgagcagcugugcgacagcagcgacgaggacgagaucggccuggacagacccgacggccaggcccagcccgccaccgccaacuacuacaucgugaccugcugcuacaccugcgacaccaccgugagacugugcaucaacagcaccaccaccgacgugagaacccugcagcagcugcugaugggcaccugcaccaucgugugccccagcugcgcccagcaguga

SEQ ID NO: 1314 - RNA, 297 nt, Artificial Sequence
  derived and/or modified sequence opt5 from E7__Human_papillomavirus_type_58__AAF13691
augagaggcaacaaucccacccugcgggaguacauccucgaccugcacccugaaccgacagaucuuuucugcuaugagcagcugugugacagcuccgaugaagacgagauuggccucgaucgccccgacggacaagcccagccugcuacggccaacuacuauaucgugaccugcuguuacacaugcgauaccacagucagacuguguauuaauucuaccacaaccgacguucggacgcuucagcagcugcucauggggaccugcacaaucgugugucccagcugcgcgcaacaguga

SEQ ID NO: 1315 - protein, 107 aa, Artificial Sequence
  E7__Human_papillomavirus_type_59__Q81965
MHGPKATLCDIVLDLEPQNYEEVDLVCYEQLPDSDSENEKDEPDGVNHPLLLARRAEPQRHNIVCVCCKCNNQLQLVVETSQDGLRALQQLFMDTLSFVCPLCAANQ

SEQ ID NO: 1316 - RNA, 324 nt, Artificial Sequence
  E7__Human_papillomavirus_type_59__ACL12335
augcauggaccaaaagcaacacuuugugacauuguuuuagauuuggaaccacaaaauuaugaggaaguugaccuugugugcuacgagcaauuaccugacuccgacuccgagaaugaaaaagaugaaccagauggaguuaaucauccuuugcuacuagcuagacgagcugaaccacagcgucacaacauuguguguguguguuguaaguguaauaaucaacuucagcuaguaguagaaaccucgcaagacggauugcgagccuuacagcagcuguuuauggacacacuauccuuuguguguccuuugugugcagcaaaccaguaa

SEQ ID NO: 1317 - RNA, 324 nt, Artificial Sequence
  derived and/or modified sequence opt1 from E7__Human_papillomavirus_type_59__ACL12335
augcacggccccaaggccacccugugcgacaucgugcucgaccuggagccgcagaacuacgaggaggucgaccuggugugcuacgagcagcuccccgacagcgacuccgagaacgagaaggacgagcccgacggggugaaccacccccugcugcucgcccgccgggcggagccgcagcgccacaacaucgucugcgugugcugcaagugcaacaaccagcugcagcugguggucgagaccagccaggacggccuccgggcccugcagcagcuguucauggacacgcucuccuucgugugcccccugugcgccgccaaccaguga

SEQ ID NO: 1318 - RNA, 324 nt, Artificial Sequence
  derived and/or modified sequence opt2 from E7__Human_papillomavirus_type_59__ACL12335
augcacggccccaaggccacccucugcgacaucguccucgaccucgagccccagaacuacgaggaggucgaccucgucugcuacgagcagcuccccgacuccgacuccgagaacgagaaggacgagcccgacggcgucaaccacccccuccuccucgcccgccgcgccgagccccagcgccacaacaucgucugcgucugcugcaagugcaacaaccagcuccagcucgucgucgagaccucccaggacggccuccgcgcccuccagcagcucuucauggacacccucuccuucgucugcccccucugcgccgccaaccaguga

SEQ ID NO: 1319 - RNA, 324 nt, Artificial Sequence
  derived and/or modified sequence opt3 from E7__Human_papillomavirus_type_59__ACL12335
augcacggccccaaggccacccugugcgacaucgugcucgaucuugagccucagaacuacgaagaggucgaccugguuuguuaugaacaauugccagauagcgacuccgagaaugaaaaagaugagccggacggggugaaccaucccuuacugcuagcuagaagggcagagccucagcggcacaauauuguaugcguguguugcaaguguaacaaucagcuccagcuggucguggaaacaucucaagauggacuucgcgcccugcagcaguuguucauggacacucucucauuuguuugcccacugugugcggcuaaccaguga

SEQ ID NO: 1320 - RNA, 324 nt, Artificial Sequence
  derived and/or modified sequence opt4 from E7__Human_papillomavirus_type_59__ACL12335
augcacggccccaaggccacccugugcgacaucgugcuggaccuggagccccagaacuacgaggagguggaccuggugugcuacgagcagcugcccgacagcgacagcgagaacgagaaggacgagcccgacggcgugaaccacccccugcugcuggccagaagagccgagccccagagacacaacaucgugugcgugugcugcaagugcaacaaccagcugcagcuggugguggagaccagccaggacggccugagagcccugcagcagcuguucauggacacccugagcuucgugugcccccugugcgccgccaaccaguga

SEQ ID NO: 1321 - RNA, 324 nt, Artificial Sequence
  derived and/or modified sequence opt5 from E7__Human_papillomavirus_type_59__ACL12335
augcacggccccaaggccacccugugcgacaucgugcucgaucuggagccucagaacuacgaagaggucgaccuuguuuguuaugaacagcugccggauagcgacuccgagaaugaaaaagaugagcccgacggggugaaccauccucuccugcuugcuagacgggccgagccccagcgccacaauauugugugcgucuguugcaaguguaacaaucagcugcagcucgugguugaaacaucucaagauggacugagagcgcugcagcaacucuucauggacacgcugagcuuugugugcccucuuugugcugccaaccaguga

SEQ ID NO: 1322 - protein, 105 aa, Artificial Sequence
  E7__Human_papillomavirus_type_66__Q80956
MHGKVPTLQEVILELAPQTEIDLQCNEQLDSSEDEDEDEIDHLLERPQQARQAEQHKCYLIHVPCCKCELVVQLDIQSTKEELRVVQQLLMGALTVTCPLCASSK

SEQ ID NO: 1323 - RNA, 318 nt, Artificial Sequence
  E7__Human_papillomavirus_type_66__AAA79500
augcaugguaaaguaccaacguugcaagagguuauauuagaacuugcaccgcaaacggaaauugaccuacaaugcaaugagcaauuggacagcucagaggaugaggaugaggaugaaauagaccauuugcuggagcggccacagcaagcuagacaagcugaacaacauaaguguuaccuaauucacguaccuuguuguaagugugaguugguggugcaguuggacauucagaguaccaaagaggagcuacgugugguacaacagcugcuuaugggugcguuaacaguaacgugcccacucugcgcaucaucuaaauaa

SEQ ID NO: 1324 - RNA, 318 nt, Artificial Sequence
  derived and/or modified sequence opt1 from E7__Human_papillomavirus_type_66__AAA79500
augcacggcaagguccccacccugcaggaggucauccucgagcuggccccgcagaccgagaucgaccugcagugcaacgagcagcucgacagcuccgaggacgaggacgaggacgagaucgaccaccuccuggagcgcccccagcaggcccggcaggcggagcagcacaagugcuaccugauccacgugcccugcugcaagugcgagcuggugguccagcuggacauccagagcacgaaggaggagcuccgcguggugcagcagcugcugaugggggcccucaccgugaccugcccccugugcgccuccagcaaguga

SEQ ID NO: 1325 - RNA, 318 nt, Artificial Sequence
  derived and/or modified sequence opt2 from E7__Human_papillomavirus_type_66__AAA79500
augcacggcaagguccccacccuccaggaggucauccucgagcucgccccccagaccgagaucgaccuccagugcaacgagcagcucgacuccuccgaggacgaggacgaggacgagaucgaccaccuccucgagcgcccccagcaggcccgccaggccgagcagcacaagugcuaccucauccacguccccugcugcaagugcgagcucgucguccagcucgacauccaguccaccaaggaggagcuccgcgucguccagcagcuccucaugggcgcccucaccgucaccugcccccucugcgccuccuccaaguga

SEQ ID NO: 1326 - RNA, 318 nt, Artificial Sequence
  derived and/or modified sequence opt3 from E7__Human_papillomavirus_type_66__AAA79500
augcacggcaaggugcccacccugcaggaggucauccucgaacuugccccucaaacagagauugaccugcagugcaacgaacaguuggauagcuccgaggacgaagaugaggacgagauagaucauuuacuggaaagaccacagcaagcuaggcaggcagagcagcacaaauguuaccuaauccauguuccgugcuguaagugcgaacucgugguacagcuggacauucaaucuacuaaagaggagcuucgggugguccagcagcuguugaugggggcccucacggugaccuguccccugugcgcgucaaguaaguga

SEQ ID NO: 1327 - RNA, 318 nt, Artificial Sequence
  derived and/or modified sequence opt4 from E7__Human_papillomavirus_type_66__AAA79500
augcacggcaaggugcccacccugcaggaggugauccuggagcuggccccccagaccgagaucgaccugcagugcaacgagcagcuggacagcagcgaggacgaggacgaggacgagaucgaccaccugcuggagagaccccagcaggccagacaggccgagcagcacaagugcuaccugauccacgugcccugcugcaagugcgagcugguggugcagcuggacauccagagcaccaaggaggagcugagaguggugcagcagcugcugaugggcgcccugaccgugaccugcccccugugcgccagcagcaaguga

SEQ ID NO: 1328 - RNA, 318 nt, Artificial Sequence
  derived and/or modified sequence opt5 from E7__Human_papillomavirus_type_66__AAA79500
augcacggcaaggugcccacccugcaggaggucauccucgaacuggccccucaaacagagauugaccuucagugcaacgaacagcuggauagcuccgaggacgaagaugaggacgagaucgaucaucuccuggaaagaccgcagcaagcucggcaggccgagcagcacaaauguuaccuuauucauguucccugcuguaagugcgaacugguggugcagcucgacauccaaucuacgaaagaggagcugcgcgucgugcagcagcugcucaugggggcgcugaccguuacauguccucuuugcgcuagcuccaaguga

SEQ ID NO: 1329 - protein, 463 aa, Artificial Sequence
  EF1A2__Homo_sapiens__Q05639
MGKEKTHINIVVIGHVDSGKSTTTGHLIYKCGGIDKRTIEKFEKEAAEMGKGSFKYAWVLDKLKAERERGITIDISLWKFETTKYYITIIDAPGHRDFIKNMITGTSQADCAVLIVAAGVGEFEAGISKNGQTREHALLAYTLGVKQLIVGVNKMDSTEPAYSEKRYDEIVKEVSAYIKKIGYNPATVPFVPISGWHGDNMLEPSPNMPWFKGWKVERKEGNASGVSLLEALDTILPPTRPTDKPLRLPLQDVYKIGGIGTVPVGRVETGILRPGMVVTFAPVNITTEVKSVEMHHEALSEALPGDNVGFNVKNVSVKDIRRGNVCGDSKSDPPQEAAQFTSQVIILNHPGQISAGYSPVIDCHTAHIACKFAELKEKIDRRSGKKLEDNPKSLKSGDAAIVEMVPGKPMCVESFSQYPPLGRFAVRDMRQTVAVGVIKNVEKKSGGAGKVTKSAQKAQKAGK

SEQ ID NO: 1330 - RNA, 1392 nt, Artificial Sequence
  EF1A2__Homo_sapiens__AAF80488
augggcaaggagaagacccacaucaacaucguggucaucggccacguggacuccggaaaguccaccaccacgggccaccucaucuacaaaugcggagguauugacaaaaggaccauugagaaguucgagaaggaggcggcugagauggggaagggauccuucaaguaugccugggugcuggacaagcugaaggcggagcgugagcgcggcaucaccaucgacaucucccucuggaaguucgagaccaccaaguacuacaucaccaucaucgaugcccccggccaccgcgacuucaucaagaacaugaucacggguacaucccaggcggacugcgcagugcugaucguggcggcgggcgugggcgaguucgaggcgggcaucuccaagaaugggcagacgcgggagcaugcccugcuggccuacacgcugggugugaagcagcucaucgugggcgugaacaaaauggacuccacagagccggccuacagcgagaagcgcuacgacgagaucgucaaggaagucagcgccuacaucaagaagaucggcuacaacccggccaccgugcccuuugugcccaucuccggcuggcacggcgacaacaugcuggagcccucccccaacaugccgugguucaagggcuggaagguggagcguaaggagggcaacgcaagcggcgugucccugcuggaggcccuggacaccauccugccccccacgcgccccacggacaagccccugcgccugccgcugcaggacguguacaagauuggcggcauuggcacggugcccgugggccggguggagaccggcauccugcggccgggcaugguggugaccuuugcgccagugaacaucaccacugaggugaagucaguggagaugcaccacgaggcucugagcgaagcucugcccggcgacaacgucggcuucaaugugaagaacgugucggugaaggacauccggcggggcaacguguguggggacagcaagucugacccgccgcaggaggcugcucaguucaccucccaggucaucauccugaaccacccggggcagauuagcgccggcuacuccccggucaucgacugccacacagcccacaucgccugcaaguuugcggagcugaaggagaagauugaccggcgcucuggcaagaagcuggaggacaaccccaagucccugaagucuggagacgcggccaucguggagauggugccgggaaagcccauguguguggagagcuucucccaguacccgccucucggccgcuucgccgugcgcgacaugaggcagacgguggccguaggcgucaucaagaacguggaaaagaagagcggcggcgccggcaaggucaccaagucggcgcagaaggcgcagaaggcgggcaaguga

SEQ ID NO: 1331 - RNA, 1392 nt, Artificial Sequence
  derived and/or modified sequence opt1 from EF1A2__Homo_sapiens__AAF80488
augggcaaggagaagacgcacaucaacaucguggucaucgggcacguggacagcggcaaguccaccacgaccgggcaccugaucuacaagugcggcgggaucgacaagcgcaccaucgagaaguucgagaaggaggccgccgagaugggcaagggcagcuucaaguacgcgugggugcucgacaagcugaaggccgagcgggagcgcgggaucaccaucgacaucucccuguggaaguucgagacgaccaaguacuacaucaccaucaucgacgcccccggccaccgggacuucaucaagaacaugaucaccgggacgagccaggccgacugcgccguccucaucguggcggccggcgugggggaguucgaggccggcaucuccaagaacggccagacccgcgagcacgcccugcuggcguacacccucggggucaagcagcugaucgugggcgugaacaagauggacagcaccgagccggccuacuccgagaagcgguacgacgagaucgucaaggaggugagcgccuacaucaagaagaucggguacaaccccgccacggugcccuucguccccaucuccggcuggcacggcgacaacaugcuggagccgagccccaacaugcccugguucaagggguggaagguggagcgcaaggagggcaacgccuccggggugagccuccuggaggcgcuggacaccauccugcccccgacccggcccaccgacaagccccugcgccugccccuccaggacgucuacaagaucggcgggaucggcacggugccggugggccgggucgagaccgggauccugcgccccggcaugguggugaccuucgcccccgucaacaucaccacggaggugaaguccguggagaugcaccacgaggcccugagcgaggcccuccccggggacaacgucggcuucaacgugaagaacgucuccgugaaggacauccggcgcgggaacgugugcggcgacagcaaguccgacccgccccaggaggccgcgcaguucaccagccaggucaucauccugaaccaccccggccagaucuccgccggguacagccccgugaucgacugccacaccgcccacaucgccugcaaguucgccgagcugaaggagaagaucgaccggcgcagcggcaagaagcucgaggacaacccgaagucccucaagagcggggacgcggccaucguggagaugguccccggcaagcccaugugcguggaguccuucagccaguacccgccccuggggcgguucgccgugcgcgacaugcggcagaccgucgccgugggcgugaucaagaacgucgagaagaaguccggcggggccggcaaggugaccaagagcgcgcagaaggcccagaaggccgggaaguga

SEQ ID NO: 1332 - RNA, 1392 nt, Artificial Sequence
  derived and/or modified sequence opt2 from EF1A2__Homo_sapiens__AAF80488
augggcaaggagaagacccacaucaacaucgucgucaucggccacgucgacuccggcaaguccaccaccaccggccaccucaucuacaagugcggcggcaucgacaagcgcaccaucgagaaguucgagaaggaggccgccgagaugggcaagggcuccuucaaguacgccuggguccucgacaagcucaaggccgagcgcgagcgcggcaucaccaucgacaucucccucuggaaguucgagaccaccaaguacuacaucaccaucaucgacgcccccggccaccgcgacuucaucaagaacaugaucaccggcaccucccaggccgacugcgccguccucaucgucgccgccggcgucggcgaguucgaggccggcaucuccaagaacggccagacccgcgagcacgcccuccucgccuacacccucggcgucaagcagcucaucgucggcgucaacaagauggacuccaccgagcccgccuacuccgagaagcgcuacgacgagaucgucaaggaggucuccgccuacaucaagaagaucggcuacaaccccgccaccguccccuucguccccaucuccggcuggcacggcgacaacaugcucgagcccucccccaacaugcccugguucaagggcuggaaggucgagcgcaaggagggcaacgccuccggcgucucccuccucgaggcccucgacaccauccucccccccacccgccccaccgacaagccccuccgccucccccuccaggacgucuacaagaucggcggcaucggcaccguccccgucggccgcgucgagaccggcauccuccgccccggcauggucgucaccuucgcccccgucaacaucaccaccgaggucaaguccgucgagaugcaccacgaggcccucuccgaggcccuccccggcgacaacgucggcuucaacgucaagaacgucuccgucaaggacauccgccgcggcaacgucugcggcgacuccaaguccgaccccccccaggaggccgcccaguucaccucccaggucaucauccucaaccaccccggccagaucuccgccggcuacucccccgucaucgacugccacaccgcccacaucgccugcaaguucgccgagcucaaggagaagaucgaccgccgcuccggcaagaagcucgaggacaaccccaagucccucaaguccggcgacgccgccaucgucgagaugguccccggcaagcccaugugcgucgaguccuucucccaguaccccccccucggccgcuucgccguccgcgacaugcgccagaccgucgccgucggcgucaucaagaacgucgagaagaaguccggcggcgccggcaaggucaccaaguccgcccagaaggcccagaaggccggcaaguga

SEQ ID NO: 1333 - RNA, 1392 nt, Artificial Sequence
  derived and/or modified sequence opt3 from EF1A2__Homo_sapiens__AAF80488
augggcaaggagaaaacccacaucaacauuguggucauagggcauguugacagcggaaaguccacaacuacgggucaccugaucuacaaaugcggcgggauugauaagagaaccaucgaaaaauucgagaaggaagccgcugagaugggaaagggcucuuuuaaauaugcaugggugcucgacaaacuuaaagccgaaagggagcgggguauuacaaucgauauaucacuguggaaguucgagacuaccaaauacuauaucacaauuaucgacgcgcccgggcaucgcgauuuuauuaagaauaugaucaccggaacaagucaggcugacugugccguauugauaguggcagccggcgucggcgaguucgaagcugggauuagcaagaacggacaaacucgagaacacgcauuacuggccuacacccuaggugugaaacagcucaucguuggcgugaauaagauggauuccacggagccugcuuauucugagaaacguuacgacgaaauugucaaggaggugucggccuauaucaaaaagaucggguacaacccagcgacuguaccguuuguucccauuucaggauggcauggcgauaauaugcuggaaccuagcccaaacaugcccugguucaaagguuggaagguggagagaaaggaagggaaugcaaguggagucucccuucuggaggccuuggacaccauacucccuccaacaaggcccacugauaaaccucugcggcugccacuccaggacguguacaagaucggcggcauugggaccgugccggucggacgcguugagacagguaucuuaagacccggcauggugguaaccuuugcuccugugaacauaacgacugaagucaaaucuguggagaugcaccacgaagcccugagcgaggcacuuccaggggauaauguuggauucaacgugaagaaugucuccgugaaagacauuaggcggggcaacguaugcggugacucaaagagugaucccccucaggaagcugcccaauuuacaagccagguuaucaucuugaaucauccagggcagauuucugcgggcuauucccccgugaucgacugucacaccgcccauauugcaugcaaguucgcugagcugaaagagaagauagaucgccgaucaggaaagaagcuagaagacaacccgaaaagccucaagaguggcgaugccgcuaucgucgagauggugccugggaagcccaugugugucgaaucuuuuucccaguacccaccucugggaagauucgccgugagggacaugcggcaaacuguugcaguggguguaauuaaaaaugucgagaagaaaagcggcggggccggaaaggugacaaaaucggcucagaaggcgcagaaggcaggcaaauga

SEQ ID NO: 1334 - RNA, 1392 nt, Artificial Sequence
  derived and/or modified sequence opt4 from EF1A2__Homo_sapiens__AAF80488
augggcaaggagaagacccacaucaacaucguggugaucggccacguggacagcggcaagagcaccaccaccggccaccugaucuacaagugcggcggcaucgacaagagaaccaucgagaaguucgagaaggaggccgccgagaugggcaagggcagcuucaaguacgccugggugcuggacaagcugaaggccgagagagagagaggcaucaccaucgacaucagccuguggaaguucgagaccaccaaguacuacaucaccaucaucgacgcccccggccacagagacuucaucaagaacaugaucaccggcaccagccaggccgacugcgccgugcugaucguggccgccggcgugggcgaguucgaggccggcaucagcaagaacggccagaccagagagcacgcccugcuggccuacacccugggcgugaagcagcugaucgugggcgugaacaagauggacagcaccgagcccgccuacagcgagaagagauacgacgagaucgugaaggaggugagcgccuacaucaagaagaucggcuacaaccccgccaccgugcccuucgugcccaucagcggcuggcacggcgacaacaugcuggagcccagccccaacaugcccugguucaagggcuggaagguggagagaaaggagggcaacgccagcggcgugagccugcuggaggcccuggacaccauccugccccccaccagacccaccgacaagccccugagacugccccugcaggacguguacaagaucggcggcaucggcaccgugcccgugggcagaguggagaccggcauccugagacccggcaugguggugaccuucgcccccgugaacaucaccaccgaggugaagagcguggagaugcaccacgaggcccugagcgaggcccugcccggcgacaacgugggcuucaacgugaagaacgugagcgugaaggacaucagaagaggcaacgugugcggcgacagcaagagcgaccccccccaggaggccgcccaguucaccagccaggugaucauccugaaccaccccggccagaucagcgccggcuacagccccgugaucgacugccacaccgcccacaucgccugcaaguucgccgagcugaaggagaagaucgacagaagaagcggcaagaagcuggaggacaaccccaagagccugaagagcggcgacgccgccaucguggagauggugcccggcaagcccaugugcguggagagcuucagccaguaccccccccugggcagauucgccgugagagacaugagacagaccguggccgugggcgugaucaagaacguggagaagaagagcggcggcgccggcaaggugaccaagagcgcccagaaggcccagaaggccggcaaguga

SEQ ID NO: 1335 - RNA, 1392 nt, Artificial Sequence
  derived and/or modified sequence opt5 from EF1A2__Homo_sapiens__AAF80488
augggcaaggagaaaacccacaucaacauuguggucaucgggcauguugacagcggaaaguccacaacgaccggccaccugauuuacaaaugcgggggaaucgauaagagaacaauugaaaaauucgagaaggaagccgcugagaugggcaaggggucuuuuaaauaugccugggugcucgacaagcugaaagcggaacgggagcgcggaaucaccaucgauauuagccuuuggaaguucgagacaaccaaauacuauaucacaauuaucgacgcucccggccauagagauuuuauuaagaauaugaucaccggcacgucccaggccgacugugccgugcugauugucgcugccggggugggagaguucgaagcuggcaucucuaagaacgggcaaacccgggaacacgcccuccuggcguacacacuuggaguuaaacagcugaucgugggcgucaauaagauggauagcaccgagccugccuauuccgagaaacgcuacgacgaaauugugaaggagguuucugcuuauaucaaaaagauuggguacaacccggccacagugcccuuugucccuaucagcggauggcauggcgauaauaugcucgaacccuccccuaacaugcccugguucaaaggcuggaagguggagagaaaggaagggaaugcuagcggagugucucugcuggaggcccucgacaccauucugccuccgacgcggcccacagauaaaccucuucgccugccccuccaggacgucuacaagaucggcgggaucggaaccguuccugugggcagaguggagacagggauucugcggcccggaauggucgugaccuuugcgccgguuaacaucaccacagaagugaaauccgucgagaugcaccacgaagcccuuagcgaggcucugccuggcgauaaugugggcuucaacguuaagaaugugucugucaaagacauucgcagagggaacgugugcggagacuccaagagcgaucccccucaggaagccgcucaauuuacgucucaggucaucauucucaaucaucccggccagaucuccgccggguauagccccgugaucgacugucacaccgcccauauugcuugcaaguucgcggagcugaaagagaagaucgaucggcgcuccggcaaaaagcuggaagacaacccuaaaucucucaagagcggagaugccgcuauuguugagauggugccggggaagcccaugugugucgaauccuuuagccaguacccuccccugggcagauucgccgugcgggacaugcgccaaacaguugccgugggagucaucaaaaauguggagaagaaaucuggcggggcuggaaaggugaccaaauccgcccagaaggcgcagaaggcuggcaaauga

SEQ ID NO: 1336 - protein, 972 aa, Artificial Sequence
  EFTUD2/m__Homo_sapiens__Q15029
MDTDLYDEFGNYIGPELDSDEDDDELGRETKDLDEMDDDDDDDDVGDHDDDHPGMEVVLHEDKKYYPTAEEVYGPEVETIVQEEDTQPLTEPIIKPVKTKKFTLMEQTLPVTVYEMDFLADLMDNSELIRNVTLCGHLHHGKTCFVDCLIEQTHPEIRKRYDQDLCYTDILFTEQERGVGIKSTPVTVVLPDTKGKSYLFNIMDTPGHVNFSDEVTAGLRISDGVVLFIDAAEGVMLNTERLIKHAVQERLAVTVCINKIDRLILELKLPPTDAYYKLRHIVDEVNGLISMYSTDENLILSPLLGNVCFSSSQYSICFTLGSFAKIYADTFGDINYQEFAKRLWGDIYFNPKTRKFTKKAPTSSSQRSFVEFILEPLYKILAQVVGDVDTSLPRTLDELGIHLTKEELKLNIRPLLRLVCKKFFGEFTGFVDMCVQHIPSPKVGAKPKIEHTYTGGVDSDLGEAMSDCDPDGPLMCHTTKMYSTDDGVQFHAFGRVLSGTIHAGQPVKVLGENYTLEDEEDSQICTVGRLWISVARYHIEVNRVPAGNWVLIEGVDQPIVKTATITEPRGNEEAQIFRPLKFNTTSVIKIAVEPVNPSELPKMLDGLRKVNKSYPSLTTKVEESGEHVILGTGELYLDCVMHDLRKMYSEIDIKVADPVVTFCETVVETSSLKCFAETPNKKNKITMIAEPLEKGLAEDIENEVVQITWNRKKLGEFFQTKYDWDLLAARSIWAFGPDATGPNILVDDTLPSEVDKALLGSVKDSIVQGFQWGTREGPLCDELIRNVKFKILDAVVAQEPLHRGGGQIIPTARRVVYSAFLMATPRLMEPYYFVEVQAPADCVSAVYTVLARRRGHVTQDAPIPGSPLYTIKAFIPAIDSFGFETDLRTHTQGQAFSLSVFHHWQIVPGDPLDKSIVIRPLEPQPAPHLAREFMIKTRRRKGLSEDVSISKFFDDPMLLELAKQDVVLNYPM

SEQ ID NO: 1337 - RNA, 2919 nt, Artificial Sequence
  EFTUD2/m__Homo_sapiens__EAW51573
auggauaccgacuuauaugaugaguuugggaauuauauuggaccagagcuugauucugaugaagaugaugaugaauuggguagagagaccaaagaucuugaugagauggaugaugaugacgacgacgaugacguaggagaucaugacgaugaccacccugggauggagguggugcugcaugaggacaagaaguacuacccaacagccgaggagguguaugguccugagguggagaccauaguucaagaggaagacacucagccucucacagaacccauuauuaagccagugaaaaccaagaaauucacucugauggagcagacauuaccuguuacgguguaugagauggauuucuuggcggaucugauggauaacucagagcucaucagaaaugugacccuuuguggacaucuccaccauggcaagacauguuuuguggauuguuuaauugaacagacucacccggaaaucagaaagcgcuaugaccaagaucugugcuauacugacauccucuucacagagcaagagagagguguaggcaucaaaagcacuccugugacaguggucuugccagacaccaaaggaaaaucuuaucucuucaauaucauggacacuccaggacaugugaauuucucugaugaggucacagcuggcuugcgcaucucagauggagugguccuuuucauugaugcugcugagggggugaugcugaacacagagcggcugaucaagcaugcggugcaggagaggcuggcagucacugugugcaucaacaagauugaccggcugauccuggagcugaagcugccuccaacugaugcuuauuacaagcugcgccacauuguggaugaggucaauggauuaauaagcauguauuccacugaugagaaccugauccuuuccccacuccuggguaacgucugcuucuccagcucccaguacagcaucugcuucacgcugggcuccuuugccaagaucuaugccgacaccuuuggugacauuaauuaccaagaauuugcuaaaagacucuggggugacaucuacuucaacccuaagacgcgaaaguucaccaaaaaggccccaacuagcagcucccagagaaguuucguggaguuuaucuuggagccucuuuauaagauccucgcccagguuguaggugacguggacaccagccucccacggacccuagacgagcuuggcauccaccugacgaaggaggagcugaagcugaacauccgccccuugcucaggcuggucugcaaaaaguucuuuggcgaguucacaggcuuuguggacaugugugugcagcauaucccuucuccaaaggugggcgccaagcccaagauugagcacaccuacaccggugguguggacuccgaccucggcgaggcuaugagugacugugacccugauggcccccugaugugccacacuacuaagauguacagcacagaugauggaguccaguuucacgccuuuggccgggugcugaguggcaccauucaugcugggcagccugugaagguacugggggagaacuacacccuggaggaugaggaagacucccagauaugcaccgugggccgccuuuggaucucuguggccagguaccacaucgaggugaaccguguuccugcuggcaacuggguucugauugaagguguugaucaaccaauugugaagacagcaaccauaaccgaaccccgaggcaaugaggaggcucagauuuuccgacccuugaaguucaauaccacaucuguuaucaagauugcuguggagccagucaaccccucagagcugcccaagaugcuugauggccugcgcaaggucaacaagagcuauccaucccucaccaccaagguggaggagucuggcgagcaugugauccugggcacuggggagcucuaccuggacugugugaugcaugauuugcggaagauguacucagagauagacaucaagguggcugacccaguugucacguuuugugagacggugguggaaacauccucccucaagugcuuugcugaaacgccuaauaagaagaacaagaucaccaugauugcugagccucuugagaagggccuggcagaggacauagagaaugaggugguccagauuacguggaacaggaagaagcugggagaguucuuccagaccaaguacgauugggaucugcuggcugcccguuccaucugggcuuuuggcccugaugcgacuggccccaacauucugguggaugauacucugcccucugagguggacaaggcucuucuugguucagugaaggacagcaucguucaagguuuccaguggggaaccagggagggcccccucugugaugaauugauucggaaugucaaguuuaagauccuggaugcggugguugcccaggagccccugcaccggggcgggggccagaucauccccacagccaggagagucgucuacucugccuuccucauggcuacuccucgucugauggagccuuacuacuuuguagagguccaggccccugcagauugcgucucugcaguuuauaccguccuggccaggcgcagggggcacgugacucaggaugcacccaucccaggcuccccucuguacaccaucaaagcuuuuaucccggccaucgacucuuuuggcuuugagacugaucuccggacucacacccagggacaagccuuuucucugucugucuuccaccacuggcagauugugccuggugauccccuggacaagagcauugucauccgccccuuggagccacagccagcuccucaccuggcccgggaauucaugaucaaaacccgccguaggaagggccucagugaagaugugagcaucagcaaauucuucgaugauccuauguugcuggaacuugccaaacaggauguugugcucaauuaccccauguga

SEQ ID NO: 1338 - RNA, 2919 nt, Artificial Sequence
  derived and/or modified sequence opt1 from EFTUD2/m__Homo_sapiens__EAW51573
auggacaccgaccuguacgacgaguucggcaacuacaucgggcccgagcucgacagcgacgaggacgacgacgagcugggccgcgagaccaaggaccuggacgagauggacgacgacgacgacgacgacgacgugggggaccacgacgacgaccacccgggcauggaggucgugcuccacgaggacaagaaguacuaccccacggccgaggagguguacgggcccgaggucgagaccaucgugcaggaggaggacacccagccccugaccgagccgaucaucaagcccgugaagacgaagaaguucacccugauggagcagacccuccccgucaccguguacgagauggacuuccuggccgaccugauggacaacuccgagcucauccggaacgugacgcugugcggccaccuccaccacggcaagaccugcuucgucgacugccucaucgagcagacccaccccgagauccgcaagcgguacgaccaggaccugugcuacaccgacauccuguucacggagcaggagcgcggggugggcaucaagagcaccccggugaccgucgugcuccccgacaccaaggggaaguccuaccuguucaacaucauggacacgcccggccacgugaacuucagcgacgaggucaccgcggggcugcggaucuccgacggcguggugcuguucaucgacgccgccgagggcgucaugcugaacaccgagcgccugaucaagcacgccgugcaggagcggcucgccgugaccgucugcaucaacaagaucgaccgccugauccuggagcucaagcugcccccgacggacgcguacuacaagcugcggcacaucguggacgaggugaacgggcucaucagcauguacuccaccgacgagaaccugauccugagcccccuccugggcaacgucugcuucuccagcucccaguacagcaucugcuucacccugggguccuucgccaagaucuacgccgacaccuucggcgacaucaacuaccaggaguucgccaagcgccucuggggcgacaucuacuucaaccccaagacgcggaaguucaccaagaaggcgcccaccagcuccagccagcgcuccuucguggaguucauccuggagccgcuguacaagauccucgcccaggucgugggggacguggacaccagccugccccggacgcuggacgagcucggcauccaccugaccaaggaggagcugaagcucaacauccgcccccugcugcggcucgucugcaagaaguucuucggggaguucaccggcuucguggacaugugcgugcagcacauccccuccccgaaggucggggccaagcccaagaucgagcacaccuacacgggcggcguggacagcgaccugggggaggccaugagcgacugcgaccccgacggcccccugaugugccacaccaccaagauguacuccaccgacgacggggugcaguuccacgccuucggccgcguccucagcgggacgauccacgcgggccagccggugaaggugcugggcgagaacuacacccuggaggacgaggaggacucccagaucugcaccgucgggcggcuguggaucagcguggcccgcuaccacaucgaggugaaccggguccccgccggcaacugggugcucaucgaggggguggaccagcccaucgucaagaccgccaccaucacggagccccgcggcaacgaggaggcccagaucuuccggccgcugaaguucaacaccaccuccgugaucaagaucgcgguggagcccgucaaccccagcgagcugccgaagaugcucgacgggcugcgcaaggugaacaaguccuaccccagccugaccacgaagguggaggaguccggcgagcacgucauccucggcaccggggagcuguaccuggacugcgugaugcacgaccuccgcaagauguacagcgagaucgacaucaagguggccgaccccgucgugaccuucugcgagaccguggucgagacguccagccugaagugcuucgccgagacccccaacaagaagaacaagaucaccaugaucgccgagccgcuggagaagggccucgccgaggacaucgagaacgagguggugcagaucaccuggaaccggaagaagcugggggaguucuuccagacgaaguacgacugggaccugcucgcggcccgcuccaucugggccuucggccccgacgccaccggccccaacauccuggucgacgacacccugcccagcgagguggacaaggcccuccugggguccgugaaggacagcaucguccagggcuuccagugggggacccgggagggcccgcugugcgacgagcucauccgcaacgugaaguucaagauccuggacgcgguggucgcccaggagccccugcaccgcgggggcggccagaucauccccacggcccggcgggugguguacuccgccuuccucauggcgacgccccgccugauggagccguacuacuucgucgaggugcaggcccccgccgacugcgugagcgccgucuacaccgugcuggcccggcgccgggggcacgugacccaggacgcgcccauccccggcuccccgcucuacaccaucaaggccuucauccccgccaucgacagcuucggguucgagaccgaccugcgcacccacacccagggccaggccuucagccuguccgucuuccaccacuggcagaucgugcccggggacccccucgacaagagcaucgugauccggccgcuggagccccagcccgcgccccaccuggcccgcgaguucaugaucaagacgcggcgccggaagggccucuccgaggacgucagcaucuccaaguucuucgacgacccgaugcugcuggagcucgccaagcaggacgugguccugaacuaccccauguga

SEQ ID NO: 1339 - RNA, 2919 nt, Artificial Sequence
  derived and/or modified sequence opt2 from EFTUD2/m__Homo_sapiens__EAW51573
auggacaccgaccucuacgacgaguucggcaacuacaucggccccgagcucgacuccgacgaggacgacgacgagcucggccgcgagaccaaggaccucgacgagauggacgacgacgacgacgacgacgacgucggcgaccacgacgacgaccaccccggcauggaggucguccuccacgaggacaagaaguacuaccccaccgccgaggaggucuacggccccgaggucgagaccaucguccaggaggaggacacccagccccucaccgagcccaucaucaagcccgucaagaccaagaaguucacccucauggagcagacccuccccgucaccgucuacgagauggacuuccucgccgaccucauggacaacuccgagcucauccgcaacgucacccucugcggccaccuccaccacggcaagaccugcuucgucgacugccucaucgagcagacccaccccgagauccgcaagcgcuacgaccaggaccucugcuacaccgacauccucuucaccgagcaggagcgcggcgucggcaucaaguccacccccgucaccgucguccuccccgacaccaagggcaaguccuaccucuucaacaucauggacacccccggccacgucaacuucuccgacgaggucaccgccggccuccgcaucuccgacggcgucguccucuucaucgacgccgccgagggcgucaugcucaacaccgagcgccucaucaagcacgccguccaggagcgccucgccgucaccgucugcaucaacaagaucgaccgccucauccucgagcucaagcucccccccaccgacgccuacuacaagcuccgccacaucgucgacgaggucaacggccucaucuccauguacuccaccgacgagaaccucauccucuccccccuccucggcaacgucugcuucuccuccucccaguacuccaucugcuucacccucggcuccuucgccaagaucuacgccgacaccuucggcgacaucaacuaccaggaguucgccaagcgccucuggggcgacaucuacuucaaccccaagacccgcaaguucaccaagaaggcccccaccuccuccucccagcgcuccuucgucgaguucauccucgagccccucuacaagauccucgcccaggucgucggcgacgucgacaccucccucccccgcacccucgacgagcucggcauccaccucaccaaggaggagcucaagcucaacauccgcccccuccuccgccucgucugcaagaaguucuucggcgaguucaccggcuucgucgacaugugcguccagcacauccccucccccaaggucggcgccaagcccaagaucgagcacaccuacaccggcggcgucgacuccgaccucggcgaggccauguccgacugcgaccccgacggcccccucaugugccacaccaccaagauguacuccaccgacgacggcguccaguuccacgccuucggccgcguccucuccggcaccauccacgccggccagcccgucaagguccucggcgagaacuacacccucgaggacgaggaggacucccagaucugcaccgucggccgccucuggaucuccgucgcccgcuaccacaucgaggucaaccgcguccccgccggcaacuggguccucaucgagggcgucgaccagcccaucgucaagaccgccaccaucaccgagccccgcggcaacgaggaggcccagaucuuccgcccccucaaguucaacaccaccuccgucaucaagaucgccgucgagcccgucaaccccuccgagcuccccaagaugcucgacggccuccgcaaggucaacaaguccuaccccucccucaccaccaaggucgaggaguccggcgagcacgucauccucggcaccggcgagcucuaccucgacugcgucaugcacgaccuccgcaagauguacuccgagaucgacaucaaggucgccgaccccgucgucaccuucugcgagaccgucgucgagaccuccucccucaagugcuucgccgagacccccaacaagaagaacaagaucaccaugaucgccgagccccucgagaagggccucgccgaggacaucgagaacgaggucguccagaucaccuggaaccgcaagaagcucggcgaguucuuccagaccaaguacgacugggaccuccucgccgcccgcuccaucugggccuucggccccgacgccaccggccccaacauccucgucgacgacacccuccccuccgaggucgacaaggcccuccucggcuccgucaaggacuccaucguccagggcuuccaguggggcacccgcgagggcccccucugcgacgagcucauccgcaacgucaaguucaagauccucgacgccgucgucgcccaggagccccuccaccgcggcggcggccagaucauccccaccgcccgccgcgucgucuacuccgccuuccucauggccaccccccgccucauggagcccuacuacuucgucgagguccaggcccccgccgacugcgucuccgccgucuacaccguccucgcccgccgccgcggccacgucacccaggacgcccccauccccggcuccccccucuacaccaucaaggccuucauccccgccaucgacuccuucggcuucgagaccgaccuccgcacccacacccagggccaggccuucucccucuccgucuuccaccacuggcagaucguccccggcgacccccucgacaaguccaucgucauccgcccccucgagccccagcccgccccccaccucgcccgcgaguucaugaucaagacccgccgccgcaagggccucuccgaggacgucuccaucuccaaguucuucgacgaccccaugcuccucgagcucgccaagcaggacgucguccucaacuaccccauguga

SEQ ID NO: 1340 - RNA, 2919 nt, Artificial Sequence
  derived and/or modified sequence opt3 from EFTUD2/m__Homo_sapiens__EAW51573
auggacaccgaucuguacgacgaguucggcaacuauaucgggcccgaacucgauagcgacgaggaugacgaugaacuuggaagagagacaaaggaccuggaugaaauggacgaugacgaugacgacgaugacgugggugaucacgacgaugaccauccuggcauggaggucguuuugcacgaggauaaaaaguacuauccaacugccgaagagguguacgggccggaaguagagacgauugugcaggaggaagacacccaacccuuaacagagccuauaaucaaaccagucaagacuaaaaaguuuacccugauggaacagacacuacccgugaccguuuaugagauggauuuccucgcugaccugauggauaauuccgaacuuauuaggaacgugacucugugcggacauuugcaccauggcaagacauguuuugucgacugccucaucgagcagacccacccugagauucggaaacgcuacgaccaggaucuguguuauacggacauccuguucacugaacaagagcgagguguggggauaaagucuaccccaguaacaguugugcuccccgauacuaaaggaaagucauacuuauuuaauaucauggacaccccuggccacgucaacuucagugaugaagugacagcaggccugcguauuagcgacggggugguccuuuuuaucgaugccgcggagggaguuauguugaauaccgaaagacugauuaaacaugcugugcaggagaggcuagccguaacggugugcaucaacaagauagaccggcucauucuggagcuuaagcugccaccgacugaugcauacuauaaauugcgccacaucgucgacgaagugaauggucucauuuccauguacucuacagaugagaaccugaucuuaucgccccugcucggcaauguuuguuucucaagcagucaguauuccaucugcuuuacccuugggucuuucgccaagauuuacgcugacacuuuuggagauauaaacuaucaggaguucgcaaaaagacuguggggcgacaucuacuuuaauccuaagacaaggaaauucaccaagaaagccccaacgagcuccucacaacggaguuucguggaauuuauuuuggaaccccuauauaagauccuggcucaggucgugggugacguagauaccagccucccucgcacacuggacgagcuugggauacaucugacuaaggaggaauugaaacucaacauucgaccacuguuaagacugguuuguaagaaauucuuuggagaguucaccggcuuuguggauaugugcguccagcacauccccucuccgaaggugggcgccaaaccuaagaucgaacacacauacacugggggagucgacuccgaucuaggugaggcgaugucagacugugaucccgacggcccacucaugugccauaccacaaagauguacagcaccgaugacggggugcaguuccacgcauuuggaaggguucugaguggcacuauucaugccggucaaccugugaaaguacuuggggagaauuauacguuggaagaugaggaagacucucagaucuguacagucggccggcuguggauuuccguggcucguuaccacauagagguuaaccgcgugcccgccggaaauuggguccucaucgaaggcguggaucagccaauuguaaagaccgcaacuaucaccgagcccagagggaacgaggaagcucaaaucuucaggccucugaaauuuaacacaaccagcgugauuaagauagccguugagccagucaauccgucggaacuucccaaaaugcuggacggauugcggaaggugaacaagucuuauccuucccucacuacaaaaguggaggaaucaggugagcaugucauccugggcacgggggaguuauaccuggacugcguuaugcacgaucuacgaaagauguauagugaaauugacaucaaaguggcggauccagugguaaccuucugcgagacugucguggaaacaagcucccucaaguguuuugccgagacccccaauaaaaagaacaagauuacaaugaucgcagaaccucuggagaaaggacuugcugaggacauagaaaaugagguugugcagaucacuuggaaccgcaagaaauugggcgaguucuuucagaccaaguacgauugggaccugcucgccgcuagaucuauuugggccuucgguccagaugcaacggggcccaauauccuggucgacgauaccuuaccgagcgaaguggacaaagcccugcuuggcucaguuaaggauaguauugugcagggauuccaauggggcacaagggaggggccuuugugcgacgaacucauccggaacguaaaauuuaagauacuggacgcugucguggcgcaggagccacuacaccgcggagguggccagauuauccccacugcaagaaggguggucuauuccgccuuccugauggcuaccccucgucucauggaacccuacuacuuuguugaggugcaggccccagcagauuguguaagcgccguguauacaguccuggcucggcgaagagggcaugugacucaagacgccccuauucccggaucuccacuuuacaccaucaaggcauucauaccggcgaucgauucauuuggcuucgaaacggacuugaggacacacacccagggucaggcuuuuagucugagcguuuuccaucacuggcagauugugccuggggaucccuuagacaaauccaucgucauucgcccacucgagccccaaccugccccacaccuggcacgggaguuuaugaucaagacuagaaggcgcaaaggccuuucugaagaugugucgauaagcaaguucuuugacgaucccaugcuguuggagcucgccaaacaggacguugugcugaauuauccuauguga

SEQ ID NO: 1341 - RNA, 2919 nt, Artificial Sequence
  derived and/or modified sequence opt4 from EFTUD2/m__Homo_sapiens__EAW51573
auggacaccgaccuguacgacgaguucggcaacuacaucggccccgagcuggacagcgacgaggacgacgacgagcugggcagagagaccaaggaccuggacgagauggacgacgacgacgacgacgacgacgugggcgaccacgacgacgaccaccccggcauggagguggugcugcacgaggacaagaaguacuaccccaccgccgaggagguguacggccccgagguggagaccaucgugcaggaggaggacacccagccccugaccgagcccaucaucaagcccgugaagaccaagaaguucacccugauggagcagacccugcccgugaccguguacgagauggacuuccuggccgaccugauggacaacagcgagcugaucagaaacgugacccugugcggccaccugcaccacggcaagaccugcuucguggacugccugaucgagcagacccaccccgagaucagaaagagauacgaccaggaccugugcuacaccgacauccuguucaccgagcaggagagaggcgugggcaucaagagcacccccgugaccguggugcugcccgacaccaagggcaagagcuaccuguucaacaucauggacacccccggccacgugaacuucagcgacgaggugaccgccggccugagaaucagcgacggcguggugcuguucaucgacgccgccgagggcgugaugcugaacaccgagagacugaucaagcacgccgugcaggagagacuggccgugaccgugugcaucaacaagaucgacagacugauccuggagcugaagcugccccccaccgacgccuacuacaagcugagacacaucguggacgaggugaacggccugaucagcauguacagcaccgacgagaaccugauccugagcccccugcugggcaacgugugcuucagcagcagccaguacagcaucugcuucacccugggcagcuucgccaagaucuacgccgacaccuucggcgacaucaacuaccaggaguucgccaagagacuguggggcgacaucuacuucaaccccaagaccagaaaguucaccaagaaggcccccaccagcagcagccagagaagcuucguggaguucauccuggagccccuguacaagauccuggcccagguggugggcgacguggacaccagccugcccagaacccuggacgagcugggcauccaccugaccaaggaggagcugaagcugaacaucagaccccugcugagacuggugugcaagaaguucuucggcgaguucaccggcuucguggacaugugcgugcagcacauccccagccccaaggugggcgccaagcccaagaucgagcacaccuacaccggcggcguggacagcgaccugggcgaggccaugagcgacugcgaccccgacggcccccugaugugccacaccaccaagauguacagcaccgacgacggcgugcaguuccacgccuucggcagagugcugagcggcaccauccacgccggccagcccgugaaggugcugggcgagaacuacacccuggaggacgaggaggacagccagaucugcaccgugggcagacuguggaucagcguggccagauaccacaucgaggugaacagagugcccgccggcaacugggugcugaucgagggcguggaccagcccaucgugaagaccgccaccaucaccgagcccagaggcaacgaggaggcccagaucuucagaccccugaaguucaacaccaccagcgugaucaagaucgccguggagcccgugaaccccagcgagcugcccaagaugcuggacggccugagaaaggugaacaagagcuaccccagccugaccaccaagguggaggagagcggcgagcacgugauccugggcaccggcgagcuguaccuggacugcgugaugcacgaccugagaaagauguacagcgagaucgacaucaagguggccgaccccguggugaccuucugcgagaccgugguggagaccagcagccugaagugcuucgccgagacccccaacaagaagaacaagaucaccaugaucgccgagccccuggagaagggccuggccgaggacaucgagaacgagguggugcagaucaccuggaacagaaagaagcugggcgaguucuuccagaccaaguacgacugggaccugcuggccgccagaagcaucugggccuucggccccgacgccaccggccccaacauccugguggacgacacccugcccagcgagguggacaaggcccugcugggcagcgugaaggacagcaucgugcagggcuuccaguggggcaccagagagggcccccugugcgacgagcugaucagaaacgugaaguucaagauccuggacgccgugguggcccaggagccccugcacagaggcggcggccagaucauccccaccgccagaagagugguguacagcgccuuccugauggccacccccagacugauggagcccuacuacuucguggaggugcaggcccccgccgacugcgugagcgccguguacaccgugcuggccagaagaagaggccacgugacccaggacgcccccauccccggcagcccccuguacaccaucaaggccuucauccccgccaucgacagcuucggcuucgagaccgaccugagaacccacacccagggccaggccuucagccugagcguguuccaccacuggcagaucgugcccggcgacccccuggacaagagcaucgugaucagaccccuggagccccagcccgccccccaccuggccagagaguucaugaucaagaccagaagaagaaagggccugagcgaggacgugagcaucagcaaguucuucgacgaccccaugcugcuggagcuggccaagcaggacguggugcugaacuaccccauguga

SEQ ID NO: 1342 - RNA, 2919 nt, Artificial Sequence
  derived and/or modified sequence opt5 from EFTUD2/m__Homo_sapiens__EAW51573
auggacaccgaucuguacgacgaguucggcaacuauaucgggcccgaacucgauagcgacgaggaugacgaugaacugggaagagagacaaaggaccuugaugaaauggacgaugacgaugacgacgaugacgugggcgaucacgacgaugaccauccugggauggaggucguucugcacgaggauaaaaaguacuauccgacggccgaagagguguacggacccgaaguggagaccauuguccaggaggaagacacacaaccucucaccgagcccaucauuaaaccugugaagaccaaaaaguuuacccugauggaacagacacuucccguuaccguguaugagauggauuuccuggcugaccucauggauaauuccgaacugauccggaacgucacgcugugcggccaucuccaccaugggaagaccuguuuuguggacugccugauugagcagacacacccugagauccgcaaaagauacgaccaggaucuuuguuauaccgacauccuguucacagaacaagagcggggaguuggcauuaagucuaccccggugacggucgugcuccccgauacaaaaggcaagagcuaccuguuuaauaucauggacaccccugggcacgugaacuucuccgaugaagucacagccggacuucgcauuucugacggcguugugcuguuuaucgaugcggcugagggggugaugcucaauaccgaaagacugauuaaacaugccguccaggagcggcuggccgugaccguuugcaucaacaagauugaccgccucauccuggagcuuaagcugcccccuacagaugcuuacuauaaacucagacacaucguggacgaagucaauggacugauuagcauguacuccacggaugagaaccuuauccugucuccccuccugggcaauguguguuucagcuccagccaguauucuauuugcuuuacccugggguccuucgccaagaucuacgcugacacauuuggagauauuaacuaucaggaguucgccaaacggcucuggggcgacaucuacuuuaauccgaagacccgcaaauucacaaagaaagcgccuaccagcagcucccaaagaucuuucguugaauuuauccuggaaccccuuuauaagauucuggcccagguggucggcgacguggauacgucucucccucggacacuggacgagcuugggauccaucugaccaaggaggaacucaaacugaacauucgcccccugcucagacuggucuguaagaaauucuuuggagaguucaccggcuuuguggauaugugcguucagcacauccccuccccuaaggugggggcuaaaccgaagauugaacacacauacaccggaggcgucgacagcgaucuuggggaggccauguccgacugugaucccgacggaccucugaugugccauacaacgaagauguacucuaccgaugacggcgugcaguuccacgcuuuuggccggguucucagcgggacaauccaugccggacaacccgugaaaguccugggcgagaauuauacccuggaagaugaggaagacucccagaucuguacaguggggcgccuuuggauuagcguggcgagauaccacaucgagguuaaccgggucccugccggaaauugggugcucauugaaggcguggaucagcccaucgucaagaccgcuacgauuaccgagccgagagggaacgaggaagcccaaaucuuccgcccucugaaauuuaacacaaccucugugauuaagaucgcuguugagcccgugaauccuuccgaacugcccaaaaugcucgacggccugcggaaggucaacaagagcuauccuucucuuacaaccaaaguggaggaaagcggagagcauguuauccugggcacgggggagcucuaccuggacugcgugaugcacgaucugagaaagauguauuccgaaauugacaucaaagucgccgaucccgugguuacauucugcgagaccguggucgaaacaucuagccuuaaguguuuugccgagaccccgaauaaaaagaacaagauuaccaugaucgcugaaccucucgagaaaggacuggcggaggacauugaaaaugagguggugcagaucacauggaaccgcaagaaacugggcgaguucuuucagacgaaguacgauugggaccuccuggccgcucgguccaucugggccuucgggcccgaugccaccggacccaauauucuugucgacgauacacugccuagcgaaguugacaaagcucuccugggcucugugaaggauuccaucgugcagggguuccaauggggcaccagagagggaccgcugugcgacgaacuuauucgcaacgucaaauuuaagauccucgacgccgugguugcgcaggagccccugcaccggggcgggggacagauuaucccuacagcuagacgcguggucuauagcgccuuccugauggccacaccccggcucauggaaccuuacuacuuuguggagguucaggcucccgccgauugugugucugcugucuauacggugcuggccagacgccggggccauguuacacaagacgcgccuauccccggguccccgcuuuacaccauuaaggccuucaucccugcuauugauagcuuuggauucgaaaccgaccugagaacacacacccagggccaggccuuuucccucucuguguuccaucacuggcagaucguccccggggauccucuggacaaaagcauugugauccggccccuggagccgcaaccugcuccccaccuugcccgcgaguuuaugaucaagacaagacggagaaaaggccucuccgaagaugugucuauuagcaaguucuuugacgauccuaugcugcuggagcucgcgaaacaggacgucguucugaauuaucccauguga

SEQ ID NO: 1343 - protein, 657 aa, Artificial Sequence
  EGFR__Homo_sapiens__A0A0B4J1Y5
MRPSGTAGAALLALLAALCPASRALEEKKVCQGTSNKLTQLGTFEDHFLSLQRMFNNCEVVLGNLEITYVQRNYDLSFLKTIQEVAGYVLIALNTVERIPLENLQIIRGNMYYENSYALAVLSNYDANKTGLKELPMRNLQEILHGAVRFSNNPALCNVESIQWRDIVSSDFLSNMSMDFQNHLGSCQKCDPSCPNGSCWGAGEENCQKLTKIICAQQCSGRCRGKSPSDCCHNQCAAGCTGPRESDCLVCRKFRDEATCKDTCPPLMLYNPTTYQMDVNPEGKYSFGATCVKKCPRNYVVTDHGSCVRACGADSYEMEEDGVRKCKKCEGPCRKVCNGIGIGEFKDSLSINATNIKHFKNCTSISGDLHILPVAFRGDSFTHTPPLDPQELDILKTVKEITGFLLIQAWPENRTDLHAFENLEIIRGRTKQHGQFSLAVVSLNITSLGLRSLKEISDGDVIISGNKNLCYANTINWKKLFGTSGQKTKIISNRGENSCKATGQVCHALCSPEGCWGPEPRDCVSCRNVSRGRECVDKCNLLEGEPREFVENSECIQCHPECLPQAMNITCTGRGPDNCIQCAHYIDGPHCVKTCPAGVMGENNTLVWKYADAGHVCHLCHPNCTYGCTGPGLEGCPTNGSYIVSHFPRSFYKMSVH

SEQ ID NO: 1344 - RNA, 1971 nt, Artificial Sequence
  EGFR__Homo_sapiens__EAW50963
augcgacccuccgggacggccggggcagcgcuccuggcgcugcuggcugcgcucugcccggcgagucgggcucuggaggaaaagaaaguuugccaaggcacgaguaacaagcucacgcaguugggcacuuuugaagaucauuuucucagccuccagaggauguucaauaacugugaggugguccuugggaauuuggaaauuaccuaugugcagaggaauuaugaucuuuccuucuuaaagaccauccaggagguggcugguuauguccucauugcccucaacacaguggagcgaauuccuuuggaaaaccugcagaucaucagaggaaauauguacuacgaaaauuccuaugccuuagcagucuuaucuaacuaugaugcaaauaaaaccggacugaaggagcugcccaugagaaauuuacaggaaauccugcauggcgccgugcgguucagcaacaacccugcccugugcaacguggagagcauccaguggcgggacauagucagcagugacuuucucagcaacaugucgauggacuuccagaaccaccugggcagcugccaaaagugugauccaagcugucccaaugggagcugcuggggugcaggagaggagaacugccagaaacugaccaaaaucaucugugcccagcagugcuccgggcgcugccguggcaagucccccagugacugcugccacaaccagugugcugcaggcugcacaggcccccgggagagcgacugccuggucugccgcaaauuccgagacgaagccacgugcaaggacaccugccccccacucaugcucuacaaccccaccacguaccagauggaugugaaccccgagggcaaauacagcuuuggugccaccugcgugaagaaguguccccguaauuauguggugacagaucacggcucgugcguccgagccuguggggccgacagcuaugagauggaggaagacggcguccgcaaguguaagaagugcgaagggccuugccgcaaaguguguaacggaauagguauuggugaauuuaaagacucacucuccauaaaugcuacgaauauuaaacacuucaaaaacugcaccuccaucaguggcgaucuccacauccugccgguggcauuuaggggugacuccuucacacauacuccuccucuggauccacaggaacuggauauucugaaaaccguaaaggaaaucacaggguuuuugcugauucaggcuuggccugaaaacaggacggaccuccaugccuuugagaaccuagaaaucauacgcggcaggaccaagcaacauggucaguuuucucuugcagucgucagccugaacauaacauccuugggauuacgcucccucaaggagauaagugauggagaugugauaauuucaggaaacaaaaauuugugcuaugcaaauacaauaaacuggaaaaaacuguuugggaccuccggucagaaaaccaaaauuauaagcaacagaggugaaaacagcugcaaggccacaggccaggucugccaugccuugugcucccccgagggcugcuggggcccggagcccagggacugcgucucuugccggaaugucagccgaggcagggaaugcguggacaagugcaaccuucuggagggugagccaagggaguuuguggagaacucugagugcauacagugccacccagagugccugccucaggccaugaacaucaccugcacaggacggggaccagacaacuguauccagugugcccacuacauugacggcccccacugcgucaagaccugcccggcaggagucaugggagaaaacaacacccuggucuggaaguacgcagacgccggccaugugugccaccugugccauccaaacugcaccuacggaugcacugggccaggucuugaaggcuguccaacgaauggaagcuacauagugucucacuuuccaagaucauucuacaagaugucagugcac

SEQ ID NO: 1345 - RNA, 1971 nt, Artificial Sequence
  derived and/or modified sequence opt1 from EGFR__Homo_sapiens__EAW50963
augcgccccagcggcaccgccggggccgcgcugcucgcccugcuggccgcccucugcccggccucccgggcgcuggaggagaagaaggugugccagggcaccagcaacaagcugacgcagcucgggaccuucgaggaccacuuccugucccugcagcgcauguucaacaacugcgaggucgugcucggcaaccuggagaucaccuacgugcagcggaacuacgaccugagcuuccucaagaccauccaggaggucgccggguacgugcugaucgcccugaacacgguggagcgcaucccccucgagaaccugcagaucauccggggcaacauguacuacgagaacuccuacgcccuggcgguccucagcaacuacgacgccaacaagaccggccugaaggagcugcccaugcgcaaccuccaggagauccugcacggggccgugcgguucuccaacaaccccgcccugugcaacguggagagcauccaguggcgcgacaucgucuccagcgacuuccucuccaacaugagcauggacuuccagaaccaccugggcuccugccagaagugcgacccgagcugccccaacggguccugcuggggcgccggggaggagaacugccagaagcugaccaagaucaucugcgcgcagcagugcagcggccggugccgcggcaagucccccagcgacugcugccacaaccagugcgccgccgggugcaccggcccccgggaguccgacugccucgugugccgcaaguuccgggacgaggccacgugcaaggacacgugcccgccccugaugcuguacaaccccaccaccuaccagauggacgugaaccccgaggggaaguacagcuucggcgcgaccugcgucaagaagugcccgcgcaacuacguggugaccgaccacggcagcugcguccgggccugcggggccgacuccuacgagauggaggaggacggcgugcgcaagugcaagaagugcgaggggcccugccggaaggugugcaacggcaucgggaucggcgaguucaaggacagccucuccaucaacgccaccaacaucaagcacuucaagaacugcaccagcaucuccggcgaccugcacauccugcccgucgccuuccgcggggacagcuucacgcacacgcccccgcucgacccccaggagcuggacauccugaagaccgugaaggagaucaccggcuuccuccugauccaggccuggcccgagaaccggaccgaccugcacgcguucgagaaccucgagaucauccgcgggcggaccaagcagcacggccaguucucccuggccguggucagccugaacaucaccucccucgggcugcgcagccugaaggagaucuccgacggcgacgugaucaucagcggcaacaagaaccucugcuacgccaacaccaucaacuggaagaagcuguucgggacguccggccagaagaccaagaucaucagcaaccgcggggagaacuccugcaaggccaccggccaggugugccacgcccugugcagccccgaggggugcuggggcccggagccccgggacugcgucuccugccgcaacgugagccggggccgcgagugcgucgacaagugcaaccuccuggagggggagccccgggaguucguggagaacuccgagugcauccagugccaccccgagugccugccgcaggcgaugaacaucacgugcaccggccgcgggcccgacaacugcauccagugcgcccacuacaucgacggcccccacugcgugaagaccugccccgccggcgucaugggggagaacaacacccugguguggaaguacgccgacgcgggccacgugugccaccucugccacccgaacugcaccuacgggugcacgggccccgggcuggagggcugccccaccaacggcagcuacaucgucagccacuucccgcgguccuucuacaagaugagcgugcac

SEQ ID NO: 1346 - RNA, 1971 nt, Artificial Sequence
  derived and/or modified sequence opt2 from EGFR__Homo_sapiens__EAW50963
augcgccccuccggcaccgccggcgccgcccuccucgcccuccucgccgcccucugccccgccucccgcgcccucgaggagaagaaggucugccagggcaccuccaacaagcucacccagcucggcaccuucgaggaccacuuccucucccuccagcgcauguucaacaacugcgaggucguccucggcaaccucgagaucaccuacguccagcgcaacuacgaccucuccuuccucaagaccauccaggaggucgccggcuacguccucaucgcccucaacaccgucgagcgcaucccccucgagaaccuccagaucauccgcggcaacauguacuacgagaacuccuacgcccucgccguccucuccaacuacgacgccaacaagaccggccucaaggagcuccccaugcgcaaccuccaggagauccuccacggcgccguccgcuucuccaacaaccccgcccucugcaacgucgaguccauccaguggcgcgacaucgucuccuccgacuuccucuccaacauguccauggacuuccagaaccaccucggcuccugccagaagugcgaccccuccugccccaacggcuccugcuggggcgccggcgaggagaacugccagaagcucaccaagaucaucugcgcccagcagugcuccggccgcugccgcggcaagucccccuccgacugcugccacaaccagugcgccgccggcugcaccggcccccgcgaguccgacugccucgucugccgcaaguuccgcgacgaggccaccugcaaggacaccugccccccccucaugcucuacaaccccaccaccuaccagauggacgucaaccccgagggcaaguacuccuucggcgccaccugcgucaagaagugcccccgcaacuacgucgucaccgaccacggcuccugcguccgcgccugcggcgccgacuccuacgagauggaggaggacggcguccgcaagugcaagaagugcgagggccccugccgcaaggucugcaacggcaucggcaucggcgaguucaaggacucccucuccaucaacgccaccaacaucaagcacuucaagaacugcaccuccaucuccggcgaccuccacauccuccccgucgccuuccgcggcgacuccuucacccacacccccccccucgacccccaggagcucgacauccucaagaccgucaaggagaucaccggcuuccuccucauccaggccuggcccgagaaccgcaccgaccuccacgccuucgagaaccucgagaucauccgcggccgcaccaagcagcacggccaguucucccucgccgucgucucccucaacaucaccucccucggccuccgcucccucaaggagaucuccgacggcgacgucaucaucuccggcaacaagaaccucugcuacgccaacaccaucaacuggaagaagcucuucggcaccuccggccagaagaccaagaucaucuccaaccgcggcgagaacuccugcaaggccaccggccaggucugccacgcccucugcucccccgagggcugcuggggccccgagccccgcgacugcgucuccugccgcaacgucucccgcggccgcgagugcgucgacaagugcaaccuccucgagggcgagccccgcgaguucgucgagaacuccgagugcauccagugccaccccgagugccucccccaggccaugaacaucaccugcaccggccgcggccccgacaacugcauccagugcgcccacuacaucgacggcccccacugcgucaagaccugccccgccggcgucaugggcgagaacaacacccucgucuggaaguacgccgacgccggccacgucugccaccucugccaccccaacugcaccuacggcugcaccggccccggccucgagggcugccccaccaacggcuccuacaucgucucccacuucccccgcuccuucuacaagauguccguccac

SEQ ID NO: 1347 - RNA, 1971 nt, Artificial Sequence
  derived and/or modified sequence opt3 from EGFR__Homo_sapiens__EAW50963
augagacccagcggcaccgccggggcugcacugcucgcccuucuggcggcuuugugcccugccuccagggcauuagaggaaaagaaagugugucagggaacaucuaacaagcugacucaacuagguacguucgaggaccacuuucucucacugcagcggauguucaauaacugcgaagucguucuuggcaaucuggagaucaccuacgugcagcgcaacuaugauuugaguuuucucaaaacaauucaggaaguagccggguacgugcugauagcucugaauacugucgagcgaaucccacucgagaacuuacaaauuauccguggaaauauguauuacgaaaacagcuaugcacuggccgugcuuuccaauuacgacgcuaacaagaccggcuugaaagagcugccgaugagaaaucuacaggaaauucuccauggugccguuagguucucuaacaaucccgcgcuguguaacguggagucgauccaguggcgggauauagucucaagcgacuuucuuaguaauauguccauggauuuccagaaccaccuggggucuugccaaaagugugacccuagcugcccaaacggauccuguuggggcgcaggcgaggaaaauugccagaaguugacaaaaaucauuugugcccagcagugcucagggcgcuguagaggaaagagucccagcgauugcugccauaaccaaugugcugccgguugcaccggcccuagggagucugacugucucgugugccggaaauuucgcgaugaagcaacuuguaaggacacaugcccaccccugauguuauauaauccuaccacguaccagauggauguaaacccagaggggaaauacuccuucggagcuacuuguguuaagaagugcccgcgaaauuauguggucaccgaccacggcucaugugugagagccugcggugcggauagcuacgaaauggaggaggacggggugaggaaauguaagaaaugcgaaggacccugccggaaggucuguaacggcaucggcauuggggaguuuaaagacagucugucuaucaaugccacaaacauaaagcauuucaaaaauugcacuuccauuagcggagaucuccacauccuuccuguugcauuucguggugacucguucacccacacaccaccccuggauccucaggaauuggacauucuaaagaccgugaaggagaucacgggcuuucugcucauccaggcuuggccagaaaaccgcacugaucugcaugccuucgagaaucuugagauuauaagagggaggacaaaacaacacggacaguucucucuggcuguaguguccuugaacaucaccucacucggccugcggaguuuaaaggaaauuagcgacggugaugucaucauauccgggaauaaaaaccuguguuaugccaauacuauuaacuggaagaaacuauuuggcacaucuggacagaagaccaagaucaucagcaaccgaggcgaaaauucaugcaaagcaacggggcaagugugucaugcccucugcagucccgaaggauguugggguccggagccucgcgacugcguuuccuguagaaacgugagcaggggccgggaaugcgucgauaaguguaaucugcuugagggggagccccgcgaguucguggagaacucugaaugcauucagugccacccagaguguuugccucaggcuaugaauauuaccugcacaggaagaggccccgacaacuguauccagugcgcgcacuacauagaugguccacauuguguaaaaacuugccccgcagggguuaugggcgagaauaacacccugguguggaaguaugccgacgcuggacacgucugucaucucugccacccuaauuguacauacggcugcacugggccaggacuggaagguuguccgaccaacggcucauauaucgugagucauuuucccaggagcuucuacaaaauguccguccac

SEQ ID NO: 1348 - RNA, 1971 nt, Artificial Sequence
  derived and/or modified sequence opt4 from EGFR__Homo_sapiens__EAW50963
augagacccagcggcaccgccggcgccgcccugcuggcccugcuggccgcccugugccccgccagcagagcccuggaggagaagaaggugugccagggcaccagcaacaagcugacccagcugggcaccuucgaggaccacuuccugagccugcagagaauguucaacaacugcgagguggugcugggcaaccuggagaucaccuacgugcagagaaacuacgaccugagcuuccugaagaccauccaggagguggccggcuacgugcugaucgcccugaacaccguggagagaaucccccuggagaaccugcagaucaucagaggcaacauguacuacgagaacagcuacgcccuggccgugcugagcaacuacgacgccaacaagaccggccugaaggagcugcccaugagaaaccugcaggagauccugcacggcgccgugagauucagcaacaaccccgcccugugcaacguggagagcauccaguggagagacaucgugagcagcgacuuccugagcaacaugagcauggacuuccagaaccaccugggcagcugccagaagugcgaccccagcugccccaacggcagcugcuggggcgccggcgaggagaacugccagaagcugaccaagaucaucugcgcccagcagugcagcggcagaugcagaggcaagagccccagcgacugcugccacaaccagugcgccgccggcugcaccggccccagagagagcgacugccuggugugcagaaaguucagagacgaggccaccugcaaggacaccugccccccccugaugcuguacaaccccaccaccuaccagauggacgugaaccccgagggcaaguacagcuucggcgccaccugcgugaagaagugccccagaaacuacguggugaccgaccacggcagcugcgugagagccugcggcgccgacagcuacgagauggaggaggacggcgugagaaagugcaagaagugcgagggccccugcagaaaggugugcaacggcaucggcaucggcgaguucaaggacagccugagcaucaacgccaccaacaucaagcacuucaagaacugcaccagcaucagcggcgaccugcacauccugcccguggccuucagaggcgacagcuucacccacacccccccccuggacccccaggagcuggacauccugaagaccgugaaggagaucaccggcuuccugcugauccaggccuggcccgagaacagaaccgaccugcacgccuucgagaaccuggagaucaucagaggcagaaccaagcagcacggccaguucagccuggccguggugagccugaacaucaccagccugggccugagaagccugaaggagaucagcgacggcgacgugaucaucagcggcaacaagaaccugugcuacgccaacaccaucaacuggaagaagcuguucggcaccagcggccagaagaccaagaucaucagcaacagaggcgagaacagcugcaaggccaccggccaggugugccacgcccugugcagccccgagggcugcuggggccccgagcccagagacugcgugagcugcagaaacgugagcagaggcagagagugcguggacaagugcaaccugcuggagggcgagcccagagaguucguggagaacagcgagugcauccagugccaccccgagugccugccccaggccaugaacaucaccugcaccggcagaggccccgacaacugcauccagugcgcccacuacaucgacggcccccacugcgugaagaccugccccgccggcgugaugggcgagaacaacacccugguguggaaguacgccgacgccggccacgugugccaccugugccaccccaacugcaccuacggcugcaccggccccggccuggagggcugccccaccaacggcagcuacaucgugagccacuuccccagaagcuucuacaagaugagcgugcac

SEQ ID NO: 1349 - RNA, 1971 nt, Artificial Sequence
  derived and/or modified sequence opt5 from EGFR__Homo_sapiens__EAW50963
augagacccagcggcaccgccggggcugcccugcucgcgcugcuugcugcccugugcccugccucccgggcucucgaggaaaagaaagugugucagggaacaucuaacaagcugacgcaacuuggcaccuucgaggaccacuuucugagccuccagcgcauguucaauaacugcgaagucguucuggggaaucuggagaucacauacgugcagagaaacuaugaucucuccuuucugaaaaccauucaggaaguggccggauacguccuuaucgcucugaauacaguggagcggauuccgcucgagaaccugcaaaucauucgcggcaauauguauuacgaaaacucuuaugcccuugcgguucugagcaauuacgacgccaacaagaccgggcucaaagagcugcccaugagaaaucugcaggaaauccuccauggagcugugcgguucuccaacaauccugcccuguguaacgucgagucuauccaguggcgcgauauugugagcuccgacuuucuuagcaauaugucuauggauuuccagaaccaccugggcuccugccaaaagugugaccccagcugcccuaacggcucuuguuggggagcuggggaggaaaauugccagaagcucacaaaaaucauuugugcccagcagugcuccggcagaugucggggaaagagccccucugauugcugccauaaccaaugugcggccgggugcaccggcccucgcgaguccgacugucugguuugcagaaaauuucgggaugaagcuacguguaaggauaccugcccgccccuuaugcuguauaauccuacaaccuaccagauggacgugaaccccgaggggaaauacagcuucggagccacaugugucaagaagugcccucgcaauuauguggugaccgaccacggcuccugugucagagcuugcggcgccgauucuuacgaaauggaggaggacgggguucggaaauguaagaaaugcgaaggacccugccgcaagguguguaacggcaucgggauuggagaguuuaaagacagccucuccaucaaugccacgaacauuaagcauuucaaaaauugcacaagcaucucuggcgaucugcacauccugccgguggcuuuuagaggggacuccuucacccacacaccuccccucgauccucaggaacuggacauucuuaagaccgucaaggagaucaccggauuucugcucauucaagcguggcccgaaaaccggacagaucugcaugccuucgagaaucuugagaucauuagaggccgcacgaaacagcacggccaguucagccuggcugugguuucucucaacaucaccagccuggggcugcggucccucaaggaaaucucugacggagaugugauuaucagcggcaauaaaaaccuguguuaugccaauacaauuaacuggaagaaacuuuuugggaccuccggacagaagacaaagaucauuagcaacagaggcgaaaauucuugcaaagccaccgggcaagucugucaugcucugugcucccccgaaggcuguuggggaccugagccgcgcgacugcgugagcugucggaacguuucuagaggccgcgaaugcguggauaaguguaaucuccuggagggggagccccgggaguucgucgagaacuccgaaugcauccagugccacccugagugucugccccaggccaugaauaucacgugcacaggaagaggcccugacaacuguauucagugcgcgcacuacaucgaugggccccauugugugaaaaccugcccggcuggagucaugggcgagaauaacacccuuguguggaaguaugccgacgccgggcacguuugucaucucugccacccuaauuguacauacggcugcaccggacccggccuggaaggguguccuacaaacggaagcuauauugugucccauuuuccccgcucuuucuacaaaaugagcguccac

SEQ ID NO: 1350 - protein, 1136 aa, Artificial Sequence
  EGFR__Homo_sapiens__E7BSV0
MRPSGTAGAALLALLAALCPASRALEEKKVCQGTSNKLTQLGTFEDHFLSLQRMFNNCEVVLGNLEITYVQRNYDLSFLKTIQEVAGYVLIALNTVERIPLENLQIIRGNMYYENSYALAVLSNYDANKTGLKELPMRNLQEILHGAVRFSNNPALCNVESIQWRDIVSSDFLSNMSMDFQNHLGSCQKCDPSCPNGSCWGAGEENCQKLTKIICAQQCSGRCRGKSPSDCCHNQCAAGCTGPRESDCLVCRKFRDEATCKDTCPPLMLYNPTTYQMDVNPEGKYSFGATCVKKCPRNYVVTDHGSCVRACGADSYEMEEDGVRKCKKCEGPCRKVCNGIGIGEFKDSLSINATNIKHFKNCTSISGDLHILPVAFRGDSFTHTPPLDPQELDILKTVKEITGFLLIQAWPENRTDLHAFENLEIIRGRTKQHGQFSLAVVSLNITSLGLRSLKEISDGDVIISGNKNLCYANTINWKKLFGTSGQKTKIISNRGENSCKATGQVCHALCSPEGCWGPEPRDCVSCRNVSRGRECVDKCNLLEGEPREFVENSECIQCHPECLPQAMNITCTGRGPDNCIQCAHYIDGPHCVKTCPAGVMGENNTLVWKYADAGHVCHLCHPNCTYGCTGPGLEGCPTNGPKIPSIATGMVGALLLLLVVALGIGLFMRRRHIVRKRTLRRLLQERELVEPLTPSGEAPNQALLRILKETEFKKIKVLGSGAFGTVYKGLWIPEGEKVKIPVAIKELREATSPKANKEILDEAYVMASVDNPHVCRLLGICLTSTVQLITQLMPFGCLLDYVREHKDNIGSQYLLNWCVQIAKGMNYLEDRRLVHRDLAARNVLVKTPQHVKITDFGLAKLLGAEEKEYHAEGGKVPIKWMALESILHRIYTHQSDVWSYGVTVWELMTFGSKPYDGIPASEISSILEKGERLPQPPICTIDVYMIMVKCWMIDADSRPKFRELIIEFSKMARDPQRYLVIQGDERMHLPSPTDSNFYRALMDEEDMDDVVDADEYLIPQQGFFSSPSTSRTPLLSSLSATSNNSTVACIDRNGLQSCPIKEDSFLQRYSSDPTGALTEDSIDDTFLPVPGEWLVWKQSCSSTSSTHSAAASLQCPSQVLPPASPEGETVADLQTQ

SEQ ID NO: 1351 - RNA, 3411 nt, Artificial Sequence
  EGFR__Homo_sapiens__ADL28125
augcgacccuccgggacggccggggcagcgcuccuggcgcugcuggcugcgcucugcccggcgagucgggcucuggaggaaaagaaaguuugccaaggcacgaguaacaagcucacgcaguugggcacuuuugaagaucauuuucucagccuccagaggauguucaauaacugugaggugguccuugggaauuuggaaauuaccuaugugcagaggaauuaugaucuuuccuucuuaaagaccauccaggagguggcugguuauguccucauugcccucaacacaguggagcgaauuccuuuggaaaaccugcagaucaucagaggaaauauguacuacgaaaauuccuaugccuuagcagucuuaucuaacuaugaugcaaauaaaaccggacugaaggagcugcccaugagaaauuuacaggaaauccugcauggcgccgugcgguucagcaacaacccugcccugugcaacguggagagcauccaguggcgggacauagucagcagugacuuucucagcaacaugucgauggacuuccagaaccaccugggcagcugccaaaagugugauccaagcugucccaaugggagcugcuggggugcaggagaggagaacugccagaaacugaccaaaaucaucugugcccagcagugcuccgggcgcugccguggcaagucccccagugacugcugccacaaccagugugcugcaggcugcacaggcccccgggagagcgacugccuggucugccgcaaauuccgagacgaagccacgugcaaggacaccugccccccacucaugcucuacaaccccaccacguaccagauggaugugaaccccgagggcaaauacagcuuuggugccaccugcgugaagaaguguccccguaauuauguggugacagaucacggcucgugcguccgagccuguggggccgacagcuaugagauggaggaagacggcguccgcaaguguaagaagugcgaagggccuugccgcaaaguguguaacggaauagguauuggugaauuuaaagacucacucuccauaaaugcuacgaauauuaaacacuucaaaaacugcaccuccaucaguggcgaucuccacauccugccgguggcauuuaggggugacuccuucacacauacuccuccucuggauccacaggaacuggauauucugaaaaccguaaaggaaaucacaggguuuuugcugauucaggcuuggccugaaaacaggacggaccuccaugccuuugagaaccuagaaaucauacgcggcaggaccaagcaacauggucaguuuucucuugcagucgucagccugaacauaacauccuugggauuacgcucccucaaggagauaagugauggagaugugauaauuucaggaaacaaaaauuugugcuaugcaaauacaauaaacuggaaaaaacuguuugggaccuccggucagaaaaccaaaauuauaagcaacagaggugaaaacagcugcaaggccacaggccaggucugccaugccuugugcucccccgagggcugcuggggcccggagcccagggacugcgucucuugccggaaugucagccgaggcagggaaugcguggacaagugcaaccuucuggagggugagccaagggaguuuguggagaacucugagugcauacagugccacccagagugccugccucaggccaugaacaucaccugcacaggacggggaccagacaacuguauccagugugcccacuacauugacggcccccacugcgucaagaccugcccggcaggagucaugggagaaaacaacacccuggucuggaaguacgcagacgccggccaugugugccaccugugccauccaaacugcaccuacggaugcacugggccaggucuugaaggcuguccaacgaaugggccuaagaucccguccaucgccacugggauggugggggcccuccucuugcugcuggugguggcccuggggaucggccucuucaugcgaaggcgccacaucguucggaagcgcacgcugcggaggcugcugcaggagagggagcuuguggagccucuuacacccaguggagaagcucccaaccaagcucucuugaggaucuugaaggaaacugaauucaaaaagaucaaagugcugggcuccggugcguucggcacgguguauaagggacucuggaucccagaaggugagaaaguuaaaauucccgucgcuaucaaggaauuaagagaagcaacaucuccgaaagccaacaaggaaauccucgaugaagccuacgugauggccagcguggacaacccccacgugugccgccugcugggcaucugccucaccuccaccgugcagcucaucacgcagcucaugcccuucggcugccuccuggacuauguccgggaacacaaagacaauauuggcucccaguaccugcucaacuggugugugcagaucgcaaagggcaugaacuacuuggaggaccgucgcuuggugcaccgcgaccuggcagccaggaacguacuggugaaaacaccgcagcaugucaagaucacagauuuugggcuggccaaacugcugggugcggaagagaaagaauaccaugcagaaggaggcaaagugccuaucaaguggauggcauuggaaucaauuuuacacagaaucuauacccaccagagugaugucuggagcuacggggugaccguuugggaguugaugaccuuuggauccaagccauaugacggaaucccugccagcgagaucuccuccauccuggagaaaggagaacgccucccucagccacccauauguaccaucgaugucuacaugaucauggucaagugcuggaugauagacgcagauagucgcccaaaguuccgugaguugaucaucgaauucuccaaaauggcccgagacccccagcgcuaccuugucauucagggggaugaaagaaugcauuugccaaguccuacagacuccaacuucuaccgugcccugauggaugaagaagacauggacgacgugguggaugccgacgaguaccucaucccacagcagggcuucuucagcagccccuccacgucacggacuccccuccugagcucucugagugcaaccagcaacaauuccaccguggcuugcauugauagaaaugggcugcaaagcugucccaucaaggaagacagcuucuugcagcgauacagcucagaccccacaggcgccuugacugaggacagcauagacgacaccuuccucccagugccuggugaguggcuugucuggaaacaguccugcuccucaaccuccucgacccacucagcagcagccagucuccaguguccaagccaggugcucccuccagcaucuccagagggggaaacaguggcagauuugcagacacaguga

SEQ ID NO: 1352 - RNA, 3411 nt, Artificial Sequence
  derived and/or modified sequence opt1 from EGFR__Homo_sapiens__ADL28125
augcgccccagcggcaccgccggggccgcgcugcucgcccugcuggccgcccucugcccggccucccgggcgcuggaggagaagaaggugugccagggcaccagcaacaagcugacgcagcucgggaccuucgaggaccacuuccugucccugcagcgcauguucaacaacugcgaggucgugcucggcaaccuggagaucaccuacgugcagcggaacuacgaccugagcuuccucaagaccauccaggaggucgccggguacgugcugaucgcccugaacacgguggagcgcaucccccucgagaaccugcagaucauccggggcaacauguacuacgagaacuccuacgcccuggcgguccucagcaacuacgacgccaacaagaccggccugaaggagcugcccaugcgcaaccuccaggagauccugcacggggccgugcgguucuccaacaaccccgcccugugcaacguggagagcauccaguggcgcgacaucgucuccagcgacuuccucuccaacaugagcauggacuuccagaaccaccugggcuccugccagaagugcgacccgagcugccccaacggguccugcuggggcgccggggaggagaacugccagaagcugaccaagaucaucugcgcgcagcagugcagcggccggugccgcggcaagucccccagcgacugcugccacaaccagugcgccgccgggugcaccggcccccgggaguccgacugccucgugugccgcaaguuccgggacgaggccacgugcaaggacacgugcccgccccugaugcuguacaaccccaccaccuaccagauggacgugaaccccgaggggaaguacagcuucggcgcgaccugcgucaagaagugcccgcgcaacuacguggugaccgaccacggcagcugcguccgggccugcggggccgacuccuacgagauggaggaggacggcgugcgcaagugcaagaagugcgaggggcccugccggaaggugugcaacggcaucgggaucggcgaguucaaggacagccucuccaucaacgccaccaacaucaagcacuucaagaacugcaccagcaucuccggcgaccugcacauccugcccgucgccuuccgcggggacagcuucacgcacacgcccccgcucgacccccaggagcuggacauccugaagaccgugaaggagaucaccggcuuccuccugauccaggccuggcccgagaaccggaccgaccugcacgcguucgagaaccucgagaucauccgcgggcggaccaagcagcacggccaguucucccuggccguggucagccugaacaucaccucccucgggcugcgcagccugaaggagaucuccgacggcgacgugaucaucagcggcaacaagaaccucugcuacgccaacaccaucaacuggaagaagcuguucgggacguccggccagaagaccaagaucaucagcaaccgcggggagaacuccugcaaggccaccggccaggugugccacgcccugugcagccccgaggggugcuggggcccggagccccgggacugcgucuccugccgcaacgugagccggggccgcgagugcgucgacaagugcaaccuccuggagggggagccccgggaguucguggagaacuccgagugcauccagugccaccccgagugccugccgcaggcgaugaacaucacgugcaccggccgcgggcccgacaacugcauccagugcgcccacuacaucgacggcccccacugcgugaagaccugccccgccggcgucaugggggagaacaacacccugguguggaaguacgccgacgcgggccacgugugccaccucugccacccgaacugcaccuacgggugcacgggccccgggcuggagggcugccccaccaacggcccgaagauccccagcaucgccaccgggauggucggcgcccugcuccugcugcucgugguggcccuggggaucggccuguucaugcggcgccggcacaucguccgcaagcggacccuccgccggcugcugcaggagcgcgagcucguggagccccugacgcccagcggggaggccccgaaccaggcgcugcuccggauccugaaggagaccgaguucaagaagaucaaggugcugggcuccggcgccuucgggaccgucuacaagggccucuggauccccgagggggagaaggugaagauccccguggccaucaaggagcugcgcgaggccaccagccccaaggccaacaaggagauccuggacgaggcguacgucauggccuccguggacaacccgcacgugugccggcuccugggcaucugccugaccagcacgguccagcucaucacccagcugaugcccuucgggugccugcucgacuacgugcgcgagcacaaggacaacaucggcucccaguaccugcugaacuggugcgugcagaucgccaagggcaugaacuaccucgaggaccggcgccugguccaccgcgaccuggccgcccggaacgugcucgugaagacgccccagcacgucaagaucaccgacuucgggcuggcgaagcugcucggcgccgaggagaaggaguaccacgccgagggcgggaaggugcccaucaaguggauggcccuggagagcauccugcaccgcaucuacacccaccaguccgacguguggagcuacggggucaccgugugggagcucaugaccuucggcuccaagccguacgacggcauccccgcgagcgagaucuccagcauccuggagaagggggagcggcugccccagcccccgaucugcaccaucgacguguacaugaucauggucaagugcuggaugaucgacgccgacucccgccccaaguuccgggagcucaucaucgaguucagcaagauggcccgcgacccccagcgguaccuggugauccagggcgacgagcgcaugcaccuccccuccccgacggacagcaacuucuaccgggcccugauggacgaggaggacauggacgacguggucgacgccgacgaguaccugaucccccagcagggguucuucuccagccccagcaccucccgcacgccccugcucagcucccugagcgcgaccuccaacaacagcaccguggccugcaucgaccggaacggccugcaguccugcccgaucaaggaggacagcuuccuccagcgcuacuccagcgaccccaccggcgcccugaccgaggacuccaucgacgacaccuuccugcccgugccgggggaguggcucgucuggaagcagagcugcuccagcacguccagcacccacuccgccgccgcgagccugcagugccccucccaggugcugccgcccgccagccccgagggcgagaccguggccgaccuccagacccaguga

SEQ ID NO: 1353 - RNA, 3411 nt, Artificial Sequence
  derived and/or modified sequence opt2 from EGFR__Homo_sapiens__ADL28125
augcgccccuccggcaccgccggcgccgcccuccucgcccuccucgccgcccucugccccgccucccgcgcccucgaggagaagaaggucugccagggcaccuccaacaagcucacccagcucggcaccuucgaggaccacuuccucucccuccagcgcauguucaacaacugcgaggucguccucggcaaccucgagaucaccuacguccagcgcaacuacgaccucuccuuccucaagaccauccaggaggucgccggcuacguccucaucgcccucaacaccgucgagcgcaucccccucgagaaccuccagaucauccgcggcaacauguacuacgagaacuccuacgcccucgccguccucuccaacuacgacgccaacaagaccggccucaaggagcuccccaugcgcaaccuccaggagauccuccacggcgccguccgcuucuccaacaaccccgcccucugcaacgucgaguccauccaguggcgcgacaucgucuccuccgacuuccucuccaacauguccauggacuuccagaaccaccucggcuccugccagaagugcgaccccuccugccccaacggcuccugcuggggcgccggcgaggagaacugccagaagcucaccaagaucaucugcgcccagcagugcuccggccgcugccgcggcaagucccccuccgacugcugccacaaccagugcgccgccggcugcaccggcccccgcgaguccgacugccucgucugccgcaaguuccgcgacgaggccaccugcaaggacaccugccccccccucaugcucuacaaccccaccaccuaccagauggacgucaaccccgagggcaaguacuccuucggcgccaccugcgucaagaagugcccccgcaacuacgucgucaccgaccacggcuccugcguccgcgccugcggcgccgacuccuacgagauggaggaggacggcguccgcaagugcaagaagugcgagggccccugccgcaaggucugcaacggcaucggcaucggcgaguucaaggacucccucuccaucaacgccaccaacaucaagcacuucaagaacugcaccuccaucuccggcgaccuccacauccuccccgucgccuuccgcggcgacuccuucacccacacccccccccucgacccccaggagcucgacauccucaagaccgucaaggagaucaccggcuuccuccucauccaggccuggcccgagaaccgcaccgaccuccacgccuucgagaaccucgagaucauccgcggccgcaccaagcagcacggccaguucucccucgccgucgucucccucaacaucaccucccucggccuccgcucccucaaggagaucuccgacggcgacgucaucaucuccggcaacaagaaccucugcuacgccaacaccaucaacuggaagaagcucuucggcaccuccggccagaagaccaagaucaucuccaaccgcggcgagaacuccugcaaggccaccggccaggucugccacgcccucugcucccccgagggcugcuggggccccgagccccgcgacugcgucuccugccgcaacgucucccgcggccgcgagugcgucgacaagugcaaccuccucgagggcgagccccgcgaguucgucgagaacuccgagugcauccagugccaccccgagugccucccccaggccaugaacaucaccugcaccggccgcggccccgacaacugcauccagugcgcccacuacaucgacggcccccacugcgucaagaccugccccgccggcgucaugggcgagaacaacacccucgucuggaaguacgccgacgccggccacgucugccaccucugccaccccaacugcaccuacggcugcaccggccccggccucgagggcugccccaccaacggccccaagauccccuccaucgccaccggcauggucggcgcccuccuccuccuccucgucgucgcccucggcaucggccucuucaugcgccgccgccacaucguccgcaagcgcacccuccgccgccuccuccaggagcgcgagcucgucgagccccucacccccuccggcgaggcccccaaccaggcccuccuccgcauccucaaggagaccgaguucaagaagaucaagguccucggcuccggcgccuucggcaccgucuacaagggccucuggauccccgagggcgagaaggucaagauccccgucgccaucaaggagcuccgcgaggccaccucccccaaggccaacaaggagauccucgacgaggccuacgucauggccuccgucgacaacccccacgucugccgccuccucggcaucugccucaccuccaccguccagcucaucacccagcucaugcccuucggcugccuccucgacuacguccgcgagcacaaggacaacaucggcucccaguaccuccucaacuggugcguccagaucgccaagggcaugaacuaccucgaggaccgccgccucguccaccgcgaccucgccgcccgcaacguccucgucaagaccccccagcacgucaagaucaccgacuucggccucgccaagcuccucggcgccgaggagaaggaguaccacgccgagggcggcaagguccccaucaaguggauggcccucgaguccauccuccaccgcaucuacacccaccaguccgacgucugguccuacggcgucaccgucugggagcucaugaccuucggcuccaagcccuacgacggcauccccgccuccgagaucuccuccauccucgagaagggcgagcgccucccccagccccccaucugcaccaucgacgucuacaugaucauggucaagugcuggaugaucgacgccgacucccgccccaaguuccgcgagcucaucaucgaguucuccaagauggcccgcgacccccagcgcuaccucgucauccagggcgacgagcgcaugcaccuccccucccccaccgacuccaacuucuaccgcgcccucauggacgaggaggacauggacgacgucgucgacgccgacgaguaccucaucccccagcagggcuucuucuccucccccuccaccucccgcaccccccuccucuccucccucuccgccaccuccaacaacuccaccgucgccugcaucgaccgcaacggccuccaguccugccccaucaaggaggacuccuuccuccagcgcuacuccuccgaccccaccggcgcccucaccgaggacuccaucgacgacaccuuccuccccguccccggcgaguggcucgucuggaagcaguccugcuccuccaccuccuccacccacuccgccgccgccucccuccagugccccucccagguccucccccccgccucccccgagggcgagaccgucgccgaccuccagacccaguga

SEQ ID NO: 1354 - RNA, 3411 nt, Artificial Sequence
  derived and/or modified sequence opt3 from EGFR__Homo_sapiens__ADL28125
augagacccagcggcaccgccggggcugcacugcucgcccuucuggcggcuuugugcccugccuccagggcauuagaggaaaagaaagugugucagggaacaucuaacaagcugacucaacuagguacguucgaggaccacuuucucucacugcagcggauguucaauaacugcgaagucguucuuggcaaucuggagaucaccuacgugcagcgcaacuaugauuugaguuuucucaaaacaauucaggaaguagccggguacgugcugauagcucugaauacugucgagcgaaucccacucgagaacuuacaaauuauccguggaaauauguauuacgaaaacagcuaugcacuggccgugcuuuccaauuacgacgcuaacaagaccggcuugaaagagcugccgaugagaaaucuacaggaaauucuccauggugccguuagguucucuaacaaucccgcgcuguguaacguggagucgauccaguggcgggauauagucucaagcgacuuucuuaguaauauguccauggauuuccagaaccaccuggggucuugccaaaagugugacccuagcugcccaaacggauccuguuggggcgcaggcgaggaaaauugccagaaguugacaaaaaucauuugugcccagcagugcucagggcgcuguagaggaaagagucccagcgauugcugccauaaccaaugugcugccgguugcaccggcccuagggagucugacugucucgugugccggaaauuucgcgaugaagcaacuuguaaggacacaugcccaccccugauguuauauaauccuaccacguaccagauggauguaaacccagaggggaaauacuccuucggagcuacuuguguuaagaagugcccgcgaaauuauguggucaccgaccacggcucaugugugagagccugcggugcggauagcuacgaaauggaggaggacggggugaggaaauguaagaaaugcgaaggacccugccggaaggucuguaacggcaucggcauuggggaguuuaaagacagucugucuaucaaugccacaaacauaaagcauuucaaaaauugcacuuccauuagcggagaucuccacauccuuccuguugcauuucguggugacucguucacccacacaccaccccuggauccucaggaauuggacauucuaaagaccgugaaggagaucacgggcuuucugcucauccaggcuuggccagaaaaccgcacugaucugcaugccuucgagaaucuugagauuauaagagggaggacaaaacaacacggacaguucucucuggcuguaguguccuugaacaucaccucacucggccugcggaguuuaaaggaaauuagcgacggugaugucaucauauccgggaauaaaaaccuguguuaugccaauacuauuaacuggaagaaacuauuuggcacaucuggacagaagaccaagaucaucagcaaccgaggcgaaaauucaugcaaagcaacggggcaagugugucaugcccucugcagucccgaaggauguugggguccggagccucgcgacugcguuuccuguagaaacgugagcaggggccgggaaugcgucgauaaguguaaucugcuugagggggagccccgcgaguucguggagaacucugaaugcauucagugccacccagaguguuugccucaggcuaugaauauuaccugcacaggaagaggccccgacaacuguauucagugcgcgcacuacauagaugguccacauuguguaaaaacuugccccgcagggguuaugggcgagaauaacacccugguguggaaguaugccgacgcuggacacgucugucaucucugccacccuaauuguacauacggcugcacugggccaggacuggaagguuguccgaccaacggccccaaaaucccuucaauugccacagggauggugggagcacuucuguugcuccuggucguggccuuaggcaucggucuguuuaugaggcgucggcauaucguucgaaagagaacccuaaggcgccuccugcaagagcgggaacuuguggagccauugacucccaguggggaagcuccuaaucaggcccugcucagaauccugaaggagacggaguucaaaaagauaaaaguauuaggcagcggagcauuuggcacagucuauaaggggcuguggaucccagaaggagagaaagugaagauucccguugcgaucaaggaacuuagggaggcuaccuccccgaaagccaacaaggaaauuuuggacgaggcauacgugauggccucugucgauaauccucacgugugccgccuccugggcaucugccuaacuucgaccguacagcugauaacacagcucaugccauucgguugucugcuugacuacgugcgagagcacaaagauaacaucgggagccaauauuugcugaauuggugcguucagauugcuaagggaaugaacuacuuagaagaccggcgucucguccauagagaucuggccgcaaggaacgugcuugugaaaacuccccagcacgucaagaucaccgacuuuggccuggcuaaauugcucggugccgaggaaaaggaguaucaugcggaaggcgggaagguuccuauuaaauggauggcccuggaguccauccuacaccgcauauacacacaccagucagauguguggaguuauggagugacgguaugggagcugaugaccuucggcucuaagcccuacgacgggauuccagcuagcgaaaucuccucaauucucgagaaaggagaacggcugccucaacccccaaucuguacuauagaugucuauaugaucauggugaagugcuggaugauugacgcagauagcagaccgaaauuuagggagcuuaucauugaguucucuaagauggcccgagacccucagcgcuacuugguuauccagggcgaugaacggaugcaucugcccuccccaacagacaguaauuuuuacagagcuuuaauggacgaggaagauauggacgauguggucgacgccgaugaguaucucauaccccaacaggguuucuuuagcucuccuuccaccucaaggacaccacugcuuaguagccugucggcaacuuccaacaauucuaccguggcguguauugaccguaacgggcuacagagcugccccaucaaggaagauucauuccuccagcgcuacaguuccgacccuacgggagcccugaccgaggauucuaucgacgauacauucuugccgguuccaggcgaguggcugguguggaaacaaagcuguuccucaacuagcaguacccacucugcugccgcauccuuacagugccccagccagguacucccuccagcuucgcccgaaggugagacagucgccgaccugcagacucaauga

SEQ ID NO: 1355 - RNA, 3411 nt, Artificial Sequence
  derived and/or modified sequence opt4 from EGFR__Homo_sapiens__ADL28125
augagacccagcggcaccgccggcgccgcccugcuggcccugcuggccgcccugugccccgccagcagagcccuggaggagaagaaggugugccagggcaccagcaacaagcugacccagcugggcaccuucgaggaccacuuccugagccugcagagaauguucaacaacugcgagguggugcugggcaaccuggagaucaccuacgugcagagaaacuacgaccugagcuuccugaagaccauccaggagguggccggcuacgugcugaucgcccugaacaccguggagagaaucccccuggagaaccugcagaucaucagaggcaacauguacuacgagaacagcuacgcccuggccgugcugagcaacuacgacgccaacaagaccggccugaaggagcugcccaugagaaaccugcaggagauccugcacggcgccgugagauucagcaacaaccccgcccugugcaacguggagagcauccaguggagagacaucgugagcagcgacuuccugagcaacaugagcauggacuuccagaaccaccugggcagcugccagaagugcgaccccagcugccccaacggcagcugcuggggcgccggcgaggagaacugccagaagcugaccaagaucaucugcgcccagcagugcagcggcagaugcagaggcaagagccccagcgacugcugccacaaccagugcgccgccggcugcaccggccccagagagagcgacugccuggugugcagaaaguucagagacgaggccaccugcaaggacaccugccccccccugaugcuguacaaccccaccaccuaccagauggacgugaaccccgagggcaaguacagcuucggcgccaccugcgugaagaagugccccagaaacuacguggugaccgaccacggcagcugcgugagagccugcggcgccgacagcuacgagauggaggaggacggcgugagaaagugcaagaagugcgagggccccugcagaaaggugugcaacggcaucggcaucggcgaguucaaggacagccugagcaucaacgccaccaacaucaagcacuucaagaacugcaccagcaucagcggcgaccugcacauccugcccguggccuucagaggcgacagcuucacccacacccccccccuggacccccaggagcuggacauccugaagaccgugaaggagaucaccggcuuccugcugauccaggccuggcccgagaacagaaccgaccugcacgccuucgagaaccuggagaucaucagaggcagaaccaagcagcacggccaguucagccuggccguggugagccugaacaucaccagccugggccugagaagccugaaggagaucagcgacggcgacgugaucaucagcggcaacaagaaccugugcuacgccaacaccaucaacuggaagaagcuguucggcaccagcggccagaagaccaagaucaucagcaacagaggcgagaacagcugcaaggccaccggccaggugugccacgcccugugcagccccgagggcugcuggggccccgagcccagagacugcgugagcugcagaaacgugagcagaggcagagagugcguggacaagugcaaccugcuggagggcgagcccagagaguucguggagaacagcgagugcauccagugccaccccgagugccugccccaggccaugaacaucaccugcaccggcagaggccccgacaacugcauccagugcgcccacuacaucgacggcccccacugcgugaagaccugccccgccggcgugaugggcgagaacaacacccugguguggaaguacgccgacgccggccacgugugccaccugugccaccccaacugcaccuacggcugcaccggccccggccuggagggcugccccaccaacggccccaagauccccagcaucgccaccggcauggugggcgcccugcugcugcugcuggugguggcccugggcaucggccuguucaugagaagaagacacaucgugagaaagagaacccugagaagacugcugcaggagagagagcugguggagccccugacccccagcggcgaggcccccaaccaggcccugcugagaauccugaaggagaccgaguucaagaagaucaaggugcugggcagcggcgccuucggcaccguguacaagggccuguggauccccgagggcgagaaggugaagauccccguggccaucaaggagcugagagaggccaccagccccaaggccaacaaggagauccuggacgaggccuacgugauggccagcguggacaacccccacgugugcagacugcugggcaucugccugaccagcaccgugcagcugaucacccagcugaugcccuucggcugccugcuggacuacgugagagagcacaaggacaacaucggcagccaguaccugcugaacuggugcgugcagaucgccaagggcaugaacuaccuggaggacagaagacuggugcacagagaccuggccgccagaaacgugcuggugaagaccccccagcacgugaagaucaccgacuucggccuggccaagcugcugggcgccgaggagaaggaguaccacgccgagggcggcaaggugcccaucaaguggauggcccuggagagcauccugcacagaaucuacacccaccagagcgacguguggagcuacggcgugaccgugugggagcugaugaccuucggcagcaagcccuacgacggcauccccgccagcgagaucagcagcauccuggagaagggcgagagacugccccagccccccaucugcaccaucgacguguacaugaucauggugaagugcuggaugaucgacgccgacagcagacccaaguucagagagcugaucaucgaguucagcaagauggccagagacccccagagauaccuggugauccagggcgacgagagaaugcaccugcccagccccaccgacagcaacuucuacagagcccugauggacgaggaggacauggacgacgugguggacgccgacgaguaccugaucccccagcagggcuucuucagcagccccagcaccagcagaaccccccugcugagcagccugagcgccaccagcaacaacagcaccguggccugcaucgacagaaacggccugcagagcugccccaucaaggaggacagcuuccugcagagauacagcagcgaccccaccggcgcccugaccgaggacagcaucgacgacaccuuccugcccgugcccggcgaguggcugguguggaagcagagcugcagcagcaccagcagcacccacagcgccgccgccagccugcagugccccagccaggugcugccccccgccagccccgagggcgagaccguggccgaccugcagacccaguga

SEQ ID NO: 1356 - RNA, 3411 nt, Artificial Sequence
  derived and/or modified sequence opt5 from EGFR__Homo_sapiens__ADL28125
augagacccagcggcaccgccggggcugcccugcucgcgcugcuugcugcccugugcccugccucccgggcucucgaggaaaagaaagugugucagggaacaucuaacaagcugacgcaacuuggcaccuucgaggaccacuuucugagccuccagcgcauguucaauaacugcgaagucguucuggggaaucuggagaucacauacgugcagagaaacuaugaucucuccuuucugaaaaccauucaggaaguggccggauacguccuuaucgcucugaauacaguggagcggauuccgcucgagaaccugcaaaucauucgcggcaauauguauuacgaaaacucuuaugcccuugcgguucugagcaauuacgacgccaacaagaccgggcucaaagagcugcccaugagaaaucugcaggaaauccuccauggagcugugcgguucuccaacaauccugcccuguguaacgucgagucuauccaguggcgcgauauugugagcuccgacuuucuuagcaauaugucuauggauuuccagaaccaccugggcuccugccaaaagugugaccccagcugcccuaacggcucuuguuggggagcuggggaggaaaauugccagaagcucacaaaaaucauuugugcccagcagugcuccggcagaugucggggaaagagccccucugauugcugccauaaccaaugugcggccgggugcaccggcccucgcgaguccgacugucugguuugcagaaaauuucgggaugaagcuacguguaaggauaccugcccgccccuuaugcuguauaauccuacaaccuaccagauggacgugaaccccgaggggaaauacagcuucggagccacaugugucaagaagugcccucgcaauuauguggugaccgaccacggcuccugugucagagcuugcggcgccgauucuuacgaaauggaggaggacgggguucggaaauguaagaaaugcgaaggacccugccgcaagguguguaacggcaucgggauuggagaguuuaaagacagccucuccaucaaugccacgaacauuaagcauuucaaaaauugcacaagcaucucuggcgaucugcacauccugccgguggcuuuuagaggggacuccuucacccacacaccuccccucgauccucaggaacuggacauucuuaagaccgucaaggagaucaccggauuucugcucauucaagcguggcccgaaaaccggacagaucugcaugccuucgagaaucuugagaucauuagaggccgcacgaaacagcacggccaguucagccuggcugugguuucucucaacaucaccagccuggggcugcggucccucaaggaaaucucugacggagaugugauuaucagcggcaauaaaaaccuguguuaugccaauacaauuaacuggaagaaacuuuuugggaccuccggacagaagacaaagaucauuagcaacagaggcgaaaauucuugcaaagccaccgggcaagucugucaugcucugugcucccccgaaggcuguuggggaccugagccgcgcgacugcgugagcugucggaacguuucuagaggccgcgaaugcguggauaaguguaaucuccuggagggggagccccgggaguucgucgagaacuccgaaugcauccagugccacccugagugucugccccaggccaugaauaucacgugcacaggaagaggcccugacaacuguauucagugcgcgcacuacaucgaugggccccauugugugaaaaccugcccggcuggagucaugggcgagaauaacacccuuguguggaaguaugccgacgccgggcacguuugucaucucugccacccuaauuguacauacggcugcaccggacccggccuggaaggguguccuacaaacggacccaaaauuccuagcaucgcuacgggcauggugggggcccugcuccugcuucuggucguggcucucggaauuggccuguuuaugcgccggagacauaucguucgcaagcggacccugagacggcuucuccaagagcgcgaacugguggagccccugacaccguccggggaagccccuaaucaggcgcuccugcggauucuuaaggagaccgaguucaaaaagaucaaaguccugggcucuggagccuuuggcacaguguauaaggggcucuggauccccgaaggagagaaagugaagauucccguugcuaucaaggaacugagagaggccaccagcccuaaagcuaacaaggaaauucuggacgaggccuacgucauggcguccguggauaauccgcacgugugcagacuucucggcaucugccugacgucuaccguccagcugauuacacagcucaugcccuucgggugucugcuugacuacgugcgcgagcacaaagauaacaucggaagccaauaucugcucaauuggugcguucagaucgccaagggcaugaacuaccuggaagaccggagacuggugcaucgcgaucuugcugccagaaacguccucgugaaaaccccucagcacguuaagauuacagacuuugggcuggcuaaacugcucggcgccgaggaaaaggaguaucaugccgaaggaggcaaggugcccaucaaauggauggcucuggaguccauucuucaccggaucuacacccaccagagcgaugucuggucuuauggggugacgguuugggagcugaugacauucggauccaagccuuacgacggcauucccgcgagcgaaaucucuuccauccucgagaaaggggaacgccugccucaacccccgauuuguaccaucgauguguauaugauuauggucaagugcuggaugaucgacgccgauagcagaccuaaauuucgggagcugauuaucgaguucucuaagauggcucgcgacccccagagauaccuugugauccagggagaugaacggaugcaucugccuagccccacagacuccaauuuuuaccgcgcccucauggacgaggaagauauggacgauguggucgacgccgaugaguaucugauuccgcaacagggcuucuuuagcucuccuuccaccagcagaacaccccuccuguccucucuuagcgcuaccuccaacaauucuacgguugccuguaucgaccggaacggccugcagagcugcccuauuaaggaagauuccuuccuccagcgcuacucuagcgaccccaccggggcgcugacagaggauuccaucgacgauaccuuccugcccgugccuggagaguggcuuguguggaaacaaagcuguucuuccacaagcucuacccacuccgcugccgccagccugcagugcccgucucagguccugcccccugcuucccccgaaggcgagacgguggccgaccuccagacacaauga

SEQ ID NO: 1357 - protein, 49 aa, Artificial Sequence
  EGFR__Homo_sapiens__L0R6G1
MCATCAIQTAPTGPNKSSLSDFSLPLKLHFLSTISISPFASNKVLTLFI

SEQ ID NO: 1358 - RNA, 150 nt, Artificial Sequence
  EGFR__Homo_sapiens__CCO13722
augugugccaccugugccauccaaacugcaccuacggguccuaauaaaucuucacugucugacuuuagucucccacuaaaacugcauuuccuuucuacaauuucaauuucucccuuugcuucaaauaaaguccugacacuauucauuuga

SEQ ID NO: 1359 - RNA, 150 nt, Artificial Sequence
  derived and/or modified sequence opt1 from EGFR__Homo_sapiens__CCO13722
augugcgcgaccugcgccauccagaccgcccccacgggcccgaacaagagcucccugagcgacuucucccucccccugaagcugcacuuccucagcaccaucuccaucagccccuucgccuccaacaaggugcugacccuguucaucuga

SEQ ID NO: 1360 - RNA, 150 nt, Artificial Sequence
  derived and/or modified sequence opt2 from EGFR__Homo_sapiens__CCO13722
augugcgccaccugcgccauccagaccgcccccaccggccccaacaaguccucccucuccgacuucucccucccccucaagcuccacuuccucuccaccaucuccaucucccccuucgccuccaacaagguccucacccucuucaucuga

SEQ ID NO: 1361 - RNA, 150 nt, Artificial Sequence
  derived and/or modified sequence opt3 from EGFR__Homo_sapiens__CCO13722
augugcgccaccugugcuauccagacagcacccacuggcccuaacaagagcucccugucugacuucucacucccacuuaaacugcacuuuuugaguacgauuagcauauccccguucgccucuaauaagguguuaacccuguuuaucuga

SEQ ID NO: 1362 - RNA, 150 nt, Artificial Sequence
  derived and/or modified sequence opt4 from EGFR__Homo_sapiens__CCO13722
augugcgccaccugcgccauccagaccgcccccaccggccccaacaagagcagccugagcgacuucagccugccccugaagcugcacuuccugagcaccaucagcaucagccccuucgccagcaacaaggugcugacccuguucaucuga

SEQ ID NO: 1363 - RNA, 150 nt, Artificial Sequence
  derived and/or modified sequence opt5 from EGFR__Homo_sapiens__CCO13722
augugcgccaccugugcuauccagacagcccccacgggcccuaacaagagcucccugucugacuucagccucccgcugaaacuucacuuucuguccaccauuucuaucagccccuucgcguccaauaaggugcucacacuguuuauuuga

SEQ ID NO: 1364 - protein, 405 aa, Artificial Sequence
  EGFR__Homo_sapiens__P00533-2
MRPSGTAGAALLALLAALCPASRALEEKKVCQGTSNKLTQLGTFEDHFLSLQRMFNNCEVVLGNLEITYVQRNYDLSFLKTIQEVAGYVLIALNTVERIPLENLQIIRGNMYYENSYALAVLSNYDANKTGLKELPMRNLQEILHGAVRFSNNPALCNVESIQWRDIVSSDFLSNMSMDFQNHLGSCQKCDPSCPNGSCWGAGEENCQKLTKIICAQQCSGRCRGKSPSDCCHNQCAAGCTGPRESDCLVCRKFRDEATCKDTCPPLMLYNPTTYQMDVNPEGKYSFGATCVKKCPRNYVVTDHGSCVRACGADSYEMEEDGVRKCKKCEGPCRKVCNGIGIGEFKDSLSINATNIKHFKNCTSISGDLHILPVAFRGDSFTHTPPLDPQELDILKTVKEITGLS

SEQ ID NO: 1365 - RNA, 1218 nt, Artificial Sequence
  EGFR__Homo_sapiens__CCDS47587.1
augcgacccuccgggacggccggggcagcgcuccuggcgcugcuggcugcgcucugcccggcgagucgggcucuggaggaaaagaaaguuugccaaggcacgaguaacaagcucacgcaguugggcacuuuugaagaucauuuucucagccuccagaggauguucaauaacugugaggugguccuugggaauuuggaaauuaccuaugugcagaggaauuaugaucuuuccuucuuaaagaccauccaggagguggcugguuauguccucauugcccucaacacaguggagcgaauuccuuuggaaaaccugcagaucaucagaggaaauauguacuacgaaaauuccuaugccuuagcagucuuaucuaacuaugaugcaaauaaaaccggacugaaggagcugcccaugagaaauuuacaggaaauccugcauggcgccgugcgguucagcaacaacccugcccugugcaacguggagagcauccaguggcgggacauagucagcagugacuuucucagcaacaugucgauggacuuccagaaccaccugggcagcugccaaaagugugauccaagcugucccaaugggagcugcuggggugcaggagaggagaacugccagaaacugaccaaaaucaucugugcccagcagugcuccgggcgcugccguggcaagucccccagugacugcugccacaaccagugugcugcaggcugcacaggcccccgggagagcgacugccuggucugccgcaaauuccgagacgaagccacgugcaaggacaccugccccccacucaugcucuacaaccccaccacguaccagauggaugugaaccccgagggcaaauacagcuuuggugccaccugcgugaagaaguguccccguaauuauguggugacagaucacggcucgugcguccgagccuguggggccgacagcuaugagauggaggaagacggcguccgcaaguguaagaagugcgaagggccuugccgcaaaguguguaacggaauagguauuggugaauuuaaagacucacucuccauaaaugcuacgaauauuaaacacuucaaaaacugcaccuccaucaguggcgaucuccacauccugccgguggcauuuaggggugacuccuucacacauacuccuccucuggauccacaggaacuggauauucugaaaaccguaaaggaaaucacagguuugagcuga

SEQ ID NO: 1366 - RNA, 1218 nt, Artificial Sequence
  derived and/or modified sequence opt1 from EGFR__Homo_sapiens__CCDS47587.1
augcgccccagcggcaccgccggggccgcgcugcucgcccugcuggccgcccucugcccggccucccgggcgcuggaggagaagaaggugugccagggcaccagcaacaagcugacccagcucgggaccuucgaggaccacuuccugucccugcagcgcauguucaacaacugcgaggucgugcucggcaaccuggagaucaccuacgugcagcggaacuacgaccugagcuuccucaagaccauccaggaggucgccggguacgugcugaucgcccugaacacgguggagcgcaucccccucgagaaccugcagaucauccggggcaacauguacuacgagaacuccuacgcccuggcgguccucagcaacuacgacgccaacaagaccggccugaaggagcugcccaugcgcaaccuccaggagauccugcacggggccgugcgguucuccaacaaccccgcccugugcaacguggagagcauccaguggcgcgacaucgucuccagcgacuuccucuccaacaugagcauggacuuccagaaccaccugggcuccugccagaagugcgacccgagcugccccaacggguccugcuggggcgccggggaggagaacugccagaagcugaccaagaucaucugcgcgcagcagugcagcggccggugccgcggcaagucccccagcgacugcugccacaaccagugcgccgccgggugcaccggcccccgggaguccgacugccucgugugccgcaaguuccgggacgaggccacgugcaaggacacgugcccgccccugaugcuguacaaccccaccaccuaccagauggacgugaaccccgaggggaaguacagcuucggcgcgaccugcgucaagaagugcccgcgcaacuacguggugaccgaccacggcagcugcguccgggccugcggggccgacuccuacgagauggaggaggacggcgugcgcaagugcaagaagugcgaggggcccugccggaaggugugcaacggcaucgggaucggcgaguucaaggacagccucuccaucaacgccaccaacaucaagcacuucaagaacugcaccagcaucuccggcgaccugcacauccugcccgucgccuuccgcggggacagcuucacgcacacgcccccgcucgacccccaggagcuggacauccugaagaccgugaaggagaucaccggccucuccuga

SEQ ID NO: 1367 - RNA, 1218 nt, Artificial Sequence
  derived and/or modified sequence opt2 from EGFR__Homo_sapiens__CCDS47587.1
augcgccccuccggcaccgccggcgccgcccuccucgcccuccucgccgcccucugccccgccucccgcgcccucgaggagaagaaggucugccagggcaccuccaacaagcucacccagcucggcaccuucgaggaccacuuccucucccuccagcgcauguucaacaacugcgaggucguccucggcaaccucgagaucaccuacguccagcgcaacuacgaccucuccuuccucaagaccauccaggaggucgccggcuacguccucaucgcccucaacaccgucgagcgcaucccccucgagaaccuccagaucauccgcggcaacauguacuacgagaacuccuacgcccucgccguccucuccaacuacgacgccaacaagaccggccucaaggagcuccccaugcgcaaccuccaggagauccuccacggcgccguccgcuucuccaacaaccccgcccucugcaacgucgaguccauccaguggcgcgacaucgucuccuccgacuuccucuccaacauguccauggacuuccagaaccaccucggcuccugccagaagugcgaccccuccugccccaacggcuccugcuggggcgccggcgaggagaacugccagaagcucaccaagaucaucugcgcccagcagugcuccggccgcugccgcggcaagucccccuccgacugcugccacaaccagugcgccgccggcugcaccggcccccgcgaguccgacugccucgucugccgcaaguuccgcgacgaggccaccugcaaggacaccugccccccccucaugcucuacaaccccaccaccuaccagauggacgucaaccccgagggcaaguacuccuucggcgccaccugcgucaagaagugcccccgcaacuacgucgucaccgaccacggcuccugcguccgcgccugcggcgccgacuccuacgagauggaggaggacggcguccgcaagugcaagaagugcgagggccccugccgcaaggucugcaacggcaucggcaucggcgaguucaaggacucccucuccaucaacgccaccaacaucaagcacuucaagaacugcaccuccaucuccggcgaccuccacauccuccccgucgccuuccgcggcgacuccuucacccacacccccccccucgacccccaggagcucgacauccucaagaccgucaaggagaucaccggccucuccuga

SEQ ID NO: 1368 - RNA, 1218 nt, Artificial Sequence
  derived and/or modified sequence opt3 from EGFR__Homo_sapiens__CCDS47587.1
augagacccagcggcaccgccggggcugcacugcucgcccuucuggcggcuuugugcccugccuccagggcauuagaggaaaagaaagugugucagggaacaucuaacaagcugacucaacuagguacguucgaggaccacuuucucucacugcagcggauguucaauaacugcgaagucguucuuggcaaucuggagaucaccuacgugcagcgcaacuaugauuugaguuuucucaaaacaauucaggaaguagccggguacgugcugauagcucugaauacugucgagcgaaucccacucgagaacuuacaaauuauccguggaaauauguauuacgaaaacagcuaugcacuggccgugcuuuccaauuacgacgcuaacaagaccggcuugaaagagcugccgaugagaaaucuacaggaaauucuccauggugccguuagguucucuaacaaucccgcgcuguguaacguggagucgauccaguggcgggauauagucucaagcgacuuucuuaguaauauguccauggauuuccagaaccaccuggggucuugccaaaagugugacccuagcugcccaaacggauccuguuggggcgcaggcgaggaaaauugccagaaguugacaaaaaucauuugugcccagcagugcucagggcgcuguagaggaaagagucccagcgauugcugccauaaccaaugugcugccgguugcaccggcccuagggagucugacugucucgugugccggaaauuucgcgaugaagcaacuuguaaggacacaugcccaccccugauguuauauaauccuaccacguaccagauggauguaaacccagaggggaaauacuccuucggagcuacuuguguuaagaagugcccgcgaaauuauguggucaccgaccacggcucaugugugagagccugcggugcggauagcuacgaaauggaggaggacggggugaggaaauguaagaaaugcgaaggacccugccggaaggucuguaacggcaucggcauuggggaguuuaaagacagucugucuaucaaugccacaaacauaaagcauuucaaaaauugcacuuccauuagcggagaucuccacauccuuccuguugcauuucguggugacucguucacccacacaccaccccuggauccucaggaauuggacauucuaaagaccgugaaggagaucacgggccugucuuga

SEQ ID NO: 1369 - RNA, 1218 nt, Artificial Sequence
  derived and/or modified sequence opt4 from EGFR__Homo_sapiens__CCDS47587.1
augagacccagcggcaccgccggcgccgcccugcuggcccugcuggccgcccugugccccgccagcagagcccuggaggagaagaaggugugccagggcaccagcaacaagcugacccagcugggcaccuucgaggaccacuuccugagccugcagagaauguucaacaacugcgagguggugcugggcaaccuggagaucaccuacgugcagagaaacuacgaccugagcuuccugaagaccauccaggagguggccggcuacgugcugaucgcccugaacaccguggagagaaucccccuggagaaccugcagaucaucagaggcaacauguacuacgagaacagcuacgcccuggccgugcugagcaacuacgacgccaacaagaccggccugaaggagcugcccaugagaaaccugcaggagauccugcacggcgccgugagauucagcaacaaccccgcccugugcaacguggagagcauccaguggagagacaucgugagcagcgacuuccugagcaacaugagcauggacuuccagaaccaccugggcagcugccagaagugcgaccccagcugccccaacggcagcugcuggggcgccggcgaggagaacugccagaagcugaccaagaucaucugcgcccagcagugcagcggcagaugcagaggcaagagccccagcgacugcugccacaaccagugcgccgccggcugcaccggccccagagagagcgacugccuggugugcagaaaguucagagacgaggccaccugcaaggacaccugccccccccugaugcuguacaaccccaccaccuaccagauggacgugaaccccgagggcaaguacagcuucggcgccaccugcgugaagaagugccccagaaacuacguggugaccgaccacggcagcugcgugagagccugcggcgccgacagcuacgagauggaggaggacggcgugagaaagugcaagaagugcgagggccccugcagaaaggugugcaacggcaucggcaucggcgaguucaaggacagccugagcaucaacgccaccaacaucaagcacuucaagaacugcaccagcaucagcggcgaccugcacauccugcccguggccuucagaggcgacagcuucacccacacccccccccuggacccccaggagcuggacauccugaagaccgugaaggagaucaccggccugagcuga

SEQ ID NO: 1370 - RNA, 1218 nt, Artificial Sequence
  derived and/or modified sequence opt5 from EGFR__Homo_sapiens__CCDS47587.1
augagacccagcggcaccgccggggcugcccugcucgcgcugcuugcugcccugugcccugccucccgggcucucgaggaaaagaaagugugucagggaacaucuaacaagcugacgcaacuuggcaccuucgaggaccacuuucugagccuccagcgcauguucaauaacugcgaagucguucuggggaaucuggagaucacauacgugcagagaaacuaugaucucuccuuucugaaaaccauucaggaaguggccggauacguccuuaucgcucugaauacaguggagcggauuccgcucgagaaccugcaaaucauucgcggcaauauguauuacgaaaacucuuaugcccuugcgguucugagcaauuacgacgccaacaagaccgggcucaaagagcugcccaugagaaaucugcaggaaauccuccauggagcugugcgguucuccaacaauccugcccuguguaacgucgagucuauccaguggcgcgauauugugagcuccgacuuucuuagcaauaugucuauggauuuccagaaccaccugggcuccugccaaaagugugaccccagcugcccuaacggcucuuguuggggagcuggggaggaaaauugccagaagcucacaaaaaucauuugugcccagcagugcuccggcagaugucggggaaagagccccucugauugcugccauaaccaaugugcggccgggugcaccggcccucgcgaguccgacugucugguuugcagaaaauuucgggaugaagcuacguguaaggauaccugcccgccccuuaugcuguauaauccuacaaccuaccagauggacgugaaccccgaggggaaauacagcuucggagccacaugugucaagaagugcccucgcaauuauguggugaccgaccacggcuccugugucagagcuugcggcgccgauucuuacgaaauggaggaggacgggguucggaaauguaagaaaugcgaaggacccugccgcaagguguguaacggcaucgggauuggagaguuuaaagacagccucuccaucaaugccacgaacauuaagcauuucaaaaauugcacaagcaucucuggcgaucugcacauccugccgguggcuuuuagaggggacuccuucacccacacaccuccccucgauccucaggaacuggacauucuuaagaccgucaaggagaucaccggacugagcuga

SEQ ID NO: 1371 - protein, 1210 aa, Artificial Sequence [sequence omitted]

SEQ ID NO: 1372 - RNA, 3633 nt, Artificial Sequence
  EGFR__Homo_sapiens__AAG35789
augcgacccuccgggacggccggggcagcgcuccuggcgcugcuggcugcgcucugcccggcgagucgggcucuggaggaaaagaaaguuugccaaggcacgaguaacaagcucacgcaguugggcacuuuugaagaucauuuucucagccuccagaggauguucaauaacugugaggugguccuugggaauuuggaaauuaccuaugugcagaggaauuaugaucuuuccuucuuaaagaccauccaggagguggcugguuauguccucauugcccucaacacaguggagcgaauuccuuuggaaaaccugcagaucaucagaggaaauauguacuacgaaaauuccuaugccuuagcagucuuaucuaacuaugaugcaaauaaaaccggacugaaggagcugcccaugagaaauuuacaggaaauccugcauggcgccgugcgguucagcaacaacccugcccugugcaacguggagagcauccaguggcgggacauagucagcagugacuuucucagcaacaugucgauggacuuccagaaccaccugggcagcugccaaaagugugauccaagcugucccaaugggagcugcuggggugcaggagaggagaacugccagaaacugaccaaaaucaucugugcccagcagugcuccgggcgcugccguggcaagucccccagugacugcugccacaaccagugugcugcaggcugcacaggcccccgggagagcgacugccuggucugccgcaaauuccgagacgaagccacgugcaaggacaccugccccccacucaugcucuacaaccccaccacguaccagauggaugugaaccccgagggcaaauacagcuuuggugccaccugcgugaagaaguguccccguaauuauguggugacagaucacggcucgugcguccgagccuguggggccgacagcuaugagauggaggaagacggcguccgcaaguguaagaagugcgaagggccuugccgcaaaguguguaacggaauagguauuggugaauuuaaagacucacucuccauaaaugcuacgaauauuaaacacuucaaaaacugcaccuccaucaguggcgaucuccacauccugccgguggcauuuaggggugacuccuucacacauacuccuccucuggauccacaggaacuggauauucugaaaaccguaaaggaaaucacaggguuuuugcugauucaggcuuggccugaaaacaggacggaccuccaugccuuugagaaccuagaaaucauacgcggcaggaccaagcaacauggucaguuuucucuugcagucgucagccugaacauaacauccuugggauuacgcucccucaaggagauaagugauggagaugugauaauuucaggaaacaaaaauuugugcuaugcaaauacaauaaacuggaaaaaacuguuugggaccuccggucagaaaaccaaaauuauaagcaacagaggugaaaacagcugcaaggccacaggccaggucugccaugccuugugcucccccgagggcugcuggggcccggagcccagggacugcgucucuugccggaaugucagccgaggcagggaaugcguggacaagugcaaccuucuggagggugagccaagggaguuuguggagaacucugagugcauacagugccacccagagugccugccucaggccaugaacaucaccugcacaggacggggaccagacaacuguauccagugugcccacuacauugacggcccccacugcgucaagaccugcccggcaggagucaugggagaaaacaacacccuggucuggaaguacgcagacgccggccaugugugccaccugugccauccaaacugcaccuacggaugcacugggccaggucuugaaggcuguccaacgaaugggccuaagaucccguccaucgccacugggauggugggggcccuccucuugcugcuggugguggcccuggggaucggccucuucaugcgaaggcgccacaucguucggaagcgcacgcugcggaggcugcugcaggagagggagcuuguggagccucuuacacccaguggagaagcucccaaccaagcucucuugaggaucuugaaggaaacugaauucaaaaagaucaaagugcugggcuccggugcguucggcacgguguauaagggacucuggaucccagaaggugagaaaguuaaaauucccgucgcuaucaaggaauuaagagaagcaacaucuccgaaagccaacaaggaaauccucgaugaagccuacgugauggccagcguggacaacccccacgugugccgccugcugggcaucugccucaccuccaccgugcagcucaucacgcagcucaugcccuucggcugccuccuggacuauguccgggaacacaaagacaauauuggcucccaguaccugcucaacuggugugugcagaucgcaaagggcaugaacuacuuggaggaccgucgcuuggugcaccgcgaccuggcagccaggaacguacuggugaaaacaccgcagcaugucaagaucacagauuuugggcuggccaaacugcugggugcggaagagaaagaauaccaugcagaaggaggcaaagugccuaucaaguggauggcauuggaaucaauuuuacacagaaucuauacccaccagagugaugucuggagcuacggggugaccguuugggaguugaugaccuuuggauccaagccauaugacggaaucccugccagcgagaucuccuccauccuggagaaaggagaacgccucccucagccacccauauguaccaucgaugucuacaugaucauggucaagugcuggaugauagacgcagauagucgcccaaaguuccgugaguugaucaucgaauucuccaaaauggcccgagacccccagcgcuaccuugucauucagggggaugaaagaaugcauuugccaaguccuacagacuccaacuucuaccgugcccugauggaugaagaagacauggacgacgugguggaugccgacgaguaccucaucccacagcagggcuucuucagcagccccuccacgucacggacuccccuccugagcucucugagugcaaccagcaacaauuccaccguggcuugcauugauagaaaugggcugcaaagcugucccaucaaggaagacagcuucuugcagcgauacagcucagaccccacaggcgccuugacugaggacagcauagacgacaccuuccucccagugccugaauacauaaaccaguccguucccaaaaggcccgcuggcucugugcagaauccugucuaucacaaucagccucugaaccccgcgcccagcagagacccacacuaccaggacccccacagcacugcagugggcaaccccgaguaucucaacacuguccagcccaccugugucaacagcacauucgacagcccugcccacugggcccagaaaggcagccaccaaauuagccuggacaacccugacuaccagcaggacuucuuucccaaggaagccaagccaaauggcaucuuuaagggcuccacagcugaaaaugcagaauaccuaagggucgcgccacaaagcagugaauuuauuggagcauga

SEQ ID NO: 1373 - RNA, 3633 nt, Artificial Sequence
  derived and/or modified sequence opt1 from EGFR__Homo_sapiens__AAG35789
augcgccccagcggcaccgccggggccgcccugcucgcccugcuggccgcccucugcccggccucccgggcgcuggaggagaagaaggugugccagggcaccagcaacaagcugacgcagcucgggaccuucgaggaccacuuccugucccugcagcgcauguucaacaacugcgaggucgugcucggcaaccuggagaucaccuacgugcagcggaacuacgaccugagcuuccucaagaccauccaggaggucgccggguacgugcugaucgcccugaacacgguggagcgcaucccccucgagaaccugcagaucauccggggcaacauguacuacgagaacuccuacgcccuggcgguccucagcaacuacgacgccaacaagaccggccugaaggagcugcccaugcgcaaccuccaggagauccugcacggggccgugcgguucuccaacaaccccgcccugugcaacguggagagcauccaguggcgcgacaucgucuccagcgacuuccucuccaacaugagcauggacuuccagaaccaccugggcuccugccagaagugcgacccgagcugccccaacggguccugcuggggcgccggggaggagaacugccagaagcugaccaagaucaucugcgcgcagcagugcagcggccggugccgcggcaagucccccagcgacugcugccacaaccagugcgccgccgggugcaccggcccccgggaguccgacugccucgugugccgcaaguuccgggacgaggccacgugcaaggacacgugcccgccccugaugcuguacaaccccaccaccuaccagauggacgugaaccccgaggggaaguacagcuucggcgcgaccugcgucaagaagugcccgcgcaacuacguggugaccgaccacggcagcugcguccgggccugcggggccgacuccuacgagauggaggaggacggcgugcgcaagugcaagaagugcgaggggcccugccggaaggugugcaacggcaucgggaucggcgaguucaaggacagccucuccaucaacgccaccaacaucaagcacuucaagaacugcaccagcaucuccggcgaccugcacauccugcccgucgccuuccgcggggacagcuucacgcacacgcccccgcucgacccccaggagcuggacauccugaagaccgugaaggagaucaccggcuuccuccugauccaggccuggcccgagaaccggaccgaccugcacgcguucgagaaccucgagaucauccgcgggcggaccaagcagcacggccaguucucccuggccguggucagccugaacaucaccucccucgggcugcgcagccugaaggagaucuccgacggcgacgugaucaucagcggcaacaagaaccucugcuacgccaacaccaucaacuggaagaagcuguucgggacguccggccagaagaccaagaucaucagcaaccgcggggagaacuccugcaaggccaccggccaggugugccacgcccugugcagccccgaggggugcuggggcccggagccccgggacugcgucuccugccgcaacgugagccggggccgcgagugcgucgacaagugcaaccuccuggagggggagccccgggaguucguggagaacuccgagugcauccagugccaccccgagugccugccgcaggcgaugaacaucacgugcaccggccgcgggcccgacaacugcauccagugcgcccacuacaucgacggcccccacugcgugaagaccugccccgccggcgucaugggggagaacaacacccugguguggaaguacgccgacgcgggccacgugugccaccucugccacccgaacugcaccuacgggugcacgggccccgggcuggagggcugccccaccaacggcccgaagauccccagcaucgccaccgggauggucggcgcccugcuccugcugcucgugguggcccuggggaucggccuguucaugcggcgccggcacaucguccgcaagcggacccuccgccggcugcugcaggagcgcgagcucguggagccccugacgcccagcggggaggccccgaaccaggcgcugcuccggauccugaaggagaccgaguucaagaagaucaaggugcugggcuccggcgccuucgggaccgucuacaagggccucuggauccccgagggggagaaggugaagauccccguggccaucaaggagcugcgcgaggccaccagccccaaggccaacaaggagauccuggacgaggcguacgucauggccuccguggacaacccgcacgugugccggcuccugggcaucugccugaccagcacgguccagcucaucacccagcugaugcccuucgggugccugcucgacuacgugcgcgagcacaaggacaacaucggcucccaguaccugcugaacuggugcgugcagaucgccaagggcaugaacuaccucgaggaccggcgccugguccaccgcgaccuggccgcccggaacgugcucgugaagacgccccagcacgucaagaucaccgacuucgggcuggcgaagcugcucggcgccgaggagaaggaguaccacgccgagggcgggaaggugcccaucaaguggauggcccuggagagcauccugcaccgcaucuacacccaccaguccgacguguggagcuacggggucaccgugugggagcucaugaccuucggcuccaagccguacgacggcauccccgcgagcgagaucuccagcauccuggagaagggggagcggcugccccagcccccgaucugcaccaucgacguguacaugaucauggucaagugcuggaugaucgacgccgacucccgccccaaguuccgggagcucaucaucgaguucagcaagauggcccgcgacccccagcgguaccuggugauccagggcgacgagcgcaugcaccuccccuccccgacggacagcaacuucuaccgggcccugauggacgaggaggacauggacgacguggucgacgccgacgaguaccugaucccccagcagggguucuucuccagccccagcaccucccgcacgccccugcucagcucccugagcgcgaccuccaacaacagcaccguggccugcaucgaccggaacggccugcaguccugcccgaucaaggaggacagcuuccuccagcgcuacuccagcgaccccaccggcgcccugaccgaggacuccaucgacgacaccuuccugcccgugccggaguacaucaaccagagcguccccaagcggcccgccggguccgugcagaaccccguguaccacaaccagccgcucaaccccgcccccagccgcgacccccacuaccaggacccgcacuccacggcggucggcaaccccgaguaccugaacaccgugcagccgaccugcgugaacagcaccuucgacucccccgcccacugggcccagaaggggagccaccagaucucccuggacaaccccgacuaccagcaggacuucuuccccaaggaggccaagcccaacggcaucuucaaggggagcacggccgagaacgcggaguaccuccgggucgcgccccagagcuccgaguucaucggcgccuga

SEQ ID NO: 1374 - RNA, 3633 nt, Artificial Sequence
  derived and/or modified sequence opt2 from EGFR__Homo_sapiens__AAG35789
augcgccccuccggcaccgccggcgccgcccuccucgcccuccucgccgcccucugccccgccucccgcgcccucgaggagaagaaggucugccagggcaccuccaacaagcucacccagcucggcaccuucgaggaccacuuccucucccuccagcgcauguucaacaacugcgaggucguccucggcaaccucgagaucaccuacguccagcgcaacuacgaccucuccuuccucaagaccauccaggaggucgccggcuacguccucaucgcccucaacaccgucgagcgcaucccccucgagaaccuccagaucauccgcggcaacauguacuacgagaacuccuacgcccucgccguccucuccaacuacgacgccaacaagaccggccucaaggagcuccccaugcgcaaccuccaggagauccuccacggcgccguccgcuucuccaacaaccccgcccucugcaacgucgaguccauccaguggcgcgacaucgucuccuccgacuuccucuccaacauguccauggacuuccagaaccaccucggcuccugccagaagugcgaccccuccugccccaacggcuccugcuggggcgccggcgaggagaacugccagaagcucaccaagaucaucugcgcccagcagugcuccggccgcugccgcggcaagucccccuccgacugcugccacaaccagugcgccgccggcugcaccggcccccgcgaguccgacugccucgucugccgcaaguuccgcgacgaggccaccugcaaggacaccugccccccccucaugcucuacaaccccaccaccuaccagauggacgucaaccccgagggcaaguacuccuucggcgccaccugcgucaagaagugcccccgcaacuacgucgucaccgaccacggcuccugcguccgcgccugcggcgccgacuccuacgagauggaggaggacggcguccgcaagugcaagaagugcgagggccccugccgcaaggucugcaacggcaucggcaucggcgaguucaaggacucccucuccaucaacgccaccaacaucaagcacuucaagaacugcaccuccaucuccggcgaccuccacauccuccccgucgccuuccgcggcgacuccuucacccacacccccccccucgacccccaggagcucgacauccucaagaccgucaaggagaucaccggcuuccuccucauccaggccuggcccgagaaccgcaccgaccuccacgccuucgagaaccucgagaucauccgcggccgcaccaagcagcacggccaguucucccucgccgucgucucccucaacaucaccucccucggccuccgcucccucaaggagaucuccgacggcgacgucaucaucuccggcaacaagaaccucugcuacgccaacaccaucaacuggaagaagcucuucggcaccuccggccagaagaccaagaucaucuccaaccgcggcgagaacuccugcaaggccaccggccaggucugccacgcccucugcucccccgagggcugcuggggccccgagccccgcgacugcgucuccugccgcaacgucucccgcggccgcgagugcgucgacaagugcaaccuccucgagggcgagccccgcgaguucgucgagaacuccgagugcauccagugccaccccgagugccucccccaggccaugaacaucaccugcaccggccgcggccccgacaacugcauccagugcgcccacuacaucgacggcccccacugcgucaagaccugccccgccggcgucaugggcgagaacaacacccucgucuggaaguacgccgacgccggccacgucugccaccucugccaccccaacugcaccuacggcugcaccggccccggccucgagggcugccccaccaacggccccaagauccccuccaucgccaccggcauggucggcgcccuccuccuccuccucgucgucgcccucggcaucggccucuucaugcgccgccgccacaucguccgcaagcgcacccuccgccgccuccuccaggagcgcgagcucgucgagccccucacccccuccggcgaggcccccaaccaggcccuccuccgcauccucaaggagaccgaguucaagaagaucaagguccucggcuccggcgccuucggcaccgucuacaagggccucuggauccccgagggcgagaaggucaagauccccgucgccaucaaggagcuccgcgaggccaccucccccaaggccaacaaggagauccucgacgaggccuacgucauggccuccgucgacaacccccacgucugccgccuccucggcaucugccucaccuccaccguccagcucaucacccagcucaugcccuucggcugccuccucgacuacguccgcgagcacaaggacaacaucggcucccaguaccuccucaacuggugcguccagaucgccaagggcaugaacuaccucgaggaccgccgccucguccaccgcgaccucgccgcccgcaacguccucgucaagaccccccagcacgucaagaucaccgacuucggccucgccaagcuccucggcgccgaggagaaggaguaccacgccgagggcggcaagguccccaucaaguggauggcccucgaguccauccuccaccgcaucuacacccaccaguccgacgucugguccuacggcgucaccgucugggagcucaugaccuucggcuccaagcccuacgacggcauccccgccuccgagaucuccuccauccucgagaagggcgagcgccucccccagccccccaucugcaccaucgacgucuacaugaucauggucaagugcuggaugaucgacgccgacucccgccccaaguuccgcgagcucaucaucgaguucuccaagauggcccgcgacccccagcgcuaccucgucauccagggcgacgagcgcaugcaccuccccucccccaccgacuccaacuucuaccgcgcccucauggacgaggaggacauggacgacgucgucgacgccgacgaguaccucaucccccagcagggcuucuucuccucccccuccaccucccgcaccccccuccucuccucccucuccgccaccuccaacaacuccaccgucgccugcaucgaccgcaacggccuccaguccugccccaucaaggaggacuccuuccuccagcgcuacuccuccgaccccaccggcgcccucaccgaggacuccaucgacgacaccuuccuccccguccccgaguacaucaaccaguccguccccaagcgccccgccggcuccguccagaaccccgucuaccacaaccagccccucaaccccgcccccucccgcgacccccacuaccaggacccccacuccaccgccgucggcaaccccgaguaccucaacaccguccagcccaccugcgucaacuccaccuucgacucccccgcccacugggcccagaagggcucccaccagaucucccucgacaaccccgacuaccagcaggacuucuuccccaaggaggccaagcccaacggcaucuucaagggcuccaccgccgagaacgccgaguaccuccgcgucgccccccaguccuccgaguucaucggcgccuga

SEQ ID NO: 1375 - RNA, 3633 nt, Artificial Sequence
  derived and/or modified sequence opt3 from EGFR__Homo_sapiens__AAG35789
augagacccagcggcaccgccggggcugcacugcucgcccuucuggcggcuuugugcccugccuccagggcauuagaggaaaagaaagugugucagggaacaucuaacaagcugacucaacuagguacguucgaggaccacuuucucucacugcagcggauguucaauaacugcgaagucguucuuggcaaucuggagaucaccuacgugcagcgcaacuaugauuugaguuuucucaaaacaauucaggaaguagccggguacgugcugauagcucugaauacugucgagcgaaucccacucgagaacuuacaaauuauccguggaaauauguauuacgaaaacagcuaugcacuggccgugcuuuccaauuacgacgcuaacaagaccggcuugaaagagcugccgaugagaaaucuacaggaaauucuccauggugccguuagguucucuaacaaucccgcgcuguguaacguggagucgauccaguggcgggauauagucucaagcgacuuucuuaguaauauguccauggauuuccagaaccaccuggggucuugccaaaagugugacccuagcugcccaaacggauccuguuggggcgcaggcgaggaaaauugccagaaguugacaaaaaucauuugugcccagcagugcucagggcgcuguagaggaaagagucccagcgauugcugccauaaccaaugugcugccgguugcaccggcccuagggagucugacugucucgugugccggaaauuucgcgaugaagcaacuuguaaggacacaugcccaccccugauguuauauaauccuaccacguaccagauggauguaaacccagaggggaaauacuccuucggagcuacuuguguuaagaagugcccgcgaaauuauguggucaccgaccacggcucaugugugagagccugcggugcggauagcuacgaaauggaggaggacggggugaggaaauguaagaaaugcgaaggacccugccggaaggucuguaacggcaucggcauuggggaguuuaaagacagucugucuaucaaugccacaaacauaaagcauuucaaaaauugcacuuccauuagcggagaucuccacauccuuccuguugcauuucguggugacucguucacccacacaccaccccuggauccucaggaauuggacauucuaaagaccgugaaggagaucacgggcuuucugcucauccaggcuuggccagaaaaccgcacugaucugcaugccuucgagaaucuugagauuauaagagggaggacaaaacaacacggacaguucucucuggcuguaguguccuugaacaucaccucacucggccugcggaguuuaaaggaaauuagcgacggugaugucaucauauccgggaauaaaaaccuguguuaugccaauacuauuaacuggaagaaacuauuuggcacaucuggacagaagaccaagaucaucagcaaccgaggcgaaaauucaugcaaagcaacggggcaagugugucaugcccucugcagucccgaaggauguugggguccggagccucgcgacugcguuuccuguagaaacgugagcaggggccgggaaugcgucgauaaguguaaucugcuugagggggagccccgcgaguucguggagaacucugaaugcauucagugccacccagaguguuugccucaggcuaugaauauuaccugcacaggaagaggccccgacaacuguauucagugcgcgcacuacauagaugguccacauuguguaaaaacuugccccgcagggguuaugggcgagaauaacacccugguguggaaguaugccgacgcuggacacgucugucaucucugccacccuaauuguacauacggcugcacugggccaggacuggaagguuguccgaccaacggccccaaaaucccuucaauugccacagggauggugggagcacuucuguugcuccuggucguggccuuaggcaucggucuguuuaugaggcgucggcauaucguucgaaagagaacccuaaggcgccuccugcaagagcgggaacuuguggagccauugacucccaguggggaagcuccuaaucaggcccugcucagaauccugaaggagacggaguucaaaaagauaaaaguauuaggcagcggagcauuuggcacagucuauaaggggcuguggaucccagaaggagagaaagugaagauucccguugcgaucaaggaacuuagggaggcuaccuccccgaaagccaacaaggaaauuuuggacgaggcauacgugauggccucugucgauaauccucacgugugccgccuccugggcaucugccuaacuucgaccguacagcugauaacacagcucaugccauucgguugucugcuugacuacgugcgagagcacaaagauaacaucgggagccaauauuugcugaauuggugcguucagauugcuaagggaaugaacuacuuagaagaccggcgucucguccauagagaucuggccgcaaggaacgugcuugugaaaacuccccagcacgucaagaucaccgacuuuggccuggcuaaauugcucggugccgaggaaaaggaguaucaugcggaaggcgggaagguuccuauuaaauggauggcccuggaguccauccuacaccgcauauacacacaccagucagauguguggaguuauggagugacgguaugggagcugaugaccuucggcucuaagcccuacgacgggauuccagcuagcgaaaucuccucaauucucgagaaaggagaacggcugccucaacccccaaucuguacuauagaugucuauaugaucauggugaagugcuggaugauugacgcagauagcagaccgaaauuuagggagcuuaucauugaguucucuaagauggcccgagacccucagcgcuacuugguuauccagggcgaugaacggaugcaucugcccuccccaacagacaguaauuuuuacagagcuuuaauggacgaggaagauauggacgauguggucgacgccgaugaguaucucauaccccaacaggguuucuuuagcucuccuuccaccucaaggacaccacugcuuaguagccugucggcaacuuccaacaauucuaccguggcguguauugaccguaacgggcuacagagcugccccaucaaggaagauucauuccuccagcgcuacaguuccgacccuacgggagcccugaccgaggauucuaucgacgauacauucuugccgguuccagaguauauuaaucaaagcgugcccaaacggccugcuggcuccguacagaacccagucuaccacaaucagccccugaacccugccccgucaagagacccccauuaucaggauccacacagcacugcaguggguaauccugaauacuuaaacaccgugcaacccacaugugucaauaguacuuuugacucuccagcucauugggcccagaagggcucccaccagaucagccucgacaacccugauuaucagcaagacuucuuucccaaagaggcaaagccaaaugggauuuucaaaggaucgaccgccgaaaacgcugaguaccugaggguugcgccgcagucaucugaauuuauaggcgccuga

SEQ ID NO: 1376 - RNA, 3633 nt, Artificial Sequence
  derived and/or modified sequence opt4 from EGFR__Homo_sapiens__AAG35789
augagacccagcggcaccgccggcgccgcccugcuggcccugcuggccgcccugugccccgccagcagagcccuggaggagaagaaggugugccagggcaccagcaacaagcugacccagcugggcaccuucgaggaccacuuccugagccugcagagaauguucaacaacugcgagguggugcugggcaaccuggagaucaccuacgugcagagaaacuacgaccugagcuuccugaagaccauccaggagguggccggcuacgugcugaucgcccugaacaccguggagagaaucccccuggagaaccugcagaucaucagaggcaacauguacuacgagaacagcuacgcccuggccgugcugagcaacuacgacgccaacaagaccggccugaaggagcugcccaugagaaaccugcaggagauccugcacggcgccgugagauucagcaacaaccccgcccugugcaacguggagagcauccaguggagagacaucgugagcagcgacuuccugagcaacaugagcauggacuuccagaaccaccugggcagcugccagaagugcgaccccagcugccccaacggcagcugcuggggcgccggcgaggagaacugccagaagcugaccaagaucaucugcgcccagcagugcagcggcagaugcagaggcaagagccccagcgacugcugccacaaccagugcgccgccggcugcaccggccccagagagagcgacugccuggugugcagaaaguucagagacgaggccaccugcaaggacaccugccccccccugaugcuguacaaccccaccaccuaccagauggacgugaaccccgagggcaaguacagcuucggcgccaccugcgugaagaagugccccagaaacuacguggugaccgaccacggcagcugcgugagagccugcggcgccgacagcuacgagauggaggaggacggcgugagaaagugcaagaagugcgagggccccugcagaaaggugugcaacggcaucggcaucggcgaguucaaggacagccugagcaucaacgccaccaacaucaagcacuucaagaacugcaccagcaucagcggcgaccugcacauccugcccguggccuucagaggcgacagcuucacccacacccccccccuggacccccaggagcuggacauccugaagaccgugaaggagaucaccggcuuccugcugauccaggccuggcccgagaacagaaccgaccugcacgccuucgagaaccuggagaucaucagaggcagaaccaagcagcacggccaguucagccuggccguggugagccugaacaucaccagccugggccugagaagccugaaggagaucagcgacggcgacgugaucaucagcggcaacaagaaccugugcuacgccaacaccaucaacuggaagaagcuguucggcaccagcggccagaagaccaagaucaucagcaacagaggcgagaacagcugcaaggccaccggccaggugugccacgcccugugcagccccgagggcugcuggggccccgagcccagagacugcgugagcugcagaaacgugagcagaggcagagagugcguggacaagugcaaccugcuggagggcgagcccagagaguucguggagaacagcgagugcauccagugccaccccgagugccugccccaggccaugaacaucaccugcaccggcagaggccccgacaacugcauccagugcgcccacuacaucgacggcccccacugcgugaagaccugccccgccggcgugaugggcgagaacaacacccugguguggaaguacgccgacgccggccacgugugccaccugugccaccccaacugcaccuacggcugcaccggccccggccuggagggcugccccaccaacggccccaagauccccagcaucgccaccggcauggugggcgcccugcugcugcugcuggugguggcccugggcaucggccuguucaugagaagaagacacaucgugagaaagagaacccugagaagacugcugcaggagagagagcugguggagccccugacccccagcggcgaggcccccaaccaggcccugcugagaauccugaaggagaccgaguucaagaagaucaaggugcugggcagcggcgccuucggcaccguguacaagggccuguggauccccgagggcgagaaggugaagauccccguggccaucaaggagcugagagaggccaccagccccaaggccaacaaggagauccuggacgaggccuacgugauggccagcguggacaacccccacgugugcagacugcugggcaucugccugaccagcaccgugcagcugaucacccagcugaugcccuucggcugccugcuggacuacgugagagagcacaaggacaacaucggcagccaguaccugcugaacuggugcgugcagaucgccaagggcaugaacuaccuggaggacagaagacuggugcacagagaccuggccgccagaaacgugcuggugaagaccccccagcacgugaagaucaccgacuucggccuggccaagcugcugggcgccgaggagaaggaguaccacgccgagggcggcaaggugcccaucaaguggauggcccuggagagcauccugcacagaaucuacacccaccagagcgacguguggagcuacggcgugaccgugugggagcugaugaccuucggcagcaagcccuacgacggcauccccgccagcgagaucagcagcauccuggagaagggcgagagacugccccagccccccaucugcaccaucgacguguacaugaucauggugaagugcuggaugaucgacgccgacagcagacccaaguucagagagcugaucaucgaguucagcaagauggccagagacccccagagauaccuggugauccagggcgacgagagaaugcaccugcccagccccaccgacagcaacuucuacagagcccugauggacgaggaggacauggacgacgugguggacgccgacgaguaccugaucccccagcagggcuucuucagcagccccagcaccagcagaaccccccugcugagcagccugagcgccaccagcaacaacagcaccguggccugcaucgacagaaacggccugcagagcugccccaucaaggaggacagcuuccugcagagauacagcagcgaccccaccggcgcccugaccgaggacagcaucgacgacaccuuccugcccgugcccgaguacaucaaccagagcgugcccaagagacccgccggcagcgugcagaaccccguguaccacaaccagccccugaaccccgcccccagcagagacccccacuaccaggacccccacagcaccgccgugggcaaccccgaguaccugaacaccgugcagcccaccugcgugaacagcaccuucgacagccccgcccacugggcccagaagggcagccaccagaucagccuggacaaccccgacuaccagcaggacuucuuccccaaggaggccaagcccaacggcaucuucaagggcagcaccgccgagaacgccgaguaccugagaguggccccccagagcagcgaguucaucggcgccuga

SEQ ID NO: 1377 - RNA, 3633 nt, Artificial Sequence
  derived and/or modified sequence opt5 from EGFR__Homo_sapiens__AAG35789
augagacccagcggcaccgccggggcugcccugcucgcgcugcuugcugcccugugcccugccucccgggcucucgaggaaaagaaagugugucagggaacaucuaacaagcugacgcaacuuggcaccuucgaggaccacuuucugagccuccagcgcauguucaauaacugcgaagucguucuggggaaucuggagaucacauacgugcagagaaacuaugaucucuccuuucugaaaaccauucaggaaguggccggauacguccuuaucgcucugaauacaguggagcggauuccgcucgagaaccugcaaaucauucgcggcaauauguauuacgaaaacucuuaugcccuugcgguucugagcaauuacgacgccaacaagaccgggcucaaagagcugcccaugagaaaucugcaggaaauccuccauggagcugugcgguucuccaacaauccugcccuguguaacgucgagucuauccaguggcgcgauauugugagcuccgacuuucuuagcaauaugucuauggauuuccagaaccaccugggcuccugccaaaagugugaccccagcugcccuaacggcucuuguuggggagcuggggaggaaaauugccagaagcucacaaaaaucauuugugcccagcagugcuccggcagaugucggggaaagagccccucugauugcugccauaaccaaugugcggccgggugcaccggcccucgcgaguccgacugucugguuugcagaaaauuucgggaugaagcuacguguaaggauaccugcccgccccuuaugcuguauaauccuacaaccuaccagauggacgugaaccccgaggggaaauacagcuucggagccacaugugucaagaagugcccucgcaauuauguggugaccgaccacggcuccugugucagagcuugcggcgccgauucuuacgaaauggaggaggacgggguucggaaauguaagaaaugcgaaggacccugccgcaagguguguaacggcaucgggauuggagaguuuaaagacagccucuccaucaaugccacgaacauuaagcauuucaaaaauugcacaagcaucucuggcgaucugcacauccugccgguggcuuuuagaggggacuccuucacccacacaccuccccucgauccucaggaacuggacauucuuaagaccgucaaggagaucaccggauuucugcucauucaagcguggcccgaaaaccggacagaucugcaugccuucgagaaucuugagaucauuagaggccgcacgaaacagcacggccaguucagccuggcugugguuucucucaacaucaccagccuggggcugcggucccucaaggaaaucucugacggagaugugauuaucagcggcaauaaaaaccuguguuaugccaauacaauuaacuggaagaaacuuuuugggaccuccggacagaagacaaagaucauuagcaacagaggcgaaaauucuugcaaagccaccgggcaagucugucaugcucugugcucccccgaaggcuguuggggaccugagccgcgcgacugcgugagcugucggaacguuucuagaggccgcgaaugcguggauaaguguaaucuccuggagggggagccccgggaguucgucgagaacuccgaaugcauccagugccacccugagugucugccccaggccaugaauaucacgugcacaggaagaggcccugacaacuguauucagugcgcgcacuacaucgaugggccccauugugugaaaaccugcccggcuggagucaugggcgagaauaacacccuuguguggaaguaugccgacgccgggcacguuugucaucucugccacccuaauuguacauacggcugcaccggacccggccuggaaggguguccuacaaacggacccaaaauuccuagcaucgcuacgggcauggugggggcccugcuccugcuucuggucguggcucucggaauuggccuguuuaugcgccggagacauaucguucgcaagcggacccugagacggcuucuccaagagcgcgaacugguggagccccugacaccguccggggaagccccuaaucaggcgcuccugcggauucuuaaggagaccgaguucaaaaagaucaaaguccugggcucuggagccuuuggcacaguguauaaggggcucuggauccccgaaggagagaaagugaagauucccguugcuaucaaggaacugagagaggccaccagcccuaaagcuaacaaggaaauucuggacgaggccuacgucauggcguccguggauaauccgcacgugugcagacuucucggcaucugccugacgucuaccguccagcugauuacacagcucaugcccuucgggugucugcuugacuacgugcgcgagcacaaagauaacaucggaagccaauaucugcucaauuggugcguucagaucgccaagggcaugaacuaccuggaagaccggagacuggugcaucgcgaucuugcugccagaaacguccucgugaaaaccccucagcacguuaagauuacagacuuugggcuggcuaaacugcucggcgccgaggaaaaggaguaucaugccgaaggaggcaaggugcccaucaaauggauggcucuggaguccauucuucaccggaucuacacccaccagagcgaugucuggucuuauggggugacgguuugggagcugaugacauucggauccaagccuuacgacggcauucccgcgagcgaaaucucuuccauccucgagaaaggggaacgccugccucaacccccgauuuguaccaucgauguguauaugauuauggucaagugcuggaugaucgacgccgauagcagaccuaaauuucgggagcugauuaucgaguucucuaagauggcucgcgacccccagagauaccuugugauccagggagaugaacggaugcaucugccuagccccacagacuccaauuuuuaccgcgcccucauggacgaggaagauauggacgauguggucgacgccgaugaguaucugauuccgcaacagggcuucuuuagcucuccuuccaccagcagaacaccccuccuguccucucuuagcgcuaccuccaacaauucuacgguugccuguaucgaccggaacggccugcagagcugcccuauuaaggaagauuccuuccuccagcgcuacucuagcgaccccaccggggcgcugacagaggauuccaucgacgauaccuuccugcccgugccugaguauauuaaucaaagcgugccgaaaagacccgcuggaucuguccagaacccuguguaccacaaucagccccuuaacccugcccccucccgggacccucauuaucaggauccgcacagcacagccguuggcaaucccgaauaccugaacaccgugcaaccuacgugugucaauucuacauuugacucccccgcucauugggcccagaaggggagccaccagaucucucucgacaacccugauuaucagcaagacuucuuucccaaagaggcgaagccgaauggaauuuucaaaggcuccaccgcugaaaacgccgaguaccugagaguggccccucagagcuccgaauuuaucggggcuuga

SEQ ID NO: 1378 - protein, 464 aa, Artificial Sequence [sequence omitted]

SEQ ID NO: 1379 - RNA, 1395 nt, Artificial Sequence
  EGFR__Homo_sapiens__AAI18666
auggcagcugaagacguuaucaucugugcccagcagugcuccgggcgcugccguggcaagucccccagugacugcugccacaaccagugugcugcaggcugcacaggcccccgggagagcgacugccuggucugccgcaaauuccgagacgaagccacgugcaaggacaccugccccccacucaugcucuacaaccccaccacguaccagauggaugugaaccccgagggcaaauacagcuuuggugccaccugcgugaagaaguguccccguaauuauguggugacagaucacggcucgugcguccgagccuguggggccgacagcuaugagauggaggaagacggcguccgcaaguguaagaagugcgaagggccuugccgcaaaguguguaacggaauagguauuggugaauuuaaagacucacucuccauaaaugcuacgaauauuaaacacuucaaaaacugcaccuccaucaguggcgaucuccacauccugccgguggcauuuaggggugacuccuucacacauacuccuccucuggauccacaggaacuggauauucugaaaaccguaaaggaaaucacaggguuuuugcugauucaggcuuggccugaaaacaggacggaccuccaugccuuugagaaccuagaaaucauacgcggcaggaccaagcaacauggucaguuuucucuugcagucgucagccugaacauaacauccuugggauuacgcucccucaaggagauaagugauggagaugugauaauuucaggaaacaaaaauuugugcuaugcaaauacaauaaacuggaaaaaacuguuugggaccuccggucagaaaaccaaaauuauaagcaacagaggugaaaacagcugcaaggccacaggccaggucugccaugccuugugcucccccgagggcugcuggggcccggagcccagggacugcgucucuugccggaaugucagccgaggcagggaaugcguggacaagugcaaccuucuggagggugagccaagggaguuuguggagaacucugagugcauacagugccacccagagugccugccucaggccaugaacaucaccugcacaggacggggaccagacaacuguauccagugugcccacuacauugacggcccccacugcgucaagaccugcccggcaggagucaugggagaaaacaacacccuggucuggaaguacgcagacgcuggccaugugugccaccugugccauccaaacugcaccuacggaugcacagggccaggucuugaaggcuguccaacgaaugggccuaagaucccguccaucgccacugggauggugggggcccuccucuugcugcuggugguggcccuggggaucgggccucuucauggaagauag

SEQ ID NO: 1380 - RNA, 1395 nt, Artificial Sequence
  derived and/or modified sequence opt1 from EGFR__Homo_sapiens__AAI18666
auggccgccgaggacgugaucaucugcgcgcagcagugcagcggccgcugccgggggaagucccccagcgacugcugccacaaccagugcgccgccggcugcaccgggccgcgcgaguccgacugccuggucugccggaaguuccgcgacgaggcgaccugcaaggacacgugcccgccccucaugcuguacaaccccaccaccuaccagauggacgugaaccccgagggcaaguacagcuucggggcgaccugcgugaagaagugcccccggaacuacgucgugacggaccacggcuccugcgugcgcgccugcggcgccgacagcuacgagauggaggaggacgggguccggaagugcaagaagugcgagggccccugccgcaaggugugcaacgggaucggcaucggggaguucaaggacucccugagcaucaacgccaccaacaucaagcacuucaagaacugcaccuccaucagcggcgaccuccacauccugcccguggccuuccggggcgacuccuucacccacacgccgccccuggacccccaggagcucgacauccugaagaccgucaaggagaucaccggguuccugcucauccaggccuggcccgagaaccgcaccgaccugcacgccuucgagaaccuggagaucauccggggccgcacgaagcagcacgggcaguucagccucgccguggugucccugaacaucaccagccugggccuccggucccugaaggagaucagcgacggcgacgucaucaucuccgggaacaagaaccugugcuacgccaacaccaucaacuggaagaagcuguucggcaccagcgggcagaagacgaagaucaucuccaaccgcggcgagaacagcugcaaggccaccggccaggugugccacgcgcucugcagcccggaggggugcuggggccccgagccccgggacugcguguccugccgcaacgucagccgggggcgcgagugcguggacaagugcaaccugcucgagggcgagccccgggaguucguggagaacuccgagugcauccagugccacccggagugccugccccaggccaugaacaucacgugcaccgggcgcggccccgacaacugcauccagugcgcccacuacaucgacgggccccacugcgucaagaccugcccggccggcgugaugggcgagaacaacacccugguguggaaguacgccgacgcggggcacgucugccaccucugccaccccaacugcaccuacggcugcaccgggcccggccuggaggggugccccacgaacggcccgaagauccccagcaucgccaccggcauggugggggcccugcuccugcugcucguggucgcccugggcaucgggccccugcacggccgguga

SEQ ID NO: 1381 - RNA, 1395 nt, Artificial Sequence
  derived and/or modified sequence opt2 from EGFR__Homo_sapiens__AAI18666
auggccgccgaggacgucaucaucugcgcccagcagugcuccggccgcugccgcggcaagucccccuccgacugcugccacaaccagugcgccgccggcugcaccggcccccgcgaguccgacugccucgucugccgcaaguuccgcgacgaggccaccugcaaggacaccugccccccccucaugcucuacaaccccaccaccuaccagauggacgucaaccccgagggcaaguacuccuucggcgccaccugcgucaagaagugcccccgcaacuacgucgucaccgaccacggcuccugcguccgcgccugcggcgccgacuccuacgagauggaggaggacggcguccgcaagugcaagaagugcgagggccccugccgcaaggucugcaacggcaucggcaucggcgaguucaaggacucccucuccaucaacgccaccaacaucaagcacuucaagaacugcaccuccaucuccggcgaccuccacauccuccccgucgccuuccgcggcgacuccuucacccacacccccccccucgacccccaggagcucgacauccucaagaccgucaaggagaucaccggcuuccuccucauccaggccuggcccgagaaccgcaccgaccuccacgccuucgagaaccucgagaucauccgcggccgcaccaagcagcacggccaguucucccucgccgucgucucccucaacaucaccucccucggccuccgcucccucaaggagaucuccgacggcgacgucaucaucuccggcaacaagaaccucugcuacgccaacaccaucaacuggaagaagcucuucggcaccuccggccagaagaccaagaucaucuccaaccgcggcgagaacuccugcaaggccaccggccaggucugccacgcccucugcucccccgagggcugcuggggccccgagccccgcgacugcgucuccugccgcaacgucucccgcggccgcgagugcgucgacaagugcaaccuccucgagggcgagccccgcgaguucgucgagaacuccgagugcauccagugccaccccgagugccucccccaggccaugaacaucaccugcaccggccgcggccccgacaacugcauccagugcgcccacuacaucgacggcccccacugcgucaagaccugccccgccggcgucaugggcgagaacaacacccucgucuggaaguacgccgacgccggccacgucugccaccucugccaccccaacugcaccuacggcugcaccggccccggccucgagggcugccccaccaacggccccaagauccccuccaucgccaccggcauggucggcgcccuccuccuccuccucgucgucgcccucggcaucggcccccuccacggccgcuga

SEQ ID NO: 1382 - RNA, 1395 nt, Artificial Sequence
  derived and/or modified sequence opt3 from EGFR__Homo_sapiens__AAI18666
auggccgcugaggacgugaucauuugcgcacagcaauguagcggcagaugcagggggaagucccccucugauuguugccacaaccagugugccgcgggaugcaccgguccucgggaaucagacugucuggucugccgcaaauuccgagaugaggcuacauguaaggacacuugcccaccgcucaugcuuuacaaucccacgaccuaucagauggauguuaacccugaaggcaaauacaguuuuggggccacaugugugaagaaaugcccacguaauuauguagugacugaccauggaagcugcgucagagcauguggcgccgauuccuacgagauggaagaggacggugugaggaagugcaagaaaugugaggggcccugccggaagguuuguaacggaauaggcaucggcgaguucaaagauucucugucgauuaaugcuaccaacaucaagcacuuuaaaaauugcacaucaauuagcggggacuugcauaucuuaccuguggcauuccgcggagauaguuuuacccacacuccaccccuggacccucaggaacuagauauacucaagacagucaaggaaaucaccgguuuccugcuuauucaagccuggccagagaacagaacggaccugcaugcuuuugagaauuuggaaaucauuaggggccggacuaaacagcacgggcaguucucccucgccgugguaucucugaacaucaccagccugggacuccgcuccuuaaaggagauaucagacggcgauguuauuaucagugguaauaaaaaccuguguuaugcgaauacaauuaacuggaagaaacuuuuugggacuagcggacagaagaccaaaaucaucucuaaucgaggcgaaaacuccugcaaggcaacaggccaagugugucacgccuugugcucaccggagggguguuggggacccgaaccuagagacugcgucagcugcaggaacgugagucggggucgugaguguguggauaagugcaaucugcuagagggcgaaccacgcgaguucgucgaaaacucugaguguauucagugccaucccgaaugucucccucaggcuaugaauauaaccugcacggggagaggaccagacaacuguauccagugcgcccacuacauugauggcccccauuguguuaaaacuugcccggcuggugugaugggggagaauaacacacugguauggaaguaugcagacgccggccacgugugucaccuuugccauccuaauugcaccuacggauguacuggccccgggcuggagggaugcccaacaaacgguccuaaaauccccuccauagcgaccggcauggucggggccuugcuccuguuacuggugguugcacucggaauuggcccacuucacgguagguga

SEQ ID NO: 1383 - RNA, 1395 nt, Artificial Sequence
  derived and/or modified sequence opt4 from EGFR__Homo_sapiens__AAI18666
auggccgccgaggacgugaucaucugcgcccagcagugcagcggcagaugcagaggcaagagccccagcgacugcugccacaaccagugcgccgccggcugcaccggccccagagagagcgacugccuggugugcagaaaguucagagacgaggccaccugcaaggacaccugccccccccugaugcuguacaaccccaccaccuaccagauggacgugaaccccgagggcaaguacagcuucggcgccaccugcgugaagaagugccccagaaacuacguggugaccgaccacggcagcugcgugagagccugcggcgccgacagcuacgagauggaggaggacggcgugagaaagugcaagaagugcgagggccccugcagaaaggugugcaacggcaucggcaucggcgaguucaaggacagccugagcaucaacgccaccaacaucaagcacuucaagaacugcaccagcaucagcggcgaccugcacauccugcccguggccuucagaggcgacagcuucacccacacccccccccuggacccccaggagcuggacauccugaagaccgugaaggagaucaccggcuuccugcugauccaggccuggcccgagaacagaaccgaccugcacgccuucgagaaccuggagaucaucagaggcagaaccaagcagcacggccaguucagccuggccguggugagccugaacaucaccagccugggccugagaagccugaaggagaucagcgacggcgacgugaucaucagcggcaacaagaaccugugcuacgccaacaccaucaacuggaagaagcuguucggcaccagcggccagaagaccaagaucaucagcaacagaggcgagaacagcugcaaggccaccggccaggugugccacgcccugugcagccccgagggcugcuggggccccgagcccagagacugcgugagcugcagaaacgugagcagaggcagagagugcguggacaagugcaaccugcuggagggcgagcccagagaguucguggagaacagcgagugcauccagugccaccccgagugccugccccaggccaugaacaucaccugcaccggcagaggccccgacaacugcauccagugcgcccacuacaucgacggcccccacugcgugaagaccugccccgccggcgugaugggcgagaacaacacccugguguggaaguacgccgacgccggccacgugugccaccugugccaccccaacugcaccuacggcugcaccggccccggccuggagggcugccccaccaacggccccaagauccccagcaucgccaccggcauggugggcgcccugcugcugcugcuggugguggcccugggcaucggcccccugcacggcagauga

SEQ ID NO: 1384 - RNA, 1395 nt, Artificial Sequence
  derived and/or modified sequence opt5 from EGFR__Homo_sapiens__AAI18666
auggccgcugaggacgugaucauuugcgcccagcaauguagcggcagaugccgggggaagucccccucugauuguugccacaaccagugugcggcuggaugcaccggcccucgcgaaagcgacugucuggucugcagaaaauuccgggaugaggccacauguaaggacacgugcccgccccucaugcuguacaauccuaccacauaucagauggauguuaaccccgaagggaaauacuccuuuggagccaccugugugaagaaaugcccucgcaauuauguggucacagaccauggcucuugcgugagagcuuguggggccgauagcuacgagauggaagaggacggaguucggaagugcaagaaaugugagggccccugccgcaagguguguaacggcaucgggauuggagaguucaaagauucccuuucuaucaaugcuaccaacauuaagcacuuuaaaaauugcacaagcaucuccggcgaccugcauauccucccugucgccuucagaggggauagcuuuacccacacgccgccccuggacccucaggaacuugauauucugaagaccgugaaggaaaucacaggauuccuccugauucaagcguggcccgagaaccggaccgaccugcaugccuuugagaaucucgaaaucauucgcggcagaacaaaacagcacgggcaguucucucuggcuguugugucccuuaacaucaccagccugggacuccggucucugaaggagauuuccgacggcgaugucaucaucagcggcaauaaaaaccuuuguuaugccaauacgauuaacuggaagaaacuguuugggacaucuggacagaagaccaaaaucauuuccaaucgcggcgaaaacagcugcaaggcuacagggcaagugugucacgcccucugcuccccugagggauguuggggccccgaaccgagagacugcgugucuugccggaacgucagccgcgggagagaguguguugauaagugcaaucugcuggagggagaaccucgggaguucguggaaaacuccgaguguauccagugccaucccgaaugucucccucaggcgaugaauauuaccugcaccggcagaggccccgacaacuguauccagugcgcccacuacaucgaugggccccauugugugaaaacaugcccugcuggagucaugggcgagaauaacacgcugguguggaaguaugccgacgcugggcacguuugucaccuuugccauccgaauugcaccuacggauguacaggccccgggcuggagggcugcccuaccaacggacccaaaauuccuagcaucgccacaggcauggugggggcccuccugcuucugcucgucguggcucugggaauuggcccccugcacgggcgcuga

SEQ ID NO: 1385 - protein, 1091 aa, Artificial Sequence
  EGFR__Homo_sapiens__Q504U8
MRPSGTAGAALLALLAALCPASRALEEKKVCQGTSNKLTQLGTFEDHFLSLQRMFNNCEVVLGNLEITYVQRNYDLSFLKTIQEVAGYVLIALNTVERIPLENLQIIRGNMYYENSYALAVLSNYDANKTGLKELPMRNLQGQKCDPSCPNGSCWGAGEENCQKLTKIICAQQCSGRCRGKSPSDCCHNQCAAGCTGPRESDCLVCRKFRDEATCKDTCPPLMLYNPTTYQMDVNPEGKYSFGATCVKKCPRNYVVTDHGSCVRACGADSYEMEEDGVRKCKKCEGPCRKVCNGIGIGEFKDSLSINATNIKHFKNCTSISGDLHILPVAFRGDSFTHTPPLDPQELDILKTVKEITGFLLIQAWPENRTDLHAFENLEIIRGRTKQHGQFSLAVVSLNITSLGLRSLKEISDGDVIISGNKNLCYANTINWKKLFGTSGQKTKIISNRGENSCKATGQVCHALCSPEGCWGPEPRDCVSCRNVSRGRECVDKCNLLEGEPREFVENSECIQCHPECLPQAMNITCTGRGPDNCIQCAHYIDGPHCVKTCPAGVMGENNTLVWKYADAGHVCHLCHPNCTYGCTGPGLEGCPTNGPKIPSIATGMVGALLLLLVVALGIGLFMRRRHIVRKRTLRRLLQERELVEPLTPSGEAPNQALLRILKETEFKKIKVLGSGAFGTVYKGLWIPEGEKVKIPVAIKELREATSPKANKEILDEAYVMASVDNPHVCRLLGICLTSTVQLITQLMPFGCLLDYVREHKDNIGSQYLLNWCVQIAKGMNYLEDRRLVHRDLAARNVLVKTPQHVKITDFGLAKLLGAEEKEYHAEGGKVPIKWMALESILHRIYTHQSDVWSYGVTVWELMTFGSKPYDGIPASEISSILEKGERLPQPPICTIDVYMIMVKCWMIDADSRPKFRELIIEFSKMARDPQRYLVIQGDERMHLPSPTDSNFYRALMDEEDMDDVVDADEYLIPQQGFFSSPSTSRTPLLSSLSATSNNSTVACIDRNGLQSCPIKEDSFLQRYSSDPTGALTEDSIDDTFLPVPGEWLVWKQSCSSTSSTHSAAASLQCPSQVLPPASPEGETVADLQTQ

SEQ ID NO: 1386 - RNA, 3276 nt, Artificial Sequence
  EGFR__Homo_sapiens__AAH94761
augcgacccuccgggacggccggggcagcgcuccuggcgcugcuggcugcgcucugcccggcgagucgggcucuggaggaaaagaaaguuugccaaggcacgaguaacaagcucacgcaguugggcacuuuugaagaucauuuucucagccuccagaggauguucaauaacugugaggugguccuugggaauuuggaaauuaccuaugugcagaggaauuaugaucuuuccuucuuaaagaccauccaggagguggcugguuauguccucauugcccucaacacaguggagcgaauuccuuuggaaaaccugcagaucaucagaggaaauauguacuacgaaaauuccuaugccuuagcagucuuaucuaacuaugaugcaaauaaaaccggacugaaggagcugcccaugagaaauuuacagggacaaaagugugauccaagcugucccaaugggagcugcuggggugcaggagaggagaacugccagaaacugaccaaaaucaucugugcccagcagugcuccgggcgcugccguggcaagucccccagugacugcugccacaaccagugugcugcaggcugcacaggcccccgggagagcgacugccuggucugccgcaaauuccgagacgaagccacgugcaaggacaccugccccccacucaugcucuacaaccccaccacguaccagauggaugugaaccccgagggcaaauacagcuuuggugccaccugcgugaagaaguguccccguaauuauguggugacagaucacggcucgugcguccgagccuguggggccgacagcuaugagauggaggaagacggcguccgcaaguguaagaagugcgaagggccuugccgcaaaguguguaacggaauagguauuggugaauuuaaagacucacucuccauaaaugcuacgaauauuaaacacuucaaaaacugcaccuccaucaguggcgaucuccacauccugccgguggcauuuaggggugacuccuucacacauacuccuccucuggauccacaggaacuggauauucugaaaaccguaaaggaaaucacaggguuuuugcugauucaggcuuggccugaaaacaggacggaccuccaugccuuugagaaccuagaaaucauacgcggcaggaccaagcaacauggucaguuuucucuugcagucgucagccugaacauaacauccuugggauuacgcucccucaaggagauaagugauggagaugugauaauuucaggaaacaaaaauuugugcuaugcaaauacaauaaacuggaaaaaacuguuugggaccuccggucagaaaaccaaaauuauaagcaacagaggugaaaacagcugcaaggccacaggccaggucugccaugccuugugcucccccgagggcugcuggggcccggagcccagggacugcgucucuugccggaaugucagccgaggcagggaaugcguggacaagugcaaccuucuggagggugagccaagggaguuuguggagaacucugagugcauacagugccacccagagugccugccucaggccaugaacaucaccugcacaggacggggaccagacaacuguauccagugugcccacuacauugacggcccccacugcgucaagaccugcccggcaggagucaugggagaaaacaacacccuggucuggaaguacgcagacgccggccaugugugccaccugugccauccaaacugcaccuacggaugcacugggccaggucuugaaggcuguccaacgaaugggccuaagaucccguccaucgccacugggauggugggggcccuccucuugcugcuggugguggcccuggggaucggccucuucaugcgaaggcgccacaucguucggaagcgcacgcugcggaggcugcugcaggagagggagcuuguggagccucuuacacccaguggagaagcucccaaccaagcucucuugaggaucuugaaggaaacugaauucaaaaagaucaaagugcugggcuccggugcguucggcacgguguauaagggacucuggaucccagaaggugagaaaguuaaaauucccgucgcuaucaaggaauuaagagaagcaacaucuccgaaagccaacaaggaaauccucgaugaagccuacgugauggccagcguggacaacccccacgugugccgccugcugggcaucugccucaccuccaccgugcagcucaucacgcagcucaugcccuucggcugccuccuggacuauguccgggaacacaaagacaauauuggcucccaguaccugcucaacuggugugugcagaucgcaaagggcaugaacuacuuggaggaccgucgcuuggugcaccgcgaccuggcagccaggaacguacuggugaaaacaccgcagcaugucaagaucacagauuuugggcuggccaaacugcugggugcggaagagaaagaauaccaugcagaaggaggcaaagugccuaucaaguggauggcauuggaaucaauuuuacacagaaucuauacccaccagagugaugucuggagcuacggggugaccguuugggaguugaugaccuuuggauccaagccauaugacggaaucccugccagcgagaucuccuccauccuggagaaaggagaacgccucccucagccacccauauguaccaucgaugucuacaugaucauggucaagugcuggaugauagacgcagauagucgcccaaaguuccgugaguugaucaucgaauucuccaaaauggcccgagacccccagcgcuaccuugucauucagggggaugaaagaaugcauuugccaaguccuacagacuccaacuucuaccgugcccugauggaugaagaagacauggacgacgugguggaugccgacgaguaccucaucccacagcagggcuucuucagcagccccuccacgucacggacuccccuccugagcucucugagugcaaccagcaacaauuccaccguggcuugcauugauagaaaugggcugcaaagcugucccaucaaggaagacagcuucuugcagcgauacagcucagaccccacaggcgccuugacugaggacagcauagacgacaccuuccucccagugccuggugaguggcuugucuggaaacaguccugcuccucaaccuccucgacccacucagcagcagccagucuccaguguccaagccaggugcucccuccagcaucuccagagggggaaacaguggcagauuugcagacacaguga

SEQ ID NO: 1387 - RNA, 3276 nt, Artificial Sequence
  derived and/or modified sequence opt1 from EGFR__Homo_sapiens__AAH94761
augcgccccagcggcaccgccggggccgcgcugcucgcccugcuggccgcccucugccccgccucccgggcgcuggaggagaagaaggugugccagggcaccagcaacaagcugacgcagcucgggaccuucgaggaccacuuccugucccugcagcgcauguucaacaacugcgaggucgugcucggcaaccuggagaucaccuacgugcagcggaacuacgaccugagcuuccucaagaccauccaggaggucgccggguacgugcugaucgcccugaacacgguggagcgcaucccccucgagaaccugcagaucauccggggcaacauguacuacgagaacuccuacgcccuggcgguccucagcaacuacgacgccaacaagaccggccugaaggagcugcccaugcgcaaccuccaggggcagaagugcgaccccuccugcccgaacggcagcugcuggggcgccggggaggagaacugccagaagcugaccaagaucaucugcgcccagcagugcuccgggcggugccgcggcaagagccccuccgacugcugccacaaccagugcgccgcgggcugcaccgggccccgggagagcgacugccuggugugccgcaaguuccgggacgaggccacgugcaaggacacgugcccgccccucaugcuguacaaccccaccaccuaccagauggacgugaaccccgagggcaaguacuccuucggggcgaccugcgucaagaagugcccccgcaacuacguggugaccgaccacggcagcugcguccgggccugcggcgccgacuccuacgagauggaggaggacggggugcgcaagugcaagaagugcgagggcccgugccggaaggugugcaacgggaucggcaucggggaguucaaggacagccuguccaucaacgccaccaacaucaagcacuucaagaacugcaccagcaucuccggcgaccuccacauccugcccgucgccuuccgcggcgacagcuucacgcacaccccgccccuggacccccaggagcucgacauccugaagaccgugaaggagaucaccggguuccugcucauccaggccuggcccgagaaccggacggaccugcacgccuucgagaaccuggagaucauccgcggccggaccaagcagcacgggcaguucagccucgccguggucucccugaacaucaccagccugggccuccgcucccugaaggagaucagcgacggggacgugaucaucuccggcaacaagaaccugugcuacgcgaacaccaucaacuggaagaagcuguucggcacgagcgggcagaagaccaagaucaucuccaaccggggcgagaacagcugcaaggccaccggccaggugugccacgcccugugcucccccgaggggugcugggggcccgagccgcgcgacugcgucagcugccgcaacgugucccggggccgcgagugcguggacaagugcaaccugcucgagggcgagccccgggaguucgucgagaacagcgagugcauccagugccaccccgagugccugccccaggccaugaacaucacgugcaccgggcgcggcccggacaacugcauccagugcgcccacuacaucgacgggccccacugcgugaagaccugccccgcgggcgucaugggcgagaacaacacccugguguggaaguacgccgacgccgggcacgugugccaccucugccaccccaacugcaccuacggcugcacggggccgggccuggaggggugccccaccaacggccccaagaucccguccaucgccaccggcauggucggggcgcugcugcuccugcuggugguggcccucggcaucgggcuguucaugcggcgccggcacaucguccgcaagcggacccugcgccggcuccugcaggagcgcgagcugguggagccccucacgcccagcggcgaggcccccaaccaggcccugcugcggauccucaaggagaccgaguucaagaagaucaaggugcugggguccggcgccuucggcaccgucuacaaggggcuguggaucccggagggcgagaaggugaagauccccguggcgaucaaggagcuccgcgaggccaccagccccaaggccaacaaggagauccuggacgaggccuacgucauggccuccguggacaacccccacgugugccggcugcucgggaucugccugaccagcacgguccagcugaucacccagcucaugccguucggcugccugcuggacuacgugcgcgagcacaaggacaacaucgggucccaguaccuccugaacuggugcgugcagaucgcgaagggcaugaacuaccuggaggaccggcgccucguccaccgggaccuggccgcccgcaacgugcuggugaagacgccccagcacgucaagaucaccgacuucggccucgccaagcugcugggggccgaggagaaggaguaccacgcggagggcgggaaggugcccaucaaguggauggcccucgagagcauccugcaccgcaucuacacccaccagagcgacgugugguccuacggcgucaccgugugggagcugaugaccuucgggagcaagcccuacgacggcaucccggccuccgagaucagcuccauccucgagaagggcgagcggcugccccagccgcccaucugcaccaucgacguguacaugaucauggucaagugcuggaugaucgacgccgacagccgccccaaguuccgggagcugaucaucgaguucuccaagauggcgcgcgacccccagcgguaccucgugauccagggggacgagcgcaugcaccuccccagccccacggacuccaacuucuaccgggcccugauggacgaggaggacauggacgacguggucgacgccgacgaguaccucaucccgcagcagggcuucuucagcucccccagcaccucccgcacgccccugcugagcucccucagcgccaccuccaacaacagcaccguggccugcaucgaccggaacgggcugcagagcugccccaucaaggaggacuccuuccugcagcgcuacagcuccgacccgaccggcgcgcucaccgaggacagcaucgacgacaccuuccugcccgugcccggcgaguggcuggucuggaagcaguccugcagcuccacgagcuccacccacagcgccgccgccucccuccagugcccgagccaggugcugccgcccgccucccccgagggggagaccguggcggaccugcagacccaguga

SEQ ID NO: 1388 - RNA, 3276 nt, Artificial Sequence
  derived and/or modified sequence opt2 from EGFR__Homo_sapiens__AAH94761
augcgccccuccggcaccgccggcgccgcccuccucgcccuccucgccgcccucugccccgccucccgcgcccucgaggagaagaaggucugccagggcaccuccaacaagcucacccagcucggcaccuucgaggaccacuuccucucccuccagcgcauguucaacaacugcgaggucguccucggcaaccucgagaucaccuacguccagcgcaacuacgaccucuccuuccucaagaccauccaggaggucgccggcuacguccucaucgcccucaacaccgucgagcgcaucccccucgagaaccuccagaucauccgcggcaacauguacuacgagaacuccuacgcccucgccguccucuccaacuacgacgccaacaagaccggccucaaggagcuccccaugcgcaaccuccagggccagaagugcgaccccuccugccccaacggcuccugcuggggcgccggcgaggagaacugccagaagcucaccaagaucaucugcgcccagcagugcuccggccgcugccgcggcaagucccccuccgacugcugccacaaccagugcgccgccggcugcaccggcccccgcgaguccgacugccucgucugccgcaaguuccgcgacgaggccaccugcaaggacaccugccccccccucaugcucuacaaccccaccaccuaccagauggacgucaaccccgagggcaaguacuccuucggcgccaccugcgucaagaagugcccccgcaacuacgucgucaccgaccacggcuccugcguccgcgccugcggcgccgacuccuacgagauggaggaggacggcguccgcaagugcaagaagugcgagggccccugccgcaaggucugcaacggcaucggcaucggcgaguucaaggacucccucuccaucaacgccaccaacaucaagcacuucaagaacugcaccuccaucuccggcgaccuccacauccuccccgucgccuuccgcggcgacuccuucacccacacccccccccucgacccccaggagcucgacauccucaagaccgucaaggagaucaccggcuuccuccucauccaggccuggcccgagaaccgcaccgaccuccacgccuucgagaaccucgagaucauccgcggccgcaccaagcagcacggccaguucucccucgccgucgucucccucaacaucaccucccucggccuccgcucccucaaggagaucuccgacggcgacgucaucaucuccggcaacaagaaccucugcuacgccaacaccaucaacuggaagaagcucuucggcaccuccggccagaagaccaagaucaucuccaaccgcggcgagaacuccugcaaggccaccggccaggucugccacgcccucugcucccccgagggcugcuggggccccgagccccgcgacugcgucuccugccgcaacgucucccgcggccgcgagugcgucgacaagugcaaccuccucgagggcgagccccgcgaguucgucgagaacuccgagugcauccagugccaccccgagugccucccccaggccaugaacaucaccugcaccggccgcggccccgacaacugcauccagugcgcccacuacaucgacggcccccacugcgucaagaccugccccgccggcgucaugggcgagaacaacacccucgucuggaaguacgccgacgccggccacgucugccaccucugccaccccaacugcaccuacggcugcaccggccccggccucgagggcugccccaccaacggccccaagauccccuccaucgccaccggcauggucggcgcccuccuccuccuccucgucgucgcccucggcaucggccucuucaugcgccgccgccacaucguccgcaagcgcacccuccgccgccuccuccaggagcgcgagcucgucgagccccucacccccuccggcgaggcccccaaccaggcccuccuccgcauccucaaggagaccgaguucaagaagaucaagguccucggcuccggcgccuucggcaccgucuacaagggccucuggauccccgagggcgagaaggucaagauccccgucgccaucaaggagcuccgcgaggccaccucccccaaggccaacaaggagauccucgacgaggccuacgucauggccuccgucgacaacccccacgucugccgccuccucggcaucugccucaccuccaccguccagcucaucacccagcucaugcccuucggcugccuccucgacuacguccgcgagcacaaggacaacaucggcucccaguaccuccucaacuggugcguccagaucgccaagggcaugaacuaccucgaggaccgccgccucguccaccgcgaccucgccgcccgcaacguccucgucaagaccccccagcacgucaagaucaccgacuucggccucgccaagcuccucggcgccgaggagaaggaguaccacgccgagggcggcaagguccccaucaaguggauggcccucgaguccauccuccaccgcaucuacacccaccaguccgacgucugguccuacggcgucaccgucugggagcucaugaccuucggcuccaagcccuacgacggcauccccgccuccgagaucuccuccauccucgagaagggcgagcgccucccccagccccccaucugcaccaucgacgucuacaugaucauggucaagugcuggaugaucgacgccgacucccgccccaaguuccgcgagcucaucaucgaguucuccaagauggcccgcgacccccagcgcuaccucgucauccagggcgacgagcgcaugcaccuccccucccccaccgacuccaacuucuaccgcgcccucauggacgaggaggacauggacgacgucgucgacgccgacgaguaccucaucccccagcagggcuucuucuccucccccuccaccucccgcaccccccuccucuccucccucuccgccaccuccaacaacuccaccgucgccugcaucgaccgcaacggccuccaguccugccccaucaaggaggacuccuuccuccagcgcuacuccuccgaccccaccggcgcccucaccgaggacuccaucgacgacaccuuccuccccguccccggcgaguggcucgucuggaagcaguccugcuccuccaccuccuccacccacuccgccgccgccucccuccagugccccucccagguccucccccccgccucccccgagggcgagaccgucgccgaccuccagacccaguga

SEQ ID NO: 1389 - RNA, 3276 nt, Artificial Sequence
  derived and/or modified sequence opt3 from EGFR__Homo_sapiens__AAH94761
augagacccagcggcaccgccggggcugcacugcucgcccuucuggcggcuuugugcccugccuccagggcauuagaggaaaagaaagugugucagggaacaucuaacaagcugacucaacuagguacguucgaggaccacuuucucucacugcagcggauguucaauaacugcgaagucguucuuggcaaucuggagaucaccuacgugcagcgcaacuaugauuugaguuuucucaaaacaauucaggaaguagccggguacgugcugauagcucugaauacugucgagcgaaucccacucgagaacuuacaaauuauccguggaaauauguauuacgaaaacagcuaugcacuggccgugcuuuccaauuacgacgcuaacaagaccggcuugaaagagcugccgaugagaaaucuacagggucagaagugugaucccucuugcccuaacgggucguguuggggagccggcgaagagaauugccagaagcucacaaaaauuaucugugcgcaacagugcucagggaggugucggggcaagagcccaagugacugcugucauaaccagugcgcagccggaugcaccgguccccgcgaguccgauugucugguuugcagaaaauucagggacgaagcuacuuguaaggauacaugcccuccacuuaugcuguauaaucccaccacguaccagauggacgugaacccugagggcaaauacucuuuuggggccacuugugucaagaagugcccacggaacuaugugguaaccgaucacggaagcuguguucgcgcaugcggcgcugacuccuacgaaauggaggaagauggugugcgaaaauguaagaaaugcgaggggccguguagaaaggucugcaauggaauaggcaucggcgaguucaaagacucauugaguauuaacgccacaaauaucaagcauuuuaaaaacugcacuagcauuucuggggaucuccacauccugcccguggcguucaggggagacuccuuuacccauacaccuccauuagacccccaagaacuggauauacucaagaccgugaaggagauuacggguuuccuucugauccaggccuggccugaaaaucggacugacuugcacgcauuugagaaccuagaaauuauccguggccgcacaaaacagcacgggcaauucucacuggcugucguuagccucaauaucaccagucugggacuuagaucucugaaggagauuuccgauggcgacgugauaaucagcgguaacaaaaauuuguguuaugccaacacuauuaauuggaagaaacucuuugggacaucgggccagaagaccaagaucauaucuaacaggggagaaaauuccugcaaagcuacgggccagguaugucaugcccugugcucaccagagggguguuggggacccgagccgcgggauugcgugaguugucgaaacgucagccgcgguagagaaugcguggacaaguguaauuuacuggagggcgaaccuagggaguucguugagaacuccgaaugcauucagugucaccccgagugccuaccacaagcaaugaacauuaccugcacagggcggggaccugauaauuguauccagugcgcccauuacaucgacggcccccacugugugaaaacuugcccagcuggugucaugggggaaaacaauacccucguguggaaguaugcggaugcaggccacguaugucaucugugccaccccaacuguacauacggaugcacuggcccugggcuugagggauguccaaccaaugguccgaaaauccccucuauugccacaggcaugguuggggcuuugcugcuccugcuuguggucgcccugggaauaggcuuguucaugcgcagaaggcauaucgugcguaagcggacccuccgaagacuguuacaggagagggaacuggucgagccucuaacuccaagcggugaagcacccaaccaggcccuccugcgcauucuuaaggagacggaauuuaaaaagaucaaaguguuggggucaggcgcuuucggaacaguuuauaagggccuguggaucccugagggggagaaagugaagauuccaguagccauaaaggaacuccgggaggcaaccagucccaaagcgaauaaggaaauccuggacgaggcuuacgucauggccuccguggauaacccgcacguuugcagauuacugggaauuugucuuacuagcaccgugcaauugaucacacagcucaugccuuuuggcugccugcuagacuacgucagggaacauaaagacaauauugguucucaguaucugcucaacuggugcgugcagaucgcaaaggggaugaauuaccuggaggaucgccgacuuguacaccgggacuuggccgcucguaacgugcugguuaaaaccccacaacacgucaagauaacugauuucggauuagccaaacuccugggcgcagaggaaaaggaguaucaugcugaagguggcaaggugcccaucaaauggauggcccuugagucaauucugcacagaaucuacacacaucagagugacguguggagcuauggggucacgguuugggaauugaugaccuuuggauccaagccuuacgauggcauucccgcgucugagaucucgagcauacucgagaaaggggaaaggcugccacagccucccauuuguacuaucgacguguauaugauuauggugaagugcuggaugaucgaugccgacucccgcccaaaauuccgggagcuaauaaucgaauuuucaaagauggcuagagauccgcagagguaccugguaauucaaggagacgagcgaaugcaccucccuagucccacagauucuaauuucuaccgcgcacugauggacgaggaagauauggacgacgucguggaugccgacgaguaucuuaucccacagcagggcuuuuucagcucccccucaaccagccggacaccuuugcugucuuccuuaagugcuacuagcaacaauucuaccguugccuguauugauagaaacggucuccaauccugcccaaucaaggaagacucauuucugcagagguacaguagcgaucccacgggggcacuuaccgaggacucgauagaugacacauuccugccugugccgggagaauggcuagucuggaaacaguccuguucuagcacuucaaguacccacuccgcggccgcuucucuccagugcccaagccaagugcugcccccugccuccccagagggcgagacaguugcagauuugcagacucaguga

SEQ ID NO: 1390 - RNA, 3276 nt, Artificial Sequence
  derived and/or modified sequence opt4 from EGFR__Homo_sapiens__AAH94761
augagacccagcggcaccgccggcgccgcccugcuggcccugcuggccgcccugugccccgccagcagagcccuggaggagaagaaggugugccagggcaccagcaacaagcugacccagcugggcaccuucgaggaccacuuccugagccugcagagaauguucaacaacugcgagguggugcugggcaaccuggagaucaccuacgugcagagaaacuacgaccugagcuuccugaagaccauccaggagguggccggcuacgugcugaucgcccugaacaccguggagagaaucccccuggagaaccugcagaucaucagaggcaacauguacuacgagaacagcuacgcccuggccgugcugagcaacuacgacgccaacaagaccggccugaaggagcugcccaugagaaaccugcagggccagaagugcgaccccagcugccccaacggcagcugcuggggcgccggcgaggagaacugccagaagcugaccaagaucaucugcgcccagcagugcagcggcagaugcagaggcaagagccccagcgacugcugccacaaccagugcgccgccggcugcaccggccccagagagagcgacugccuggugugcagaaaguucagagacgaggccaccugcaaggacaccugccccccccugaugcuguacaaccccaccaccuaccagauggacgugaaccccgagggcaaguacagcuucggcgccaccugcgugaagaagugccccagaaacuacguggugaccgaccacggcagcugcgugagagccugcggcgccgacagcuacgagauggaggaggacggcgugagaaagugcaagaagugcgagggccccugcagaaaggugugcaacggcaucggcaucggcgaguucaaggacagccugagcaucaacgccaccaacaucaagcacuucaagaacugcaccagcaucagcggcgaccugcacauccugcccguggccuucagaggcgacagcuucacccacacccccccccuggacccccaggagcuggacauccugaagaccgugaaggagaucaccggcuuccugcugauccaggccuggcccgagaacagaaccgaccugcacgccuucgagaaccuggagaucaucagaggcagaaccaagcagcacggccaguucagccuggccguggugagccugaacaucaccagccugggccugagaagccugaaggagaucagcgacggcgacgugaucaucagcggcaacaagaaccugugcuacgccaacaccaucaacuggaagaagcuguucggcaccagcggccagaagaccaagaucaucagcaacagaggcgagaacagcugcaaggccaccggccaggugugccacgcccugugcagccccgagggcugcuggggccccgagcccagagacugcgugagcugcagaaacgugagcagaggcagagagugcguggacaagugcaaccugcuggagggcgagcccagagaguucguggagaacagcgagugcauccagugccaccccgagugccugccccaggccaugaacaucaccugcaccggcagaggccccgacaacugcauccagugcgcccacuacaucgacggcccccacugcgugaagaccugccccgccggcgugaugggcgagaacaacacccugguguggaaguacgccgacgccggccacgugugccaccugugccaccccaacugcaccuacggcugcaccggccccggccuggagggcugccccaccaacggccccaagauccccagcaucgccaccggcauggugggcgcccugcugcugcugcuggugguggcccugggcaucggccuguucaugagaagaagacacaucgugagaaagagaacccugagaagacugcugcaggagagagagcugguggagccccugacccccagcggcgaggcccccaaccaggcccugcugagaauccugaaggagaccgaguucaagaagaucaaggugcugggcagcggcgccuucggcaccguguacaagggccuguggauccccgagggcgagaaggugaagauccccguggccaucaaggagcugagagaggccaccagccccaaggccaacaaggagauccuggacgaggccuacgugauggccagcguggacaacccccacgugugcagacugcugggcaucugccugaccagcaccgugcagcugaucacccagcugaugcccuucggcugccugcuggacuacgugagagagcacaaggacaacaucggcagccaguaccugcugaacuggugcgugcagaucgccaagggcaugaacuaccuggaggacagaagacuggugcacagagaccuggccgccagaaacgugcuggugaagaccccccagcacgugaagaucaccgacuucggccuggccaagcugcugggcgccgaggagaaggaguaccacgccgagggcggcaaggugcccaucaaguggauggcccuggagagcauccugcacagaaucuacacccaccagagcgacguguggagcuacggcgugaccgugugggagcugaugaccuucggcagcaagcccuacgacggcauccccgccagcgagaucagcagcauccuggagaagggcgagagacugccccagccccccaucugcaccaucgacguguacaugaucauggugaagugcuggaugaucgacgccgacagcagacccaaguucagagagcugaucaucgaguucagcaagauggccagagacccccagagauaccuggugauccagggcgacgagagaaugcaccugcccagccccaccgacagcaacuucuacagagcccugauggacgaggaggacauggacgacgugguggacgccgacgaguaccugaucccccagcagggcuucuucagcagccccagcaccagcagaaccccccugcugagcagccugagcgccaccagcaacaacagcaccguggccugcaucgacagaaacggccugcagagcugccccaucaaggaggacagcuuccugcagagauacagcagcgaccccaccggcgcccugaccgaggacagcaucgacgacaccuuccugcccgugcccggcgaguggcugguguggaagcagagcugcagcagcaccagcagcacccacagcgccgccgccagccugcagugccccagccaggugcugccccccgccagccccgagggcgagaccguggccgaccugcagacccaguga

SEQ ID NO: 1391 - RNA, 3276 nt, Artificial Sequence
  derived and/or modified sequence opt5 from EGFR__Homo_sapiens__AAH94761
augagacccagcggcaccgccggggcugcccugcucgcgcugcuugcugcccugugcccugccucccgggcucucgaggaaaagaaagugugucagggaacaucuaacaagcugacgcaacuuggcaccuucgaggaccacuuucugagccuccagcgcauguucaauaacugcgaagucguucuggggaaucuggagaucacauacgugcagagaaacuaugaucucuccuuucugaaaaccauucaggaaguggccggauacguccuuaucgcucugaauacaguggagcggauuccgcucgagaaccugcaaaucauucgcggcaauauguauuacgaaaacucuuaugcccuugcgguucugagcaauuacgacgccaacaagaccgggcucaaagagcugcccaugagaaaucugcagggacagaagugugauccuuccugccccaacggcucuuguuggggcgcuggggaagagaauugccagaagcucacaaaaaucaucugugcccaacagugcagcggacggugucgcggcaaguccccuagcgacugcugucauaaccagugcgcugccgggugcaccggacccagagagucugauugucuggugugccggaaauuccgcgacgaagcgacguguaaggauaccugcccuccgcuuaugcuguauaaucccacaaccuaccagauggacgucaacccugagggcaaauacuccuuuggggccacaugugugaagaagugccccagaaacuauguugugaccgaucacggaagcuguguccgggcuugcggcgccgacucuuacgaaauggaggaagauggcgugcgcaaauguaagaaaugcgaggggccuuguagaaaggugugcaauggaauuggcaucggggaguucaaagacucccucagcauuaacgcuacgaauaucaagcauuuuaaaaacugcacaucuauuuccggagaucugcacauccuucccgucgccuuccggggcgacagcuuuacccauacaccgccucuggacccccaagaacucgauauucugaagaccguuaaggagaucaccggguuccugcucauccaggccuggccugaaaaucgcacagaccugcacgcuuuugagaaccuugaaauuaucagaggacggacgaaacagcacggccaauucucccuggcgguggugucucucaauauuaccagccugggccuuagaucccugaaggagaucagcgauggggacgucauuaucucuggaaacaaaaaucucuguuaugccaacacaaucaauuggaagaaacuguuuggcaccuccgggcagaagacaaagauuaucagcaaccgcggagaaaauucuugcaaagcuaccggccaggugugucaugcccugugcagccccgagggguguuggggccccgagccucgggauugcguuuccuguagaaacgugucucgcggacgggaaugcgucgacaaguguaaucuccuggagggcgaaccgagagaguucguggagaacagcgaaugcauucagugucaccccgagugccuuccucaagccaugaacaucacgugcacagggcgcggacccgauaauuguauucagugcgcucauuacaucgacggcccucacuguguuaaaaccugccccgccggggugaugggagaaaacaauacccuggucuggaaguaugcggaugcuggccacgugugucaucucugccacccgaacuguacauacgggugcaccggcccuggacuggagggcugucccacaaaugggccuaaaauccccuccauugccacgggaauggucggcgcccugcuucuccugcuggugguugcucucgggaucggacuguucaugcggagacgccauauugugcggaagagaacccuucgccggcugcuccaggagagagaacuggucgagccucugacacccagcggcgaagccccgaaccaggcccuucuccggauccugaaggagaccgaauuuaaaaagauuaaagugcuggggucuggcgcuuucggaacaguuuauaagggccucuggaucccugagggggagaaagugaagauucccgucgcgaucaaggaacugcgcgaggccaccucccccaaagcuaauaaggaaauccuugacgaggccuacgugauggcuagcguggauaacccucacguuugcagacugcucggaauuugucugacgucuaccguccaacugaucacacagcuuaugccguuuggcugccuccuggacuacgugcgggaacauaaagacaauauugggucccaguaucugcucaacuggugcgugcagaucgccaagggaaugaauuaccuggaggauagacgccuuguccaccgggaccuggcggccagaaacgugcucguuaaaacaccccaacacgugaagauuaccgauuucggccuggcuaaacugcuuggggccgaggaaaaggaguaucaugcugaaggcggaaaggucccuaucaaauggauggcccucgagagcauccugcaccgcauuuacacccaucaguccgacguguggucuuauggcguuacggugugggaacugaugacauuugggagcaagcccuacgauggaaucccugccuccgagauuucuagcauccucgagaaaggcgaaagacugccccagccucccauuuguaccaucgacgucuauaugaucauggugaagugcuggaugauugaugcugacucccggccgaaauuccgcgagcuuaucauugaauuuagcaagauggcgagagauccucagcgguaccugguuauccaaggggacgagcgcaugcaccuccccucuccuacagauuccaauuucuacagagcccugauggacgaggaagauauggacgacguggucgaugcugacgaguaucugauuccccagcagggauuuuucagcucuccguccaccagccggaccccucuucugucuagccucuccgccacaagcaacaauucuacgguggccuguaucgaucgcaacggccugcaauccugccccaucaaggaagacagcuuucuccagagauacuccucugauccuaccggcgcucugacagaggacagcauugaugacaccuuccuucccgugcccggggaauggcuggucuggaaacaguccuguucuagcacauccucuacccacagcgccgcggcuucccuccagugcccuagccaaguucugccgcccgccucuccugagggagagacgguggccgaucugcagacacaguga

SEQ ID NO: 1392 - protein, 71 aa, Artificial Sequence
  EGFR__Homo_sapiens__Q8NDU8
MRPSGTAGAALLALLAALCPASRALEEKKGKGVSRRLPRRPRIAPRTPQPAQPRTGAPARARAPARPFLFP

SEQ ID NO: 1393 - RNA, 216 nt, Artificial Sequence
  EGFR__Homo_sapiens__CAA34902
augcgacccuccgggacggccggggcagcgcuccuggcgcugcuggcugcgcucugcccggcgagucgggcucuggaggaaaagaaagguaagggcgugucucgccggcucccgcgccgcccccggaucgcgccccggaccccgcagcccgcccaaccgcgcaccggcgcaccggcucgcgcccgcgcccccgcccguccuuuccuguuuccuuga

SEQ ID NO: 1394 - RNA, 216 nt, Artificial Sequence
  derived and/or modified sequence opt1 from EGFR__Homo_sapiens__CAA34902
augcgccccagcggcaccgccggggccgcgcugcucgcccugcuggccgcccucugcccggccucccgggcgcuggaggagaagaagggcaagggggugagccgccggcugccccgccggccccgcaucgcgccccggaccccgcagcccgcccagccccgcacgggcgcccccgcccgggcccgcgccccggcccggcccuuccucuuccccuga

SEQ ID NO: 1395 - RNA, 216 nt, Artificial Sequence
  derived and/or modified sequence opt2 from EGFR__Homo_sapiens__CAA34902
augcgccccuccggcaccgccggcgccgcccuccucgcccuccucgccgcccucugccccgccucccgcgcccucgaggagaagaagggcaagggcgucucccgccgccucccccgccgcccccgcaucgccccccgcaccccccagcccgcccagccccgcaccggcgcccccgcccgcgcccgcgcccccgcccgccccuuccucuuccccuga

SEQ ID NO: 1396 - RNA, 216 nt, Artificial Sequence
  derived and/or modified sequence opt3 from EGFR__Homo_sapiens__CAA34902
augagacccagcggcaccgccggggcugcacugcucgcccuucuggcggcuuugugcccugccuccagggcauuagaggaaaagaaaggaaagggugugucucggcgccugccacgacguccgagaaucgcccccaggacaccucagccagcucaaccccggacuggcgccccugcacgcgcuagagccccagcgaggcccuuccuauuuccuuga

SEQ ID NO: 1397 - RNA, 216 nt, Artificial Sequence
  derived and/or modified sequence opt4 from EGFR__Homo_sapiens__CAA34902
augagacccagcggcaccgccggcgccgcccugcuggcccugcuggccgcccugugccccgccagcagagcccuggaggagaagaagggcaagggcgugagcagaagacugcccagaagacccagaaucgcccccagaaccccccagcccgcccagcccagaaccggcgcccccgccagagccagagcccccgccagacccuuccuguuccccuga

SEQ ID NO: 1398 - RNA, 216 nt, Artificial Sequence
  derived and/or modified sequence opt5 from EGFR__Homo_sapiens__CAA34902
augagacccagcggcaccgccggggcugcccugcucgcgcugcuugcugcccugugcccugccucccgggcucucgaggaaaagaaaggaaagggcgugucucgcagacugccgcggcgccccagaaucgccccucggacaccccagccugcucaaccccgcacgggggccccugcgagagcccgggcuccggcccgccccuuccuuuuuccuuga

SEQ ID NO: 1399 - protein, 239 aa, Artificial Sequence
  EGLN3__Homo_sapiens__Q9H6Z9
MPLGHIMRLDLEKIALEYIVPCLHEVGFCYLDNFLGEVVGDCVLERVKQLHCTGALRDGQLAGPRAGVSKRHLRGDQITWIGGNEEGCEAISFLLSLIDRLVLYCGSRLGKYYVKERSKAMVACYPGNGTGYVRHVDNPNGDGRCITCIYYLNKNWDAKLHGGILRIFPEGKSFIADVEPIFDRLLFFWSDRRNPHEVQPSYATRYAMTVWYFDAEERAEAKKKFRNLTRKTESALTED

SEQ ID NO: 1400 - RNA, 720 nt, Artificial Sequence
  EGLN3__Homo_sapiens__AAH10992
augccccugggacacaucaugaggcuggaccuggagaaaauugcccuggaguacaucgugcccugucugcacgaggugggcuucugcuaccuggacaacuuccugggcgagguggugggcgacugcguccuggagcgcgucaagcagcugcacugcaccggggcccugcgggacggccagcuggcggggccgcgcgccggcgucuccaagcgacaccugcggggcgaccagaucacguggaucgggggcaacgaggagggcugcgaggccaucagcuuccuccugucccucaucgacaggcugguccucuacugcgggagccggcugggcaaauacuacgucaaggagaggucuaaggcaaugguggcuugcuauccgggaaauggaacagguuauguucgccacguggacaaccccaacggugauggucgcugcaucaccugcaucuacuaucugaacaagaauugggaugccaagcuacauggugggauccugcggauauuuccagaggggaaaucauucauagcagauguggagcccauuuuugacagacuccuguucuucuggucagaucguaggaacccacacgaagugcagcccucuuacgcaaccagauaugcuaugacugucugguacuuugaugcugaagaaagggcagaagccaaaaagaaauucaggaauuuaacuaggaaaacugaaucugcccucacugaagacuga

SEQ ID NO: 1401 - RNA, 720 nt, Artificial Sequence
  derived and/or modified sequence opt1 from EGLN3__Homo_sapiens__AAH10992
augccccugggccacaucaugcgccucgaccuggagaagaucgcccuggaguacaucgugccgugccuccacgaggucggguucugcuaccuggacaacuuccugggcgagguggugggggacugcguccucgagcgggugaagcagcugcacugcaccggcgcccugcgcgacgggcagcucgcgggcccccgggccggcgugagcaagcgccaccuccgcggggaccagaucaccuggaucggcgggaacgaggagggcugcgaggccaucuccuuccugcucagccugaucgaccggcugguccucuacugcgggucccggcugggcaaguacuacgugaaggagcgcagcaaggccaugguggccugcuaccccggcaacgggacgggcuacguccggcacguggacaaccccaacggggacggccgcugcaucacgugcaucuacuaccugaacaagaacugggacgcgaagcuccacggcgggauccugcggaucuucccggagggcaaguccuucaucgccgacguggagcccaucuucgaccgccugcuguucuucuggagcgaccggcgcaacccccacgagguccagcccuccuacgccacccgguacgccaugaccgugugguacuucgacgcggaggagcgcgccgaggccaagaagaaguuccggaaccugacccgcaagaccgagagcgcccugaccgaggacuga

SEQ ID NO: 1402 - RNA, 720 nt, Artificial Sequence
  derived and/or modified sequence opt2 from EGLN3__Homo_sapiens__AAH10992
augccccucggccacaucaugcgccucgaccucgagaagaucgcccucgaguacaucguccccugccuccacgaggucggcuucugcuaccucgacaacuuccucggcgaggucgucggcgacugcguccucgagcgcgucaagcagcuccacugcaccggcgcccuccgcgacggccagcucgccggcccccgcgccggcgucuccaagcgccaccuccgcggcgaccagaucaccuggaucggcggcaacgaggagggcugcgaggccaucuccuuccuccucucccucaucgaccgccucguccucuacugcggcucccgccucggcaaguacuacgucaaggagcgcuccaaggccauggucgccugcuaccccggcaacggcaccggcuacguccgccacgucgacaaccccaacggcgacggccgcugcaucaccugcaucuacuaccucaacaagaacugggacgccaagcuccacggcggcauccuccgcaucuuccccgagggcaaguccuucaucgccgacgucgagcccaucuucgaccgccuccucuucuucugguccgaccgccgcaacccccacgagguccagcccuccuacgccacccgcuacgccaugaccgucugguacuucgacgccgaggagcgcgccgaggccaagaagaaguuccgcaaccucacccgcaagaccgaguccgcccucaccgaggacuga

SEQ ID NO: 1403 - RNA, 720 nt, Artificial Sequence
  derived and/or modified sequence opt3 from EGLN3__Homo_sapiens__AAH10992
augccccugggccacaucaugagacucgaccuugagaagauugcccuggaauacauagugccuugcuugcaugaggucggguucuguuauuuagauaacuuucugggagaaguugugggugacugcguacuagagagggugaaacagcuccacuguaccggcgcucugcgggaugggcaacuugcaggaccacgcgccggcgucagcaagcgacaucugcguggugaccagaucacauggauugggggaaaugaagagggcugcgaggcgaucuccuucuugcucucucugauugauagacuggugcucuacuguggcucaagguuagggaaauauuacguuaaggaacggaguaaagcuaugguggccugcuauccgggaaacgguacuggcuacguccgccacguggacaaucccaacggggauggaagauguaucacgugcauauauuaccugaauaagaacugggacgcaaaacuucauggcgguaucuugaggauuuuuccugaggggaaguccuucaucgccgauguagaaccaauuuuugaccggcugcuauucuuuuggagcgaucgccgaaauccccacgagguucagccuucuuacgcuaccagauaugcaaugacagugugguacuucgacgccgaggaaagggcugaggccaagaaaaaguuucggaaccucacucguaaaaccgaaucggcgcugacagaggauuga

SEQ ID NO: 1404 - RNA, 720 nt, Artificial Sequence
  derived and/or modified sequence opt4 from EGLN3__Homo_sapiens__AAH10992
augccccugggccacaucaugagacuggaccuggagaagaucgcccuggaguacaucgugcccugccugcacgaggugggcuucugcuaccuggacaacuuccugggcgagguggugggcgacugcgugcuggagagagugaagcagcugcacugcaccggcgcccugagagacggccagcuggccggccccagagccggcgugagcaagagacaccugagaggcgaccagaucaccuggaucggcggcaacgaggagggcugcgaggccaucagcuuccugcugagccugaucgacagacuggugcuguacugcggcagcagacugggcaaguacuacgugaaggagagaagcaaggccaugguggccugcuaccccggcaacggcaccggcuacgugagacacguggacaaccccaacggcgacggcagaugcaucaccugcaucuacuaccugaacaagaacugggacgccaagcugcacggcggcauccugagaaucuuccccgagggcaagagcuucaucgccgacguggagcccaucuucgacagacugcuguucuucuggagcgacagaagaaacccccacgaggugcagcccagcuacgccaccagauacgccaugaccgugugguacuucgacgccgaggagagagccgaggccaagaagaaguucagaaaccugaccagaaagaccgagagcgcccugaccgaggacuga

SEQ ID NO: 1405 - RNA, 720 nt, Artificial Sequence
  derived and/or modified sequence opt5 from EGLN3__Homo_sapiens__AAH10992
augccccugggccacaucaugagacucgaccuggagaagauugcccuugaauacaucgugccuugccugcaugaggucggguucuguuaucucgauaacuuucugggagaaguugugggcgacugcgugcuugagcgggucaaacagcugcacuguaccggggcucuccgcgauggacaacuggccggcccgagagcgggggugagcaagcggcaucugcgcggagaccagauuacauggaucggcggcaaugaagaggggugcgaggcuauuuccuuccuccugucucuuaucgauagacugguucucuacuguggaagccggcugggcaaauauuacgugaaggaacgcuccaaagccauggucgccugcuaucccgggaacggaacgggcuacgugagacacguugacaauccuaacggggauggacgguguauuaccugcaucuauuaccuuaauaagaacugggacgcuaagcugcauggcggcauccuccgcauuuuucccgaggggaaaucuuucaucgccgauguggaaccuauuuuugacagacugcuguucuuuuggagcgaucggcgcaauccccacgagguccagccuuccuacgcuacaagauaugccaugaccgugugguacuucgacgcggaggaacgggccgaggcuaagaaaaaguuucgcaaccucacaagaaaaaccgaaucugcccugacagaggauuga

SEQ ID NO: 1406 - protein, 521 aa, Artificial Sequence
  ELF2/m__Homo_sapiens__B7Z720
MATSLHEGPTNQLDLLIRAVEASVHSSNAHCTDKTIEAAEALLHMESPTCLRDSRSPEFIHAAMRPDVITETVVEVSTEESEPMDTSPIPTSPDSHEPMKKKKVGRKPKTQQSPISNGSPELGIKKKPREGKGNTTYLWEFLLDLLQDKNTCPRYIKWTQREKGIFKLVDSKAVSKLWGKHKNKPDMNYETMGRALRYYYQRGILAKVEGQRLVYQFKDMPKNIVVIDDDKSETCNEDLAGTTDEKSLERVSLSAESLLKAASSVRSGKNSSPINCSRAEKGVARVVNITSPGHDASSRSPTTTASVSATAAPRTVRVAMQVPVVMTSLGQKISTVAVQSVNAGAPLITSTSPTTATSPKVVIQTIPTVMPASTENGDKITMQPAKIITIPATQLAQCQLQTKSNLTGSGSINIVGTPLAVRALTPVSIAHGTPVMRLSMPTQQASGQTPPRVISAVIKGPEVKSEAVAKKQEHDVKTLQLVEEKPADGNKTVTHVVVVSAPSAIALPVTMKTEGLVTCEK

SEQ ID NO: 1407 - RNA, 1566 nt, Artificial Sequence
  ELF2/m__Homo_sapiens__BAH13456
auggcgacgucucugcaugagggacccacgaaccagcuggaucugcucauccgggccguggaagcaucaguucacagcaguaaugcacacuguacagauaagacaauugaagcugcugaagcccugcuucauauggaaucuccuaccugcuugagggauucaagaaguccugaauucauccaugcugcuaugaggccagaugucauuacagaaacuguaguggaggugucaacugaagagucugaacccauggauaccucuccuauuccaacaucaccagauagccaugaaccaaugaaaaagaaaaaaguuggccguaaaccaaagacccagcaaucaccaauuuccaaugggucuccugaguuagguauaaagaagaaaccaagagaaggaaaaggaaacacaaccuauuugugggaguuucuuuuagaucuacuucaagauaaaaauacuugucccagguauauuaaauggacucagagagaaaaaggcauauucaagcugguggauucaaaggcugucucuaagcuuuggggaaagcauaagaacaaaccagacaugaacuaugaaaccaugggacgagcuuugagauacuacuaccaaaggggaauucuugcaaagguugaaggacagaggcuuguauaucaguucaaggauaugccgaaaaacauaguggucauagaugaugacaaaagugaaaccuguaaugaagauuuagcaggaacuacugaugaaaaaucauuagaacgagugucacugucugcagaaagucuccugaaagcagcauccucuguucgcaguggaaaaaauucauccccuauaaacugcuccagagcagagaaggguguagcuagaguugugaauaucacuuccccugggcacgaugcuucauccaggucuccuacuaccacugcaucugugucagcaacagcagcuccaaggacaguucguguggcaaugcagguaccuguuguaaugacaucauugggucagaaaauuucaacuguggcaguucagucaguuaaugcaggugcaccauuaauaaccagcacuaguccaacaacagcgaccucuccaaagguagucauucagacaaucccuacugugaugccagcuucuacugaaaauggagacaaaaucaccaugcagccugccaaaauuauuaccaucccagcuacacagcuugcacagugucaacugcagacaaagucaaaucugacuggaucaggaagcauuaacauuguuggaaccccauuggcugugagagcacuuaccccuguuucaauagcccaugguacaccuguaaugagacuaucaaugccuacucagcaggcaucuggccagacuccuccucgaguuaucagugcagucauaaaggggccagagguuaaaucggaagcaguggcaaaaaagcaagaacaugaugugaaaacuuugcagcuaguagaagaaaaaccagcagauggaaauaagacagugacccacguagugguugucagugcgccuucagcuauugcccuuccuguaacuaugaaaacagaaggacuagugacaugugagaaauaa

SEQ ID NO: 1408 - RNA, 1566 nt, Artificial Sequence
  derived and/or modified sequence opt1 from ELF2/m__Homo_sapiens__BAH13456
auggccaccagccugcacgagggccccaccaaccagcucgaccugcugauccgcgccguggaggcguccguccacagcuccaacgcccacugcacggacaagaccaucgaggccgccgaggcccuccugcacauggagagcccgaccugccugcgggacucccgcagccccgaguucauccacgcggccaugcggcccgacgugaucaccgagacgguggucgagguguccaccgaggagagcgagcccauggacaccuccccgauccccaccagccccgacucccacgagcccaugaagaagaagaagguggggcgcaagccgaagacgcagcagagccccaucuccaacggcagccccgagcucgggaucaagaagaagccccgggagggcaaggggaacaccaccuaccugugggaguuccugcucgaccugcugcaggacaagaacacgugcccgcgcuacaucaaguggacgcagcgggagaagggcaucuucaagcucgucgacuccaaggccgugagcaagcuguggggcaagcacaagaacaagcccgacaugaacuacgagaccauggggcgcgcccugcgguacuacuaccagcgcggcauccucgcgaagguggaggggcagcggcuggucuaccaguucaaggacaugcccaagaacaucguggugaucgacgacgacaaguccgagaccugcaacgaggaccuggccggcaccacggacgagaagucccucgagcgcgucagccugagcgccgagagccugcucaaggccgccuccagcgugcgguccgggaagaacagcucccccaucaacugcagccgcgcggagaagggcguggcccgggucgugaacaucaccuccccgggccacgacgccagcucccgcagccccaccaccacggccuccgugagcgccaccgcggcgccccggaccguccgcguggccaugcagguccccguggugaugaccucccuggggcagaagaucagcacgguggccguccaguccgugaacgccggcgccccgcugaucaccagcaccucccccaccacggccaccagccccaaggucgugauccagaccauccccaccgugaugccggccuccacggagaacggggacaagaucaccaugcagcccgccaagaucaucaccauccccgccacccagcucgcgcagugccagcugcagaccaagagcaaccugaccggcagcggcuccaucaacaucgucgggacgccccucgccgugcgggcccugaccccggugagcaucgcccacggcacccccgucaugcgccuguccaugcccacccagcaggcgagcgggcagaccccgccccgggugaucuccgccgugaucaagggccccgaggucaagagcgaggccguggccaagaagcaggagcacgacgugaagacccuccagcuggucgaggagaagcccgccgacgggaacaagaccgugacgcacguggucgugguguccgcgccgagcgccaucgcccugcccgucaccaugaagaccgagggccucgugaccugcgagaaguga

SEQ ID NO: 1409 - RNA, 1566 nt, Artificial Sequence
  derived and/or modified sequence opt2 from ELF2/m__Homo_sapiens__BAH13456
auggccaccucccuccacgagggccccaccaaccagcucgaccuccucauccgcgccgucgaggccuccguccacuccuccaacgcccacugcaccgacaagaccaucgaggccgccgaggcccuccuccacauggagucccccaccugccuccgcgacucccgcucccccgaguucauccacgccgccaugcgccccgacgucaucaccgagaccgucgucgaggucuccaccgaggaguccgagcccauggacaccucccccauccccaccucccccgacucccacgagcccaugaagaagaagaaggucggccgcaagcccaagacccagcagucccccaucuccaacggcucccccgagcucggcaucaagaagaagccccgcgagggcaagggcaacaccaccuaccucugggaguuccuccucgaccuccuccaggacaagaacaccugcccccgcuacaucaaguggacccagcgcgagaagggcaucuucaagcucgucgacuccaaggccgucuccaagcucuggggcaagcacaagaacaagcccgacaugaacuacgagaccaugggccgcgcccuccgcuacuacuaccagcgcggcauccucgccaaggucgagggccagcgccucgucuaccaguucaaggacaugcccaagaacaucgucgucaucgacgacgacaaguccgagaccugcaacgaggaccucgccggcaccaccgacgagaagucccucgagcgcgucucccucuccgccgagucccuccucaaggccgccuccuccguccgcuccggcaagaacuccucccccaucaacugcucccgcgccgagaagggcgucgcccgcgucgucaacaucaccucccccggccacgacgccuccucccgcucccccaccaccaccgccuccgucuccgccaccgccgccccccgcaccguccgcgucgccaugcagguccccgucgucaugaccucccucggccagaagaucuccaccgucgccguccaguccgucaacgccggcgccccccucaucaccuccaccucccccaccaccgccaccucccccaaggucgucauccagaccauccccaccgucaugcccgccuccaccgagaacggcgacaagaucaccaugcagcccgccaagaucaucaccauccccgccacccagcucgcccagugccagcuccagaccaaguccaaccucaccggcuccggcuccaucaacaucgucggcaccccccucgccguccgcgcccucacccccgucuccaucgcccacggcacccccgucaugcgccucuccaugcccacccagcaggccuccggccagacccccccccgcgucaucuccgccgucaucaagggccccgaggucaaguccgaggccgucgccaagaagcaggagcacgacgucaagacccuccagcucgucgaggagaagcccgccgacggcaacaagaccgucacccacgucgucgucgucuccgcccccuccgccaucgcccuccccgucaccaugaagaccgagggccucgucaccugcgagaaguga

SEQ ID NO: 1410 - RNA, 1566 nt, Artificial Sequence
  derived and/or modified sequence opt3 from ELF2/m__Homo_sapiens__BAH13456
auggccaccagccugcacgagggccccacaaaccagcucgaccuucugaucagagcuguggaagcauccguccauucuucaaaugcccacugcacugauaagacgauugaggcggcugaagccuuguuacauauggagaguccuaccugucugagggacagccgguccccagaguucauacacgcagccaugcgcccggauguuaucacagaaacugugguagaggugucuaccgaagagucggaacccauggacacaucaccuauuccaaccagccccgauagucaugagccuaugaaaaagaaaaaggucgggcgaaaaccaaagacucaacagucccccaucucuaacggaagcccugagcuagguauuaagaaaaagccacgugaaggcaaagggaauacaaccuaccucugggaguuucugcuugaccuguugcaggauaagaacacgugcccgagauauaucaaauggacucagagggaaaagggaauauucaagcucguggacuccaaagcuguuucaaagcuguggggcaaacacaagaauaaacccgauaugaacuacgagaccaugggucgggcacugcgcuauuacuaucaaagagggauccucgccaagguggaaggacagagguuagucuaccaguuuaaagacaugccuaagaauauugugguaaucgaugacgauaagagugagacauguaacgaggaccuggcuggcacuaccgacgagaaaagccuugaacggguuucuuuguccgccgaaucacugcuaaaggcggcaagcagugugcgcucuggcaaaaauuccagcccaauuaacugcucgcgagccgagaagggggucgcuagaguggugaauaucacaucucccggacacgaugccuccucaaggaguccuaccacgacugcaagcgucuccgcuacagccgcgccacggaccguucguguggccaugcagguacccguggucaugacuucucucggucagaaaauaagcacaguggcaguucaaucagugaacgcuggcgccccgcugauuaccaguacguccccuaccacagcuacuagccccaaggucgugauccagaccauuccaacaguaaugccugccucuacugaaaauggggacaagaucaccaugcagcccgcaaaaaucauuacaauaccagccacccaacuugcucagugucagcugcaaacuaagucaaacuugacgggaaguggcagcaucaauauuguugguacaccccucgcggugcgcgcacugaccccugucuccaucgcccaugggacuccagugaugagauuaucuaugccgacccagcaggcuucgggacagacacccccuagggucauaagcgccgugauuaaaggcccagagguuaaguccgaggcaguggccaaaaagcaagaacacgauguaaagacccugcagcucgucgaggaaaaacccgcugacggcaacaagacugugacacauguuguggucgugucagccccuagugcaaucgcgcuuccaguaacgaugaaaaccgaggggcuggugacuugcgaaaaguga

SEQ ID NO: 1411 - RNA, 1566 nt, Artificial Sequence
  derived and/or modified sequence opt4 from ELF2/m__Homo_sapiens__BAH13456
auggccaccagccugcacgagggccccaccaaccagcuggaccugcugaucagagccguggaggccagcgugcacagcagcaacgcccacugcaccgacaagaccaucgaggccgccgaggcccugcugcacauggagagccccaccugccugagagacagcagaagccccgaguucauccacgccgccaugagacccgacgugaucaccgagaccgugguggaggugagcaccgaggagagcgagcccauggacaccagccccauccccaccagccccgacagccacgagcccaugaagaagaagaaggugggcagaaagcccaagacccagcagagccccaucagcaacggcagccccgagcugggcaucaagaagaagcccagagagggcaagggcaacaccaccuaccugugggaguuccugcuggaccugcugcaggacaagaacaccugccccagauacaucaaguggacccagagagagaagggcaucuucaagcugguggacagcaaggccgugagcaagcuguggggcaagcacaagaacaagcccgacaugaacuacgagaccaugggcagagcccugagauacuacuaccagagaggcauccuggccaagguggagggccagagacugguguaccaguucaaggacaugcccaagaacaucguggugaucgacgacgacaagagcgagaccugcaacgaggaccuggccggcaccaccgacgagaagagccuggagagagugagccugagcgccgagagccugcugaaggccgccagcagcgugagaagcggcaagaacagcagccccaucaacugcagcagagccgagaagggcguggccagaguggugaacaucaccagccccggccacgacgccagcagcagaagccccaccaccaccgccagcgugagcgccaccgccgcccccagaaccgugagaguggccaugcaggugcccguggugaugaccagccugggccagaagaucagcaccguggccgugcagagcgugaacgccggcgccccccugaucaccagcaccagccccaccaccgccaccagccccaagguggugauccagaccauccccaccgugaugcccgccagcaccgagaacggcgacaagaucaccaugcagcccgccaagaucaucaccauccccgccacccagcuggcccagugccagcugcagaccaagagcaaccugaccggcagcggcagcaucaacaucgugggcaccccccuggccgugagagcccugacccccgugagcaucgcccacggcacccccgugaugagacugagcaugcccacccagcaggccagcggccagaccccccccagagugaucagcgccgugaucaagggccccgaggugaagagcgaggccguggccaagaagcaggagcacgacgugaagacccugcagcugguggaggagaagcccgccgacggcaacaagaccgugacccacguggugguggugagcgcccccagcgccaucgcccugcccgugaccaugaagaccgagggccuggugaccugcgagaaguga

SEQ ID NO: 1412 - RNA, 1566 nt, Artificial Sequence
  derived and/or modified sequence opt5 from ELF2/m__Homo_sapiens__BAH13456
auggccaccagccugcacgagggccccacaaaccagcucgaccugcuuaucagagcuguggaagccuccguccauucuagcaaugcgcacugcacggauaagaccauugaggcugccgaagcccugcuccauauggaguccccuacaugucugcgggacucucgcagcccggaguucauccacgcugccaugagacccgauguuauuaccgaaacagugguggaggucuccaccgaagagucugaaccuauggacacaagccccaucccuaccucccccgauagccaugagccuaugaaaaagaaaaagguggggcggaaaccgaagacgcaacagucucccauuuccaacggaagcccugagcuuggcaucaagaaaaagccccgcgaagggaaaggaaauaccacauaccugugggaguuucuccuggaccugcuccaggauaagaauaccugcccuagauauaucaaauggacacagcgggaaaagggcauuuucaagcugguugacucuaaagcuguguccaaacuuugggggaaacacaagaacaaacccgauaugaacuacgagaccaugggacgcgcccugagauauuacuaucaacggggcauccucgcgaaggucgaaggccagcgccugguguaccaguuuaaagacaugccgaagaauauuguugugaucgaugacgauaagagcgagacguguaacgaggaccuugccgggacaaccgacgaaaaaucucuggagagagucucccucagcgcugaaucccugcugaaggccgcuucuagcgugcgguccggaaagaauagcucuccuauuaacugcucccgcgccgagaagggcguggcgagagucguuaauaucacaagccccgggcacgaugccucuagccgguccccuaccaccacagcuucugugagcgccacggcugcuccccgcaccgugagagucgccaugcaagugcccguugugaugacaucccucggacagaaaauuagcaccgucgccgugcagucuguuaacgcgggcgccccucugaucacauccaccagcccgacgacagcuaccucucccaagguggucauccagaccauuccuacagugaugcccgccuccaccgaaaauggggacaagaucacaaugcagccugccaaaauuaucacgauucccgcuacccaacuugcccagugucagcugcaaacaaagagcaaccucaccggauccggcucuaucaauaucgucggcacaccgcuggcggugcgggcucuuaccccuguuagcauugcccaugggacgcccgugaugagacuguccaugccuacccagcaggccucuggacagacacccccucgcgucaucagcgcugugauuaaaggccccgagguuaaguccgaggccguggcuaaaaagcaagaacacgaugucaagacccuccagcugguggaggaaaaaccggccgacgggaacaagacagugacccauguugucguggugagcgcgccuucugccaucgcucugcccgucacgaugaaaacagagggacucgugaccugcgaaaaguga

SEQ ID NO: 1413 - protein, 269 aa, Artificial Sequence
  EMMPRIN__Homo_sapiens__Q54A51
MAAALFVLLGFALLGTHGASGAAGTVFTTVEDLGSKILLTCSLNDSATEVTGHRWLKGGVVLKEDALPGQKTEFKVDSDDQWGEYSCVFLPEPMGTANIQLHGPPRVKAVKSSEHINEGETAMLVCKSESVPPVTDWAWYKITDSEDKALMNGSESRFFVSSSQGRSELHIENLNMEADPGQYRCNGTSSKGSDQAIITLRVRSHLAALWPFLGIVAEVLVLVTIIFIYEKRRKPEDVLDDDDAGSAPLKSSGQHQNDKGKNVRQRNSS

SEQ ID NO: 1414 - RNA, 810 nt, Artificial Sequence
  EMMPRIN__Homo_sapiens__BAC67168
auggcggcugcgcuguucgugcugcugggauucgcgcugcugggcacccacggagccuccggggcugccggcacagucuucacuaccguagaagaccuuggcuccaagauacuccucaccugcuccuugaaugacagcgccacagaggucacagggcaccgcuggcugaaggggggcguggugcugaaggaggacgcgcugcccggccagaaaacggaguucaagguggacuccgacgaccaguggggagaguacuccugcgucuuccuccccgagcccaugggcacggccaacauccagcuccacgggccucccagagugaaggcugugaagucgucagaacacaucaacgagggggagacggccaugcuggucugcaagucagaguccgugccaccugucacugacugggccugguacaagaucacugacucugaggacaaggcccucaugaacggcuccgagagcagguucuucgugaguuccucgcagggccggucagagcuacacauugagaaccugaacauggaggccgaccccggccaguaccggugcaacggcaccagcuccaagggcuccgaccaggccaucaucacgcuccgcgugcgcagccaccuggccgcccucuggcccuuccugggcaucguggcugaggugcuggugcuggucaccaucaucuucaucuacgagaagcgccggaagcccgaggacguccuggaugaugacgacgccggcucugcaccccugaagagcagcgggcagcaccagaaugacaaaggcaagaacguccgccagaggaacucuuccuga

SEQ ID NO: 1415 - RNA, 810 nt, Artificial Sequence
  derived and/or modified sequence opt1 from EMMPRIN__Homo_sapiens__BAC67168
auggccgccgcccuguucgugcuccugggcuucgcccugcucgggacccacggcgccagcggggccgccggcaccgucuucacgaccguggaggaccugggguccaagauccugcugaccugcagccucaacgacuccgcgaccgaggugacgggccaccgcuggcugaagggcggggucgugcucaaggaggacgcccugcccggccagaagaccgaguucaagguggacagcgacgaccaguggggcgaguacuccugcgucuuccugccggagcccauggggaccgccaacauccagcuccacgggccgccccgggugaaggccgucaagagcuccgagcacaucaacgagggcgagaccgcgaugcuggugugcaagagcgaguccgugccgcccgugacggacugggccugguacaagaucaccgacagcgaggacaaggcccugaugaacggcuccgagagccgcuucuucgucuccagcucccaggggcggagcgagcuccacaucgagaaccugaacauggaggccgaccccggccaguaccgcugcaacgggaccuccagcaagggcuccgaccaggccaucaucacccugcgggugcgcagccaccucgcggcccuguggcccuuccugggcaucguggccgagguccucgugcuggugacgaucaucuucaucuacgagaagcggcgcaagcccgaggacguccuggacgacgacgacgccgggagcgcgccccucaaguccagcggccagcaccagaacgacaaggggaagaacgugcggcagcgcaacuccagcuga

SEQ ID NO: 1416 - RNA, 810 nt, Artificial Sequence
  derived and/or modified sequence opt2 from EMMPRIN__Homo_sapiens__BAC67168
auggccgccgcccucuucguccuccucggcuucgcccuccucggcacccacggcgccuccggcgccgccggcaccgucuucaccaccgucgaggaccucggcuccaagauccuccucaccugcucccucaacgacuccgccaccgaggucaccggccaccgcuggcucaagggcggcgucguccucaaggaggacgcccuccccggccagaagaccgaguucaaggucgacuccgacgaccaguggggcgaguacuccugcgucuuccuccccgagcccaugggcaccgccaacauccagcuccacggccccccccgcgucaaggccgucaaguccuccgagcacaucaacgagggcgagaccgccaugcucgucugcaaguccgaguccgucccccccgucaccgacugggccugguacaagaucaccgacuccgaggacaaggcccucaugaacggcuccgagucccgcuucuucgucuccuccucccagggccgcuccgagcuccacaucgagaaccucaacauggaggccgaccccggccaguaccgcugcaacggcaccuccuccaagggcuccgaccaggccaucaucacccuccgcguccgcucccaccucgccgcccucuggcccuuccucggcaucgucgccgagguccucguccucgucaccaucaucuucaucuacgagaagcgccgcaagcccgaggacguccucgacgacgacgacgccggcuccgccccccucaaguccuccggccagcaccagaacgacaagggcaagaacguccgccagcgcaacuccuccuga

SEQ ID NO: 1417 - RNA, 810 nt, Artificial Sequence
  derived and/or modified sequence opt3 from EMMPRIN__Homo_sapiens__BAC67168
auggccgcugcacuguucgugcuccuuggauuugcccuguuggggacccacggagcgagcggugcugccggcacagucuucacuacgguugaggacuuaggguccaagauccugcuaaccugcucucucaacgauucagcaacagaagugacuggacauagauggcugaaaggcgguguagugcuuaaggaggacgcccugcccgggcagaaaaccgaauuuaaggucgauagugacgaucaauggggagaguacagcuguguguucuugccugaaccaaugggcacagcuaauauucagcuccacggcccgcccaggguuaaagcagugaaguccucugagcauauaaacgagggggaaaccgccaugcuggucugcaagucggagucagugccuccaguaacugacugggcuugguauaaaaucacagauagcgaagacaaggcccugaugaauggaagugagucccgguuuuucguuucuagcucccagggucgcucagagcuccacauugaaaacuuaaauauggaggcggaucccggccaguaccgauguaacgggaccaguagcaaaggaucugaccaagcaaucauuacgcugcgugugagaucccaucuugccgcuuuguggccuuuucugggcaucgucgccgaagugcuagugcucgucacuauaaucuucauuuaugagaagaggcggaaaccagaagauguucuggacgaugacgacgcagguucagcuccccuuaagagcagugggcagcaccagaaugauaagggcaaaaacgugcgccagagaaauucuuccuga

SEQ ID NO: 1418 - RNA, 810 nt, Artificial Sequence
  derived and/or modified sequence opt4 from EMMPRIN__Homo_sapiens__BAC67168
auggccgccgcccuguucgugcugcugggcuucgcccugcugggcacccacggcgccagcggcgccgccggcaccguguucaccaccguggaggaccugggcagcaagauccugcugaccugcagccugaacgacagcgccaccgaggugaccggccacagauggcugaagggcggcguggugcugaaggaggacgcccugcccggccagaagaccgaguucaagguggacagcgacgaccaguggggcgaguacagcugcguguuccugcccgagcccaugggcaccgccaacauccagcugcacggcccccccagagugaaggccgugaagagcagcgagcacaucaacgagggcgagaccgccaugcuggugugcaagagcgagagcgugccccccgugaccgacugggccugguacaagaucaccgacagcgaggacaaggcccugaugaacggcagcgagagcagauucuucgugagcagcagccagggcagaagcgagcugcacaucgagaaccugaacauggaggccgaccccggccaguacagaugcaacggcaccagcagcaagggcagcgaccaggccaucaucacccugagagugagaagccaccuggccgcccuguggcccuuccugggcaucguggccgaggugcuggugcuggugaccaucaucuucaucuacgagaagagaagaaagcccgaggacgugcuggacgacgacgacgccggcagcgccccccugaagagcagcggccagcaccagaacgacaagggcaagaacgugagacagagaaacagcagcuga

SEQ ID NO: 1419 - RNA, 810 nt, Artificial Sequence
  derived and/or modified sequence opt5 from EMMPRIN__Homo_sapiens__BAC67168
auggccgccgcccuguucgugcuccugggauuugcgcuucuggggacccacggagcuagcggcgccgccgggacagucuucacgaccguugaggaccucggauccaagauccugcuuacaugcucucugaacgauagcgcuaccgaagugacaggccaucgguggcucaaagggggagugguccugaaggaggacgcccugcccggccagaaaaccgaauuuaagguggauuccgacgaucaauggggcgaguacucuuguguuuuccucccugaaccgauggggacagcuaauauucagcugcacggacccccucgggugaaagccgucaagagcuccgagcauaucaacgagggcgaaaccgcgaugcuugugugcaagucugagagcguucccccugugacggacugggccugguauaaaauuaccgauuccgaagacaaggcucugaugaaugggagcgagucucgcuuuuucgucuccagcucucagggaagauccgagcuccacaucgaaaaccugaauauggaggccgaucccggccaguaccgguguaacgggacaagcucuaaaggauccgaccaagcuauuaucacccuucgcgugagaagccaucuggccgcgcucuggccuuuucugggcaucguggccgaaguccugguucucgugacaauuaucuucauuuaugagaagcggcgcaaaccggaagaugugcuggacgaugacgacgcuggcuccgcuccccuuaagucuagcgggcagcaccagaaugauaagggcaaaaacgucagacagagaaauuccagcuga

SEQ ID NO: 1420 - protein, 314 aa, Artificial Sequence
  EpCam__Homo_sapiens__P16422
MAPPQVLAFGLLLAAATATFAAAQEECVCENYKLAVNCFVNNNRQCQCTSVGAQNTVICSKLAAKCLVMKAEMNGSKLGRRAKPEGALQNNDGLYDPDCDESGLFKAKQCNGTSMCWCVNTAGVRRTDKDTEITCSERVRTYWIIIELKHKAREKPYDSKSLRTALQKEITTRYQLDPKFITSILYENNVITIDLVQNSSQKTQNDVDIADVAYYFEKDVKGESLFHSKKMDLTVNGEQLDLDPGQTLIYYVDEKAPEFSMQGLKAGVIAVIVVVVIAVVAGIVVLVISRKKRMAKYEKAEIKEMGEMHRELNA

SEQ ID NO: 1421 - RNA, 945 nt, Artificial Sequence
  EpCam__Homo_sapiens__AAA35723
auggcgcccccgcagguccucgcguucgggcuucugcuugccgcggcgacggcgacuuuugccgcagcucaggaagaaugugucugugaaaacuacaagcuggccguaaacugcuuugugaauaauaaucgucaaugccaguguacuucaguuggugcacaaaauacugucauuugcucaaagcuggcugccaaauguuuggugaugaaggcagaaaugaauggcucaaaacuugggagaagagcaaaaccugaaggggcccuccagaacaaugaugggcuuuaugauccugacugcgaugagagcgggcucuuuaaggccaagcagugcaacggcaccuccaugugcuggugugugaacacugcuggggucagaagaacagacaaggacacugaaauaaccugcucugagcgagugagaaccuacuggaucaucauugaacuaaaacacaaagcaagagaaaaaccuuaugauaguaaaaguuugcggacugcacuucagaaggagaucacaacgcguuaucaacuggauccaaaauuuaucacgaguauuuuguaugagaauaauguuaucacuauugaucugguucaaaauucuucucaaaaaacucagaaugauguggacauagcugauguggcuuauuauuuugaaaaagauguuaaaggugaauccuuguuucauucuaagaaaauggaccugacaguaaauggggaacaacuggaucuggauccuggucaaacuuuaauuuauuauguugaugaaaaagcaccugaauucucaaugcagggucuaaaagcugguguuauugcuguuauugugguuguggugauagcaguuguugcuggaauuguugugcugguuauuuccagaaagaagagaauggcaaaguaugagaaggcugagauaaaggagaugggugagaugcauagggaacucaaugcauaa

SEQ ID NO: 1422 - RNA, 945 nt, Artificial Sequence
  derived and/or modified sequence opt1 from EpCam__Homo_sapiens__AAA35723
auggccccgccccaggugcuggccuucggccuccugcuggcggccgccaccgccaccuucgccgcggcccaggaggagugcgucugcgagaacuacaagcucgccgugaacugcuucgugaacaacaaccgccagugccagugcacgagcgucggggcccagaacaccgugaucugcuccaagcuggcggccaagugccuggugaugaaggccgagaugaacggcagcaagcucgggcggcgcgccaagcccgagggcgcccugcagaacaacgacgggcuguacgaccccgacugcgacgaguccggccucuucaaggcgaagcagugcaacggcaccagcaugugcuggugcgucaacaccgccggggugcggcgcacggacaaggacaccgagaucacgugcuccgagcgggugcgcaccuacuggaucaucaucgagcugaagcacaaggcccgggagaagcccuacgacagcaagucccugcgcaccgcccuccagaaggagaucaccacccgguaccagcuggacccgaaguucaucaccagcauccuguacgagaacaacgucaucacgaucgaccucgugcagaacuccagccagaagacccagaacgacguggacaucgccgacgucgcguacuacuucgagaaggacgugaagggcgagucccuguuccacagcaagaagauggaccugaccgugaacggggagcagcucgaccuggaccccggccagacccugaucuacuacgucgacgagaaggcccccgaguucuccaugcaggggcucaaggccggcgugaucgccgugaucgucgugguggucaucgccgugguggcgggcaucgucgugcuggucaucagccgcaagaagcggauggccaaguacgagaaggccgagaucaaggagaugggggagaugcaccgcgagcugaacgccuga

SEQ ID NO: 1423 - RNA, 945 nt, Artificial Sequence
  derived and/or modified sequence opt2 from EpCam__Homo_sapiens__AAA35723
auggcccccccccagguccucgccuucggccuccuccucgccgccgccaccgccaccuucgccgccgcccaggaggagugcgucugcgagaacuacaagcucgccgucaacugcuucgucaacaacaaccgccagugccagugcaccuccgucggcgcccagaacaccgucaucugcuccaagcucgccgccaagugccucgucaugaaggccgagaugaacggcuccaagcucggccgccgcgccaagcccgagggcgcccuccagaacaacgacggccucuacgaccccgacugcgacgaguccggccucuucaaggccaagcagugcaacggcaccuccaugugcuggugcgucaacaccgccggcguccgccgcaccgacaaggacaccgagaucaccugcuccgagcgcguccgcaccuacuggaucaucaucgagcucaagcacaaggcccgcgagaagcccuacgacuccaagucccuccgcaccgcccuccagaaggagaucaccacccgcuaccagcucgaccccaaguucaucaccuccauccucuacgagaacaacgucaucaccaucgaccucguccagaacuccucccagaagacccagaacgacgucgacaucgccgacgucgccuacuacuucgagaaggacgucaagggcgagucccucuuccacuccaagaagauggaccucaccgucaacggcgagcagcucgaccucgaccccggccagacccucaucuacuacgucgacgagaaggcccccgaguucuccaugcagggccucaaggccggcgucaucgccgucaucgucgucgucgucaucgccgucgucgccggcaucgucguccucgucaucucccgcaagaagcgcauggccaaguacgagaaggccgagaucaaggagaugggcgagaugcaccgcgagcucaacgccuga

SEQ ID NO: 1424 - RNA, 945 nt, Artificial Sequence
  derived and/or modified sequence opt3 from EpCam__Homo_sapiens__AAA35723
auggcucccccucaggugcuggccuucggccuccuucuggcagccgcgaccgcuacauuugccgcagcccaagaggaaugcgucugugagaacuacaaguuggcuguuaauugcuucgugaacaauaacagacagugucagugcacuagcguaggggcacagaauacggugaucuguuccaaauuagccgcuaagugccuggucaugaaagccgaaaugaacggaucuaagcuagguaggcgggcgaaaccagagggcgcacuccaaaauaacgacgggcuguaugauccggacugugaugaaucaggacuuuuuaaggccaagcagugcaauggcaccaguauguguuggugcgugaacacagcugguguucgccgaacugacaaagauaccgagauuacauguagcgagcgugugagaaccuacuggauaaucauugaacugaagcacaaagccagggagaagcccuaugacuccaaaucuuugcggacugcacuccagaaggaaaucacaacccgcuaccagcuggauccuaaguucauuacgucgauccuguaugagaauaacgucauaacuaucgaccucgugcaaaauucaagccagaaaacccagaacgauguagacauugcugauguugccuacuauuuugagaaggacgugaaaggggaaaguuuauuccauuccaagaaaauggaucugacagucaauggagagcagcuugacuuggacccaggccaaacucugaucuacuacguggaugaaaaggcgcccgaguuuucuaugcagggccuaaaagccggggugauugcagucaucguugugguagugauagcugucguggccggaauuguugugcucgucaucagcagaaagaagaggauggcuaaauaugaaaaggccgagauuaaagagaugggugaaaugcaccgggagcugaacgcauga

SEQ ID NO: 1425 - RNA, 945 nt, Artificial Sequence
  derived and/or modified sequence opt4 from EpCam__Homo_sapiens__AAA35723
auggcccccccccaggugcuggccuucggccugcugcuggccgccgccaccgccaccuucgccgccgcccaggaggagugcgugugcgagaacuacaagcuggccgugaacugcuucgugaacaacaacagacagugccagugcaccagcgugggcgcccagaacaccgugaucugcagcaagcuggccgccaagugccuggugaugaaggccgagaugaacggcagcaagcugggcagaagagccaagcccgagggcgcccugcagaacaacgacggccuguacgaccccgacugcgacgagagcggccuguucaaggccaagcagugcaacggcaccagcaugugcuggugcgugaacaccgccggcgugagaagaaccgacaaggacaccgagaucaccugcagcgagagagugagaaccuacuggaucaucaucgagcugaagcacaaggccagagagaagcccuacgacagcaagagccugagaaccgcccugcagaaggagaucaccaccagauaccagcuggaccccaaguucaucaccagcauccuguacgagaacaacgugaucaccaucgaccuggugcagaacagcagccagaagacccagaacgacguggacaucgccgacguggccuacuacuucgagaaggacgugaagggcgagagccuguuccacagcaagaagauggaccugaccgugaacggcgagcagcuggaccuggaccccggccagacccugaucuacuacguggacgagaaggcccccgaguucagcaugcagggccugaaggccggcgugaucgccgugaucguggugguggugaucgccgugguggccggcaucguggugcuggugaucagcagaaagaagagaauggccaaguacgagaaggccgagaucaaggagaugggcgagaugcacagagagcugaacgccuga

SEQ ID NO: 1426 - RNA, 945 nt, Artificial Sequence
  derived and/or modified sequence opt5 from EpCam__Homo_sapiens__AAA35723
auggcucccccucaggugcuggccuucggccuccugcuugccgcggcuaccgccacauuugccgcugcccaagaggaaugcgucugugagaacuacaagcuggcuguuaauugcuucgugaacaauaacagacagugucagugcacgagcgugggggcccagaauaccgucaucuguuccaaacucgcggccaagugccuggugaugaaagcugaaaugaacggaucuaaacuuggccggcgcgccaagccggagggggcucugcaaaauaacgacggacucuaugaucccgacugugaugaaagcggccuguuuaaggccaagcagugcaaugggacauccauguguuggugcguuaacaccgcgggagugagacggacagacaaagauaccgagauuacauguucugagcgcgucagaaccuacuggaucauuaucgaacugaagcacaaagcccgggagaagccuuaugacagcaaaucccuccgcacggcucugcagaaggaaauuaccacaagauaccagcuugaucccaaguucaucaccucuauccuguaugagaauaacgugauuacaaucgaccucguucaaaauagcucccagaaaacccagaacgauguggacauugccgaugucgcuuacuauuuugagaaggacgugaaaggcgaaagccuguuccauucuaagaaaauggaucuuacggugaauggcgagcagcuggaccucgacccugggcaaacacugaucuacuacgucgaugaaaaggcccccgaguuuuccaugcagggacugaaagccggcguuauugcugugaucguggucgugguuauugcgguggucgccgggaucgugguucucgugaucagccggaagaagcgcauggcuaaauaugaaaaggccgagauuaaagagaugggagaaaugcacagagagcugaacgccuga

SEQ ID NO: 1427 - protein, 976 aa, Artificial Sequence
  EphA2__Homo_sapiens__P29317
MELQAARACFALLWGCALAAAAAAQGKEVVLLDFAAAGGELGWLTHPYGKGWDLMQNIMNDMPIYMYSVCNVMSGDQDNWLRTNWVYRGEAERIFIELKFTVRDCNSFPGGASSCKETFNLYYAESDLDYGTNFQKRLFTKIDTIAPDEITVSSDFEARHVKLNVEERSVGPLTRKGFYLAFQDIGACVALLSVRVYYKKCPELLQGLAHFPETIAGSDAPSLATVAGTCVDHAVVPPGGEEPRMHCAVDGEWLVPIGQCLCQAGYEKVEDACQACSPGFFKFEASESPCLECPEHTLPSPEGATSCECEEGFFRAPQDPASMPCTRPPSAPHYLTAVGMGAKVELRWTPPQDSGGREDIVYSVTCEQCWPESGECGPCEASVRYSEPPHGLTRTSVTVSDLEPHMNYTFTVEARNGVSGLVTSRSFRTASVSINQTEPPKVRLEGRSTTSLSVSWSIPPPQQSRVWKYEVTYRKKGDSNSYNVRRTEGFSVTLDDLAPDTTYLVQVQALTQEGQGAGSKVHEFQTLSPEGSGNLAVIGGVAVGVVLLLVLAGVGFFIHRRRKNQRARQSPEDVYFSKSEQLKPLKTYVDPHTYEDPNQAVLKFTTEIHPSCVTRQKVIGAGEFGEVYKGMLKTSSGKKEVPVAIKTLKAGYTEKQRVDFLGEAGIMGQFSHHNIIRLEGVISKYKPMMIITEYMENGALDKFLREKDGEFSVLQLVGMLRGIAAGMKYLANMNYVHRDLAARNILVNSNLVCKVSDFGLSRVLEDDPEATYTTSGGKIPIRWTAPEAISYRKFTSASDVWSFGIVMWEVMTYGERPYWELSNHEVMKAINDGFRLPTPMDCPSAIYQLMMQCWQQERARRPKFADIVSILDKLIRAPDSLKTLADFDPRVSIRLPSTSGSEGVPFRTVSEWLESIKMQQYTEHFMAAGYTAIEKVVQMTNDDIKRIGVRLPGHQKRIAYSLLGLKDQVNTVGIPI

SEQ ID NO: 1428 - RNA, 2931 nt, Artificial Sequence
  EphA2__Homo_sapiens__CCDS169.1
auggagcuccaggcagcccgcgccugcuucgcccugcuguggggcugugcgcuggccgcggccgcggcggcgcagggcaaggaagugguacugcuggacuuugcugcagcuggaggggagcucggcuggcucacacacccguauggcaaagggugggaccugaugcagaacaucaugaaugacaugccgaucuacauguacuccgugugcaacgugaugucuggcgaccaggacaacuggcuccgcaccaacuggguguaccgaggagaggcugagcguaucuucauugagcucaaguuuacuguacgugacugcaacagcuucccugguggcgccagcuccugcaaggagacuuucaaccucuacuaugccgagucggaccuggacuacggcaccaacuuccagaagcgccuguucaccaagauugacaccauugcgcccgaugagaucaccgucagcagcgacuucgaggcacgccacgugaagcugaacguggaggagcgcuccguggggccgcucacccgcaaaggcuucuaccuggccuuccaggauaucggugccuguguggcgcugcucuccguccgugucuacuacaagaagugccccgagcugcugcagggccuggcccacuucccugagaccaucgccggcucugaugcaccuucccuggccacuguggccggcaccuguguggaccaugccguggugccaccggggggugaagagccccguaugcacugugcaguggauggcgaguggcuggugcccauugggcagugccugugccaggcaggcuacgagaagguggaggaugccugccaggccugcucgccuggauuuuuuaaguuugaggcaucugagagccccugcuuggagugcccugagcacacgcugccauccccugagggugccaccuccugcgagugugaggaaggcuucuuccgggcaccucaggacccagcgucgaugccuugcacacgaccccccuccgccccacacuaccucacagccgugggcaugggugccaagguggagcugcgcuggacgcccccucaggacagcgggggccgcgaggacauugucuacagcgucaccugcgaacagugcuggcccgagucuggggaaugcgggccgugugaggccagugugcgcuacucggagccuccucacggacugacccgcaccagugugacagugagcgaccuggagccccacaugaacuacaccuucaccguggaggcccgcaauggcgucucaggccugguaaccagccgcagcuuccguacugccagugucagcaucaaccagacagagccccccaaggugaggcuggagggccgcagcaccaccucgcuuagcgucuccuggagcauccccccgccgcagcagagccgaguguggaaguacgaggucacuuaccgcaagaagggagacuccaacagcuacaaugugcgccgcaccgaggguuucuccgugacccuggacgaccuggccccagacaccaccuaccugguccaggugcaggcacugacgcaggagggccagggggccggcagcaaggugcacgaauuccagacgcuguccccggagggaucuggcaacuuggcggugauuggcggcguggcugucggugugguccugcuucuggugcuggcaggaguuggcuucuuuauccaccgcaggaggaagaaccagcgugcccgccaguccccggaggacguuuacuucuccaagucagaacaacugaagccccugaagacauacguggacccccacacauaugaggaccccaaccaggcuguguugaaguucacuaccgagauccauccauccugugucacucggcagaaggugaucggagcaggagaguuuggggagguguacaagggcaugcugaagacauccucggggaagaaggaggugccgguggccaucaagacgcugaaagccggcuacacagagaagcagcgaguggacuuccucggcgaggccggcaucaugggccaguucagccaccacaacaucauccgccuagagggcgucaucuccaaauacaagcccaugaugaucaucacugaguacauggagaauggggcccuggacaaguuccuucgggagaaggauggcgaguucagcgugcugcagcuggugggcaugcugcggggcaucgcagcuggcaugaaguaccuggccaacaugaacuaugugcaccgugaccuggcugcccgcaacauccucgucaacagcaaccuggucugcaaggugucugacuuuggccugucccgcgugcuggaggacgaccccgaggccaccuacaccaccaguggcggcaagauccccauccgcuggaccgccccggaggccauuuccuaccggaaguucaccucugccagcgacguguggagcuuuggcauugucaugugggaggugaugaccuauggcgagcggcccuacugggaguuguccaaccacgaggugaugaaagccaucaaugauggcuuccggcuccccacacccauggacugccccuccgccaucuaccagcucaugaugcagugcuggcagcaggagcgugcccgccgccccaaguucgcugacaucgucagcauccuggacaagcucauucgugccccugacucccucaagacccuggcugacuuugacccccgcgugucuauccggcuccccagcacgagcggcucggagggggugcccuuccgcacgguguccgaguggcuggaguccaucaagaugcagcaguauacggagcacuucauggcggccggcuacacugccaucgagaagguggugcagaugaccaacgacgacaucaagaggauuggggugcggcugcccggccaccagaagcgcaucgccuacagccugcugggacucaaggaccaggugaacacuguggggauccccaucuga

SEQ ID NO: 1429 - RNA, 2931 nt, Artificial Sequence
  derived and/or modified sequence opt1 from EphA2__Homo_sapiens__CCDS169.1
auggagcugcaggccgcccgcgcgugcuucgcccuccuguggggcugcgcccuggccgccgcggccgccgcccaggggaaggaggugguccuccuggacuucgcggccgccggcggggagcugggcuggcucacccaccccuacgggaagggcugggaccugaugcagaacaucaugaacgacaugccgaucuacauguacagcgugugcaacgugauguccggcgaccaggacaacuggcugcggaccaacugggucuaccgcggggaggccgagcggaucuucaucgagcucaaguucacggugcgcgacugcaacagcuuccccggcggggccuccagcugcaaggagaccuucaaccuguacuacgcggaguccgaccuggacuacggcaccaacuuccagaagcgccucuucaccaagaucgacacgaucgcccccgacgagaucaccgugagcuccgacuucgaggcccgccacgucaagcugaacguggaggagcggagcguggggccccugacccgcaagggcuucuaccucgccuuccaggacaucggcgccugcgucgcgcugcuguccgugcggguguacuacaagaagugcccggagcuccugcaggggcuggcccacuuccccgagaccaucgccggcagcgacgcccccucccucgccacggucgcggggaccugcguggaccacgccguggugcccccgggcggcgaggagccccgcaugcacugcgccguggacggggaguggcuggugcccaucggccagugccugugccaggccggguacgagaaggucgaggacgccugccaggcgugcagccccggcuucuucaaguucgaggccuccgagagcccgugccucgagugccccgagcacacccugcccucccccgagggggccaccagcugcgagugcgaggagggcuucuuccgggccccgcaggaccccgcguccaugcccugcacgcggcccccgagcgcgccccacuaccugaccgccgugggcaugggggccaagguggagcuccgguggaccccgccccaggacuccggcgggcgcgaggacaucgucuacagcgugaccugcgagcagugcuggcccgagagcggcgagugcgggcccugcgaggccuccgugcgguacagcgagccgccccacggccugacgcgcaccuccgucaccgugagcgaccuggagccccacaugaacuacaccuucacggucgaggcccggaacggcguguccgggcucgugaccagccgcuccuuccggaccgccagcgucuccaucaaccagaccgagccgcccaaggugcgccuggagggccggagcacgaccucccugagcguguccuggagcaucccgccgccccagcagucccgcgucuggaaguacgaggugaccuaccgcaagaagggggacagcaacuccuacaacgugcggcgcaccgagggcuucagcgucacgcucgacgaccuggcccccgacaccaccuaccugguccaggugcaggcccucacccaggaggggcagggcgccggcuccaagguccacgaguuccagacgcugagccccgaggggagcggcaaccuggcggugaucgggggcguggccgucggcguggugcuccugcugguccucgccggggugggcuucuucauccaccggcgccggaagaaccagcgcgcccggcagucccccgaggacguguacuucagcaaguccgagcagcugaagccccugaagaccuacgucgacccccacaccuacgaggaccccaaccaggccgugcucaaguucaccacggagauccaccccagcugcgugacccgccagaaggucaucggggcgggcgaguucggggagguguacaagggcaugcugaagaccuccagcggcaagaaggaggugcccgucgccaucaagacccugaaggccggguacaccgagaagcagcggguggacuuccucggcgaggccgggaucaugggccaguucucccaccacaacaucauccgccuggagggggugaucagcaaguacaagcccaugaugaucaucacggaguacauggagaacggcgcgcuggacaaguuccugcgggagaaggacggcgaguucuccguccuccagcugguggggaugcugcgcggcaucgccgccgggaugaaguaccucgccaacaugaacuacgugcaccgggaccuggccgcgcgcaacauccuggucaacagcaaccucgugugcaagguguccgacuucggccugagccggguccuggaggacgacccggaggccaccuacaccaccuccgggggcaagauccccauccgcuggacggcccccgaggccaucagcuaccggaaguucaccuccgccagcgacgugugguccuucggcaucgugaugugggaggucaugaccuacggggagcgccccuacugggagcucagcaaccacgaggugaugaaggcgaucaacgacggcuuccggcugccgacccccauggacugccccagcgccaucuaccagcugaugaugcagugcuggcagcaggagcgcgcccgccggcccaaguucgccgacaucguguccauccucgacaagcugauccgcgccccggacagccugaagacgcucgcggacuucgacccccgggucuccauccgccugcccagcaccuccgggagcgagggcgugcccuuccggaccguguccgaguggcuggagagcaucaagaugcagcaguacaccgagcacuucauggccgccggguacacggccaucgagaaggucgugcagaugaccaacgacgacaucaagcgcaucggcgugcggcucccgggccaccagaagcgcaucgcguacucccugcuggggcucaaggaccaggucaacaccgugggcauccccaucuga

SEQ ID NO: 1430 - RNA, 2931 nt, Artificial Sequence
  derived and/or modified sequence opt2 from EphA2__Homo_sapiens__CCDS169.1
auggagcuccaggccgcccgcgccugcuucgcccuccucuggggcugcgcccucgccgccgccgccgccgcccagggcaaggaggucguccuccucgacuucgccgccgccggcggcgagcucggcuggcucacccaccccuacggcaagggcugggaccucaugcagaacaucaugaacgacaugcccaucuacauguacuccgucugcaacgucauguccggcgaccaggacaacuggcuccgcaccaacugggucuaccgcggcgaggccgagcgcaucuucaucgagcucaaguucaccguccgcgacugcaacuccuuccccggcggcgccuccuccugcaaggagaccuucaaccucuacuacgccgaguccgaccucgacuacggcaccaacuuccagaagcgccucuucaccaagaucgacaccaucgcccccgacgagaucaccgucuccuccgacuucgaggcccgccacgucaagcucaacgucgaggagcgcuccgucggcccccucacccgcaagggcuucuaccucgccuuccaggacaucggcgccugcgucgcccuccucuccguccgcgucuacuacaagaagugccccgagcuccuccagggccucgcccacuuccccgagaccaucgccggcuccgacgcccccucccucgccaccgucgccggcaccugcgucgaccacgccgucgucccccccggcggcgaggagccccgcaugcacugcgccgucgacggcgaguggcucguccccaucggccagugccucugccaggccggcuacgagaaggucgaggacgccugccaggccugcucccccggcuucuucaaguucgaggccuccgagucccccugccucgagugccccgagcacacccuccccucccccgagggcgccaccuccugcgagugcgaggagggcuucuuccgcgccccccaggaccccgccuccaugcccugcacccgcccccccuccgccccccacuaccucaccgccgucggcaugggcgccaaggucgagcuccgcuggacccccccccaggacuccggcggccgcgaggacaucgucuacuccgucaccugcgagcagugcuggcccgaguccggcgagugcggccccugcgaggccuccguccgcuacuccgagcccccccacggccucacccgcaccuccgucaccgucuccgaccucgagccccacaugaacuacaccuucaccgucgaggcccgcaacggcgucuccggccucgucaccucccgcuccuuccgcaccgccuccgucuccaucaaccagaccgagccccccaagguccgccucgagggccgcuccaccaccucccucuccgucuccugguccaucccccccccccagcagucccgcgucuggaaguacgaggucaccuaccgcaagaagggcgacuccaacuccuacaacguccgccgcaccgagggcuucuccgucacccucgacgaccucgcccccgacaccaccuaccucguccagguccaggcccucacccaggagggccagggcgccggcuccaagguccacgaguuccagacccucucccccgagggcuccggcaaccucgccgucaucggcggcgucgccgucggcgucguccuccuccucguccucgccggcgucggcuucuucauccaccgccgccgcaagaaccagcgcgcccgccagucccccgaggacgucuacuucuccaaguccgagcagcucaagccccucaagaccuacgucgacccccacaccuacgaggaccccaaccaggccguccucaaguucaccaccgagauccaccccuccugcgucacccgccagaaggucaucggcgccggcgaguucggcgaggucuacaagggcaugcucaagaccuccuccggcaagaaggagguccccgucgccaucaagacccucaaggccggcuacaccgagaagcagcgcgucgacuuccucggcgaggccggcaucaugggccaguucucccaccacaacaucauccgccucgagggcgucaucuccaaguacaagcccaugaugaucaucaccgaguacauggagaacggcgcccucgacaaguuccuccgcgagaaggacggcgaguucuccguccuccagcucgucggcaugcuccgcggcaucgccgccggcaugaaguaccucgccaacaugaacuacguccaccgcgaccucgccgcccgcaacauccucgucaacuccaaccucgucugcaaggucuccgacuucggccucucccgcguccucgaggacgaccccgaggccaccuacaccaccuccggcggcaagauccccauccgcuggaccgcccccgaggccaucuccuaccgcaaguucaccuccgccuccgacgucugguccuucggcaucgucaugugggaggucaugaccuacggcgagcgccccuacugggagcucuccaaccacgaggucaugaaggccaucaacgacggcuuccgccuccccacccccauggacugccccuccgccaucuaccagcucaugaugcagugcuggcagcaggagcgcgcccgccgccccaaguucgccgacaucgucuccauccucgacaagcucauccgcgcccccgacucccucaagacccucgccgacuucgacccccgcgucuccauccgccuccccuccaccuccggcuccgagggcguccccuuccgcaccgucuccgaguggcucgaguccaucaagaugcagcaguacaccgagcacuucauggccgccggcuacaccgccaucgagaaggucguccagaugaccaacgacgacaucaagcgcaucggcguccgccuccccggccaccagaagcgcaucgccuacucccuccucggccucaaggaccaggucaacaccgucggcauccccaucuga

SEQ ID NO: 1431 - RNA, 2931 nt, Artificial Sequence
  derived and/or modified sequence opt3 from EphA2__Homo_sapiens__CCDS169.1
auggagcugcaggccgcuagagcaugcuucgcccuccuuuggggcugugcgcuggcugccgcagccgcugcacaagggaaggaaguggucuuguuagacuuugccgcugccggaggugagcugggcuggcuaacccaccccuacgggaaaggaugggaucucaugcagaacaucaugaaugacaugccuauuuauauguacagcguuugcaacgugauguccggcgaucaggacaauuggcugaggacaaacuggguauaucggggugaagcggagcgcauauucaucgaacuuaaguuuacugugcgagauuguaauucuuucccagggggagcaucaaguugcaaagagacguuuaaccuguacuaugccgagagcgacuuggauuacggcaccaauuuccagaagcgucucuuuacaaaaauugacacuaucgcuccggaugaaauuaccgucuccucugacuucgaggccagacaugugaagcugaacguugaagagaggucggugggcccccugacacggaagggguuuuaucucgcauuccaagauaucggagcuugugucgccuuacugucagugcgcguauacuacaaaaagugcccugagcuuuugcagggucuggcgcacuuuccagaaaccauagccggcagcgacgcacccagucuagcuacuguugccgggacauguguggaucaugcugucgugccuccaggaggcgaggaacccagaaugcacugcgccguggacggugaguggcucgucccuaucgggcagugucugugccaggcaggauaugaaaaaguugaggacgccugucaagccugcuccccaggcuucuuuaaguucgaggcgucugaaagcccgugccuugagugucccgaacauacccugccuuccccagagggcgcaacgucaugcgaaugugaggagggguucuuuagggcuccccaggauccugcuaguaugccaugcacucggcccccgagcgccccucacuacuugaccgcagugggaaugggugccaaaguagaacuccgcuggacacccccacaggacucuggcgggcgagaggauauuguguauuccgucacuugugaacagugcuggccugagucaggagaauguggccccugcgaggcuagcgugagauacagugagccaccccacggucugaccaggacaucuguuaccguguccgacuuagaaccucauaugaauuauacguucacugucgaggcccggaacggggugagcggccugguaacaucgcguucuuuucgcaccgcauccguuucaaucaaucaaacugaaccaccgaaggugagacucgagggaaggaguacaaccagccuuuccgucucuuggagcauucccccuccacagcagucacggguguggaaguacgaggucacguaucgcaaaaagggcgauaguaacuccuacaaugugcgaagaaccgaaggguucagcguuacacuggacgauuuggcgcccgacacuaccuaccuagugcaaguacaggcucugacacaggagggacagggugccggcucuaaaguccacgaauuucaaacucucucaccugaggggaguggaaaccuggcagugaucggcgguguugccgugggggucgugcuucuguugguacucgcuggcgugggauucuuuauacauaggcggcgcaagaaucagagagccaggcagagcccagaagauguuuauuucuccaaaucugagcagcugaagcccuuaaaaaccuacgucgacccgcacacauaugaggauccuaaccaagcagugcugaaguuuaccacugaaauucacccaucgugugugacgcgucagaaggucaucggcgcuggggaguucggagaaguuuacaaagguaugcuaaagacaagcuccggcaaaaaggaggugcccguggccauuaaaacccucaaggcgggguauacugaaaagcagcggguagacuuucugggagaggccggcaucaugggucaguucucacaucacaacaucauucgacuugagggggucauaaguaaauacaagccuaugaugaucauuaccgaauauauggagaauggcgcuuuggacaaauuucugagagaaaaggauggagaguucucugugcuccaacugguuggcaugcuuagggggaucgcagccggaaugaaauaccuggcuaacaugaauuacgugcaucgcgacuuggccgcacggaacauacucgucaauagcaaccuggugugcaagguuuccgauuucggcuuaucaagagugcuggaagacgaucccgaggcgacauauaccacuagcggugggaagauuccaaucagguggacagccccugaggcuaucucuuaccgcaaauuuacguccgccagugacguauggagcuucggaauugucaugugggaagugaugaccuauggcgagcgacccuacugggaacuaucuaaucacgaggugaugaaggcaaucaacgaugguuuucggcucccaacuccgauggacuguccuuccgcuauuuaucagcugaugaugcagugcuggcagcaagagcgugccagaaggcccaaauucgcagauauagucucaauccuugacaaguugauucgcgccccagauagucugaaaacacucgcugacuuugauccccggguuagcaucagacugccuucgaccuccggcucugaaggggugccauucaggacaguaagcgagugguuagaaucaaucaagaugcagcaguacacugagcauuuuauggcggccggauauaccgcaauugaaaaggugguccaaaugacgaaugacgacauaaaacgaaucggcgugcgccugcccgggcaccagaagcggauugcuuacagucuuuugggacucaaagaucagguuaacaccgugggcaucccuauuuga

SEQ ID NO: 1432 - RNA, 2931 nt, Artificial Sequence
  derived and/or modified sequence opt4 from EphA2__Homo_sapiens__CCDS169.1
auggagcugcaggccgccagagccugcuucgcccugcuguggggcugcgcccuggccgccgccgccgccgcccagggcaaggagguggugcugcuggacuucgccgccgccggcggcgagcugggcuggcugacccaccccuacggcaagggcugggaccugaugcagaacaucaugaacgacaugcccaucuacauguacagcgugugcaacgugaugagcggcgaccaggacaacuggcugagaaccaacuggguguacagaggcgaggccgagagaaucuucaucgagcugaaguucaccgugagagacugcaacagcuuccccggcggcgccagcagcugcaaggagaccuucaaccuguacuacgccgagagcgaccuggacuacggcaccaacuuccagaagagacuguucaccaagaucgacaccaucgcccccgacgagaucaccgugagcagcgacuucgaggccagacacgugaagcugaacguggaggagagaagcgugggcccccugaccagaaagggcuucuaccuggccuuccaggacaucggcgccugcguggcccugcugagcgugagaguguacuacaagaagugccccgagcugcugcagggccuggcccacuuccccgagaccaucgccggcagcgacgcccccagccuggccaccguggccggcaccugcguggaccacgccguggugccccccggcggcgaggagcccagaaugcacugcgccguggacggcgaguggcuggugcccaucggccagugccugugccaggccggcuacgagaagguggaggacgccugccaggccugcagccccggcuucuucaaguucgaggccagcgagagccccugccuggagugccccgagcacacccugcccagccccgagggcgccaccagcugcgagugcgaggagggcuucuucagagccccccaggaccccgccagcaugcccugcaccagaccccccagcgccccccacuaccugaccgccgugggcaugggcgccaagguggagcugagauggacccccccccaggacagcggcggcagagaggacaucguguacagcgugaccugcgagcagugcuggcccgagagcggcgagugcggccccugcgaggccagcgugagauacagcgagcccccccacggccugaccagaaccagcgugaccgugagcgaccuggagccccacaugaacuacaccuucaccguggaggccagaaacggcgugagcggccuggugaccagcagaagcuucagaaccgccagcgugagcaucaaccagaccgagccccccaaggugagacuggagggcagaagcaccaccagccugagcgugagcuggagcaucccccccccccagcagagcagaguguggaaguacgaggugaccuacagaaagaagggcgacagcaacagcuacaacgugagaagaaccgagggcuucagcgugacccuggacgaccuggcccccgacaccaccuaccuggugcaggugcaggcccugacccaggagggccagggcgccggcagcaaggugcacgaguuccagacccugagccccgagggcagcggcaaccuggccgugaucggcggcguggccgugggcguggugcugcugcuggugcuggccggcgugggcuucuucauccacagaagaagaaagaaccagagagccagacagagccccgaggacguguacuucagcaagagcgagcagcugaagccccugaagaccuacguggacccccacaccuacgaggaccccaaccaggccgugcugaaguucaccaccgagauccaccccagcugcgugaccagacagaaggugaucggcgccggcgaguucggcgagguguacaagggcaugcugaagaccagcagcggcaagaaggaggugcccguggccaucaagacccugaaggccggcuacaccgagaagcagagaguggacuuccugggcgaggccggcaucaugggccaguucagccaccacaacaucaucagacuggagggcgugaucagcaaguacaagcccaugaugaucaucaccgaguacauggagaacggcgcccuggacaaguuccugagagagaaggacggcgaguucagcgugcugcagcuggugggcaugcugagaggcaucgccgccggcaugaaguaccuggccaacaugaacuacgugcacagagaccuggccgccagaaacauccuggugaacagcaaccuggugugcaaggugagcgacuucggccugagcagagugcuggaggacgaccccgaggccaccuacaccaccagcggcggcaagauccccaucagauggaccgcccccgaggccaucagcuacagaaaguucaccagcgccagcgacguguggagcuucggcaucgugaugugggaggugaugaccuacggcgagagacccuacugggagcugagcaaccacgaggugaugaaggccaucaacgacggcuucagacugcccacccccauggacugccccagcgccaucuaccagcugaugaugcagugcuggcagcaggagagagccagaagacccaaguucgccgacaucgugagcauccuggacaagcugaucagagcccccgacagccugaagacccuggccgacuucgaccccagagugagcaucagacugcccagcaccagcggcagcgagggcgugcccuucagaaccgugagcgaguggcuggagagcaucaagaugcagcaguacaccgagcacuucauggccgccggcuacaccgccaucgagaagguggugcagaugaccaacgacgacaucaagagaaucggcgugagacugcccggccaccagaagagaaucgccuacagccugcugggccugaaggaccaggugaacaccgugggcauccccaucuga

SEQ ID NO: 1433 - RNA, 2931 nt, Artificial Sequence
  derived and/or modified sequence opt5 from EphA2__Homo_sapiens__CCDS169.1
auggagcugcaggccgcuagagccugcuucgcgcuccuguggggcugugcucuugccgccgcugccgcugcccaagggaaggaagugguccugcucgacuuugcggccgcuggaggcgagcugggguggcuuacccaccccuacggaaaaggcugggaucugaugcagaacaucaugaaugacaugccuauuuauauguacagcguuugcaacgugauguccggggaucaggacaauuggcuccggacaaacuggguguaucgcggagaagccgagagaaucuucauugaacugaaguuuacgguccgggauuguaauucuuucccgggcggcgcuagcuccugcaaagagaccuuuaaccuguacuaugccgagucugaccucgauuacgggacaaauuuccagaagcgccuguuuaccaaaaucgacacaauugcgcccgaugaaaucaccgugagcuccgacuucgaggccagacauguuaaacuuaacguggaagagagaucugucggaccucugacacgcaagggcuuuuaucucgcuuuccaagauaucggggccuguguggcucugcuuagcguuagaguguacuacaaaaagugccccgagcugcuccagggacuggcccacuuuccugaaaccauugccggcuccgacgcucccagccuggcgacggucgccgggaccuguguggaucaugcuguggucccuccgggaggcgaggaaccccggaugcacugcgccguugacggcgaguggcucgugccuaucgggcagugucugugccaggccggauaugaaaaaguggaggacgcuugucaagccugcucucccggcuucuuuaaguucgaggcguccgaaagcccuugccuugagugucccgaacauacacugccgucuccugagggggcuaccuccugcgaaugugaggagggauucuuucgcgcuccccaggauccugccagcaugcccugcacaagacccccuucugccccgcacuaccucaccgccgucggcaugggggcuaaaguggaacugcgguggacgcccccucaggacuccggaggccgcgaggauauuguuuauagcgugacaugugaacagugcuggcccgaguccggcgaaugugggccuugcgaggccucugucagauacagcgagcccccgcacggacuuacccggacauccgugaccguuagcgaccuggaaccucauaugaauuauaccuucacaguggaggcgcgcaacggcgucucugggcucgugacgucccggagcuuucggaccgccucugucagcaucaaucaaacagaacccccuaaggugagacuggagggacgcuccaccacaucucugagcguuuccuggagcauucccccuccccagcagucucggguguggaaguacgaggucaccuauagaaagaagggcgauuccaacagcuacaaugugcgccggacggaaggguucucuguuacacucgacgaucuggcuccggacaccaccuaccuugugcaaguccaggcccugacacaggagggccagggagcuggcuccaaagugcacgaauuucaaacccucagcccugagggguccggaaaccuggccgugaucggcgggguugcggucggaguggugcuucugcucguccuggccggcgugggguucuuuauucauagacgccggaagaaucagagagcucgccagucucccgaagauguuuauuucagcaaauccgagcagcugaagccccucaaaacauacguggacccucacacguaugaggauccgaaccaagccguccugaaguuuaccacagaaauccaccccucuugugugacccggcagaagguuaucggcgcuggagaguucggcgaaguguacaaagggaugcuuaagacaagcuccggcaaaaaggaggucccuguggccauuaaaacccugaaggccggauauacggaaaagcagagaguugacuuucucggggaggcuggaaucaugggccaguucagccaucacaacauuauccgccuggagggggugauuucuaaauacaagcccaugaugaucaucaccgaauauauggagaauggcgcgcuggacaaauuucuucgggaaaaggauggagaguucuccguccuccaacuggugggcaugcugagagggauugccgcuggaaugaaauaccucgccaacaugaauuacgugcaucgggaccuggccgcucgcaacauccuugucaauagcaaccugguuugcaaggugucugauuucggccucuccagagugcuggaagacgauccugaggccacauauaccacaagcgggggaaagauucccauccgguggaccgcgccugaggcuauuucuuacagaaaauuuacgagcgccuccgacgucuggagcuucggcaucgugaugugggaaguuaugacauauggggagcgccccuacugggaacugucuaaucacgaggugaugaaggccaucaacgauggcuuucggcuuccgaccccuauggacugucccuccgcuauuuaucagcucaugaugcagugcuggcagcaagagagagcccgcagaccuaaauucgcggauaucgucagcauucuggacaagcugauccgggcucccgauucccucaaaacacuggccgacuuugauccgcgcgugucuauuagacuuccuagcaccuccggaucugaaggcguucccuuccggaccgugagcgaguggcuggaauccaucaagaugcagcaguacacagagcauuuuauggccgcuggguauacggccauugaaaaggucgugcaaaugaccaaugacgacaucaaacgcaucggaguuagacucccuggccaccagaagcggauugcuuacucucugcuggggcuuaaagaucaggugaacacagucggaauccccauuuga

SEQ ID NO: 1434 - protein, 983 aa, Artificial Sequence
  EphA3__Homo_sapiens__P29320
MDCQLSILLLLSCSVLDSFGELIPQPSNEVNLLDSKTIQGELGWISYPSHGWEEISGVDEHYTPIRTYQVCNVMDHSQNNWLRTNWVPRNSAQKIYVELKFTLRDCNSIPLVLGTCKETFNLYYMESDDDHGVKFREHQFTKIDTIAADESFTQMDLGDRILKLNTEIREVGPVNKKGFYLAFQDVGACVALVSVRVYFKKCPFTVKNLAMFPDTVPMDSQSLVEVRGSCVNNSKEEDPPRMYCSTEGEWLVPIGKCSCNAGYEERGFMCQACRPGFYKALDGNMKCAKCPPHSSTQEDGSMNCRCENNYFRADKDPPSMACTRPPSSPRNVISNINETSVILDWSWPLDTGGRKDVTFNIICKKCGWNIKQCEPCSPNVRFLPRQFGLTNTTVTVTDLLAHTNYTFEIDAVNGVSELSSPPRQFAAVSITTNQAAPSPVLTIKKDRTSRNSISLSWQEPEHPNGIILDYEVKYYEKQEQETSYTILRARGTNVTISSLKPDTIYVFQIRARTAAGYGTNSRKFEFETSPDSFSISGESSQVVMIAISAAVAIILLTVVIYVLIGRFCGYKSKHGADEKRLHFGNGHLKLPGLRTYVDPHTYEDPTQAVHEFAKELDATNISIDKVVGAGEFGEVCSGRLKLPSKKEISVAIKTLKVGYTEKQRRDFLGEASIMGQFDHPNIIRLEGVVTKSKPVMIVTEYMENGSLDSFLRKHDAQFTVIQLVGMLRGIASGMKYLSDMGYVHRDLAARNILINSNLVCKVSDFGLSRVLEDDPEAAYTTRGGKIPIRWTSPEAIAYRKFTSASDVWSYGIVLWEVMSYGERPYWEMSNQDVIKAVDEGYRLPPPMDCPAALYQLMLDCWQKDRNNRPKFEQIVSILDKLIRNPGSLKIITSAAARPSNLLLDQSNVDITTFRTTGDWLNGVWTAHCKEIFTGVEYSSCDTIAKISTDDMKKVGVTVVGPQKKIISSIKALETQSKNGPVPV

SEQ ID NO: 1435 - RNA, 2952 nt, Artificial Sequence
  EphA3__Homo_sapiens__AAG43576
auggauugucagcucuccauccuccuccuucucagcugcucuguucucgacagcuucggggaacugauuccgcagccuuccaaugaagucaaucuacuggauucaaaaacaauucaaggggagcugggcuggaucucuuauccaucacaugggugggaagagaucagugguguggaugaacauuacacacccaucaggacuuaccaggugugcaaugucauggaccacagucaaaacaauuggcugagaacaaacuggguccccaggaacucagcucagaagauuuauguggagcucaaguucacucuacgagacugcaauagcauuccauugguuuuaggaacuugcaaggagacauucaaccuguacuacauggagucugaugaugaucauggggugaaauuucgagagcaucaguuuacaaagauugacaccauugcagcugaugaaaguuucacucaaauggaucuuggggaccguauucugaagcucaacacugagauuagagaaguagguccugucaacaagaagggauuuuauuuggcauuucaagauguuggugcuuguguugccuuggugucugugagaguauacuucaaaaagugcccauuuacagugaagaaucuggcuauguuuccagacacgguacccauggacucccagucccugguggagguuagagggucuugugucaacaauucuaaggaggaagauccuccaaggauguacugcaguacagaaggcgaauggcuuguacccauuggcaaguguuccugcaaugcuggcuaugaagaaagagguuuuaugugccaagcuugucgaccagguuucuacaaggcauuggaugguaauaugaagugugcuaagugcccgccucacaguucuacucaggaagaugguucaaugaacugcaggugugagaauaauuacuuccgggcagacaaagacccuccauccauggcuuguacccgaccuccaucuucaccaagaaauguuaucucuaauauaaacgagaccucaguuauccuggacuggaguuggccccuggacacaggaggccggaaagauguuaccuucaacaucauauguaaaaaauguggguggaauauaaaacagugugagccaugcagcccaaauguccgcuuccucccucgacaguuuggacucaccaacaccacggugacagugacagaccuucuggcacauacuaacuacaccuuugagauugaugccguuaauggggugucagagcugagcuccccaccaagacaguuugcugcggucagcaucacaacuaaucaggcugcuccaucaccuguccugacgauuaagaaagaucggaccuccagaaauagcaucucuuuguccuggcaagaaccugaacauccuaaugggaucauauuggacuacgaggucaaauacuaugaaaagcaggaacaagaaacaaguuauaccauucugagggcaagaggcacaaauguuaccaucaguagccucaagccugacacuauauacguauuccaaauccgagcccgaacagccgcuggauaugggacgaacagccgcaaguuugaguuugaaacuaguccagacucuuucuccaucucuggugaaaguagccaaguggucaugaucgccauuucagcggcaguagcaauuauucuccucacuguugucaucuauguuuugauugggagguucuguggcuauaagucaaaacauggggcagaugaaaaaagacuucauuuuggcaaugggcauuuaaaacuuccaggucucaggacuuauguugacccacauacauaugaagacccuacccaagcuguucaugaguuugccaaggaauuggaugccaccaacauauccauugauaaaguuguuggagcaggugaauuuggagaggugugcaguggucgcuuaaaacuuccuucaaaaaaagagauuucaguggccauuaagacccugaaaguuggcuacacagaaaagcagaggagagacuuccugggagaagcaagcauuaugggacaguuugaccaccccaauaucauucgacuggaaggaguuguuaccaaaaguaagccaguuaugauugucacagaauacauggagaaugguuccuuggauaguuuccuacguaaacacgaugcccaguuuacugucauucagcuaguggggaugcuucgagggauagcaucuggcaugaaguaccugucagacaugggcuauguucaccgagaccucgcugcucggaacaucuugaucaacaguaacuugguguguaagguuucugauuucggacuuucgcguguccuggaggaugacccagaagcugcuuauacaacaagaggagggaagaucccaaucagguggacaucaccagaagcuauagccuaccgcaaguucacgucagccagcgauguauggaguuaugggauuguucucugggaggugaugucuuauggagagagaccauacugggagauguccaaucaggauguaauuaaagcuguagaugagggcuaucgacugccaccccccauggacugcccagcugccuuguaucagcugaugcuggacugcuggcagaaagacaggaacaacagacccaaguuugagcagauuguuaguauucuggacaagcuuauccggaaucccggcagccugaagaucaucaccagugcagccgcaaggccaucaaaccuucuucuggaccaaagcaauguggauaucacuaccuuccgcacaacaggugacuggcuuaauggugucuggacagcacacugcaaggaaaucuucacggguguggaguacaguucuugugacacaauagccaagauuuccacagaugacaugaaaaagguuggugucaccgugguugggccacagaagaagaucaucaguagcauuaaagcucuagaaacgcaaucaaagaauggcccaguucccguguaa

SEQ ID NO: 1436 - RNA, 2952 nt, Artificial Sequence
  derived and/or modified sequence opt1 from EphA3__Homo_sapiens__AAG43576
auggacugccagcugagcauccuccugcugcucuccugcagcgugcuggacuccuucggcgagcugaucccccagccgagcaacgaggucaaccuccuggacuccaagaccauccagggggagcugggcuggaucagcuaccccucccacgggugggaggagaucagcggcguggacgagcacuacacccccauccgcacguaccaggugugcaacgucauggaccacucccagaacaacuggcuccggaccaacugggugccccgcaacagcgcccagaagaucuacguggagcugaaguucacccugcgggacugcaacuccaucccgcucguccuggggaccugcaaggagacguucaaccuguacuacauggagagcgacgacgaccacggcgugaaguuccgcgagcaccaguucaccaagaucgacaccaucgccgcggacgaguccuucacccagauggaccucggcgaccggauccugaagcugaacacggagauccgcgagguggggcccgucaacaagaagggcuucuaccucgccuuccaggacgugggggccugcguggcccuggucagcgugcggguguacuucaagaagugccccuucaccgucaagaaccuggccauguuccccgacaccgugccgauggacucccagagccucguggagguccgcggcuccugcgugaacaacagcaaggaggaggacccgccccggauguacugcuccaccgagggggaguggcuggugcccaucggcaagugcagcugcaacgcgggcuacgaggagcgcggguucaugugccaggccugccggcccggcuucuacaaggcccuggacgggaacaugaagugcgccaagugcccgccccacagcuccacgcaggaggacggcagcaugaacugccgcugcgagaacaacuacuuccgggcggacaaggacccgcccuccauggccugcacccgcccgcccagcagcccccggaacgucaucuccaacaucaacgagaccuccgugauccucgacuggagcuggccccuggacaccggcgggcgcaaggacgugacguucaacaucaucugcaagaagugcggcuggaacaucaagcagugcgagcccugcucccccaacguccgguuccugccccgccaguucgggcucaccaacaccaccgugacggucaccgaccugcuggcccacaccaacuacaccuucgagaucgacgccgugaacggcgugagcgagcucuccagcccgccccggcaguucgccgcggucuccaucacgaccaaccaggccgcccccagccccgugcugaccaucaagaaggaccgcaccucccggaacagcaucucccugagcuggcaggagcccgagcaccccaacgggaucauccucgacuacgaggugaaguacuacgagaagcaggagcaggagacguccuacaccauccugcgcgcccgcggcaccaacgucaccaucagcagccugaagcccgacacgaucuacguguuccagauccgggcccgcaccgcggccggcuacgggaccaacucccggaaguucgaguucgagaccagcccggacuccuucagcaucuccggcgagagcucccagguggucaugaucgccaucagcgccgccguggcgaucauccuccugacgguggucaucuacgugcugaucgggcgcuucugcggcuacaaguccaagcacggggccgacgagaagcggcuccacuucggcaacggccaccugaagcugcccgggcuccgcaccuacguggacccccacaccuacgaggaccccacccaggccguccacgaguucgccaaggagcuggacgccaccaacaucagcaucgacaagguggugggcgcgggggaguucggcgaggucugcuccgggcggcugaagcucccgagcaagaaggagaucuccguggccaucaagacgcugaaggugggcuacaccgagaagcagcgccgggacuuccugggcgaggccagcaucauggggcaguucgaccaccccaacaucauccgccucgagggcgucgugaccaaguccaagcccgugaugaucgucaccgaguacauggagaacgggagccuggacuccuuccugcggaagcacgacgcccaguucacggugauccagcuggugggcaugcuccgcggcaucgcgagcgggaugaaguaccugagcgacaugggcuacguccaccgggaccuggccgcccgcaacauccucaucaacuccaaccuggugugcaaggugagcgacuucgggcugucccggguccucgaggacgaccccgaggccgccuacaccacccgcggcgggaagaucccgauccgguggaccagccccgaggcgaucgccuaccgcaaguucacguccgccagcgacgugugguccuacggcaucgugcugugggaggucaugagcuacggcgagcggcccuacugggagauguccaaccaggacgugaucaaggccguggacgagggguaccgccugcccccgcccauggacugccccgccgcgcucuaccagcugaugcuggacugcuggcagaaggaccgcaacaaccggcccaaguucgagcagaucgucagcauccucgacaagcugauccgcaacccgggcucccugaagaucaucaccagcgccgccgcccggcccuccaaccuccugcuggaccagagcaacguggacaucaccaccuuccgcacgaccggggacuggcucaacggcguguggaccgcccacugcaaggagaucuucaccggggucgaguacuccagcugcgacacgaucgcgaagaucuccaccgacgacaugaagaaggugggcgugaccgucgugggcccccagaagaagaucaucagcuccaucaaggcccuggagacccagagcaagaacgggcccgugccggucuga

SEQ ID NO: 1437 - RNA, 2952 nt, Artificial Sequence
  derived and/or modified sequence opt2 from EphA3__Homo_sapiens__AAG43576
auggacugccagcucuccauccuccuccuccucuccugcuccguccucgacuccuucggcgagcucaucccccagcccuccaacgaggucaaccuccucgacuccaagaccauccagggcgagcucggcuggaucuccuaccccucccacggcugggaggagaucuccggcgucgacgagcacuacacccccauccgcaccuaccaggucugcaacgucauggaccacucccagaacaacuggcuccgcaccaacugggucccccgcaacuccgcccagaagaucuacgucgagcucaaguucacccuccgcgacugcaacuccaucccccucguccucggcaccugcaaggagaccuucaaccucuacuacauggaguccgacgacgaccacggcgucaaguuccgcgagcaccaguucaccaagaucgacaccaucgccgccgacgaguccuucacccagauggaccucggcgaccgcauccucaagcucaacaccgagauccgcgaggucggccccgucaacaagaagggcuucuaccucgccuuccaggacgucggcgccugcgucgcccucgucuccguccgcgucuacuucaagaagugccccuucaccgucaagaaccucgccauguuccccgacaccguccccauggacucccagucccucgucgagguccgcggcuccugcgucaacaacuccaaggaggaggaccccccccgcauguacugcuccaccgagggcgaguggcucguccccaucggcaagugcuccugcaacgccggcuacgaggagcgcggcuucaugugccaggccugccgccccggcuucuacaaggcccucgacggcaacaugaagugcgccaagugccccccccacuccuccacccaggaggacggcuccaugaacugccgcugcgagaacaacuacuuccgcgccgacaaggacccccccuccauggccugcacccgcccccccuccuccccccgcaacgucaucuccaacaucaacgagaccuccgucauccucgacugguccuggccccucgacaccggcggccgcaaggacgucaccuucaacaucaucugcaagaagugcggcuggaacaucaagcagugcgagcccugcucccccaacguccgcuuccucccccgccaguucggccucaccaacaccaccgucaccgucaccgaccuccucgcccacaccaacuacaccuucgagaucgacgccgucaacggcgucuccgagcucuccucccccccccgccaguucgccgccgucuccaucaccaccaaccaggccgcccccucccccguccucaccaucaagaaggaccgcaccucccgcaacuccaucucccucuccuggcaggagcccgagcaccccaacggcaucauccucgacuacgaggucaaguacuacgagaagcaggagcaggagaccuccuacaccauccuccgcgcccgcggcaccaacgucaccaucuccucccucaagcccgacaccaucuacgucuuccagauccgcgcccgcaccgccgccggcuacggcaccaacucccgcaaguucgaguucgagaccucccccgacuccuucuccaucuccggcgaguccucccaggucgucaugaucgccaucuccgccgccgucgccaucauccuccucaccgucgucaucuacguccucaucggccgcuucugcggcuacaaguccaagcacggcgccgacgagaagcgccuccacuucggcaacggccaccucaagcuccccggccuccgcaccuacgucgacccccacaccuacgaggaccccacccaggccguccacgaguucgccaaggagcucgacgccaccaacaucuccaucgacaaggucgucggcgccggcgaguucggcgaggucugcuccggccgccucaagcuccccuccaagaaggagaucuccgucgccaucaagacccucaaggucggcuacaccgagaagcagcgccgcgacuuccucggcgaggccuccaucaugggccaguucgaccaccccaacaucauccgccucgagggcgucgucaccaaguccaagcccgucaugaucgucaccgaguacauggagaacggcucccucgacuccuuccuccgcaagcacgacgcccaguucaccgucauccagcucgucggcaugcuccgcggcaucgccuccggcaugaaguaccucuccgacaugggcuacguccaccgcgaccucgccgcccgcaacauccucaucaacuccaaccucgucugcaaggucuccgacuucggccucucccgcguccucgaggacgaccccgaggccgccuacaccacccgcggcggcaagauccccauccgcuggaccucccccgaggccaucgccuaccgcaaguucaccuccgccuccgacgucugguccuacggcaucguccucugggaggucauguccuacggcgagcgccccuacugggagauguccaaccaggacgucaucaaggccgucgacgagggcuaccgccuccccccccccauggacugccccgccgcccucuaccagcucaugcucgacugcuggcagaaggaccgcaacaaccgccccaaguucgagcagaucgucuccauccucgacaagcucauccgcaaccccggcucccucaagaucaucaccuccgccgccgcccgccccuccaaccuccuccucgaccaguccaacgucgacaucaccaccuuccgcaccaccggcgacuggcucaacggcgucuggaccgcccacugcaaggagaucuucaccggcgucgaguacuccuccugcgacaccaucgccaagaucuccaccgacgacaugaagaaggucggcgucaccgucgucggcccccagaagaagaucaucuccuccaucaaggcccucgagacccaguccaagaacggccccguccccgucuga

SEQ ID NO: 1438 - RNA, 2952 nt, Artificial Sequence
  derived and/or modified sequence opt3 from EphA3__Homo_sapiens__AAG43576
auggacugccagcugagcauccuccuucuguuguccuguucuguguuagauucauucggcgagcugauuccccaaccuaguaacgaagucaaucuacucgacagcaagaccauacagggggagcugggauggaucuccuacccaucucacgguugggaagagauuucgggcguugaugaacauuauacaccgaucagaacuuaccaggugugcaacguaauggaccacucacagaauaacuggcuuaggacgaauugggugccccggaacagcgcccagaaaauuuaugucgagcugaaguuuaccuugcgcgauuguaauaguaucccucucgugcuggggacaugcaaagagacuuucaaccuguacuauauggaauccgacgaugaccauggaguuaaguuucgagagcaccaauucaccaaaauagauacaaucgcugcagacgaaucuuuuacccagauggaucucggcgaccguauuuuaaagcugaauacugagaucagagagguggguccagucaacaagaaaggguucuaccuugccuuucaggaugugggagcguguguagcuuugguuagcgugagggucuauuucaagaaaugccccuuuacagugaagaaucuggccauguucccugacaccgugccaauggacucccaaagucuagucgaaguucggggcucaugugugaacaauagcaaagaggaagaucccccucgcauguacugcucuacggagggcgaauggcucguaccaauugggaaguguuccugcaacgcaggauacgaggagagagguuuuaugugucaggccugcaggccgggcuucuauaaggcucuggacgggaauaugaaaugcgcaaagugucccccucauucaagcacucaggaagauggaaguaugaacugccggugugagaacaauuacuuucgcgccgacaaagauccacccucuauggcuugcacccgaccuccauccagccccagaaacgugaucucgaauauaaacgaaacaucugucauucuugacugguccuggccgcuggauacuggcgguaggaaggacgugaccuucaauaucauuuguaaaaagugcggguggaacaucaaacagugugagccuugcucacccaauguucgguucuugccacgucaauuuggacucacaaacaccacggugacugucacagaucuguuagcccacaccaauuauacuuucgaaaucgacgcggugaacggcguaagugagcugagcuccccuccccgccaguuugcagccguuucuauuacaaccaaucaggcugccccaagccccgugcucacgauaaagaaggauagaaccucaaggaacaguaucucccuuagcuggcaagagccugaacacccaaauggcauuauccuggacuacgaggucaaauauuacgaaaagcaggagcaggaaacaucuuauacuauauugcgggcacgagggaccaacgugacaauuucaagucuaaaaccggacacuaucuacgucuuccagauccgcgcuagaaccgccgcgggauacgguacaaauagcaggaaguuugaguucgagaccucccccgauucuuuuucgauuagcggcgaauccucacaagugguuaugaucgccauuagugcagcuguggccauaauccugcucacuguagucauuuaugugcugaucgggcgguucuguggauacaaaucuaagcauggcgcugacgagaagcgccuucacuuugguaacgggcaucugaaauugccuggccucagaacguauguugauccacacacauacgaagaccccacccaggccgugcacgaguucgcaaaggagcuggaugccacuaacaucagcauugacaaagucgugggagcuggcgaauuuggggagguaugcuccggaagguuaaagcugccuagcaaaaaggaaauaucaguggcgaucaagacccuaaaaguugguuauacagagaagcagcgucgggauuuccucggcgaagcaucuauuauggggcaguuugaccauccaaauaucauucgacuggagggagucgugaccaaauccaagcccgugaugaucgucacugaguacauggaaaacggcagucuugauagcuucuugagaaaacacgacgcccaauucacaguuauacagcugguggguaugcucagggggaucgcuucuggcaugaaguaucuguccgauaugggauacgugcaucgcgaccuugccgcacggaauauucugaucaacucaaauuugguauguaaggucagugauuuuggccucagcagagugcuggaggacgacccggaagccgcuuacacgacccgcgggggaaaaauuccuaucagguggacuucgccagaggccauagcauaucgaaaguucacauccgcgucugauguuuggagcuacgguauuguguuaugggaagucaugucauauggcgagcggcccuacugggagaugaguaaccaggacgugaucaaagcuguugaugaaggguaucgucugccucccccaauggacugcccugccgcacuauaccagcucaugcuggauugcuggcaaaaggacagaaauaacaggcccaaauuugagcagauuguguccauccuugauaaguugauacgcaauccaggaucucugaaaaucauuaccagcgccgcugcccggccguccaaccuccuguuagaccagucaaauguagauaucacaacuuucagaaccacgggcgacuggcugaacggugucuggaccgcacacuguaaggaaauuuuuacagggguggaguauagcaguugcgauacuaucgcuaagauaucuaccgacgauaugaaaaaggugggcgucacaguugugggaccucagaaaaagauuaucuccagcaucaaagcccuugaaacucaaucgaagaauggccccguaccaguguga

SEQ ID NO: 1439 - RNA, 2952 nt, Artificial Sequence
  derived and/or modified sequence opt4 from EphA3__Homo_sapiens__AAG43576
auggacugccagcugagcauccugcugcugcugagcugcagcgugcuggacagcuucggcgagcugaucccccagcccagcaacgaggugaaccugcuggacagcaagaccauccagggcgagcugggcuggaucagcuaccccagccacggcugggaggagaucagcggcguggacgagcacuacacccccaucagaaccuaccaggugugcaacgugauggaccacagccagaacaacuggcugagaaccaacugggugcccagaaacagcgcccagaagaucuacguggagcugaaguucacccugagagacugcaacagcaucccccuggugcugggcaccugcaaggagaccuucaaccuguacuacauggagagcgacgacgaccacggcgugaaguucagagagcaccaguucaccaagaucgacaccaucgccgccgacgagagcuucacccagauggaccugggcgacagaauccugaagcugaacaccgagaucagagaggugggccccgugaacaagaagggcuucuaccuggccuuccaggacgugggcgccugcguggcccuggugagcgugagaguguacuucaagaagugccccuucaccgugaagaaccuggccauguuccccgacaccgugcccauggacagccagagccugguggaggugagaggcagcugcgugaacaacagcaaggaggaggacccccccagaauguacugcagcaccgagggcgaguggcuggugcccaucggcaagugcagcugcaacgccggcuacgaggagagaggcuucaugugccaggccugcagacccggcuucuacaaggcccuggacggcaacaugaagugcgccaagugccccccccacagcagcacccaggaggacggcagcaugaacugcagaugcgagaacaacuacuucagagccgacaaggacccccccagcauggccugcaccagaccccccagcagccccagaaacgugaucagcaacaucaacgagaccagcgugauccuggacuggagcuggccccuggacaccggcggcagaaaggacgugaccuucaacaucaucugcaagaagugcggcuggaacaucaagcagugcgagcccugcagccccaacgugagauuccugcccagacaguucggccugaccaacaccaccgugaccgugaccgaccugcuggcccacaccaacuacaccuucgagaucgacgccgugaacggcgugagcgagcugagcagcccccccagacaguucgccgccgugagcaucaccaccaaccaggccgcccccagccccgugcugaccaucaagaaggacagaaccagcagaaacagcaucagccugagcuggcaggagcccgagcaccccaacggcaucauccuggacuacgaggugaaguacuacgagaagcaggagcaggagaccagcuacaccauccugagagccagaggcaccaacgugaccaucagcagccugaagcccgacaccaucuacguguuccagaucagagccagaaccgccgccggcuacggcaccaacagcagaaaguucgaguucgagaccagccccgacagcuucagcaucagcggcgagagcagccagguggugaugaucgccaucagcgccgccguggccaucauccugcugaccguggugaucuacgugcugaucggcagauucugcggcuacaagagcaagcacggcgccgacgagaagagacugcacuucggcaacggccaccugaagcugcccggccugagaaccuacguggacccccacaccuacgaggaccccacccaggccgugcacgaguucgccaaggagcuggacgccaccaacaucagcaucgacaagguggugggcgccggcgaguucggcgaggugugcagcggcagacugaagcugcccagcaagaaggagaucagcguggccaucaagacccugaaggugggcuacaccgagaagcagagaagagacuuccugggcgaggccagcaucaugggccaguucgaccaccccaacaucaucagacuggagggcguggugaccaagagcaagcccgugaugaucgugaccgaguacauggagaacggcagccuggacagcuuccugagaaagcacgacgcccaguucaccgugauccagcuggugggcaugcugagaggcaucgccagcggcaugaaguaccugagcgacaugggcuacgugcacagagaccuggccgccagaaacauccugaucaacagcaaccuggugugcaaggugagcgacuucggccugagcagagugcuggaggacgaccccgaggccgccuacaccaccagaggcggcaagauccccaucagauggaccagccccgaggccaucgccuacagaaaguucaccagcgccagcgacguguggagcuacggcaucgugcugugggaggugaugagcuacggcgagagacccuacugggagaugagcaaccaggacgugaucaaggccguggacgagggcuacagacugcccccccccauggacugccccgccgcccuguaccagcugaugcuggacugcuggcagaaggacagaaacaacagacccaaguucgagcagaucgugagcauccuggacaagcugaucagaaaccccggcagccugaagaucaucaccagcgccgccgccagacccagcaaccugcugcuggaccagagcaacguggacaucaccaccuucagaaccaccggcgacuggcugaacggcguguggaccgcccacugcaaggagaucuucaccggcguggaguacagcagcugcgacaccaucgccaagaucagcaccgacgacaugaagaaggugggcgugaccguggugggcccccagaagaagaucaucagcagcaucaaggcccuggagacccagagcaagaacggccccgugcccguguga

SEQ ID NO: 1440 - RNA, 2952 nt, Artificial Sequence
  derived and/or modified sequence opt5 from EphA3__Homo_sapiens__AAG43576
auggacugccagcugagcauccuccugcuucuguccuguucugugcucgauagcuucggcgagcugauuccccaaccuuccaacgaagucaaucuucuggacucuaagaccauccagggggagcucggauggauuagcuacccgucccacggcugggaagagaucucugggguugaugaacauuauacacccauuagaacguaccaggugugcaacgugauggaccacagccagaauaacuggcugcggaccaauugggucccucgcaacuccgcccaaaagaucuauguggagcugaaguuuacacucagagauuguaauagcaucccccugguucuuggaaccugcaaagagacauucaaccuguacuauauggaaucugacgaugaccauggcgugaaguuucgggagcaccaguucaccaaaauugauacaaucgcugccgacgaauccuuuacccagauggaucucggggaccgcauucugaaacuuaauacggagaucagagaggucggaccugugaacaagaaaggcuucuaccuggcguuucaggauguuggcgcuuguguggcccucgucagcgugcggguguauuucaagaaaugccccuuuaccgucaagaaucuggccauguucccugacacaguuccgauggacucucaaucccugguggaagugcgcgggagcugugucaacaauucuaaagaggaagaucccccuagaauguacugcuccaccgagggagaauggcucgugcccauuggcaaguguagcugcaacgcuggguacgaggagcggggauuuaugugucaggccugccgcccuggcuucuauaaggcucuggacgggaauaugaaaugcgccaagugucccccgcauuccucuacacaggaagauggaagcaugaacugcagaugugagaacaauuacuuucgggcggacaaagauccucccuccauggccugcacccgcccucccagcucucccagaaacguuaucuccaauauuaacgaaacgagcgugauccuugacuggucuuggccucuggauacaggcggccggaaggacgucaccuucaauaucauuuguaaaaagugcggguggaacaucaaacagugugagccgugcagccccaaugugcgcuuccucccuagacaauuuggacugacaaacaccaccguuacagugacggaucuucuggcucacaccaauuauacauucgaaauugacgccgucaacggcguguccgagcucucuucucccccucggcaguuugcugccgucuccaucaccacaaaucaggcggcccccagcccggugcugaccauuaagaaggauagaacgucucgcaacuccaucagccugucuuggcaagagccugaacaccccaaugggaucauucucgacuacgagguuaaauauuacgaaaagcaggagcaggaaacauccuauaccauccugcgggcuagaggaaccaacgugacaauuagcucccuuaaaccugacaccaucuacgucuuccagauucgcgcccggacagcugccggcuacgggaccaauucuagaaaguuugaguucgagacgagccccgauuccuuuucuaucagcggagaauccagccaagugguuaugaucgccauuucugcugcgguggccaucauucugcucacagucgugaucuaugugcugauuggccgcuucuguggcuacaaauccaagcauggggcugacgagaagcggcuucacuuuggaaacggccaucugaaacucccugggcugagaaccuauguugauccccacacauacgaagacccgacccaggccguccacgaguucgccaaggagcuggaugcuacgaacaucagcauugacaaaguggugggagccggcgaauuuggggaggucugcucuggccgccucaagcugccuuccaaaaaggaaaucagcguggcgaucaagacccuuaaaguuggauauacagagaagcagcggagagauuuccugggcgaagcuagcauuauggggcaguuugaccaucccaauaucauucgccucgagggaguggucaccaaaagcaagcccgugaugaucguuacagaguacauggaaaacggcucccuggauagcuuccugcggaaacacgacgcccaauucaccgugauucagcuugucgggaugcucagaggaaucgccucuggcaugaaguaucuguccgauaugggguacgugcaucgggaccuggcugcccgcaauauccucauuaacagcaaucugguuuguaagguguccgauuuuggccuuucuagaguccuggaggacgacccugaagcugccuacacgacacggggaggcaaaaucccgauuagauggaccagccccgaggcgaucgccuaucgcaaguucacauccgcuucugauguguggagcuacgggauugugcucugggaagucauguccuauggagagcggccuuacugggagaugucuaaccaggacguuaucaaagccguggaugaaggcuauagacugcccccucccauggacugcccugcugcccuguaccagcuuaugcucgauugcuggcaaaaggaccgcaauaacagacccaaauuugagcagaucgugagcauucuggauaagcugauccggaauccggggucccucaaaauuaucaccagcgcggccgcucgcccuucuaaccugcuucuggaccaguccaaugucgauauuaccacauucagaacgaccggagacuggcucaacggcguguggacagcccacuguaaggaaaucuuuaccgggguugaguauagcucuugcgauacaaucgcuaagauuuccaccgacgauaugaaaaaggugggcgucacggugguuggaccccagaaaaagaucauuagcucuaucaaagcccuggaaacacaauccaagaauggcccugugcccgucuga

SEQ ID NO: 1441 - protein, 983 aa, Artificial Sequence [sequence omitted]

SEQ ID NO: 1442 - RNA, 2952 nt, Artificial Sequence
  EphA3__Homo_sapiens__AAH63282
auggauugucagcucuccauccuccuccuucucagcugcucuguucucgacagcuucggggaacugauuccgcagccuuccaaugaagucaaucuacuggauucaaaaacaauucaaggggagcugggcuggaucucuuauccaucacaugggugggaagagaucagugguguggaugaacauuacacacccaucaggacuuaccaggugugcaaugucauggaccacagucaaaacaauuggcugagaacaaacuggguccccaggaacucagcucagaagauuuauguggagcucaaguucacucuacgagacugcaauagcauuccauugguuuuaggaacuugcaaggagacauucaaccuguacuacauggagucugaugaugaucauggggugaaauuucgagagcaucaguuuacaaagauugacaccauugcagcugaugaaaguuucacucaaauggaucuuggggaccguauucugaagcucaacacugagauuagagaaguagguccugucaacaagaagggauuuuauuuggcauuucaagauguuggugcuuguguugccuuggugucugugagaguauacuucaaaaagugcccauuuacagugaagaaucuggcuauguuuccagacacgguacccauggacucccagucccugguggagguuagagggucuugugucaacaauucuaaggaggaagauccuccaaggauguacugcaguacagaaggcgaauggcuuguacccauuggcaaguguuccugcaaugcuggcuaugaagaaagagguuuuaugugccaagcuugucgaccagguuucuacaaggcauuggaugguaauaugaagugugcuaagugcccgccucacaguucuacucaggaagaugguucaaugaacugcaggugugagaauaauuacuuccgggcagacaaagacccuccauccauggcuuguacccgaccuccaucuucaccaagaaauguuaucucuaauauaaacgagaccucaguuauccuggacuggaguuggccccuggacacaggaggccggaaagauguuaccuucaacaucauauguaaaaaauguggguggaauauaaaacagugugagccaugcagcccaaauguccgcuuccucccucgacaguuuggacucaccaacaccacggugacagugacagaccuucuggcacauacuaacuacaccuuugagauugaugccguuaauggggugucagagcugagcuccccaccaagacaguuugcugcggucagcaucacaacuaaucaggcugcuccaucaccuguccugacgauuaagaaagaucggaccuccagaaauagcaucucuuuguccuggcaagaaccugaacauccuaaugggaucauauuggacuacgaggucaaauacuaugaaaagcaggaacaagaaacaaguuauaccauucugagggcaagaggcacaaauguuaccaucaguagccucaagccugacacuauauacguauuccaaauccgagcccgaacagccgcuggauaugggacgaacagccgcaaguuugaguuugaaacuaguccagacucuuucuccaucucuggugaaaguagccaaguggucaugaucgccauuucagcggcaguagcaauuauucuccucacuguugucaucuauguuuugauugggagguucuguggcuauaagucaaaacauggggcagaugaaaaaagacuucauuuuggcaaugggcauuuaaaacuuccaggucucaggacuuauguugacccacauacauaugaagacccuacccaaacuguucaugaguuugccaaggaauuggaugccaccaacauauccauugauaaaguuguuggagcaggugaauuuggagaggugugcaguggucgcuuaaaacuuccuucaaaaaaagagauuucaguggccauuaagacccugaaaguuggcuacacagaaaagcagaggagagacuuccugggagaagcaagcauuaugggacaguuugaccaccccaauaucauucgacuggaaggaguuguuaccaaaaguaagccaguuaugauugucacagaauacauggagaaugguuccuuggauaguuuccuacguaaacacgaugcccaguuuacugucauucagcuaguggggaugcuucgagggauagcaucuggcaugaaguaccugucagacaugggcuauguucaccgagaccucgcugcucggaacaucuugaucaacaguaacuugguguguaagguuucugauuucggacuuucgcguguccuggaggaugacccagaagcugcuuauacaacaagaggagggaagaucccaaucagguggacaucaccagaagcuauagccuaccgcaaguucacgucagccagcgauguauggaguuaugggauuguucucugggaggugaugucuuauggagagagaccauacugggagauguccaaucaggauguaauuaaagcuguagaugagggcuaucgacugccaccccccauggacugcccagcugccuuguaucagcugaugcuggacugcuggcagaaagacaggaacaacagacccaaguuugagcagauuguuaguauucuggacaagcuuauccggaaucccggcagccugaagaucaucaccagugcagccgcaaggccaucaaaccuucuucuggaccaaagcaauguggauaucacuaccuuccgcacaacaggugacuggcuuaauggugucuggacagcacacugcaaggaaaucuucacggguguggaguacaguucuugugacacaauagccaagauuuccacagaugacaugaaaaagguuggugucaccgugguugggccacagaagaagaucaucaguagcauuaaagcucuagaaacgcaaucaaagaauggcccaguucccguguaa

SEQ ID NO: 1443 - RNA, 2952 nt, Artificial Sequence
  derived and/or modified sequence opt1 from EphA3__Homo_sapiens__AAH63282
auggacugccagcugagcauccuccugcugcucuccugcagcgugcuggacuccuucggcgagcugaucccccagccgagcaacgaggucaaccuccuggacuccaagaccauccagggggagcugggcuggaucagcuaccccucccacgggugggaggagaucagcggcguggacgagcacuacacccccauccgcacguaccaggugugcaacgucauggaccacucccagaacaacuggcuccggaccaacugggugccccgcaacagcgcccagaagaucuacguggagcugaaguucacccugcgggacugcaacuccaucccgcucguccuggggaccugcaaggagacguucaaccuguacuacauggagagcgacgacgaccacggcgugaaguuccgcgagcaccaguucaccaagaucgacaccaucgccgcggacgaguccuucacccagauggaccucggcgaccggauccugaagcugaacacggagauccgcgagguggggcccgucaacaagaagggcuucuaccucgccuuccaggacgugggggccugcguggcccuggucagcgugcggguguacuucaagaagugccccuucaccgucaagaaccuggccauguuccccgacaccgugccgauggacucccagagccucguggagguccgcggcuccugcgugaacaacagcaaggaggaggacccgccccggauguacugcuccaccgagggggaguggcuggugcccaucggcaagugcagcugcaacgcgggcuacgaggagcgcggguucaugugccaggccugccggcccggcuucuacaaggcccuggacgggaacaugaagugcgccaagugcccgccccacagcuccacgcaggaggacggcagcaugaacugccgcugcgagaacaacuacuuccgggcggacaaggacccgcccuccauggccugcacccgcccgcccagcagcccccggaacgucaucuccaacaucaacgagaccuccgugauccucgacuggagcuggccccuggacaccggcgggcgcaaggacgugacguucaacaucaucugcaagaagugcggcuggaacaucaagcagugcgagcccugcucccccaacguccgguuccugccccgccaguucgggcucaccaacaccaccgugacggucaccgaccugcuggcccacaccaacuacaccuucgagaucgacgccgugaacggcgugagcgagcucuccagcccgccccggcaguucgccgcggucuccaucacgaccaaccaggccgcccccagccccgugcugaccaucaagaaggaccgcaccucccggaacagcaucucccugagcuggcaggagcccgagcaccccaacgggaucauccucgacuacgaggugaaguacuacgagaagcaggagcaggagacguccuacaccauccugcgcgcccgcggcaccaacgucaccaucagcagccugaagcccgacacgaucuacguguuccagauccgggcccgcaccgcggccggcuacgggaccaacucccggaaguucgaguucgagaccagcccggacuccuucagcaucuccggcgagagcucccagguggucaugaucgccaucagcgccgccguggcgaucauccuccugacgguggucaucuacgugcugaucgggcgcuucugcggcuacaaguccaagcacggggccgacgagaagcggcuccacuucggcaacggccaccugaagcugcccgggcuccgcaccuacguggacccccacaccuacgaggaccccacccagaccguccacgaguucgccaaggagcuggacgccacgaacaucagcaucgacaagguggugggcgccggggaguucggcgaggucugcuccgggcggcugaagcucccgagcaagaaggagaucuccguggcgaucaagacccugaaggugggcuacaccgagaagcagcgccgggacuuccugggcgaggccagcaucauggggcaguucgaccaccccaacaucauccgccucgagggcgucgugaccaaguccaagcccgugaugaucgucacggaguacauggagaacgggagccuggacuccuuccugcggaagcacgacgcccaguucaccgugauccagcuggugggcaugcuccgcggcaucgccagcgggaugaaguaccugagcgacaugggcuacguccaccgggaccuggcggcccgcaacauccucaucaacuccaaccuggugugcaaggugagcgacuucgggcugucccggguccucgaggacgaccccgaggccgccuacaccacccgcggcgggaagaucccgauccgguggacgagccccgaggccaucgcguaccgcaaguucaccuccgccagcgacgugugguccuacggcaucgugcugugggaggucaugagcuacggcgagcggcccuacugggagauguccaaccaggacgugaucaaggccguggacgagggguaccgccugcccccgcccauggacugccccgccgcccucuaccagcugaugcuggacugcuggcagaaggaccgcaacaaccggcccaaguucgagcagaucgucagcauccucgacaagcugauccgcaacccgggcucccugaagaucaucaccagcgcggccgcccggcccuccaaccuccugcuggaccagagcaacguggacaucaccacguuccgcaccaccggggacuggcucaacggcguguggaccgcccacugcaaggagaucuucacgggggucgaguacuccagcugcgacaccaucgccaagaucuccaccgacgacaugaagaaggugggcgugaccgucgugggcccccagaagaagaucaucagcuccaucaaggcgcuggagacgcagagcaagaacgggcccgugccggucuga

SEQ ID NO: 1444 - RNA, 2952 nt, Artificial Sequence
  derived and/or modified sequence opt2 from EphA3__Homo_sapiens__AAH63282
auggacugccagcucuccauccuccuccuccucuccugcuccguccucgacuccuucggcgagcucaucccccagcccuccaacgaggucaaccuccucgacuccaagaccauccagggcgagcucggcuggaucuccuaccccucccacggcugggaggagaucuccggcgucgacgagcacuacacccccauccgcaccuaccaggucugcaacgucauggaccacucccagaacaacuggcuccgcaccaacugggucccccgcaacuccgcccagaagaucuacgucgagcucaaguucacccuccgcgacugcaacuccaucccccucguccucggcaccugcaaggagaccuucaaccucuacuacauggaguccgacgacgaccacggcgucaaguuccgcgagcaccaguucaccaagaucgacaccaucgccgccgacgaguccuucacccagauggaccucggcgaccgcauccucaagcucaacaccgagauccgcgaggucggccccgucaacaagaagggcuucuaccucgccuuccaggacgucggcgccugcgucgcccucgucuccguccgcgucuacuucaagaagugccccuucaccgucaagaaccucgccauguuccccgacaccguccccauggacucccagucccucgucgagguccgcggcuccugcgucaacaacuccaaggaggaggaccccccccgcauguacugcuccaccgagggcgaguggcucguccccaucggcaagugcuccugcaacgccggcuacgaggagcgcggcuucaugugccaggccugccgccccggcuucuacaaggcccucgacggcaacaugaagugcgccaagugccccccccacuccuccacccaggaggacggcuccaugaacugccgcugcgagaacaacuacuuccgcgccgacaaggacccccccuccauggccugcacccgcccccccuccuccccccgcaacgucaucuccaacaucaacgagaccuccgucauccucgacugguccuggccccucgacaccggcggccgcaaggacgucaccuucaacaucaucugcaagaagugcggcuggaacaucaagcagugcgagcccugcucccccaacguccgcuuccucccccgccaguucggccucaccaacaccaccgucaccgucaccgaccuccucgcccacaccaacuacaccuucgagaucgacgccgucaacggcgucuccgagcucuccucccccccccgccaguucgccgccgucuccaucaccaccaaccaggccgcccccucccccguccucaccaucaagaaggaccgcaccucccgcaacuccaucucccucuccuggcaggagcccgagcaccccaacggcaucauccucgacuacgaggucaaguacuacgagaagcaggagcaggagaccuccuacaccauccuccgcgcccgcggcaccaacgucaccaucuccucccucaagcccgacaccaucuacgucuuccagauccgcgcccgcaccgccgccggcuacggcaccaacucccgcaaguucgaguucgagaccucccccgacuccuucuccaucuccggcgaguccucccaggucgucaugaucgccaucuccgccgccgucgccaucauccuccucaccgucgucaucuacguccucaucggccgcuucugcggcuacaaguccaagcacggcgccgacgagaagcgccuccacuucggcaacggccaccucaagcuccccggccuccgcaccuacgucgacccccacaccuacgaggaccccacccagaccguccacgaguucgccaaggagcucgacgccaccaacaucuccaucgacaaggucgucggcgccggcgaguucggcgaggucugcuccggccgccucaagcuccccuccaagaaggagaucuccgucgccaucaagacccucaaggucggcuacaccgagaagcagcgccgcgacuuccucggcgaggccuccaucaugggccaguucgaccaccccaacaucauccgccucgagggcgucgucaccaaguccaagcccgucaugaucgucaccgaguacauggagaacggcucccucgacuccuuccuccgcaagcacgacgcccaguucaccgucauccagcucgucggcaugcuccgcggcaucgccuccggcaugaaguaccucuccgacaugggcuacguccaccgcgaccucgccgcccgcaacauccucaucaacuccaaccucgucugcaaggucuccgacuucggccucucccgcguccucgaggacgaccccgaggccgccuacaccacccgcggcggcaagauccccauccgcuggaccucccccgaggccaucgccuaccgcaaguucaccuccgccuccgacgucugguccuacggcaucguccucugggaggucauguccuacggcgagcgccccuacugggagauguccaaccaggacgucaucaaggccgucgacgagggcuaccgccuccccccccccauggacugccccgccgcccucuaccagcucaugcucgacugcuggcagaaggaccgcaacaaccgccccaaguucgagcagaucgucuccauccucgacaagcucauccgcaaccccggcucccucaagaucaucaccuccgccgccgcccgccccuccaaccuccuccucgaccaguccaacgucgacaucaccaccuuccgcaccaccggcgacuggcucaacggcgucuggaccgcccacugcaaggagaucuucaccggcgucgaguacuccuccugcgacaccaucgccaagaucuccaccgacgacaugaagaaggucggcgucaccgucgucggcccccagaagaagaucaucuccuccaucaaggcccucgagacccaguccaagaacggccccguccccgucuga

SEQ ID NO: 1445 - RNA, 2952 nt, Artificial Sequence
  derived and/or modified sequence opt3 from EphA3__Homo_sapiens__AAH63282
auggacugccagcugagcauccuccuucuguuguccuguucuguguuagauucauucggcgagcugauuccccaaccuaguaacgaagucaaucuacucgacagcaagaccauacagggggagcugggauggaucuccuacccaucucacgguugggaagagauuucgggcguugaugaacauuauacaccgaucagaacuuaccaggugugcaacguaauggaccacucacagaauaacuggcuuaggacgaauugggugccccggaacagcgcccagaaaauuuaugucgagcugaaguuuaccuugcgcgauuguaauaguaucccucucgugcuggggacaugcaaagagacuuucaaccuguacuauauggaauccgacgaugaccauggaguuaaguuucgagagcaccaauucaccaaaauagauacaaucgcugcagacgaaucuuuuacccagauggaucucggcgaccguauuuuaaagcugaauacugagaucagagagguggguccagucaacaagaaaggguucuaccuugccuuucaggaugugggagcguguguagcuuugguuagcgugagggucuauuucaagaaaugccccuuuacagugaagaaucuggccauguucccugacaccgugccaauggacucccaaagucuagucgaaguucggggcucaugugugaacaauagcaaagaggaagaucccccucgcauguacugcucuacggagggcgaauggcucguaccaauugggaaguguuccugcaacgcaggauacgaggagagagguuuuaugugucaggccugcaggccgggcuucuauaaggcucuggacgggaauaugaaaugcgcaaagugucccccucauucaagcacucaggaagauggaaguaugaacugccggugugagaacaauuacuuucgcgccgacaaagauccacccucuauggcuugcacccgaccuccauccagccccagaaacgugaucucgaauauaaacgaaacaucugucauucuugacugguccuggccgcuggauacuggcgguaggaaggacgugaccuucaauaucauuuguaaaaagugcggguggaacaucaaacagugugagccuugcucacccaauguucgguucuugccacgucaauuuggacucacaaacaccacggugacugucacagaucuguuagcccacaccaauuauacuuucgaaaucgacgcggugaacggcguaagugagcugagcuccccuccccgccaguuugcagccguuucuauuacaaccaaucaggcugccccaagccccgugcucacgauaaagaaggauagaaccucaaggaacaguaucucccuuagcuggcaagagccugaacacccaaauggcauuauccuggacuacgaggucaaauauuacgaaaagcaggagcaggaaacaucuuauacuauauugcgggcacgagggaccaacgugacaauuucaagucuaaaaccggacacuaucuacgucuuccagauccgcgcuagaaccgccgcgggauacgguacaaauagcaggaaguuugaguucgagaccucccccgauucuuuuucgauuagcggcgaauccucacaagugguuaugaucgccauuagugcagcuguggccauaauccugcucacuguagucauuuaugugcugaucgggcgguucuguggauacaaaucuaagcauggcgcugacgagaagcgccuucacuuugguaacgggcaucugaaauugccuggccucagaacguauguugauccacacacauacgaagaccccacccagacugugcacgaguucgccaaggagcuggaugcaaccaacaucagcauugacaaagucgugggagccggcgaauuuggggagguaugcuccggaagguuaaagcugccuagcaaaaaggaaauaucaguggcuaucaagacacuaaaaguugguuauaccgagaagcagcgucgggauuuccucggcgaagcgucuauuauggggcaguuugaccauccaaauaucauucgacuggagggagucgugacuaaauccaagcccgugaugaucgucacagaguacauggaaaacggcagucuugauagcuucuugagaaaacacgacgcacaauucacgguuauacagcugguggguaugcucagggggaucgccucuggcaugaaguaucuguccgauaugggauacgugcaucgcgaccuugcugcccggaauauucugaucaacucaaauuugguauguaaggucagugauuuuggccucagcagagugcuggaggacgacccggaagcagccuacaccacucgcgggggaaaaauuccuaucagguggacaucgccagaggcuauagccuaucgaaaguucaccuccgcaucugauguuuggagcuacgguauuguguuaugggaagucaugucauauggcgagcggcccuacugggagaugaguaaccaggacgugaucaaagcgguugaugaaggguaucgucugccucccccaauggacugcccugcugcccuauaccagcucaugcuggauugcuggcaaaaggacagaaauaacaggcccaaauuugagcagauuguguccauccuugauaaguugauacgcaauccaggaucucugaaaaucauuacaagcgcagccgcucggccguccaaccuccuguuagaccagucaaauguagauaucacuaccuucagaacgaccggcgacuggcugaacggugucuggacagcccacuguaaggaaauuuuuacugggguggaguauagcaguugcgauaccaucgcaaagauaucuacagacgauaugaaaaaggugggcgucacuguugugggaccucagaaaaagauuaucuccagcaucaaagcucuugaaacccaaucgaagaauggccccguaccaguguga

SEQ ID NO: 1446 - RNA, 2952 nt, Artificial Sequence
  derived and/or modified sequence opt4 from EphA3__Homo_sapiens__AAH63282
auggacugccagcugagcauccugcugcugcugagcugcagcgugcuggacagcuucggcgagcugaucccccagcccagcaacgaggugaaccugcuggacagcaagaccauccagggcgagcugggcuggaucagcuaccccagccacggcugggaggagaucagcggcguggacgagcacuacacccccaucagaaccuaccaggugugcaacgugauggaccacagccagaacaacuggcugagaaccaacugggugcccagaaacagcgcccagaagaucuacguggagcugaaguucacccugagagacugcaacagcaucccccuggugcugggcaccugcaaggagaccuucaaccuguacuacauggagagcgacgacgaccacggcgugaaguucagagagcaccaguucaccaagaucgacaccaucgccgccgacgagagcuucacccagauggaccugggcgacagaauccugaagcugaacaccgagaucagagaggugggccccgugaacaagaagggcuucuaccuggccuuccaggacgugggcgccugcguggcccuggugagcgugagaguguacuucaagaagugccccuucaccgugaagaaccuggccauguuccccgacaccgugcccauggacagccagagccugguggaggugagaggcagcugcgugaacaacagcaaggaggaggacccccccagaauguacugcagcaccgagggcgaguggcuggugcccaucggcaagugcagcugcaacgccggcuacgaggagagaggcuucaugugccaggccugcagacccggcuucuacaaggcccuggacggcaacaugaagugcgccaagugccccccccacagcagcacccaggaggacggcagcaugaacugcagaugcgagaacaacuacuucagagccgacaaggacccccccagcauggccugcaccagaccccccagcagccccagaaacgugaucagcaacaucaacgagaccagcgugauccuggacuggagcuggccccuggacaccggcggcagaaaggacgugaccuucaacaucaucugcaagaagugcggcuggaacaucaagcagugcgagcccugcagccccaacgugagauuccugcccagacaguucggccugaccaacaccaccgugaccgugaccgaccugcuggcccacaccaacuacaccuucgagaucgacgccgugaacggcgugagcgagcugagcagcccccccagacaguucgccgccgugagcaucaccaccaaccaggccgcccccagccccgugcugaccaucaagaaggacagaaccagcagaaacagcaucagccugagcuggcaggagcccgagcaccccaacggcaucauccuggacuacgaggugaaguacuacgagaagcaggagcaggagaccagcuacaccauccugagagccagaggcaccaacgugaccaucagcagccugaagcccgacaccaucuacguguuccagaucagagccagaaccgccgccggcuacggcaccaacagcagaaaguucgaguucgagaccagccccgacagcuucagcaucagcggcgagagcagccagguggugaugaucgccaucagcgccgccguggccaucauccugcugaccguggugaucuacgugcugaucggcagauucugcggcuacaagagcaagcacggcgccgacgagaagagacugcacuucggcaacggccaccugaagcugcccggccugagaaccuacguggacccccacaccuacgaggaccccacccagaccgugcacgaguucgccaaggagcuggacgccaccaacaucagcaucgacaagguggugggcgccggcgaguucggcgaggugugcagcggcagacugaagcugcccagcaagaaggagaucagcguggccaucaagacccugaaggugggcuacaccgagaagcagagaagagacuuccugggcgaggccagcaucaugggccaguucgaccaccccaacaucaucagacuggagggcguggugaccaagagcaagcccgugaugaucgugaccgaguacauggagaacggcagccuggacagcuuccugagaaagcacgacgcccaguucaccgugauccagcuggugggcaugcugagaggcaucgccagcggcaugaaguaccugagcgacaugggcuacgugcacagagaccuggccgccagaaacauccugaucaacagcaaccuggugugcaaggugagcgacuucggccugagcagagugcuggaggacgaccccgaggccgccuacaccaccagaggcggcaagauccccaucagauggaccagccccgaggccaucgccuacagaaaguucaccagcgccagcgacguguggagcuacggcaucgugcugugggaggugaugagcuacggcgagagacccuacugggagaugagcaaccaggacgugaucaaggccguggacgagggcuacagacugcccccccccauggacugccccgccgcccuguaccagcugaugcuggacugcuggcagaaggacagaaacaacagacccaaguucgagcagaucgugagcauccuggacaagcugaucagaaaccccggcagccugaagaucaucaccagcgccgccgccagacccagcaaccugcugcuggaccagagcaacguggacaucaccaccuucagaaccaccggcgacuggcugaacggcguguggaccgcccacugcaaggagaucuucaccggcguggaguacagcagcugcgacaccaucgccaagaucagcaccgacgacaugaagaaggugggcgugaccguggugggcccccagaagaagaucaucagcagcaucaaggcccuggagacccagagcaagaacggccccgugcccguguga

SEQ ID NO: 1447 - RNA, 2952 nt, Artificial Sequence
  derived and/or modified sequence opt5 from EphA3__Homo_sapiens__AAH63282
auggacugccagcugagcauccuccugcuucuguccuguucugugcucgauagcuucggcgagcugauuccccaaccuuccaacgaagucaaucuucuggacucuaagaccauccagggggagcucggauggauuagcuacccgucccacggcugggaagagaucucugggguugaugaacauuauacacccauuagaacguaccaggugugcaacgugauggaccacagccagaauaacuggcugcggaccaauugggucccucgcaacuccgcccaaaagaucuauguggagcugaaguuuacacucagagauuguaauagcaucccccugguucuuggaaccugcaaagagacauucaaccuguacuauauggaaucugacgaugaccauggcgugaaguuucgggagcaccaguucaccaaaauugauacaaucgcugccgacgaauccuuuacccagauggaucucggggaccgcauucugaaacuuaauacggagaucagagaggucggaccugugaacaagaaaggcuucuaccuggcguuucaggauguuggcgcuuguguggcccucgucagcgugcggguguauuucaagaaaugccccuuuaccgucaagaaucuggccauguucccugacacaguuccgauggacucucaaucccugguggaagugcgcgggagcugugucaacaauucuaaagaggaagaucccccuagaauguacugcuccaccgagggagaauggcucgugcccauuggcaaguguagcugcaacgcuggguacgaggagcggggauuuaugugucaggccugccgcccuggcuucuauaaggcucuggacgggaauaugaaaugcgccaagugucccccgcauuccucuacacaggaagauggaagcaugaacugcagaugugagaacaauuacuuucgggcggacaaagauccucccuccauggccugcacccgcccucccagcucucccagaaacguuaucuccaauauuaacgaaacgagcgugauccuugacuggucuuggccucuggauacaggcggccggaaggacgucaccuucaauaucauuuguaaaaagugcggguggaacaucaaacagugugagccgugcagccccaaugugcgcuuccucccuagacaauuuggacugacaaacaccaccguuacagugacggaucuucuggcucacaccaauuauacauucgaaauugacgccgucaacggcguguccgagcucucuucucccccucggcaguuugcugccgucuccaucaccacaaaucaggcggcccccagcccggugcugaccauuaagaaggauagaacgucucgcaacuccaucagccugucuuggcaagagccugaacaccccaaugggaucauucucgacuacgagguuaaauauuacgaaaagcaggagcaggaaacauccuauaccauccugcgggcuagaggaaccaacgugacaauuagcucccuuaaaccugacaccaucuacgucuuccagauucgcgcccggacagcugccggcuacgggacgaauagcagaaaguuugaguucgagaccagccccgauuccuuuucuaucagcggagaauccagccaagugguuaugaucgccauuucugcugcgguggccaucauucugcucacagucgugaucuaugugcugauuggccgcuucuguggcuacaaauccaagcauggggcugacgagaagcggcuucacuuuggaaacggccaucugaaacucccugggcugagaaccuauguugauccccacacauacgaagacccgacccagacgguccacgaguucgccaaggagcuggaugccaccaacaucagcauugacaaaguggugggagcuggcgaauuuggggaggucugcucuggccgccucaagcugccuuccaaaaaggaaaucagcguggccaucaagacacuuaaaguuggauauaccgagaagcagcggagagauuuccugggcgaagcgucuauuauggggcaguuugaccaucccaauaucauucgccucgagggaguggucacaaaaagcaagcccgugaugaucguuaccgaguacauggaaaacggcucccuggauagcuuccugcggaaacacgacgcucaauucacggugauucagcuugucgggaugcucagaggaaucgccucuggcaugaaguaucuguccgauaugggguacgugcaucgggaccuggccgcucgcaauauccucauuaacagcaaucugguuuguaagguguccgauuuuggccuuucuagaguccuggaggacgacccugaagccgcuuacacaacccggggaggcaaaaucccgauuagauggacaagccccgaggccaucgcguaucgcaaguucaccuccgccucugauguguggagcuacgggauugugcucugggaagucauguccuauggagagcggccuuacugggagaugucuaaccaggacguuaucaaagcuguggaugaaggcuauagacugcccccucccauggacugcccugccgcucuguaccagcuuaugcucgauugcuggcaaaaggaccgcaauaacagacccaaauuugagcagaucgugagcauucuggauaagcugauccggaauccggggucccucaaaauuaucaccagcgccgcggcccgcccuucuaaccugcuucuggaccaguccaaugucgauauuacaacguucagaaccacaggagacuggcucaacggcguguggaccgcucacuguaaggaaaucuuuacagggguugaguauagcucuugcgauaccaucgccaagauuuccacggacgauaugaaaaaggugggcgucacagugguuggaccccagaaaaagaucauuagcucuaucaaagcucuggaaacccaauccaagaauggcccugugcccgucuga

SEQ ID NO: 1448 - protein, 462 aa, Artificial Sequence
  ErbB3__Homo_sapiens__B3KWG5
MPMSTILPVTSPCLPATGVTVWELMTFGAEPYAGLRLAEVPDLLEKGERLAQPQICTIDVYMVMVKCWMIDENIRPTFKELANEFTRMARDPPRYLVIKRESGPGIAPGPEPHGLTNKKLEEVELEPELDLDLDLEAEEDNLATTTLGSALSLPVGTLNRPRGSQSLLSPSSGYMPMNQGNLGESCQESAVSGSSERCPRPVSLHPMPRGCLASESSEGHVTGSEAELQEKVSMCRSRSRSRSPRPRGDSAYHSQRHSLLTPVTPLSPPGLEEEDVNGYVMPDTHLKGTPSSREGTLSSVGLSSVLGTEEEDEDEEYEYMNRRRRHSPPHPPRPSSLEELGYEYMDVGSDLSASLGSTQSCPLHPVPIMPTAGTTPDEDYEYMNRQRDGGGPGGDYAAMGACPASEQGYEEMRAFQGPGHQAPHVHYARLKTLRSLEATDSAFDNPDYWHSRLFPKANAQRT

SEQ ID NO: 1449 - RNA, 1389 nt, Artificial Sequence
  ErbB3__Homo_sapiens__BAG54127
augcccaugucuacuauuuugccagugacuaguccaugucuuccugcaacaggugugacaguuugggaguugaugaccuucggggcagagcccuaugcagggcuacgauuggcugaaguaccagaccugcuagagaagggggagcgguuggcacagccccagaucugcacaauugaugucuacauggugauggucaaguguuggaugauugaugagaacauucgcccaaccuuuaaagaacuagccaaugaguucaccaggauggcccgagacccaccacgguaucuggucauaaagagagagagugggccuggaauagccccugggccagagccccauggucugacaaacaagaagcuagaggaaguagagcuggagccagaacuagaccuagaccuagacuuggaagcagaggaggacaaccuggcaaccaccacacugggcuccgcccucagccuaccaguuggaacacuuaaucggccacgugggagccagagccuuuuaaguccaucaucuggauacaugcccaugaaccaggguaaucuuggggagucuugccaggagucugcaguuucugggagcagugaacggugcccccguccagucucucuacacccaaugccacggggaugccuggcaucagagucaucagaggggcauguaacaggcucugaggcugagcuccaggagaaagugucaauguguagaagccggagcaggagccggagcccacggccacgcggagauagcgccuaccauucccagcgccacagucugcugacuccuguuaccccacucuccccacccggguuagaggaagaggaugucaacgguuaugucaugccagauacacaccucaaagguacucccuccucccgggaaggcacccuuucuucagugggucucaguucuguccuggguacugaagaagaagaugaagaugaggaguaugaauacaugaaccggaggagaaggcacaguccaccucaucccccuaggccaaguucccuugaggagcuggguuaugaguacauggauguggggucagaccucagugccucucugggcagcacacagaguugcccacuccacccuguacccaucaugcccacugcaggcacaacuccagaugaagacuaugaauauaugaaucggcaacgagauggaggugguccugggggugauuaugcagccaugggggccugcccagcaucugagcaaggguaugaagagaugagagcuuuucaggggccuggacaucaggccccccauguccauuaugcccgccuaaaaacucuacguagcuuagaggcuacagacucugccuuugauaacccugauuacuggcauagcaggcuuuuccccaaggcuaaugcccagagaacguaa

SEQ ID NO: 1450 - RNA, 1389 nt, Artificial Sequence
  derived and/or modified sequence opt1 from ErbB3__Homo_sapiens__BAG54127
augcccaugagcaccauccugccggugaccucccccugccuccccgccacgggcgucaccgugugggagcugaugaccuucggggccgagcccuacgcgggccugcgccucgccgaggugccggaccugcuggagaagggggagcggcucgcccagccccagaucugcaccaucgacgucuacauggugauggugaagugcuggaugaucgacgagaacauccgccccacguucaaggagcuggccaacgaguucacccggauggcccgcgacccgccccgguaccuggucaucaagcgcgagagcggccccgggaucgcgcccggccccgagccgcacggccucaccaacaagaagcuggaggagguggagcuggagcccgagcucgaccuggaccuggaccucgaggccgaggaggacaaccuggccaccacgacccugggguccgcccucagccugcccgugggcacccugaaccggccccgcgggucccagagccuccuguccccgagcuccggcuacaugcccaugaaccaggggaaccugggcgagagcugccaggaguccgcggucagcggcuccagcgagcggugcccccgccccgugucccuccacccgaugccccgggggugccuggccagcgaguccagcgagggccacgugaccggguccgaggccgagcugcaggagaaggucagcaugugccgcagccggucccgcagccggagcccccgcccccggggcgacuccgccuaccacucccagcgccacagccuccugacgccggugacgccccuguccccgcccggccucgaggaggaggacgugaacggguacgucaugcccgacacccaccugaagggcacccccagcucccgggaggggacccugagcuccgugggccucagcuccgugcuggggaccgaggaggaggacgaggacgaggaguacgaguacaugaaccgccggcgccgccacagcccgccccacccgccccggcccuccagccuggaggagcucggcuacgaguacauggacgucggcuccgaccugagcgccucccuggggagcacccagagcugcccccuccaccccgugcccaucaugcccaccgcgggcacgaccccggacgaggacuacgaguacaugaaccgccagcgggacgggggcgggcccggcggcgacuacgccgccaugggggccugccccgccuccgagcagggcuacgaggagaugcgcgcguuccaggggcccggccaccaggccccgcacgugcacuacgcccggcugaagacccugcgcagccucgaggccaccgacuccgccuucgacaaccccgacuacuggcacagccggcuguuccccaaggcgaacgcccagcgcacguga

SEQ ID NO: 1451 - RNA, 1389 nt, Artificial Sequence
  derived and/or modified sequence opt2 from ErbB3__Homo_sapiens__BAG54127
augcccauguccaccauccuccccgucaccucccccugccuccccgccaccggcgucaccgucugggagcucaugaccuucggcgccgagcccuacgccggccuccgccucgccgagguccccgaccuccucgagaagggcgagcgccucgcccagccccagaucugcaccaucgacgucuacauggucauggucaagugcuggaugaucgacgagaacauccgccccaccuucaaggagcucgccaacgaguucacccgcauggcccgcgaccccccccgcuaccucgucaucaagcgcgaguccggccccggcaucgcccccggccccgagccccacggccucaccaacaagaagcucgaggaggucgagcucgagcccgagcucgaccucgaccucgaccucgaggccgaggaggacaaccucgccaccaccacccucggcuccgcccucucccuccccgucggcacccucaaccgcccccgcggcucccagucccuccucucccccuccuccggcuacaugcccaugaaccagggcaaccucggcgaguccugccaggaguccgccgucuccggcuccuccgagcgcugcccccgccccgucucccuccaccccaugccccgcggcugccucgccuccgaguccuccgagggccacgucaccggcuccgaggccgagcuccaggagaaggucuccaugugccgcucccgcucccgcucccgcuccccccgcccccgcggcgacuccgccuaccacucccagcgccacucccuccucacccccgucaccccccucuccccccccggccucgaggaggaggacgucaacggcuacgucaugcccgacacccaccucaagggcacccccuccucccgcgagggcacccucuccuccgucggccucuccuccguccucggcaccgaggaggaggacgaggacgaggaguacgaguacaugaaccgccgccgccgccacucccccccccaccccccccgccccuccucccucgaggagcucggcuacgaguacauggacgucggcuccgaccucuccgccucccucggcuccacccaguccugcccccuccaccccguccccaucaugcccaccgccggcaccacccccgacgaggacuacgaguacaugaaccgccagcgcgacggcggcggccccggcggcgacuacgccgccaugggcgccugccccgccuccgagcagggcuacgaggagaugcgcgccuuccagggccccggccaccaggccccccacguccacuacgcccgccucaagacccuccgcucccucgaggccaccgacuccgccuucgacaaccccgacuacuggcacucccgccucuuccccaaggccaacgcccagcgcaccuga

SEQ ID NO: 1452 - RNA, 1389 nt, Artificial Sequence
  derived and/or modified sequence opt3 from ErbB3__Homo_sapiens__BAG54127
augcccaugagcaccauccugccugugacauccccaugccucccggccacuggcgucacgguuugggagcuuaugaccuucggggcugaacccuacgcaggacugagauuggccgaggugccugacuuacuggaaaagggugagaggcuagcgcagccacaaauuuguacaauagauguauauauggugauggucaaaugcuggaugaucgacgaaaacauucggcccacuuuuaaggagcucgcuaaugaguucacccgcauggcccgagauccuccacguuaccuggugaucaaaagagaaucuggccccgggauugcaccuggaccagagccgcacggccuuacaaacaagaaacuggaagagguugaguuggaacccgagcucgaccuggaucuggaccucgaagccgaggaagauaauuuagcuaccacuacacuggguucagcacuuaguuugccuguggggacccugaacaggccacggggaagccagucccuacucucucccucgucaggcuauaugccuaugaaucagggcaaccugggggagagcugucaggagagugccgucuccggaucuagcgaacgcugcccaagacccgugucccuucauccgaugccuagggguugucuggcuucagagaguagcgaaggccacguaacggggucugaggccgaauugcaagagaagguuuccaugugccggucacgcagccgaaguagaucucccaggccacggggagacuccgcguaccauagccagcgucacucgcuccugacuccugugacccccuuaucuccacccggccuggaggaagaggaugucaaugguuaugugaugccugacacacaucucaaggggacuccauccucacgcgaaggaacccuuaguagcgugggccuguccucugucuugggcacagaggaagaggaugaggacgaagaguacgaauauaugaacagaaggcggcgacacagcccgccccacccuccacgccccucaagucuagaggagcugggguacgaauacauggauguuggauccgaccucagcgcaucucuggguucaacccagaguuguccucuucauccagugcccaucaugccgacggccggcacuacaccugacgaggauuaugaauacaugaauagacagagggacgggggaggcccagguggggauuaugcugccaugggcgcaugccccgcuagcgagcaaggauacgaagagaugcgggccuuucagggcccugggcaccaggcgccccauguacacuaugcccgccugaaaaccuugagaucccucgaggcaacugacucugcuuucgauaacccagacuacuggcacucgaggcuguuuccuaaggccaaugcucagcguacauga

SEQ ID NO: 1453 - RNA, 1389 nt, Artificial Sequence
  derived and/or modified sequence opt4 from ErbB3__Homo_sapiens__BAG54127
augcccaugagcaccauccugcccgugaccagccccugccugcccgccaccggcgugaccgugugggagcugaugaccuucggcgccgagcccuacgccggccugagacuggccgaggugcccgaccugcuggagaagggcgagagacuggcccagccccagaucugcaccaucgacguguacauggugauggugaagugcuggaugaucgacgagaacaucagacccaccuucaaggagcuggccaacgaguucaccagaauggccagagacccccccagauaccuggugaucaagagagagagcggccccggcaucgcccccggccccgagccccacggccugaccaacaagaagcuggaggagguggagcuggagcccgagcuggaccuggaccuggaccuggaggccgaggaggacaaccuggccaccaccacccugggcagcgcccugagccugcccgugggcacccugaacagacccagaggcagccagagccugcugagccccagcagcggcuacaugcccaugaaccagggcaaccugggcgagagcugccaggagagcgccgugagcggcagcagcgagagaugccccagacccgugagccugcaccccaugcccagaggcugccuggccagcgagagcagcgagggccacgugaccggcagcgaggccgagcugcaggagaaggugagcaugugcagaagcagaagcagaagcagaagccccagacccagaggcgacagcgccuaccacagccagagacacagccugcugacccccgugaccccccugagcccccccggccuggaggaggaggacgugaacggcuacgugaugcccgacacccaccugaagggcacccccagcagcagagagggcacccugagcagcgugggccugagcagcgugcugggcaccgaggaggaggacgaggacgaggaguacgaguacaugaacagaagaagaagacacagccccccccacccccccagacccagcagccuggaggagcugggcuacgaguacauggacgugggcagcgaccugagcgccagccugggcagcacccagagcugcccccugcaccccgugcccaucaugcccaccgccggcaccacccccgacgaggacuacgaguacaugaacagacagagagacggcggcggccccggcggcgacuacgccgccaugggcgccugccccgccagcgagcagggcuacgaggagaugagagccuuccagggccccggccaccaggccccccacgugcacuacgccagacugaagacccugagaagccuggaggccaccgacagcgccuucgacaaccccgacuacuggcacagcagacuguuccccaaggccaacgcccagagaaccuga

SEQ ID NO: 1454 - RNA, 1389 nt, Artificial Sequence
  derived and/or modified sequence opt5 from ErbB3__Homo_sapiens__BAG54127
augcccaugagcaccauccugccugugacauccccgugccuccccgccacgggcgucaccguuugggagcugaugacauucggggcugaaccuuacgccggacuuagacuggcggaggugcccgaccuccuggaaaagggcgagcggcuugcucagccucaaauuuguaccaucgauguguauauggucauggugaaaugcuggaugauugacgaaaacauccgccccacauuuaaggagcuggccaaugaguucaccagaauggcccgggauccuccgcgcuaccucguuauuaaaagagaaucugggcccggaaucgcuccuggccccgagccucacgggcugacaaacaagaaacuggaagagguggagcucgaacccgagcuggaccuugaucuggaccucgaagccgaggaagauaaucuggcuaccacgacccuuggaagcgcccugucccucccggucggcacacugaaccggccucgcggcucucagagccugcucucccccucuagcggguauaugccuaugaaucagggaaaccugggcgaguccugucaggagagcgcggugucuggguccagcgaaagaugcccccggcccguuucucuucauccuaugccgcgcggaugucuggccuccgagagcucugaaggccacgugaccggguccgaggcugaacuccaagagaaggucagcaugugcagaucccggucucgcagcagauccccucggccccgcggagacagcgccuaccauucucagagacacucccugcuuacacccgugaccccucugucucccccgggccucgaggaagaggaugugaauggcuaugucaugccugacacgcaucugaaggggacacccagcagccgggaaggaacccuguccucuguuggccucagcuccgugcuggggacagaggaagaggaugaggacgaagaguacgaauauaugaacagacgccggagacacagcccuccccacccuccccgcccgucuucccuugaggagcugggauacgaauacauggaugugggcagcgaccucucugcuucccuggggagcacccaguccuguccucuucaucccguccccaucaugccuaccgccggaacaacgccggacgaggauuaugaauacaugaaucggcagagagacggcggcgggcccggaggcgauuaugcggccaugggggcuugcccugccucugagcaaggauacgaagagaugcgcgcuuuucagggccccgggcaccaggccccucaugugcacuaugcccggcugaaaacccucagaagccuggaggcuacagacuccgcguucgauaaccccgacuacuggcacucucgccuguuuccuaaggccaaugcucagcggaccuga

SEQ ID NO: 1455 - protein, 921 aa, Artificial Sequence
  ErbB3__Homo_sapiens__B4DGQ7
MRANDALQVLGLLFSLARGSEVGNSQAVCPGTLNGLSVTGDAENQYQTLYKLYERCEVVMGNLEIVLTGHNADLSFLQWIREVTGYVLVAMNEFSTLPLPNLRVVRGTQVYDGKFAIFVMLNYNTNSSHALRQLRLTQLTEILSGGVYIEKNDKLCHMDTIDWRDIVRDRDAEIVVKDNGRSCPPCHEVCKGRCWGPGSEDCQTLTKTICAPQCNGHCFGPNPNQCCHDECAGGCSGPQDTDCFACRHFNDSGACVPRCPQPLVYNKLTFQLEPNPHTKYQYGGVCVASCPHNFVVDQTSCVRACPPDKMEVDKNGLKMCEPCGGLCPKACEGTGSGSRFQTVDSSNIDGFVNCTKILGNLDFLITGLNGDPWHKIPALDPEKLNVFRTVREITGYLNIQSWPPHMHNFSVFSNLTTIGGRSLYNRGFSLLIMKNLNVTSLGFRSLKEISAGRIYISANRQLCYHHSLNWTKVLRGPTEERLDIKHNRPRRDCVAEGKVCDPLCSSGGCWGPGPGQCLSCRNYSRGGVCVTHCNFLNGEPREFAHEAECFSCHPECQPMEGTATCNGSGSDTCAQCAHFRDGPHCVSSCPHGVLGAKGPIYKYPDVQNECRPCHENCTQGCKGPELQDCLGQTLVLIGKTHLTMALTVIAGLVVIFMMLGGTFLYWRGRRIQNKRAMRRYLERGESIEPLDPSEKANKVLARIFKETELRKLKVLGSGVFGTVHKGVWIPEGESIKIPVCIKVIEDKSGRQSFQAVTDHMLAIGSLDHAHIVRLLGLCPGSSLQLVTQYLPLGSLLDHVRQHRGALGPQLLLNWGVQIAKGMYYLEEHGMVHRNLAARNVLLKSPSQVQVADFGVADLLPPDDKQLLYSEAKTPIKWMALESIHFGKYTHQSDVWSYGQCIWMPSLPSLAPVSNLPFETPS

SEQ ID NO: 1456 - RNA, 2766 nt, Artificial Sequence
  ErbB3__Homo_sapiens__BAG57868
augagggcgaacgacgcucugcaggugcugggcuugcuuuucagccuggcccggggcuccgaggugggcaacucucaggcaguguguccugggacucugaauggccugagugugaccggcgaugcugagaaccaauaccagacacuguacaagcucuacgagaggugugagguggugauggggaaccuugagauugugcucacgggacacaaugccgaccucuccuuccugcaguggauucgagaagugacaggcuauguccucguggccaugaaugaauucucuacucuaccauugcccaaccuccgcguggugcgagggacccaggucuacgaugggaaguuugccaucuucgucauguugaacuauaacaccaacuccagccacgcucugcgccagcuccgcuugacucagcucaccgagauucugucaggggguguuuauauugagaagaacgauaagcuuugucacauggacacaauugacuggagggacaucgugagggaccgagaugcugagauaguggugaaggacaauggcagaagcuguccccccugucaugagguuugcaaggggcgaugcugggguccuggaucagaagacugccagacauugaccaagaccaucugugcuccucaguguaauggucacugcuuugggcccaaccccaaccagugcugccaugaugagugugccgggggcugcucaggcccucaggacacagacugcuuugccugccggcacuucaaugacaguggagccuguguaccucgcuguccacagccucuugucuacaacaagcuaacuuuccagcuggaacccaauccccacaccaaguaucaguauggaggaguuuguguagccagcuguccccauaacuuugugguggaucaaacauccugugucagggccuguccuccugacaagauggaaguagauaaaaaugggcucaagaugugugagccuugugggggacuaugucccaaagccugugagggaacaggcucugggagccgcuuccagacuguggacucgagcaacauugauggauuugugaacugcaccaagauccugggcaaccuggacuuucugaucaccggccucaauggagaccccuggcacaagaucccugcccuggacccagagaagcucaaugucuuccggacaguacgggagaucacagguuaccugaacauccaguccuggccgccccacaugcacaacuucaguguuuuuuccaauuugacaaccauuggaggcagaagccucuacaaccggggcuucucauuguugaucaugaagaacuugaaugucacaucucugggcuuccgaucccugaaggaaauuagugcugggcguaucuauauaagugccaauaggcagcucugcuaccaccacucuuugaacuggaccaaggugcuucgggggccuacggaagagcgacuagacaucaagcauaaucggccgcgcagagacugcguggcagagggcaaagugugugacccacugugcuccucugggggaugcuggggcccaggcccuggucagugcuuguccugucgaaauuauagccgaggaggugucugugugacccacugcaacuuucugaauggggagccucgagaauuugcccaugaggccgaaugcuucuccugccacccggaaugccaacccauggagggcacugccacaugcaauggcucgggcucugauacuugugcucaaugugcccauuuucgagaugggccccacugugugagcagcugcccccauggaguccuaggugccaagggcccaaucuacaaguacccagauguucagaaugaaugucggcccugccaugagaacugcacccagggguguaaaggaccagagcuucaagacuguuuaggacaaacacuggugcugaucggcaaaacccaucugacaauggcuuugacagugauagcaggauugguagugauuuucaugaugcugggcggcacuuuucucuacuggcgugggcgccggauucagaauaaaagggcuaugaggcgauacuuggaacggggugagagcauagagccucuggaccccagugagaaggcuaacaaagucuuggccagaaucuucaaagagacagagcuaaggaagcuuaaagugcuuggcucgggugucuuuggaacugugcacaaaggaguguggaucccugagggugaaucaaucaagauuccagucugcauuaaagucauugaggacaagaguggacggcagaguuuucaagcugugacagaucauaugcuggccauuggcagccuggaccaugcccacauuguaaggcugcugggacuaugcccagggucaucucugcagcuugucacucaauauuugccucuggguucucugcuggaucaugugagacaacaccggggggcacuggggccacagcugcugcucaacuggggaguacaaauugccaagggaauguacuaccuugaggaacaugguauggugcauagaaaccuggcugcccgaaacgugcuacucaagucacccagucagguucagguggcagauuuugguguggcugaccugcugccuccugaugauaagcagcugcuauacagugaggccaagacuccaauuaaguggauggcccuugagaguauccacuuugggaaauacacacaccagagugaugucuggagcuauggucagugcaucuggaugcccucucuaccaucacuggccccaguuucaaauuuaccuuuugagacccccucuuag

SEQ ID NO: 1457 - RNA, 2766 nt, Artificial Sequence
  derived and/or modified sequence opt1 from ErbB3__Homo_sapiens__BAG57868
augcgcgccaacgacgcccuccaggugcugggccugcuguucagccucgcgcggggguccgaggucggcaacagccaggccgugugccccgggacccugaacggccuguccgugaccggggacgccgagaaccaguaccagacgcucuacaagcuguacgagcgcugcgaggucgugaugggcaaccuggagaucgugcucaccggccacaacgccgaccugagcuuccugcaguggauccgggaggucaccggguacgugcucguggccaugaacgaguucuccacccugccgcugcccaaccuccgcgucgugcggggcacccagguguacgacgggaaguucgcgaucuucgucaugcugaacuacaacaccaacagcucccacgcccugcgccagcuccggcugacccagcugaccgagauccucagcggcgggguguacaucgagaagaacgacaagcugugccacauggacacgaucgacuggcgcgacaucgugcgggaccgcgacgccgagaucgucgugaaggacaacggccgguccugcccgcccugccacgaggugugcaagggccgcugcugggggcccggcagcgaggacugccagacccugaccaagaccaucugcgcgccccagugcaacgggcacugcuucggccccaaccccaaccagugcugccacgacgagugcgccggcgggugcuccggcccgcaggacacggacugcuucgccugccggcacuucaacgacagcggggccugcgucccccgcugcccccagccccucguguacaacaagcugaccuuccagcuggagccgaacccccacaccaaguaccaguacggcggggugugcgucgccuccugcccccacaacuucgugguggaccagaccagcugcguccgggccugcccgcccgacaagauggagguggacaagaacggccucaagaugugcgagcccugcggcgggcugugccccaaggcgugcgagggcacgggguccggcagccgcuuccagaccgucgacuccagcaacaucgacggguucgugaacugcaccaagauccugggcaaccucgacuuccugaucaccggccugaacggggaccccuggcacaagaucccggcccucgaccccgagaagcugaacguguuccggacgguccgcgagaucaccggcuaccugaacauccaguccuggccgccccacaugcacaacuucagcguguucagcaaccucaccaccaucgggggccggucccuguacaaccgcggguucagccugcucaucaugaagaaccugaacgugacgucccugggcuuccggagccucaaggagaucuccgccggccgcaucuacaucagcgccaaccgccagcugugcuaccaccacucccugaacuggaccaagguccuccgggggcccaccgaggagcgccuggacaucaagcacaaccggccccgccgggacugcguggccgagggcaaggugugcgacccccugugcagcuccgggggcugcuggggccccgggccgggccagugccucagcugccgcaacuacucccgcgggggcgucugcgugacccacugcaacuuccugaacggggagccccgggaguucgcgcacgaggccgagugcuucagcugccaccccgagugccagccgauggagggcacggcgaccugcaacggcuccgggagcgacacgugcgcccagugcgcccacuuccgggacggcccccacugcguguccagcugcccccacgggguccugggcgccaaggggcccaucuacaaguacccggacgugcagaacgagugccgccccugccacgagaacugcacccagggcugcaagggccccgagcugcaggacugccucgggcagacgcuggugcugaucggcaagacccaccucaccauggcccugaccgucaucgccgggcugguggugaucuucaugaugcucggcgggacguuccuguacuggcggggccgccggauccagaacaagcgcgccaugcggcgcuaccuggagcggggcgaguccaucgagccccucgacccgagcgagaaggccaacaagguccuggcgcgcaucuucaaggagaccgagcugcggaagcucaaggugcugggguccggcguguucgggaccguccacaagggcguguggauccccgagggggagagcaucaagauccccgugugcaucaaggucaucgaggacaagagcggccgccaguccuuccaggccgugaccgaccacaugcuggccaucggcagccucgaccacgcccacaucgugcgccugcuggggcucugccccggcuccagccugcagcuggucacccaguaccucccgcuggggucccugcucgaccacgugcggcagcaccgcggcgcgcugggcccccagcugcuccugaacuggggcgugcagaucgccaaggggauguacuaccuggaggagcacgggaugguccaccggaaccucgccgcccgcaacgugcugcucaagagccccucccaggugcaggucgccgacuucggcguggcggaccugcugcccccggacgacaagcagcugcucuacagcgaggccaagacgcccaucaaguggauggcccuggaguccauccacuucgggaaguacacccaccagagcgacgugugguccuacggccagugcaucuggaugcccagccugcccucccucgccccggucagcaaccugcccuucgagacccccuccuga

SEQ ID NO: 1458 - RNA, 2766 nt, Artificial Sequence
  derived and/or modified sequence opt2 from ErbB3__Homo_sapiens__BAG57868
augcgcgccaacgacgcccuccagguccucggccuccucuucucccucgcccgcggcuccgaggucggcaacucccaggccgucugccccggcacccucaacggccucuccgucaccggcgacgccgagaaccaguaccagacccucuacaagcucuacgagcgcugcgaggucgucaugggcaaccucgagaucguccucaccggccacaacgccgaccucuccuuccuccaguggauccgcgaggucaccggcuacguccucgucgccaugaacgaguucuccacccucccccuccccaaccuccgcgucguccgcggcacccaggucuacgacggcaaguucgccaucuucgucaugcucaacuacaacaccaacuccucccacgcccuccgccagcuccgccucacccagcucaccgagauccucuccggcggcgucuacaucgagaagaacgacaagcucugccacauggacaccaucgacuggcgcgacaucguccgcgaccgcgacgccgagaucgucgucaaggacaacggccgcuccugcccccccugccacgaggucugcaagggccgcugcuggggccccggcuccgaggacugccagacccucaccaagaccaucugcgccccccagugcaacggccacugcuucggccccaaccccaaccagugcugccacgacgagugcgccggcggcugcuccggcccccaggacaccgacugcuucgccugccgccacuucaacgacuccggcgccugcgucccccgcugcccccagccccucgucuacaacaagcucaccuuccagcucgagcccaacccccacaccaaguaccaguacggcggcgucugcgucgccuccugcccccacaacuucgucgucgaccagaccuccugcguccgcgccugcccccccgacaagauggaggucgacaagaacggccucaagaugugcgagcccugcggcggccucugccccaaggccugcgagggcaccggcuccggcucccgcuuccagaccgucgacuccuccaacaucgacggcuucgucaacugcaccaagauccucggcaaccucgacuuccucaucaccggccucaacggcgaccccuggcacaagauccccgcccucgaccccgagaagcucaacgucuuccgcaccguccgcgagaucaccggcuaccucaacauccaguccuggcccccccacaugcacaacuucuccgucuucuccaaccucaccaccaucggcggccgcucccucuacaaccgcggcuucucccuccucaucaugaagaaccucaacgucaccucccucggcuuccgcucccucaaggagaucuccgccggccgcaucuacaucuccgccaaccgccagcucugcuaccaccacucccucaacuggaccaagguccuccgcggccccaccgaggagcgccucgacaucaagcacaaccgcccccgccgcgacugcgucgccgagggcaaggucugcgacccccucugcuccuccggcggcugcuggggccccggccccggccagugccucuccugccgcaacuacucccgcggcggcgucugcgucacccacugcaacuuccucaacggcgagccccgcgaguucgcccacgaggccgagugcuucuccugccaccccgagugccagcccauggagggcaccgccaccugcaacggcuccggcuccgacaccugcgcccagugcgcccacuuccgcgacggcccccacugcgucuccuccugcccccacggcguccucggcgccaagggccccaucuacaaguaccccgacguccagaacgagugccgccccugccacgagaacugcacccagggcugcaagggccccgagcuccaggacugccucggccagacccucguccucaucggcaagacccaccucaccauggcccucaccgucaucgccggccucgucgucaucuucaugaugcucggcggcaccuuccucuacuggcgcggccgccgcauccagaacaagcgcgccaugcgccgcuaccucgagcgcggcgaguccaucgagccccucgaccccuccgagaaggccaacaagguccucgcccgcaucuucaaggagaccgagcuccgcaagcucaagguccucggcuccggcgucuucggcaccguccacaagggcgucuggauccccgagggcgaguccaucaagauccccgucugcaucaaggucaucgaggacaaguccggccgccaguccuuccaggccgucaccgaccacaugcucgccaucggcucccucgaccacgcccacaucguccgccuccucggccucugccccggcuccucccuccagcucgucacccaguaccucccccucggcucccuccucgaccacguccgccagcaccgcggcgcccucggcccccagcuccuccucaacuggggcguccagaucgccaagggcauguacuaccucgaggagcacggcaugguccaccgcaaccucgccgcccgcaacguccuccucaagucccccucccagguccaggucgccgacuucggcgucgccgaccuccucccccccgacgacaagcagcuccucuacuccgaggccaagacccccaucaaguggauggcccucgaguccauccacuucggcaaguacacccaccaguccgacgucugguccuacggccagugcaucuggaugcccucccuccccucccucgcccccgucuccaaccuccccuucgagacccccuccuga

SEQ ID NO: 1459 - RNA, 2766 nt, Artificial Sequence
  derived and/or modified sequence opt3 from ErbB3__Homo_sapiens__BAG57868
augagagccaacgacgcucuccaggugcugggccuucuguucagcuuggcaaggggguccgaggucggaaauucucaagccguuugccccgguaccuuaaacggccugucagugacaggggaugcggaaaaucaguaccagacucuauauaagcucuacgagcggugugaaguagugaugggaaaccuggagaucguccuuacgggccacaaugcugaccugucguuuuugcaguggauucgcgaagugaccgguuauguucucguggccaugaacgaguucagcacacugccucugccaaaucuccgagucgugcgugggacucaaguauacgauggaaaauuugcaauauucguuauguuaaacuauaauaccaacuccucucaugcccugagacagcuuagguugacacagcugaccgagauccuaucgggcggcguguacauugaaaagaaugacaaacucugccacauggauacuaucgacuggcgggauauuguccgcgacagagaugcugagaucguggugaaggacaacgggaggucauguccgcccugccaugaagucuguaaaggacggugcugggguccuggcagcgaggauugucagacacugaccaagacgauaugcgcaccacaauguaaugggcacugcuuuggacccaacccuaaucaguguugccaugacgagugcgccggcgguuguagugggccacaggauacugacugcuucgcuugucgccacuuuaacgacuccggagccugcguuccccgauguccucagccacuuguguauaacaagcugaccuuccaauuggaaccgaauccccacacaaaauaccaguacggcggcguaugcguggcgucuuguccucauaacuuugucguggaucagacuagcugcguuagagcauguccacccgacaagauggagguggauaaaaaugggcucaagaugugcgaaccuuguggaggucugugcccaaaagccugcgagggcaccggguccggaucaagguuccaaacagucgacaguagcaacaucgauggcuuugugaauuguaccaagauuuuagguaaccuggacuuccucaucacggggcuuaauggcgaucccuggcacaagauuccggcucuggacccugaaaaauugaacguauuucggacuguucgugagaucacaggauaucuaaauauacagucuuggcccccacauaugcacaacuucuccguguucucaaaucugaccacuauuggcgggcgcagccucuacaacagaggauuuagucugcuuaucaugaagaaucugaacgucacaucuuuggguuucaggucccucaaagagauuagcgccggccggaucuauaucucggcaaaucgacagcugugcuaccaccauucuuuaaacuggaccaaggugcugcgcgggccuacggaagagagacuagauauuaaacacaacaggccccggcgcgacugugucgcugaaggaaaggugugcgauccacucuguuccucaggcgguugcugggggcccggcccuggacagugucugaguugcagaaauuauagcaggggcgggguuugugugacccauugcaacuuucuuaauggagagccacgugaguucgcccacgaggcggaguguuuuuccugccauccggaaugccaacccauggaggguacagccacuuguaacggcucugggagcgauaccugcgcacagugugcucacuuccgggacggaccucacugcguaucaaguuguccacauggcgucuugggugccaaagggcccauauacaaguauccugacgugcagaaugaaugccgaccaugucacgagaacugcacacagggcuguaagggacccgaacugcaagacugccucggccagacucugguucuuaucgggaaaacccaucugacaauggcuuugaccgugauugccggacucgucgugaucuuuaugaugcugggcgguacuuucuuauacuggagagggaggcgcauacagaauaagcgggcaaugagaagguaccuggagcgcggagaguccauugaaccgcuagauccuagcgagaaagccaacaagguacucgcucgaaucuuuaaagaaacggagcugcggaaacuuaagguguugggcucugguguuuucggcacaguccacaaggggguguggaucccagagggagaaucaauuaagauccccguguguauuaaagucauagaggacaagaguggccgucagagcuuucaagcgguuaccgaucacaugcuggcaaucgggucccucgaccaugcccacauugugagacuguuaggacugugcccuggcucuagucuucaguuggugacucaguaucucccccuggguagccuacuggaucauguaaggcagcaccgcggggcucucggaccacaacugcuuuugaauuggggcguccagaucgccaaagguauguacuaucuggaagaacauggcauggugcaccggaacuuagcagccagaaauguucuccugaaguccccuucacaggugcaagucgcugacuucgggguggccgaucuucugcccccagacgauaagcaguugcucuacagugaagcaaaaaccccgaucaaguggauggcgcuggagucuauucacuuuggaaaauauacacaucagagcgacguuugguccuacggccagugcauauggaugccuucacuacccagccuggcuccagugucuaaccuccccuucgagaccccuuccuga

SEQ ID NO: 1460 - RNA, 2766 nt, Artificial Sequence
  derived and/or modified sequence opt4 from ErbB3__Homo_sapiens__BAG57868
augagagccaacgacgcccugcaggugcugggccugcuguucagccuggccagaggcagcgaggugggcaacagccaggccgugugccccggcacccugaacggccugagcgugaccggcgacgccgagaaccaguaccagacccuguacaagcuguacgagagaugcgagguggugaugggcaaccuggagaucgugcugaccggccacaacgccgaccugagcuuccugcaguggaucagagaggugaccggcuacgugcugguggccaugaacgaguucagcacccugccccugcccaaccugagaguggugagaggcacccagguguacgacggcaaguucgccaucuucgugaugcugaacuacaacaccaacagcagccacgcccugagacagcugagacugacccagcugaccgagauccugagcggcggcguguacaucgagaagaacgacaagcugugccacauggacaccaucgacuggagagacaucgugagagacagagacgccgagaucguggugaaggacaacggcagaagcugcccccccugccacgaggugugcaagggcagaugcuggggccccggcagcgaggacugccagacccugaccaagaccaucugcgccccccagugcaacggccacugcuucggccccaaccccaaccagugcugccacgacgagugcgccggcggcugcagcggcccccaggacaccgacugcuucgccugcagacacuucaacgacagcggcgccugcgugcccagaugcccccagccccugguguacaacaagcugaccuuccagcuggagcccaacccccacaccaaguaccaguacggcggcgugugcguggccagcugcccccacaacuucgugguggaccagaccagcugcgugagagccugcccccccgacaagauggagguggacaagaacggccugaagaugugcgagcccugcggcggccugugccccaaggccugcgagggcaccggcagcggcagcagauuccagaccguggacagcagcaacaucgacggcuucgugaacugcaccaagauccugggcaaccuggacuuccugaucaccggccugaacggcgaccccuggcacaagauccccgcccuggaccccgagaagcugaacguguucagaaccgugagagagaucaccggcuaccugaacauccagagcuggcccccccacaugcacaacuucagcguguucagcaaccugaccaccaucggcggcagaagccuguacaacagaggcuucagccugcugaucaugaagaaccugaacgugaccagccugggcuucagaagccugaaggagaucagcgccggcagaaucuacaucagcgccaacagacagcugugcuaccaccacagccugaacuggaccaaggugcugagaggccccaccgaggagagacuggacaucaagcacaacagacccagaagagacugcguggccgagggcaaggugugcgacccccugugcagcagcggcggcugcuggggccccggccccggccagugccugagcugcagaaacuacagcagaggcggcgugugcgugacccacugcaacuuccugaacggcgagcccagagaguucgcccacgaggccgagugcuucagcugccaccccgagugccagcccauggagggcaccgccaccugcaacggcagcggcagcgacaccugcgcccagugcgcccacuucagagacggcccccacugcgugagcagcugcccccacggcgugcugggcgccaagggccccaucuacaaguaccccgacgugcagaacgagugcagacccugccacgagaacugcacccagggcugcaagggccccgagcugcaggacugccugggccagacccuggugcugaucggcaagacccaccugaccauggcccugaccgugaucgccggccugguggugaucuucaugaugcugggcggcaccuuccuguacuggagaggcagaagaauccagaacaagagagccaugagaagauaccuggagagaggcgagagcaucgagccccuggaccccagcgagaaggccaacaaggugcuggccagaaucuucaaggagaccgagcugagaaagcugaaggugcugggcagcggcguguucggcaccgugcacaagggcguguggauccccgagggcgagagcaucaagauccccgugugcaucaaggugaucgaggacaagagcggcagacagagcuuccaggccgugaccgaccacaugcuggccaucggcagccuggaccacgcccacaucgugagacugcugggccugugccccggcagcagccugcagcuggugacccaguaccugccccugggcagccugcuggaccacgugagacagcacagaggcgcccugggcccccagcugcugcugaacuggggcgugcagaucgccaagggcauguacuaccuggaggagcacggcauggugcacagaaaccuggccgccagaaacgugcugcugaagagccccagccaggugcagguggccgacuucggcguggccgaccugcugccccccgacgacaagcagcugcuguacagcgaggccaagacccccaucaaguggauggcccuggagagcauccacuucggcaaguacacccaccagagcgacguguggagcuacggccagugcaucuggaugcccagccugcccagccuggcccccgugagcaaccugcccuucgagacccccagcuga

SEQ ID NO: 1461 - RNA, 2766 nt, Artificial Sequence
  derived and/or modified sequence opt5 from ErbB3__Homo_sapiens__BAG57868
augagagccaacgacgcucuccaggugcugggccugcuuuucagccuggcccggggguccgaggucggaaauucucaagcgguuugccccggcacccucaacgggcugagcgugacaggagaugcugaaaaucaguaccagacgcuuuauaagcuguacgagcgcugugaaguggucaugggcaaccucgagaucgugcugaccgggcacaaugccgaccuguccuuucuccaguggauuagagaaguuacaggauaugugcuggucgccaugaacgaguucucuacccuuccucugccgaaucuccgggugguucgcggcacacaaguguacgauggcaaauuugcuaucuucgucaugcugaacuauaauaccaacagcucccaugcccuuagacagcugcggcucacacagcugaccgagauucugucugggggaguguacaucgaaaagaaugacaaacucugccacauggauacgauugacuggcgcgauaucgugagagaccgggaugcugagaucgucguuaaggacaacggccgcagcugucccccuugccaugaaguguguaaagggagaugcuggggacccggcuccgaggauugucagacccugacaaagaccauuugcgccccucaauguaaugggcacugcuuuggacccaacccuaaucaguguugccaugacgagugcgcgggcggcuguagcgggccgcaggauacagacugcuucgccugucggcacuuuaacgacucuggagcuugcgugccccgcuguccucagccccuugucuauaacaagcugaccuuccaacucgaaccuaauccccacacgaaauaccaguacggcggggugugcguugccuccuguccgcauaacuuuguggucgaucagacaagcugcgugagagcuuguccucccgacaagauggagguugauaaaaauggacugaagaugugcgaaccuuguggcgggcuuugccccaaagccugcgagggaaccggcucuggcucccgguuccaaacaguggacagcucuaacaucgauggguuugucaauuguaccaagauucugggaaaccucgacuuccugaucaccggccugaauggggaucccuggcacaagauuccugcgcucgacccggaaaaacugaacguguuucgcacagucagagagaucacgggauaucuuaauauucaguccuggcccccucauaugcacaacuucagcguguucuccaaucugaccacaaucggcgggcggucucucuacaacagaggcuuuagccugcuuaucaugaagaaucugaacguuaccucccucggauuccgcagccugaaagagauuucugccggccggaucuauauuuccgcuaauagacagcugugcuaccaccauagccucaacuggacaaaggugcugcgcgggcccaccgaagaacggcuugauaucaaacacaacagaccucgccgggacugugucgccgaaggaaaggugugcgauccccuguguucuagcggcgggugcuggggaccgggcccugggcagugucucuccugcagaaauuauucucgcggcggaguuugugugacgcauugcaacuuucugaauggcgagccccgggaguucgcucacgaggccgaguguuuuagcugccauccugaaugccaacccauggaggggacagccaccuguaacggauccggcagcgauaccugcgcucagugugcgcacuucagagacgggccucacugcgucucuuccuguccccauggagugcugggcgccaaagggccgauuuacaaguauccugacgugcagaaugaaugccgccccugucacgagaacugcacacagggcuguaagggacccgaacuucaagacugccucggccagacccugguucugaucgggaaaacacaucucacgauggcucugaccgucaucgccggacuuguggugauuuuuaugaugcugggcgggacauuccucuacuggcggggaagacggauccagaauaagcgcgccaugagacgguaccuggagagaggcgagagcauugaaccucuggauccgucugagaaagcuaacaagguccuugcccgcaucuuuaaagaaaccgagcuccggaagcugaaggugcugggguccggcguuuucggaacagugcacaaaggcgucuggauucccgagggggaaagcaucaagaucccuguguguauuaaaguuaucgaggacaaguccggaagacagucuuuucaagcggugaccgaucacaugcucgcuauuggcagccuggaccaugcccacaucguccgccuucuggggcucugccccggauccucucugcagcuggugacgcaguaucuuccucucggcagccugcuggaucauguuagacagcaccggggcgcccucgggccccaacugcuucugaauuggggagugcagauugcuaaaggcauguacuaucucgaggaacaugggaugguccaccgcaaccuggccgcuagaaaugugcugcuuaaguccccuagccaggugcaagucgccgacuucggaguugcggaucuccugcccccggacgauaagcagcugcucuacucugaagccaaaaccccuaucaaguggauggcucuggaguccauucacuuuggcaaauauacacaucagagcgacguguggucuuacgggcagugcaucuggaugcccucccuuccuagccuggcccccgugucuaaccucccguucgagaccccuagcuga

SEQ ID NO: 1462 - protein, 1308 aa, Artificial Sequence
  ERBB4__Homo_sapiens__Q15303
MKPATGLWVWVSLLVAAGTVQPSDSQSVCAGTENKLSSLSDLEQQYRALRKYYENCEVVMGNLEITSIEHNRDLSFLRSVREVTGYVLVALNQFRYLPLENLRIIRGTKLYEDRYALAIFLNYRKDGNFGLQELGLKNLTEILNGGVYVDQNKFLCYADTIHWQDIVRNPWPSNLTLVSTNGSSGCGRCHKSCTGRCWGPTENHCQTLTRTVCAEQCDGRCYGPYVSDCCHRECAGGCSGPKDTDCFACMNFNDSGACVTQCPQTFVYNPTTFQLEHNFNAKYTYGAFCVKKCPHNFVVDSSSCVRACPSSKMEVEENGIKMCKPCTDICPKACDGIGTGSLMSAQTVDSSNIDKFINCTKINGNLIFLVTGIHGDPYNAIEAIDPEKLNVFRTVREITGFLNIQSWPPNMTDFSVFSNLVTIGGRVLYSGLSLLILKQQGITSLQFQSLKEISAGNIYITDNSNLCYYHTINWTTLFSTINQRIVIRDNRKAENCTAEGMVCNHLCSSDGCWGPGPDQCLSCRRFSRGRICIESCNLYDGEFREFENGSICVECDPQCEKMEDGLLTCHGPGPDNCTKCSHFKDGPNCVEKCPDGLQGANSFIFKYADPDRECHPCHPNCTQGCNGPTSHDCIYYPWTGHSTLPQHARTPLIAAGVIGGLFILVIVGLTFAVYVRRKSIKKKRALRRFLETELVEPLTPSGTAPNQAQLRILKETELKRVKVLGSGAFGTVYKGIWVPEGETVKIPVAIKILNETTGPKANVEFMDEALIMASMDHPHLVRLLGVCLSPTIQLVTQLMPHGCLLEYVHEHKDNIGSQLLLNWCVQIAKGMMYLEERRLVHRDLAARNVLVKSPNHVKITDFGLARLLEGDEKEYNADGGKMPIKWMALECIHYRKFTHQSDVWSYGVTIWELMTFGGKPYDGIPTREIPDLLEKGERLPQPPICTIDVYMVMVKCWMIDADSRPKFKELAAEFSRMARDPQRYLVIQGDDRMKLPSPNDSKFFQNLLDEEDLEDMMDAEEYLVPQAFNIPPPIYTSRARIDSNRSEIGHSPPPAYTPMSGNQFVYRDGGFAAEQGVSVPYRAPTSTIPEAPVAQGATAEIFDDSCCNGTLRKPVAPHVQEDSSTQRYSADPTVFAPERSPRGELDEEGYMTPMRDKPKQEYLNPVEENPFVSRRKNGDLQALDNPEYHNASNGPPKAEDEYVNEPLYLNTFANTLGKAEYLKNNILSMPEKAKKAFDNPDYWNHSLPPRSTLQHPDYLQEYSTKYFYKQNGRIRPIVAENPEYLSEFSLKPGTVLPPPPYRHRNTVV

SEQ ID NO: 1463 - RNA, 3927 nt, Artificial Sequence
  ERBB4__Homo_sapiens__AAB59446
augaagccggcgacaggacuuugggucugggugagccuucucguggcggcggggaccguccagcccagcgauucucagucagugugugcaggaacggagaauaaacugagcucucucucugaccuggaacagcaguaccgagccuugcgcaaguacuaugaaaacugugagguugucaugggcaaccuggagauaaccagcauugagcacaaccgggaccucuccuuccugcggucuguucgagaagucacaggcuacguguuaguggcucuuaaucaguuucguuaccugccucuggagaauuuacgcauuauucgugggacaaaacuuuaugaggaucgauaugccuuggcaauauuuuuaaacuacagaaaagauggaaacuuuggacuucaagaacuuggauuaaagaacuugacagaaauccuaaaugguggagucuauguagaccagaacaaauuccuuuguuaugcagacaccauucauuggcaagauauuguucggaacccauggccuuccaacuugacucuugugucaacaaaugguaguucaggauguggacguugccauaaguccuguacuggccguugcuggggacccacagaaaaucauugccagacuuugacaaggacggugugugcagaacaaugugacggcagaugcuacggaccuuacgucagugacugcugccaucgagaaugugcuggaggcugcucaggaccuaaggacacagacugcuuugccugcaugaauuucaaugacaguggagcauguguuacucaguguccccaaaccuuugucuacaauccaaccaccuuucaacuggagcacaauuucaaugcaaaguacacauauggagcauucugugucaagaaauguccacauaacuuugugguagauuccaguucuugugugcgugccugcccuaguuccaagauggaaguagaagaaaaugggauuaaaauguguaaaccuugcacugacauuugcccaaaagcuugugauggcauuggcacaggaucauugaugucagcucagacuguggauuccaguaacauugacaaauucauaaacuguaccaagaucaaugggaauuugaucuuucuagucacugguauucauggggacccuuacaaugcaauugaagccauagacccagagaaacugaacgucuuucggacagucagagagauaacagguuuccugaacauacagucauggccaccaaacaugacugacuucaguguuuuuucuaaccuggugaccauugguggaagaguacucuauaguggccuguccuugcuuauccucaagcaacagggcaucaccucucuacaguuccagucccugaaggaaaucagcgcaggaaacaucuauauuacugacaacagcaaccuguguuauuaucauaccauuaacuggacaacacucuucagcacaaucaaccagagaauaguaauccgggacaacagaaaagcugaaaauuguacugcugaaggaauggugugcaaccaucuguguuccagugauggcuguuggggaccugggccagaccaaugucugucgugucgccgcuucaguagaggaaggaucugcauagagucuuguaaccucuaugauggugaauuucgggaguuugagaauggcuccaucuguguggagugugacccccagugugagaagauggaagauggccuccucacaugccauggaccggguccugacaacuguacaaagugcucucauuuuaaagauggcccaaacuguguggaaaaauguccagauggcuuacagggggcaaacaguuucauuuucaaguaugcugauccagaucgggagugccacccaugccauccaaacugcacccaaggguguaacggucccacuagucaugacugcauuuacuacccauggacgggccauuccacuuuaccacaacaugcuagaacuccccugauugcagcuggaguaauuggugggcucuucauucuggucauugugggucugacauuugcuguuuauguuagaaggaagagcaucaaaaagaaaagagccuugagaagauucuuggaaacagaguugguggaaccauuaacucccaguggcacagcacccaaucaagcucaacuucguauuuugaaagaaacugagcugaagaggguaaaaguccuuggcucaggugcuuuuggaacgguuuauaaagguauuuggguaccugaaggagaaacugugaagauuccuguggcuauuaagauucuuaaugagacaacuggucccaaggcaaauguggaguucauggaugaagcucugaucauggcaaguauggaucauccacaccuaguccgguugcugggugugugucugagcccaaccauccagcugguuacucaacuuaugccccauggcugccuguuggaguauguccacgagcacaaggauaacauuggaucacaacugcugcuuaacugguguguccagauagcuaagggaaugauguaccuggaagaaagacgacucguucaucgggauuuggcagcccguaaugucuuagugaaaucuccaaaccaugugaaaaucacagauuuugggcuagccagacucuuggaaggagaugaaaaagaguacaaugcugauggaggaaagaugccaauuaaauggauggcucuggaguguauacauuacaggaaauucacccaucagagugacguuuggagcuauggaguuacuauaugggaacugaugaccuuuggaggaaaacccuaugauggaauuccaacgcgagaaaucccugauuuauuagagaaaggagaacguuugccucagccucccaucugcacuauugacguuuacauggucauggucaaauguuggaugauugaugcugacaguagaccuaaauuuaaggaacuggcugcugaguuuucaaggauggcucgagacccucaaagauaccuaguuauucagggugaugaucguaugaagcuucccaguccaaaugacagcaaguucuuucagaaucucuuggaugaagaggauuuggaagauaugauggaugcugaggaguacuuggucccucaggcuuucaacaucccaccucccaucuauacuuccagagcaagaauugacucgaauaggagugaaauuggacacagcccuccuccugccuacacccccaugucaggaaaccaguuuguauaccgagauggagguuuugcugcugaacaaggagugucugugcccuacagagccccaacuagcacaauuccagaagcuccuguggcacagggugcuacugcugagauuuuugaugacuccugcuguaauggcacccuacgcaagccaguggcaccccauguccaagaggacaguagcacccagagguacagugcugaccccaccguguuugccccagaacggagcccacgaggagagcuggaugaggaagguuacaugacuccuaugcgagacaaacccaaacaagaauaccugaauccaguggaggagaacccuuuuguuucucggagaaaaaauggagaccuucaagcauuggauaaucccgaauaucacaaugcauccaaugguccacccaaggccgaggaugaguaugugaaugagccacuguaccucaacaccuuugccaacaccuugggaaaagcugaguaccugaagaacaacauacugucaaugccagagaaggccaagaaagcguuugacaacccugacuacuggaaccacagccugccaccucggagcacccuucagcacccagacuaccugcaggaguacagcacaaaauauuuuuauaaacagaaugggcggauccggccuauuguggcagagaauccugaauaccucucugaguucucccugaagccaggcacugugcugccgccuccaccuuacagacaccggaauacugugguguaa

SEQ ID NO: 1464 - RNA, 3927 nt, Artificial Sequence
  derived and/or modified sequence opt1 from ERBB4__Homo_sapiens__AAB59446
augaagcccgccaccggccugugggugugggucagccuccugguggccgcggggaccgugcagcccuccgacagccaguccgucugcgccggcacggagaacaagcugagcucccucagcgaccuggagcagcaguaccgcgcccugcggaaguacuacgagaacugcgagguggugauggggaaccucgagaucaccuccaucgagcacaaccgcgaccugagcuuccugcgguccguccgcgaggugaccggcuacgugcucgucgcccugaaccaguuccgguaccugccccucgagaaccugcgcaucauccgggggaccaagcuguacgaggaccgcuacgcccucgcgaucuuccugaacuaccggaaggacggcaacuucggccugcaggagcucgggcugaagaaccugacggagauccucaacggcgggguguacguggaccagaacaaguuccugugcuacgccgacaccauccacuggcaggacaucguccgcaaccccuggcccagcaaccugacccucguguccaccaacggcagcuccgggugcggccggugccacaagagcugcacgggccgcugcugggggccgaccgagaaccacugccagacccugacccggacggugugcgccgagcagugcgacggccgcugcuacgggcccuacgucuccgacugcugccaccgggagugcgccggcggcugcagcgggcccaaggacaccgacugcuucgcgugcaugaacuucaacgacuccggcgccugcgugacccagugcccccagaccuucguguacaacccgacgaccuuccagcuggagcacaacuucaacgccaaguacaccuacggggccuucugcgucaagaagugcccccacaacuucgugguggacagcuccagcugcguccgcgccugccccagcuccaagauggagguggaggagaacggcaucaagaugugcaagcccugcaccgacaucugcccgaaggcgugcgacgggaucggcacgggcagccucauguccgcccagaccguggacagcuccaacaucgacaaguucaucaacugcaccaagaucaacgggaaccugaucuuccuggucaccggcauccacggggaccccuacaacgccaucgaggccaucgaccccgagaagcucaacguguuccggacgguccgcgagaucaccggcuuccugaacauccagagcuggcccccgaacaugaccgacuucuccguguucagcaaccuggugaccaucgggggccggguccucuacuccggccugagccugcucauccugaagcagcaggggaucacgucccugcaguuccagagccucaaggagaucuccgccggcaacaucuacaucaccgacaacagcaaccugugcuacuaccacaccaucaacuggaccacgcuguucuccaccaucaaccagcgcaucgugauccgggacaaccgcaaggcggagaacugcaccgccgaggggauggugugcaaccaccucugcagcuccgacggcugcugggggcccggccccgaccagugccugagcugccgccgguucucccgcggccggaucugcaucgagagcugcaaccuguacgacggggaguuccgcgaguucgagaacggcagcaucugcgucgagugcgacccccagugcgagaagauggaggacgggcuccugaccugccacggcccgggccccgacaacugcacgaagugcucccacuucaaggacgggcccaacugcguggagaagugccccgacggccugcagggggccaacagcuucaucuucaaguacgccgacccggaccgggagugccaccccugccaccccaacugcacccagggcugcaacgggcccaccucccacgacugcaucuacuacccguggaccggccacagcacccucccccagcacgcccgcacgccccugaucgcggccggcgugaucgggggccuguucauccuggucaucguggggcucaccuucgccguguacguccggcgcaaguccaucaagaagaagcgggcccugcgccgguuccuggagaccgagcucguggagccgcugacccccagcggcacggcccccaaccaggcgcagcugcgcauccucaaggagaccgagcugaagcgggugaagguccugggguccggcgccuucggcaccguguacaaggggaucugggugcccgagggcgagaccgucaagaucccgguggccaucaagauccucaacgagacgaccgggcccaaggccaacguggaguucauggacgaggcgcugaucauggccagcauggaccacccccaccugguccgccuccugggcgugugccugucccccaccauccagcucgugacccagcugaugccgcacgggugccugcucgaguacguccacgagcacaaggacaacaucggcagccagcugcugcucaacuggugcgugcagaucgccaagggcaugauguaccuggaggagcggcgccuggugcaccgggaccucgccgcccgcaacguccuggugaagucccccaaccacgugaagaucacggacuucgggcuggcgcggcuccuggagggcgacgagaaggaguacaacgccgacgggggcaagaugcccaucaaguggauggcccuggagugcauccacuaccgcaaguucacccaccagagcgacgucugguccuacggggugaccaucugggagcucaugaccuucggcggcaagcccuacgacgggaucccgacgcgcgagauccccgaccugcuggagaagggcgagcggcucccccagcccccgaucugcaccaucgacguguacauggucauggugaagugcuggaugaucgacgccgacagccgccccaaguucaaggagcuggccgcggaguucucccggauggcccgcgacccccagcgguaccuggugauccagggggacgaccgcaugaagcuccccagcccgaacgacuccaaguucuuccagaaccugcuggacgaggaggaccucgaggacaugauggacgccgaggaguaccuggucccccaggccuucaacaucccgcccccgaucuacaccagccgggcccgcaucgacagcaaccgguccgagaucggccacagcccgccgcccgcguacacccccauguccggcaaccaguucguguaccgcgacgggggcuucgccgccgagcagggggugagcguccccuaccgggcccccacguccaccauccccgaggcgcccguggcccagggcgccaccgccgagaucuucgacgacagcugcugcaacgggacccugcgcaagcccguggcgccccacguccaggaggacuccagcacgcagcgguacuccgccgaccccaccguguucgcccccgagcgcagcccccggggcgagcucgacgaggagggcuacaugacccccaugcgcgacaagccgaagcaggaguaccugaaccccguggaggagaaccccuucgucucccggcgcaagaacggggaccugcaggcccucgacaaccccgaguaccacaacgccagcaacggcccgcccaaggccgaggacgaguacgugaacgagccccuguaccugaacaccuucgcgaacacgcucgggaaggccgaguaccugaagaacaacauccuguccaugcccgagaaggccaagaaggccuucgacaacccggacuacuggaaccacagccucccgccccgguccacccugcagcaccccgacuaccugcaggaguacagcaccaaguacuucuacaagcagaacggccgcauccggcccaucguggccgagaaccccgaguaccucuccgaguucagccugaagcccgggaccguccugcccccgccgcccuaccgccaccgcaacacggugguguga

SEQ ID NO: 1465 - RNA, 3927 nt, Artificial Sequence
  derived and/or modified sequence opt2 from ERBB4__Homo_sapiens__AAB59446
augaagcccgccaccggccucugggucugggucucccuccucgucgccgccggcaccguccagcccuccgacucccaguccgucugcgccggcaccgagaacaagcucuccucccucuccgaccucgagcagcaguaccgcgcccuccgcaaguacuacgagaacugcgaggucgucaugggcaaccucgagaucaccuccaucgagcacaaccgcgaccucuccuuccuccgcuccguccgcgaggucaccggcuacguccucgucgcccucaaccaguuccgcuaccucccccucgagaaccuccgcaucauccgcggcaccaagcucuacgaggaccgcuacgcccucgccaucuuccucaacuaccgcaaggacggcaacuucggccuccaggagcucggccucaagaaccucaccgagauccucaacggcggcgucuacgucgaccagaacaaguuccucugcuacgccgacaccauccacuggcaggacaucguccgcaaccccuggcccuccaaccucacccucgucuccaccaacggcuccuccggcugcggccgcugccacaaguccugcaccggccgcugcuggggccccaccgagaaccacugccagacccucacccgcaccgucugcgccgagcagugcgacggccgcugcuacggccccuacgucuccgacugcugccaccgcgagugcgccggcggcugcuccggccccaaggacaccgacugcuucgccugcaugaacuucaacgacuccggcgccugcgucacccagugcccccagaccuucgucuacaaccccaccaccuuccagcucgagcacaacuucaacgccaaguacaccuacggcgccuucugcgucaagaagugcccccacaacuucgucgucgacuccuccuccugcguccgcgccugccccuccuccaagauggaggucgaggagaacggcaucaagaugugcaagcccugcaccgacaucugccccaaggccugcgacggcaucggcaccggcucccucauguccgcccagaccgucgacuccuccaacaucgacaaguucaucaacugcaccaagaucaacggcaaccucaucuuccucgucaccggcauccacggcgaccccuacaacgccaucgaggccaucgaccccgagaagcucaacgucuuccgcaccguccgcgagaucaccggcuuccucaacauccaguccuggccccccaacaugaccgacuucuccgucuucuccaaccucgucaccaucggcggccgcguccucuacuccggccucucccuccucauccucaagcagcagggcaucaccucccuccaguuccagucccucaaggagaucuccgccggcaacaucuacaucaccgacaacuccaaccucugcuacuaccacaccaucaacuggaccacccucuucuccaccaucaaccagcgcaucgucauccgcgacaaccgcaaggccgagaacugcaccgccgagggcauggucugcaaccaccucugcuccuccgacggcugcuggggccccggccccgaccagugccucuccugccgccgcuucucccgcggccgcaucugcaucgaguccugcaaccucuacgacggcgaguuccgcgaguucgagaacggcuccaucugcgucgagugcgacccccagugcgagaagauggaggacggccuccucaccugccacggccccggccccgacaacugcaccaagugcucccacuucaaggacggccccaacugcgucgagaagugccccgacggccuccagggcgccaacuccuucaucuucaaguacgccgaccccgaccgcgagugccaccccugccaccccaacugcacccagggcugcaacggccccaccucccacgacugcaucuacuaccccuggaccggccacuccacccucccccagcacgcccgcaccccccucaucgccgccggcgucaucggcggccucuucauccucgucaucgucggccucaccuucgccgucuacguccgccgcaaguccaucaagaagaagcgcgcccuccgccgcuuccucgagaccgagcucgucgagccccucacccccuccggcaccgcccccaaccaggcccagcuccgcauccucaaggagaccgagcucaagcgcgucaagguccucggcuccggcgccuucggcaccgucuacaagggcaucuggguccccgagggcgagaccgucaagauccccgucgccaucaagauccucaacgagaccaccggccccaaggccaacgucgaguucauggacgaggcccucaucauggccuccauggaccacccccaccucguccgccuccucggcgucugccucucccccaccauccagcucgucacccagcucaugccccacggcugccuccucgaguacguccacgagcacaaggacaacaucggcucccagcuccuccucaacuggugcguccagaucgccaagggcaugauguaccucgaggagcgccgccucguccaccgcgaccucgccgcccgcaacguccucgucaagucccccaaccacgucaagaucaccgacuucggccucgcccgccuccucgagggcgacgagaaggaguacaacgccgacggcggcaagaugcccaucaaguggauggcccucgagugcauccacuaccgcaaguucacccaccaguccgacgucugguccuacggcgucaccaucugggagcucaugaccuucggcggcaagcccuacgacggcauccccacccgcgagauccccgaccuccucgagaagggcgagcgccucccccagccccccaucugcaccaucgacgucuacauggucauggucaagugcuggaugaucgacgccgacucccgccccaaguucaaggagcucgccgccgaguucucccgcauggcccgcgacccccagcgcuaccucgucauccagggcgacgaccgcaugaagcuccccucccccaacgacuccaaguucuuccagaaccuccucgacgaggaggaccucgaggacaugauggacgccgaggaguaccucgucccccaggccuucaacauccccccccccaucuacaccucccgcgcccgcaucgacuccaaccgcuccgagaucggccacucccccccccccgccuacacccccauguccggcaaccaguucgucuaccgcgacggcggcuucgccgccgagcagggcgucuccguccccuaccgcgcccccaccuccaccauccccgaggcccccgucgcccagggcgccaccgccgagaucuucgacgacuccugcugcaacggcacccuccgcaagcccgucgccccccacguccaggaggacuccuccacccagcgcuacuccgccgaccccaccgucuucgcccccgagcgcuccccccgcggcgagcucgacgaggagggcuacaugacccccaugcgcgacaagcccaagcaggaguaccucaaccccgucgaggagaaccccuucgucucccgccgcaagaacggcgaccuccaggcccucgacaaccccgaguaccacaacgccuccaacggcccccccaaggccgaggacgaguacgucaacgagccccucuaccucaacaccuucgccaacacccucggcaaggccgaguaccucaagaacaacauccucuccaugcccgagaaggccaagaaggccuucgacaaccccgacuacuggaaccacucccuccccccccgcuccacccuccagcaccccgacuaccuccaggaguacuccaccaaguacuucuacaagcagaacggccgcauccgccccaucgucgccgagaaccccgaguaccucuccgaguucucccucaagcccggcaccguccucccccccccccccuaccgccaccgcaacaccgucgucuga

SEQ ID NO: 1466 - RNA, 3927 nt, Artificial Sequence
  derived and/or modified sequence opt3 from ERBB4__Homo_sapiens__AAB59446
augaagcccgccaccggccugugggugugggucagccuccuuguugcugcagggacagugcagccuuccgacucucaaucaguaugcgccggaacugaaaacaaacugaguagcuuguccgauuuagaacagcaguacagagcgcugaggaaguauuacgagaauugugaaguggucauggguaaccuagagaucacgucuauugaacacaaucgggaccucucguuccugcgcucagugcgagagguuaccggcuaugugcuugucgcucugaaccaguuucguuacuugccacucgagaaucugagaauaaucagggggacaaaacuguaugaagaucgguacgcccucgcaauuuucuuaaacuaucgcaaggacggaaauuuuggccugcaagagcuugguuugaaaaaccugacugaaauccuaaaugggggaguguacguagaucagaacaaguuccucugcuacgccgacaccauucauuggcaggauaucguuagaaauccguggcccagcaaccugacacuugugaguaccaauggcuccucuggcugugggaggugccacaagagcuguacuggacggugcugggguccuacagagaaccauugucagacccugacgcgcacugucugcgcugagcaaugugacggccgaugcuaugggccauacguguccgauuguugccacagagaaugcgcaggaggcuguucaggucccaaagacaccgauugcuuugccuguaugaauuucaacgacaguggggcuugcgugacacaguguccucagacuuuugucuauaacccaaccacauuccaguuggagcauaauuuuaacgccaaguacaccuauggagcguucugcguuaaaaaguguccccacaauuuugugguagauucuagcuccugcgugagggcauguccuucaagcaaaauggaagucgaggaaaacggcauaaagaugugcaagccauguacggacaucugcccgaaagccugcgacggcauugggacuggaagucucaugucugcucaaacaguggauuccagcaauaucgacaaguucauuaacuguaccaaaaucaaugguaaccugauauuuuuaguuacuggcauucacggggaucccuacaaugccaucgaggcaauugacccugagaagcugaacguguuccggacaguccgugaaaucaccggauuccucaauauccagucguggccacccaacaugacggauuuuucuguguucuccaaucuuguaaccauuggcggucgcguucuguauucaggguugagucuacugauacucaaacagcaaggcaucacaagccugcaguuucagucccuuaaggagauuucugcuggaaacaucuacauaacugacaauagcaaccugugcuacuaucauaccauuaacuggacaacuuuguucucaaccaucaaucagagaaucgugauuagggauaaccggaaagccgaaaauuguacagcggagggcauggucugcaaccaccucuguaguuccgacgggugcuggggaccugguccagaucaaugucugagcugccgacgcuuuucuagaggcaggaucuguauugaaucaugcaauuuauacgacggggaguuccgggaguuugaaaacggaaguauauguguggagugcgauccccagugcgaaaagauggaggacggccugcuaaccugucaugguccggggccugacaauugcacuaaguguagccacuucaaagauggccccaacugcgucgaaaaguguccagacggacuccagggcgccaauuccuuuaucuucaaauaugcagauccugaccgcgagugccaccccugucauccaaacugcacgcagggguguaauggacccacaucucacgauugcauuuacuauccuuggaccggucauucgacucugccacaacacgcuagaaccccgcuuaucgccgcuggcgugaucgggggauuguuuauucugguuauagugggccucacauucgccguauacgucaggcguaagagcaucaaaaagaagcgggcacugcgaagauuucuugagaccgaacugguggagcccuugacuccuuccgguacagccccaaaccaggcucagcucaggauucugaaagaaacggaguuaaagcgcguuaaagugcuggggucaggcgcguucggaaccgucuauaagggcaucugggugcccgagggggaaacuguaaaaauuccuguggcaaucaagauacuaaaugagacaaccggaccaaaggccaacguugaguucauggacgaagcucucaucauggccaguauggaucauccccaccugguccggcuuuugggcgugugucugucuccgacaauucagcucgugacucaacugaugccucacgguugcuuacuggaauacguccaugagcacaaagacaauaucgggagccagcuuuugcucaacuggugcguucagauugcaaagggaaugauguaccuggaggaaagaaggcuagugcaucgcgaucuggccgcucgaaacgugcucguaaaauccccaaaucacgucaagaucaccgacuuuggccuggcccggcuuuuggagggugaugaaaaagaguauaacgcagacggcgggaagaugcccauaaaguggauggcgcuggaauguauucacuaccguaaauucacgcaucagucagauguguggagcuauggaguuaccaucugggaguuaaugacauuuggcgggaagccuuacgacggcauucccacuagagagaucccagaccuccuggaaaaaggagagaggcuuccucaacccccaauaugcaccaucgauguguauauggucauggugaaguguuggaugauugacgcugauucucgcccgaaauucaaggaacuggccgcagaguuuucccggauggccagagacccucagagguacuugguuauccagggugaugaccgaaugaaacuccccaguccaaaugauagcaaguucuuucaaaaccugcuagacgaagaggaucuggaggacaugauggaugcugaagaguaucucgugccccaggccuucaauauuccuccacccaucuacacaucucgcgcacggauagacuccaacagaucagaaauugggcacaguccuccgccagcuuacacucccaugagcggaaaucaguuuguauauagggauggcgguuucgccgcggagcagggcgucucggugccuuaccgugccccaaccuccacgauccccgaggcuccuguggcacaaggggccacagcugaaaucuuugacgacucuugcuguaacggaacccugcgcaagccggucgcaccccauguucaggaggauagcucaacucagcgguauagugccgacccaacaguguucgcgccugaaagaucccccaggggcgagcuugaugaagagggguacaugaccccaaugcgagacaaaccuaagcaggaguauuugaaucccguagaagagaacccauuugugucucggcgcaaaaauggagaucugcaagccuuagacaacccggaauaccacaaugcuagcaacggcccucccaaggccgaggaugaauaugucaaugagccacucuaccugaacacuuucgcaaacacccuugguaaagcugaguaccugaagaauaacauucuauccaugcccgaaaaggccaaaaaggcauucgacaauccugauuauuggaaccauucacucccacccagaagcacacugcagcacccugacuacuugcaggaguauaguacgaaauacuuuuauaagcagaaugggaggauccggccgauuguggccgaaaacccagaguaccugucugaguucuccuuaaaacccggaaccguucucccucccccaccuuaucgacacagaaauacuguggucuga

SEQ ID NO: 1467 - RNA, 3927 nt, Artificial Sequence
  derived and/or modified sequence opt4 from ERBB4__Homo_sapiens__AAB59446
augaagcccgccaccggccugugggugugggugagccugcugguggccgccggcaccgugcagcccagcgacagccagagcgugugcgccggcaccgagaacaagcugagcagccugagcgaccuggagcagcaguacagagcccugagaaaguacuacgagaacugcgagguggugaugggcaaccuggagaucaccagcaucgagcacaacagagaccugagcuuccugagaagcgugagagaggugaccggcuacgugcugguggcccugaaccaguucagauaccugccccuggagaaccugagaaucaucagaggcaccaagcuguacgaggacagauacgcccuggccaucuuccugaacuacagaaaggacggcaacuucggccugcaggagcugggccugaagaaccugaccgagauccugaacggcggcguguacguggaccagaacaaguuccugugcuacgccgacaccauccacuggcaggacaucgugagaaaccccuggcccagcaaccugacccuggugagcaccaacggcagcagcggcugcggcagaugccacaagagcugcaccggcagaugcuggggccccaccgagaaccacugccagacccugaccagaaccgugugcgccgagcagugcgacggcagaugcuacggccccuacgugagcgacugcugccacagagagugcgccggcggcugcagcggccccaaggacaccgacugcuucgccugcaugaacuucaacgacagcggcgccugcgugacccagugcccccagaccuucguguacaaccccaccaccuuccagcuggagcacaacuucaacgccaaguacaccuacggcgccuucugcgugaagaagugcccccacaacuucgugguggacagcagcagcugcgugagagccugccccagcagcaagauggagguggaggagaacggcaucaagaugugcaagcccugcaccgacaucugccccaaggccugcgacggcaucggcaccggcagccugaugagcgcccagaccguggacagcagcaacaucgacaaguucaucaacugcaccaagaucaacggcaaccugaucuuccuggugaccggcauccacggcgaccccuacaacgccaucgaggccaucgaccccgagaagcugaacguguucagaaccgugagagagaucaccggcuuccugaacauccagagcuggccccccaacaugaccgacuucagcguguucagcaaccuggugaccaucggcggcagagugcuguacagcggccugagccugcugauccugaagcagcagggcaucaccagccugcaguuccagagccugaaggagaucagcgccggcaacaucuacaucaccgacaacagcaaccugugcuacuaccacaccaucaacuggaccacccuguucagcaccaucaaccagagaaucgugaucagagacaacagaaaggccgagaacugcaccgccgagggcauggugugcaaccaccugugcagcagcgacggcugcuggggccccggccccgaccagugccugagcugcagaagauucagcagaggcagaaucugcaucgagagcugcaaccuguacgacggcgaguucagagaguucgagaacggcagcaucugcguggagugcgacccccagugcgagaagauggaggacggccugcugaccugccacggccccggccccgacaacugcaccaagugcagccacuucaaggacggccccaacugcguggagaagugccccgacggccugcagggcgccaacagcuucaucuucaaguacgccgaccccgacagagagugccaccccugccaccccaacugcacccagggcugcaacggccccaccagccacgacugcaucuacuaccccuggaccggccacagcacccugccccagcacgccagaaccccccugaucgccgccggcgugaucggcggccuguucauccuggugaucgugggccugaccuucgccguguacgugagaagaaagagcaucaagaagaagagagcccugagaagauuccuggagaccgagcugguggagccccugacccccagcggcaccgcccccaaccaggcccagcugagaauccugaaggagaccgagcugaagagagugaaggugcugggcagcggcgccuucggcaccguguacaagggcaucugggugcccgagggcgagaccgugaagauccccguggccaucaagauccugaacgagaccaccggccccaaggccaacguggaguucauggacgaggcccugaucauggccagcauggaccacccccaccuggugagacugcugggcgugugccugagccccaccauccagcuggugacccagcugaugccccacggcugccugcuggaguacgugcacgagcacaaggacaacaucggcagccagcugcugcugaacuggugcgugcagaucgccaagggcaugauguaccuggaggagagaagacuggugcacagagaccuggccgccagaaacgugcuggugaagagccccaaccacgugaagaucaccgacuucggccuggccagacugcuggagggcgacgagaaggaguacaacgccgacggcggcaagaugcccaucaaguggauggcccuggagugcauccacuacagaaaguucacccaccagagcgacguguggagcuacggcgugaccaucugggagcugaugaccuucggcggcaagcccuacgacggcauccccaccagagagauccccgaccugcuggagaagggcgagagacugccccagccccccaucugcaccaucgacguguacauggugauggugaagugcuggaugaucgacgccgacagcagacccaaguucaaggagcuggccgccgaguucagcagaauggccagagacccccagagauaccuggugauccagggcgacgacagaaugaagcugcccagccccaacgacagcaaguucuuccagaaccugcuggacgaggaggaccuggaggacaugauggacgccgaggaguaccuggugccccaggccuucaacauccccccccccaucuacaccagcagagccagaaucgacagcaacagaagcgagaucggccacagccccccccccgccuacacccccaugagcggcaaccaguucguguacagagacggcggcuucgccgccgagcagggcgugagcgugcccuacagagcccccaccagcaccauccccgaggcccccguggcccagggcgccaccgccgagaucuucgacgacagcugcugcaacggcacccugagaaagcccguggccccccacgugcaggaggacagcagcacccagagauacagcgccgaccccaccguguucgcccccgagagaagccccagaggcgagcuggacgaggagggcuacaugacccccaugagagacaagcccaagcaggaguaccugaaccccguggaggagaaccccuucgugagcagaagaaagaacggcgaccugcaggcccuggacaaccccgaguaccacaacgccagcaacggcccccccaaggccgaggacgaguacgugaacgagccccuguaccugaacaccuucgccaacacccugggcaaggccgaguaccugaagaacaacauccugagcaugcccgagaaggccaagaaggccuucgacaaccccgacuacuggaaccacagccugccccccagaagcacccugcagcaccccgacuaccugcaggaguacagcaccaaguacuucuacaagcagaacggcagaaucagacccaucguggccgagaaccccgaguaccugagcgaguucagccugaagcccggcaccgugcugccccccccccccuacagacacagaaacaccgugguguga

SEQ ID NO: 1468 - RNA, 3927 nt, Artificial Sequence
  derived and/or modified sequence opt5 from ERBB4__Homo_sapiens__AAB59446
augaagcccgccaccggccugugggugugggucagccuccugguugcugccgggacagugcagccuuccgacucucaaagcgugugcgcgggaacggaaaacaaacuuuccucucugagcgaucucgaacagcaguacagagcucugcggaaguauuacgagaauugugaagucgugaugggcaaccuugagaucaccuccauugaacacaaucgcgaccugucuuuccucagaagcguucgggaggugacaggguauguccugguggcccugaaccaguuucgcuaccucccgcuggagaaucuuagaaucauucggggaaccaaacuguaugaagaucgcuacgcccucgcuaucuuccugaacuauagaaaggacggcaauuuugggcuucaagagcugggacucaaaaaccugacagaaauucugaauggcggcguuuacguggaucagaacaaguuccucugcuacgccgacaccauccauuggcaggauaucguccggaaucccuggccuuccaaccugacacuugugagcaccaaugggucuuccggauguggccgcugccacaagagcuguacggggagaugcuggggacccaccgagaaccauugucagacacugacccggacagugugcgcugagcaaugugacggccgcugcuaugggccuuacgucucugauuguugccacagagaaugcgccggaggcuguuccggccccaaagacaccgauugcuuugcguguaugaauuucaacgacagcggggccugcguuacgcaguguccucagacauuuguguauaacccgaccacauuccagcucgagcauaauuuuaacgcuaaguacaccuauggagccuucugcgugaaaaaguguccccacaauuuugucguggauucuuccagcugcguucgggcuuguccuuccucuaaaauggaaguggaggaaaacggcauuaagaugugcaagcccuguaccgacaucugcccuaaagccugcgacgggauuggaacaggcagccugauguccgcgcaaacggucgauagcucuaauaucgacaaguucauuaacuguaccaaaaucaaugggaaccuuauuuuucuggugacaggaauccacggcgaucccuacaaugccaucgaggcuauugacccggagaagcucaacguuuuccgcaccgugagagaaaucacaggcuuccugaauauucaguccuggccucccaacaugaccgauuuuagcgucuucucuaaucuggugacgaucgggggacggguccucuauagcggccugucccuucugauucucaaacagcaagggaucacaucucugcaguuucagagccuuaaggagaucuccgccggaaacauuuacaucaccgacaauagcaaccugugcuacuaucauaccauuaacuggacaacccucuucucuacaaucaaucagagaauugugauccgcgauaaccggaaagcugaaaauuguacggccgagggcaugguuugcaaccaccuguguuccagcgacgggugcuggggcccuggacccgaucaaugucugucuugcagacgcuuuucccggggcagaaucuguauugaaagcugcaaucucuacgacggggaguuccgcgaguuugaaaacggauccaucuguguggagugcgauccccagugcgaaaagauggaggacggccugcuuaccugucaugggccuggaccggacaauugcacaaaguguucucacuucaaagauggccccaacugcgucgaaaaguguccugacgggcugcagggcgccaauagcuuuauuuucaaauaugcugaucccgaccgggagugccacccuugucaucccaacugcacccagggauguaauggcccgacaucccacgauugcaucuacuauccuuggaccgggcauucuacgcucccccaacacgcgagaaccccucugauugccgcuggagugaucggcgggcuguuuauucuuguuaucgugggacucacauucgccgucuacgugcgcagaaagagcaucaaaaagaagagagcccugcgccgguuucuggagaccgaacucguggagccccugacaccuuccggcaccgcucccaaccaggcccagcuucggauucugaaagaaacggagcucaagcggguuaaaguccuggggagcggcgcguucggaacaguguauaagggcaucugggugccggagggggaaaccgucaaaauuccuguggcuaucaagauucugaaugagacaaccggacccaaggccaacguugaguucauggacgaagcccuuaucauggcuucuauggaucauccccaccucgugcgccugcugggcgucugucucuccccuaccauccagcuggugacacaacuuaugccgcacgggugccugcucgaauacguucaugagcacaaagacaauauuggaagccagcugcugcuuaacuggugcgugcagaucgccaagggcaugauguaccucgaggaaagacggcugguccauagagaucuggcugcccgcaacgugcucguuaaaucucccaaucacgugaagauuacggacuuugggcuggcgcggcuucuggagggcgaugaaaaagaguauaacgccgacggaggcaagaugccuaucaaguggauggcucucgaauguauucacuacagaaaauucacccaucaguccgaugucuggagcuauggggugacaaucugggagcugaugaccuuuggaggcaagcccuacgacgggaucccuacacgcgagauucccgaccugcuugaaaaaggagagagacucccucaacccccgaucugcaccauugauguguauauggucaugguuaaguguuggaugaucgacgccgauucucggccuaaauucaaggaacuggcugccgaguuuagccgcauggcgagagacccccagcgguaccuggugauucagggcgaugaccgcaugaaacucccuucccccaaugauagcaaguucuuucaaaaccugcuugacgaagaggaucuggaggacaugauggaugccgaagaguaucucgugccgcaggcuuucaauaucccucccccuaucuacacgucuagagcccggauugacuccaaccgcagcgaaaucggccacuccccuccgcccgcuuacacacccaugucugggaaucaguuugucuauagagauggaggcuucgccgccgagcagggggugagcguucccuaccgggcuccuaccuccaccauucccgaggcgccuguggcccaaggagcuacagccgaaaucuuugacgacucuugcuguaacggcacccugcgcaagcccgucgccccucaugugcaggaggauagcuccacacagagauauucugcugacccgacgguuuucgcccccgaacggagcccuagaggggagcuggaugaagagggauacaugacccccaugcgcgacaaaccuaagcaggaguaucuuaaucccguggaagagaacccguuugucucccggcgcaaaaauggcgaucugcaagcgcucgacaacccugaauaccacaaugcuagcaacggcccucccaaggccgaggaugaauaugugaaugagccccuguaccucaacacauucgccaacacccuggggaaagcugaguaccuuaagaauaacauucugucuaugcccgaaaaggccaaaaaggcguucgacaauccugauuauuggaaccauucccucccgcccagaagcacacugcagcacccugacuaccugcaggaguauucuaccaaauacuuuuauaagcagaauggacggaucagacccauuguugcugaaaacccugaguaccuuuccgaguucagccugaaacccggcacggugcucccgccucccccuuaucgccaccggaauaccgucguguga

SEQ ID NO: 1469 - protein, 486 aa, Artificial Sequence
  ERG__Homo_sapiens__P11308
MIQTVPDPAAHIKEALSVVSEDQSLFECAYGTPHLAKTEMTASSSSDYGQTSKMSPRVPQQDWLSQPPARVTIKMECNPSQVNGSRNSPDECSVAKGGKMVGSPDTVGMNYGSYMEEKHMPPPNMTTNERRVIVPADPTLWSTDHVRQWLEWAVKEYGLPDVNILLFQNIDGKELCKMTKDDFQRLTPSYNADILLSHLHYLRETPLPHLTSDDVDKALQNSPRLMHARNTGGAAFIFPNTSVYPEATQRITTRPDLPYEPPRRSAWTGHGHPTPQSKAAQPSPSTVPKTEDQRPQLDPYQILGPTSSRLANPGSGQIQLWQFLLELLSDSSNSSCITWEGTNGEFKMTDPDEVARRWGERKSKPNMNYDKLSRALRYYYDKNIMTKVHGKRYAYKFDFHGIAQALQPHPPESSLYKYPSDLPYMGSYHAHPQKMNFVAPHPPALPVTSSSFFAAPNPYWNSPTGGIYPNTRLPTSHMPSHLGTYY

SEQ ID NO: 1470 - RNA, 1461 nt, Artificial Sequence
  ERG__Homo_sapiens__CCDS46648.1
augauucagacugucccggacccagcagcucauaucaaggaagccuuaucaguugugagugaggaccagucguuguuugagugugccuacggaacgccacaccuggcuaagacagagaugaccgcguccuccuccagcgacuauggacagacuuccaagaugagcccacgcgucccucagcaggauuggcugucucaacccccagccagggucaccaucaaaauggaauguaacccuagccaggugaauggcucaaggaacucuccugaugaaugcaguguggccaaaggcgggaagauggugggcagcccagacaccguugggaugaacuacggcagcuacauggaggagaagcacaugccacccccaaacaugaccacgaacgagcgcagaguuaucgugccagcagauccuacgcuauggaguacagaccaugugcggcaguggcuggagugggcggugaaagaauauggccuuccagacgucaacaucuuguuauuccagaacaucgaugggaaggaacugugcaagaugaccaaggacgacuuccagaggcucacccccagcuacaacgccgacauccuucucucacaucuccacuaccucagagagacuccucuuccacauuugacuucagaugauguugauaaagccuuacaaaacucuccacgguuaaugcaugcuagaaacacagggggugcagcuuuuauuuucccaaauacuucaguauauccugaagcuacgcaaagaauuacaacuaggccagauuuaccauaugagccccccaggagaucagccuggaccggucacggccaccccacgccccagucgaaagcugcucaaccaucuccuuccacagugcccaaaacugaagaccagcguccucaguuagauccuuaucagauucuuggaccaacaaguagccgccuugcaaauccaggcaguggccagauccagcuuuggcaguuccuccuggagcuccugucggacagcuccaacuccagcugcaucaccugggaaggcaccaacggggaguucaagaugacggaucccgacgagguggcccggcgcuggggagagcggaagagcaaacccaacaugaacuacgauaagcucagccgcgcccuccguuacuacuaugacaagaacaucaugaccaagguccaugggaagcgcuacgccuacaaguucgacuuccacgggaucgcccaggcccuccagccccaccccccggagucaucucuguacaaguaccccucagaccucccguacaugggcuccuaucacgcccacccacagaagaugaacuuuguggcgccccacccuccagcccuccccgugacaucuuccaguuuuuuugcugccccaaacccauacuggaauucaccaacuggggguauauaccccaacacuaggcuccccaccagccauaugccuucucaucugggcacuuacuacuaa

SEQ ID NO: 1471 - RNA, 1461 nt, Artificial Sequence
  derived and/or modified sequence opt1 from ERG__Homo_sapiens__CCDS46648.1
augauccagaccgugcccgacccggccgcccacaucaaggaggcgcugagcgucguguccgaggaccagagccucuucgagugcgccuacggcacgccccaccuggccaagaccgagaugaccgccuccagcuccagcgacuacgggcagaccuccaagaugagcccccgcgugccccagcaggacuggcugucccagccgcccgcccgggucaccaucaagauggagugcaaccccagccaggugaacggcucccgcaacagccccgacgagugcuccguggcgaagggcgggaagauggucgggagcccggacacggugggcaugaacuacggcuccuacauggaggagaagcacaugcccccgcccaacaugaccaccaacgagcggcgcgugaucguccccgccgaccccacccucuggagcacggaccacgugcggcaguggcuggagugggccgugaaggaguacgggcugcccgacgucaacauccuccuguuccagaacaucgacggcaaggagcugugcaagaugaccaaggacgacuuccagcgccucacccccuccuacaacgccgacauccugcugagccaccuccacuaccugcgggagaccccgcugccccaccucacguccgacgacguggacaaggcgcugcagaacagcccccgccugaugcacgcccggaacaccgggggcgccgccuucaucuuccccaacaccagcguguacccggaggccacccagcgcaucacgacccggcccgaccuccccuacgagcccccgcgccgguccgcguggaccgggcacggccaccccacgccccagagcaaggccgcccagcccuccccgagcaccguccccaagaccgaggaccagcgcccccagcuggacccguaccagauccugggccccaccuccagccggcucgccaaccccggguccggccagauccagcuguggcaguuccugcucgagcugcugagcgacuccagcaacuccagcugcaucaccugggaggggacgaacggcgaguucaagaugaccgaccccgacgagguggcccgccgguggggcgagcgcaaguccaagccgaacaugaacuacgacaagcucagccgggcgcugcgcuacuacuacgacaagaacaucaugaccaaggugcacgggaagcgguacgccuacaaguucgacuuccacggcaucgcccaggcccugcagccccacccgcccgaguccagccucuacaaguaccccuccgaccugcccuacauggggagcuaccacgcccacccccagaagaugaacuucgucgcgccccacccgcccgcccugcccgugaccuccagcagcuucuucgccgcccccaacccguacuggaacucccccacgggcgggaucuaccccaacacccgccuccccaccagccacaugccgucccaccugggcaccuacuacuga

SEQ ID NO: 1472 - RNA, 1461 nt, Artificial Sequence
  derived and/or modified sequence opt2 from ERG__Homo_sapiens__CCDS46648.1
augauccagaccguccccgaccccgccgcccacaucaaggaggcccucuccgucgucuccgaggaccagucccucuucgagugcgccuacggcaccccccaccucgccaagaccgagaugaccgccuccuccuccuccgacuacggccagaccuccaagauguccccccgcgucccccagcaggacuggcucucccagccccccgcccgcgucaccaucaagauggagugcaaccccucccaggucaacggcucccgcaacucccccgacgagugcuccgucgccaagggcggcaagauggucggcucccccgacaccgucggcaugaacuacggcuccuacauggaggagaagcacaugcccccccccaacaugaccaccaacgagcgccgcgucaucguccccgccgaccccacccucugguccaccgaccacguccgccaguggcucgagugggccgucaaggaguacggccuccccgacgucaacauccuccucuuccagaacaucgacggcaaggagcucugcaagaugaccaaggacgacuuccagcgccucacccccuccuacaacgccgacauccuccucucccaccuccacuaccuccgcgagaccccccucccccaccucaccuccgacgacgucgacaaggcccuccagaacuccccccgccucaugcacgcccgcaacaccggcggcgccgccuucaucuuccccaacaccuccgucuaccccgaggccacccagcgcaucaccacccgccccgaccuccccuacgagcccccccgccgcuccgccuggaccggccacggccaccccaccccccaguccaaggccgcccagcccucccccuccaccguccccaagaccgaggaccagcgcccccagcucgaccccuaccagauccucggccccaccuccucccgccucgccaaccccggcuccggccagauccagcucuggcaguuccuccucgagcuccucuccgacuccuccaacuccuccugcaucaccugggagggcaccaacggcgaguucaagaugaccgaccccgacgaggucgcccgccgcuggggcgagcgcaaguccaagcccaacaugaacuacgacaagcucucccgcgcccuccgcuacuacuacgacaagaacaucaugaccaagguccacggcaagcgcuacgccuacaaguucgacuuccacggcaucgcccaggcccuccagccccacccccccgaguccucccucuacaaguaccccuccgaccuccccuacaugggcuccuaccacgcccacccccagaagaugaacuucgucgccccccacccccccgcccuccccgucaccuccuccuccuucuucgccgcccccaaccccuacuggaacucccccaccggcggcaucuaccccaacacccgccuccccaccucccacaugcccucccaccucggcaccuacuacuga

SEQ ID NO: 1473 - RNA, 1461 nt, Artificial Sequence
  derived and/or modified sequence opt3 from ERG__Homo_sapiens__CCDS46648.1
augauccagaccgugcccgacccugccgcucacauuaaggaggcacugagcgucguuuccgaagaucaaucucucuucgagugcgccuacggcacaccacaucuugcgaaaacugaaaugacggcuucaaguagcuccgacuaugggcagaccucuaagaugucgccgagagugccccagcaggauuggcugucacaaccuccagccaggguaacaauaaaaauggaguguaaccccagccaggugaauggaagucggaacuccccugacgaaugcucugucgcaaaggguggcaaaaugguggggagcccagauacuguuggaaugaauuacggcuccuauauggaggagaagcacaugcccccuccaaacaugaccacaaaugaacgccgagugaucgucccggccgaccccaccuuguggucaacugaucaugugcgucagugguuagagugggcuguaaaggaauacggucugccugacguuaacauucuacucuuucagaauaucgaugggaaagagcuguguaagaugacaaaagacgauuuccaaagacuuaccccaaguuauaacgcagacauucuguugagccaccuccauuaccugagggagacgccccugccucaccucacuucugaugacguggacaaggccuuacaaaauuccccacggcugaugcacgcucgcaacaccggaggcgccgcguuuaucuuccccaauacaucagucuauccggaagcaacucagagaauaaccacaaggccugaucuucccuacgagccaccucggcgcagcgccuggaccggccaugggcaccccacgccacagaguaaagcugcccagcccucuccuuccacugugccaaagacagaagaccagcgaccgcaguuggaucccuaccaaauccugggaccuaccagcucgagacuagcaaacccagguucuggccagauucagcucuggcaguuucugcuugagcuguuguccgacucaaguaauagcuccugcaucacuugggaagggacaaacggagaguucaagaugaccgaucccgacgagguggcuaggcgguggggcgaacguaaaucuaagccuaauaugaacuaugauaaacucagccgcgcccugagauacuauuacgacaagaacauuaugacgaaaguccaugguaagagguaugcguacaaauuugauuuccacgggaucgcccaagcauuacagccacaucccccggagucaagucuguauaaguacccuuccgaccucccauacaugggaagcuaucacgcucacccccagaagaugaauuuuguugccccucaucccccagcccuuccugugaccucuucaaguuucuuugcugcacccaacccauacuggaauagcccgacaggcggcauauauccuaacacucggcugcccaccucccacaugccaucucauuuggggacauacuauuga

SEQ ID NO: 1474 - RNA, 1461 nt, Artificial Sequence
  derived and/or modified sequence opt4 from ERG__Homo_sapiens__CCDS46648.1
augauccagaccgugcccgaccccgccgcccacaucaaggaggcccugagcguggugagcgaggaccagagccuguucgagugcgccuacggcaccccccaccuggccaagaccgagaugaccgccagcagcagcagcgacuacggccagaccagcaagaugagccccagagugccccagcaggacuggcugagccagccccccgccagagugaccaucaagauggagugcaaccccagccaggugaacggcagcagaaacagccccgacgagugcagcguggccaagggcggcaagauggugggcagccccgacaccgugggcaugaacuacggcagcuacauggaggagaagcacaugcccccccccaacaugaccaccaacgagagaagagugaucgugcccgccgaccccacccuguggagcaccgaccacgugagacaguggcuggagugggccgugaaggaguacggccugcccgacgugaacauccugcuguuccagaacaucgacggcaaggagcugugcaagaugaccaaggacgacuuccagagacugacccccagcuacaacgccgacauccugcugagccaccugcacuaccugagagagaccccccugccccaccugaccagcgacgacguggacaaggcccugcagaacagccccagacugaugcacgccagaaacaccggcggcgccgccuucaucuuccccaacaccagcguguaccccgaggccacccagagaaucaccaccagacccgaccugcccuacgagccccccagaagaagcgccuggaccggccacggccaccccaccccccagagcaaggccgcccagcccagccccagcaccgugcccaagaccgaggaccagagaccccagcuggaccccuaccagauccugggccccaccagcagcagacuggccaaccccggcagcggccagauccagcuguggcaguuccugcuggagcugcugagcgacagcagcaacagcagcugcaucaccugggagggcaccaacggcgaguucaagaugaccgaccccgacgagguggccagaagauggggcgagagaaagagcaagcccaacaugaacuacgacaagcugagcagagcccugagauacuacuacgacaagaacaucaugaccaaggugcacggcaagagauacgccuacaaguucgacuuccacggcaucgcccaggcccugcagccccacccccccgagagcagccuguacaaguaccccagcgaccugcccuacaugggcagcuaccacgcccacccccagaagaugaacuucguggccccccacccccccgcccugcccgugaccagcagcagcuucuucgccgcccccaaccccuacuggaacagccccaccggcggcaucuaccccaacaccagacugcccaccagccacaugcccagccaccugggcaccuacuacuga

SEQ ID NO: 1475 - RNA, 1461 nt, Artificial Sequence
  derived and/or modified sequence opt5 from ERG__Homo_sapiens__CCDS46648.1
augauccagaccgugcccgacccugccgcucacauuaaggaggcccugagcgucguuuccgaagaucaaucucucuucgagugcgcguacggcacaccgcaucuggcuaaaacggaaaugaccgccagcuccucuagcgacuaugggcagacauccaagaugucucccagagugccucagcaggauuggcuuagccaacccccugcccgggugaccaucaaaauggaguguaaccccucccaggucaauggaagccgcaacucuccugacgaaugcuccguggcuaagggcgggaaaaugguuggaagcccggauacagugggcaugaauuacgggucuuauauggaggagaagcacaugcccccucccaacaugaccacaaaugaaagacgggucauugugccugccgaccccacccugugguccacggaucauguucgccaguggcucgagugggcugugaaggaauacggacugccggacgucaacauccuucuguuucagaauauugauggcaaagagcucuguaagaugaccaaagacgauuuccaaagacugacaccuagcuauaacgccgacauccugcucucucaucugcacuaccuucgggagacaccccugccucaccucaccuccgaugacguggacaaggcgcugcagaauagcccccgccuuaugcacgccagaaacaccggcggggcugccuuuaucuuccccaauacguccguguauccugaagcuacacagcggauuaccacacgcccggaucugcccuacgagccucccagacggucugccuggaccggacauggccacccuacaccccagagcaaagcggcccaaccguccccuagcaccguccccaagacggaagaccagcgcccucagcucgaucccuaccaaauccuggggccuaccucuuccagacuggcuaaccccggaagcggccagauucagcucuggcaguuucugcuugagcugcucucugacagcuccaauucuagcugcaucacaugggaagggaccaacggagaguucaagaugacagauccggacgagguugcccggcgcuggggcgaaagaaaauccaagccuaauaugaacuaugauaaacugagccgggcucuuagauacuauuacgacaagaacauuaugaccaaagugcauggcaagcgcuaugccuacaaauuugauuuccacgggaucgcccaagcucugcagccccaucccccugagucuucccucuauaaguacccgagcgaccugcccuacaugggaucuuaucacgcgcacccucagaagaugaauuuuguggcuccccauccucccgcccugccugucacguccagcuccuucuuugccgcccccaacccguacuggaacucuccuacaggcgggauuuaucccaauacccggcucccuaccagccacaugcccucccaucugggaacauacuauuga

SEQ ID NO: 1476 - protein, 452 aa, Artificial Sequence
  ETV6__Homo_sapiens__P41212
MSETPAQCSIKQERISYTPPESPVPSYASSTPLHVPVPRALRMEEDSIRLPAHLRLQPIYWSRDDVAQWLKWAENEFSLRPIDSNTFEMNGKALLLLTKEDFRYRSPHSGDVLYELLQHILKQRKPRILFSPFFHPGNSIHTQPEVILHQNHEEDNCVQRTPRPSVDNVHHNPPTIELLHRSRSPITTNHRPSPDPEQRPLRSPLDNMIRRLSPAERAQGPRPHQENNHQESYPLSVSPMENNHCPASSESHPKPSSPRQESTRVIQLMPSPIMHPLILNPRHSVDFKQSRLSEDGLHREGKPINLSHREDLAYMNHIMVSVSPPEEHAMPIGRIADCRLLWDYVYQLLSDSRYENFIRWEDKESKIFRIVDPNGLARLWGNHKNRTNMTYEKMSRALRHYYKLNIIRKEPGQRLLFRFMKTPDEIMSGRTDRLEHLESQELDEQIYQEDEC

SEQ ID NO: 1477 - RNA, 1359 nt, Artificial Sequence
  ETV6__Homo_sapiens__AAA19786
augucugagacuccugcucaguguagcauuaagcaggaacgaauuucauauacaccuccagagagcccagugccgaguuacgcuuccucgacgccacuucauguuccagugccucgagcgcucaggauggaggaagacucgauccgccugccugcgcaccugcgcuugcagccaauuuacuggagcagggaugacguagcccaguggcucaagugggcugaaaaugaguuuucuuuaaggccaauugacagcaacacguuugaaaugaauggcaaagcucuccugcugcugaccaaagaggacuuucgcuaucgaucuccucauucaggugaugugcucuaugaacuccuucagcauauucugaagcagaggaaaccucggauucuuuuuucaccauucuuccacccuggaaacucuauacacacacagccggaggucauacugcaucagaaccaugaagaagauaacuguguccagaggacccccaggccauccguggauaaugugcaccauaacccucccaccauugaacuguugcaccgcuccaggucaccuaucacgacaaaucaccggccuucuccugaccccgagcagcggccccuccgguccccccuggacaacaugauccgccgccucuccccggcugagagagcucagggacccaggccgcaccaggagaacaaccaccaggaguccuacccucugucagugucucccauggagaauaaucacugcccagcguccuccgagucccacccgaagccauccagcccccggcaggagagcacacgcgugauccagcugaugcccagccccaucaugcacccucugauccugaacccccggcacuccguggauuucaaacaguccaggcucuccgaggacgggcugcauagggaagggaagcccaucaaccucucucaucgggaagaccuggcuuacaugaaccacaucauggucucugucuccccgccugaagagcacgccaugcccauugggagaauagcagacuguagacugcuuugggauuacgucuaucaguugcuuucugacagccgguacgaaaacuucauccgaugggaggacaaagaauccaaaauauuccggauaguggaucccaacggacuggcucgacuguggggaaaccauaagaacagaacaaacaugaccuaugagaaaauguccagagcccugcgccacuacuacaaacuaaacauuaucaggaaggagccaggacaaaggcuuuuguucagguuuaugaaaaccccagaugaaaucaugaguggccgaacagaccgucuggagcaccuagagucccaggagcuggaugaacaaauauaccaagaagaugaaugcuga

SEQ ID NO: 1478 - RNA, 1359 nt, Artificial Sequence
  derived and/or modified sequence opt1 from ETV6__Homo_sapiens__AAA19786
augagcgagacccccgcccagugcuccaucaagcaggagcgcaucagcuacaccccgcccgagucccccgugcccagcuacgccuccagcacgccgcugcacguccccgugccccgggcgcuccgcauggaggaggacuccauccggcugcccgcccaccuccgccugcagccgaucuacuggagccgggacgacguggcccaguggcugaagugggccgagaacgaguucucccugcgccccaucgacagcaacaccuucgagaugaacggcaaggcccuccugcugcucaccaaggaggacuuccgguaccgcagcccccacuccggggacguccuguacgagcugcuccagcacauccugaagcagcggaagccccgcauccuguucuccccguucuuccaccccggcaacagcauccacacccagcccgaggugauccuccaccagaaccacgaggaggacaacugcgugcagcggacgccccgcccguccgucgacaacgugcaccacaacccgcccaccaucgagcugcugcaccggagccgcucccccaucaccaccaaccaccggcccagccccgaccccgagcagcgcccccuccgguccccgcuggacaacaugauccgccggcugagccccgcggagcgcgcccaggggccccggccccaccaggagaacaaccaccaggagagcuacccgcucuccgugagccccauggagaacaaccacugccccgccuccagcgagucccacccgaagcccagcagcccccgccaggaguccacgcgcgucauccagcugaugcccuccccgaucaugcacccccugauccucaacccccggcacagcguggacuucaagcagucccgccugagcgaggacggccugcaccgggaggggaagcccaucaaccucucccaccgcgaggaccuggccuacaugaaccacaucauggugagcgucuccccgcccgaggagcacgcgaugcccaucggccggaucgccgacugccgccugcucugggacuacguguaccagcugcugagcgacucccgguacgagaacuucauccgcugggaggacaaggagagcaagaucuuccggaucguggaccccaacggccucgcccgccugugggggaaccacaagaaccggaccaacaugaccuacgagaagaugucccgcgcccugcggcacuacuacaagcucaacaucauccgcaaggagccgggccagcggcugcuguuccgcuucaugaagacccccgacgagaucaugagcgggcggacggaccgccucgagcaccuggagagccaggagcuggacgagcagaucuaccaggaggacgagugcuga

SEQ ID NO: 1479 - RNA, 1359 nt, Artificial Sequence
  derived and/or modified sequence opt2 from ETV6__Homo_sapiens__AAA19786
auguccgagacccccgcccagugcuccaucaagcaggagcgcaucuccuacaccccccccgagucccccguccccuccuacgccuccuccaccccccuccacguccccgucccccgcgcccuccgcauggaggaggacuccauccgccuccccgcccaccuccgccuccagcccaucuacuggucccgcgacgacgucgcccaguggcucaagugggccgagaacgaguucucccuccgccccaucgacuccaacaccuucgagaugaacggcaaggcccuccuccuccucaccaaggaggacuuccgcuaccgcuccccccacuccggcgacguccucuacgagcuccuccagcacauccucaagcagcgcaagccccgcauccucuucucccccuucuuccaccccggcaacuccauccacacccagcccgaggucauccuccaccagaaccacgaggaggacaacugcguccagcgcaccccccgccccuccgucgacaacguccaccacaacccccccaccaucgagcuccuccaccgcucccgcucccccaucaccaccaaccaccgccccucccccgaccccgagcagcgcccccuccgcuccccccucgacaacaugauccgccgccucucccccgccgagcgcgcccagggcccccgcccccaccaggagaacaaccaccaggaguccuacccccucuccgucucccccauggagaacaaccacugccccgccuccuccgagucccaccccaagcccuccuccccccgccaggaguccacccgcgucauccagcucaugcccucccccaucaugcacccccucauccucaacccccgccacuccgucgacuucaagcagucccgccucuccgaggacggccuccaccgcgagggcaagcccaucaaccucucccaccgcgaggaccucgccuacaugaaccacaucauggucuccgucuccccccccgaggagcacgccaugcccaucggccgcaucgccgacugccgccuccucugggacuacgucuaccagcuccucuccgacucccgcuacgagaacuucauccgcugggaggacaaggaguccaagaucuuccgcaucgucgaccccaacggccucgcccgccucuggggcaaccacaagaaccgcaccaacaugaccuacgagaagaugucccgcgcccuccgccacuacuacaagcucaacaucauccgcaaggagcccggccagcgccuccucuuccgcuucaugaagacccccgacgagaucauguccggccgcaccgaccgccucgagcaccucgagucccaggagcucgacgagcagaucuaccaggaggacgagugcuga

SEQ ID NO: 1480 - RNA, 1359 nt, Artificial Sequence
  derived and/or modified sequence opt3 from ETV6__Homo_sapiens__AAA19786
augagcgagacccccgcccagugcuccaucaagcaagaaagaauuucuuacacaccuccagagucaccggugcccaguuaugcuagcuccacuccucugcacgucccaguucccagggcacuccggauggaagaggacucuauacgccuuccugcccaucugcgauugcagccaaucuacuggucgcgugaugacguggcgcagugguuaaaaugggcugaaaacgaguucucacugagacccauugauagcaauacguuugagaugaacggcaaggcccuacuccugcuuaccaaagaagacuucagguaucggaguccucacuccggggauguacuguacgaguugcuccagcauauccugaagcaacgcaaaccaaggauucuguuuucuccguucuuucaccccggaaauagcauccauacacagccugaagugauacuccaccagaaccacgaggaggacaauuguguccagagaacuccacggcccuccguggauaacguucaucacaauccuccaaccaucgaauuacugcaucgcucacgaagucccauuacaaccaaccacagaccgagcccugaccccgagcaaaggccacuucggucuccuuuggauaauaugauccgucgccugucccccgcagaaagagcccaggguccaaggccccaccaggagaacaaucaucaggaaucauauccucuaagcgugaguccaauggagaacaaucacugcccggcuucuuccgagagccaucccaagccuucgucuccacggcaagaauccacucgagucauucagcucaugcccucaccuaucaugcacccacugauacuuaacccccgccauaguguggacuucaagcagagcagacuguccgaggauggcuugcacagggaagggaaaccgauuaaucucucucaccgggaggaccuggcauacaugaaccauaucaugguaagcguuucaccuccagaagaacacgccaugcccauuggacgcaucgcugauuguagauuacugugggacuauguguaccaacuccuuagugacuccagguacgagaacuuuauccguugggaagauaaggagagcaaaauuuuccggauagucgacccuaauggccuggcccgauugugggguaaccauaagaauagaacaaacaugaccuaugagaaaaugucuagggcgcuacgccacuacuauaagcugaauaucauucggaaggagcccgggcagagacuccuguuuagguucaugaaaacgccagaugaaaucaugucaggacgcacugaccgacuugagcaccuggagagucaggaauuggaugagcagauauaccaagaagacgagugcuga

SEQ ID NO: 1481 - RNA, 1359 nt, Artificial Sequence
  derived and/or modified sequence opt4 from ETV6__Homo_sapiens__AAA19786
augagcgagacccccgcccagugcagcaucaagcaggagagaaucagcuacaccccccccgagagccccgugcccagcuacgccagcagcaccccccugcacgugcccgugcccagagcccugagaauggaggaggacagcaucagacugcccgcccaccugagacugcagcccaucuacuggagcagagacgacguggcccaguggcugaagugggccgagaacgaguucagccugagacccaucgacagcaacaccuucgagaugaacggcaaggcccugcugcugcugaccaaggaggacuucagauacagaagcccccacagcggcgacgugcuguacgagcugcugcagcacauccugaagcagagaaagcccagaauccuguucagccccuucuuccaccccggcaacagcauccacacccagcccgaggugauccugcaccagaaccacgaggaggacaacugcgugcagagaacccccagacccagcguggacaacgugcaccacaacccccccaccaucgagcugcugcacagaagcagaagccccaucaccaccaaccacagacccagccccgaccccgagcagagaccccugagaagcccccuggacaacaugaucagaagacugagccccgccgagagagcccagggccccagaccccaccaggagaacaaccaccaggagagcuacccccugagcgugagccccauggagaacaaccacugccccgccagcagcgagagccaccccaagcccagcagccccagacaggagagcaccagagugauccagcugaugcccagccccaucaugcacccccugauccugaaccccagacacagcguggacuucaagcagagcagacugagcgaggacggccugcacagagagggcaagcccaucaaccugagccacagagaggaccuggccuacaugaaccacaucauggugagcgugagcccccccgaggagcacgccaugcccaucggcagaaucgccgacugcagacugcugugggacuacguguaccagcugcugagcgacagcagauacgagaacuucaucagaugggaggacaaggagagcaagaucuucagaaucguggaccccaacggccuggccagacuguggggcaaccacaagaacagaaccaacaugaccuacgagaagaugagcagagcccugagacacuacuacaagcugaacaucaucagaaaggagcccggccagagacugcuguucagauucaugaagacccccgacgagaucaugagcggcagaaccgacagacuggagcaccuggagagccaggagcuggacgagcagaucuaccaggaggacgagugcuga

SEQ ID NO: 1482 - RNA, 1359 nt, Artificial Sequence
  derived and/or modified sequence opt5 from ETV6__Homo_sapiens__AAA19786
augagcgagacccccgcccagugcuccaucaagcaagaaagaauuucuuacacaccuccggagagccccgugccuuccuaugcuucuagcacgccccugcacgucccuguuccccgggcccuccgcauggaagaggacuccaucagacugccugcgcaucuucggcugcagccgauuuacuggucucgcgaugacguggcucaguggcucaaaugggccgaaaacgaguucagccugagacccaucgauuccaauaccuuugagaugaacggcaaggcccuucugcuccugacaaaagaagacuuccgguaucgcagcccucacucuggggaugugcuguacgagcuccugcagcauauucuuaagcaaagaaaaccccggauccuguuuuccccuuucuuucaccccggaaauagcauccauacccagccggaagucauucuccaccagaaccacgaggaggacaauugugugcagcgcacaccuagacccucuguugauaacgugcaucacaauccucccaccaucgaacugcuucaucggucccgcagccccauuacaaccaaccacagaccuucuccggaccccgagcaacggccucugcgcagcccccucgauaauaugaucagacggcuguccccugcugaaagagcccagggcccccgcccgcaccaggagaacaaucaucaggaauccuauccucugucugucagccccauggagaacaaucacugcccugcuuccagcgagucucaucccaagccuuccagcccccggcaagaaucuacgagagugauucagcucaugccgagcccuaucaugcacccccugauucuuaacccccgccauuccguugacuucaagcagucucggcugagcgaggaugggcuccacagagaaggaaaaccuaucaaucugucccaccgcgaggaccuugccuacaugaaccauaucauggugagcgucucuccgcccgaagaacacgcgaugccuauuggccggaucgccgauuguagacugcucugggacuauguguaccaacugcuguccgacagccgcuacgagaacuuuauucggugggaagauaaggagucuaaaaucuucagaauuguggaccccaaugggcucgcucgccuguggggaaaccauaagaaucggaccaacaugacauaugagaaaauguccagagcccuucggcacuacuauaagcugaauaucauccgcaaggagccuggccagagacuccuguuucgguucaugaaaacccccgaugaaauuaugagcggcagaacagaccgccuugagcaccuggagucccaggaacucgaugagcagaucuaccaagaagacgagugcuga

SEQ ID NO: 1483 - protein, 656 aa, Artificial Sequence
  EWS__Homo_sapiens__Q01844
MASTDYSTYSQAAAQQGYSAYTAQPTQGYAQTTQAYGQQSYGTYGQPTDVSYTQAQTTATYGQTAYATSYGQPPTGYTTPTAPQAYSQPVQGYGTGAYDTTTATVTTTQASYAAQSAYGTQPAYPAYGQQPAATAPTRPQDGNKPTETSQPQSSTGGYNQPSLGYGQSNYSYPQVPGSYPMQPVTAPPSYPPTSYSSTQPTSYDQSSYSQQNTYGQPSSYGQQSSYGQQSSYGQQPPTSYPPQTGSYSQAPSQYSQQSSSYGQQSSFRQDHPSSMGVYGQESGGFSGPGENRSMSGPDNRGRGRGGFDRGGMSRGGRGGGRGGMGSAGERGGFNKPGGPMDEGPDLDLGPPVDPDEDSDNSAIYVQGLNDSVTLDDLADFFKQCGVVKMNKRTGQPMIHIYLDKETGKPKGDATVSYEDPPTAKAAVEWFDGKDFQGSKLKVSLARKKPPMNSMRGGLPPREGRGMPPPLRGGPGGPGGPGGPMGRMGGRGGDRGGFPPRGPRGSRGNPSGGGNVQHRAGDWQCPNPGCGNQNFAWRTECNQCKAPKPEGFLPPPFPPPGGDRGRGGPGGMRGGRGGLMDRGGPGGMFRGGRGGDRGGFRGGRGMDRGGFGGGRRGGPGGPPGPLMEQMGGRRGGRGGPGKMDKGEHRQERRDRPY

SEQ ID NO: 1484 - RNA, 1971 nt, Artificial Sequence
  EWS__Homo_sapiens__AAH04817
auggcguccacggauuacaguaccuauagccaagcugcagcgcagcagggcuacagugcuuacaccgcccagcccacucaaggauaugcacagaccacccaggcauaugggcaacaaagcuauggaaccuauggacagcccacugaugucagcuauacccaggcucagaccacugcaaccuaugggcagaccgccuaugcaacuucuuauggacagccucccacugguuauacuacuccaacugccccccaggcauacagccagccuguccagggguauggcacuggugcuuaugauaccaccacugcuacagucaccaccacccaggccuccuaugcagcucagucugcauauggcacucagccugcuuauccagccuaugggcagcagccagcagccacugcaccuacaagaccgcaggauggaaacaagcccacugagacuagucaaccucaaucuagcacaggggguuacaaccagcccagccuaggauauggacagaguaacuacaguuauccccagguaccugggagcuaccccaugcagccagucacugcaccuccauccuacccuccuaccagcuauuccucuacacagccgacuaguuaugaucagagcaguuacucucagcagaacaccuaugggcaaccgagcagcuauggacagcagaguagcuauggucaacaaagcagcuaugggcagcagccucccacuaguuacccaccccaaacuggauccuacagccaagcuccaagucaauauagccaacagagcagcagcuacgggcagcagaguucauuccgacaggaccaccccaguagcauggguguuuaugggcaggagucuggaggauuuuccggaccaggagagaaccggagcaugaguggcccugauaaccggggcaggggaagagggggauuugaucguggaggcaugagcagaggugggcggggaggaggacgcgguggaaugggcagcgcuggagagcgagguggcuucaauaagccugguggacccauggaugaaggaccagaucuugaucuaggcccaccuguagauccagaugaagacucugacaacagugcaauuuauguacaaggauuaaaugacagugugacucuagaugaucuggcagacuucuuuaagcagugugggguuguuaagaugaacaagagaacugggcaacccaugauccacaucuaccuggacaaggaaacaggaaagcccaaaggcgaugccacaguguccuaugaagacccacccacugccaaggcugccguggaaugguuugaugggaaagauuuucaagggagcaaacuuaaagucucccuugcucggaagaagccuccaaugaacaguaugcgggguggucugccaccccgugagggcagaggcaugccaccaccacuccguggagguccaggaggcccaggagguccugggggacccaugggucgcaugggaggccguggaggagauagaggaggcuucccuccaagaggaccccgggguucccgagggaaccccucuggaggaggaaacguccagcaccgagcuggagacuggcagugucccaauccggguuguggaaaccagaacuucgccuggagaacagagugcaaccaguguaaggccccaaagccugaaggcuuccucccgccacccuuuccgcccccggguggugaucguggcagagguggcccugguggcaugcggggaggaagagguggccucauggaucgugguggucccgguggaauguucagagguggccgugguggagacagagguggcuuccgugguggccggggcauggaccgagguggcuuugguggaggaagacgagguggcccuggggggcccccuggaccuuugauggaacagaugggaggaagaagaggaggacguggaggaccuggaaaaauggauaaaggcgagcaccgucaggagcgcagagaucggcccuacuag

SEQ ID NO: 1485 - RNA, 1971 nt, Artificial Sequence
  derived and/or modified sequence opt1 from EWS__Homo_sapiens__AAH04817
auggccagcaccgacuacuccaccuacagccaggccgcggcccagcagggcuacuccgccuacacggcccagcccacccagggguacgcccagaccacccaggcguacggccagcagagcuacgggacguacggccagccgaccgacguguccuacacccaggcccagaccacggccaccuacgggcagaccgccuacgcgaccagcuacggccagccccccacgggcuacaccacccccaccgccccgcaggccuacucccagcccguccagggguacggcacgggggccuacgacaccaccaccgccacggugaccaccacccaggcgagcuacgccgcccaguccgccuacggcacgcagcccgccuaccccgcguacgggcagcagccggccgccaccgcccccacccgcccccaggacggcaacaagcccaccgagacgagccagccgcaguccagcaccggcggguacaaccagcccucccugggcuacgggcagagcaacuacuccuacccccaggugcccggcagcuacccgaugcagcccgucaccgccccccccuccuacccgcccaccagcuacuccagcacgcagcccaccagcuacgaccaguccagcuacucccagcagaacaccuacggccagcccagcuccuacgggcagcagagcuccuacggccagcagagcuccuacgggcagcagccgcccaccagcuaccccccccagacgggcuccuacagccaggcgccgucccaguacagccagcaguccagcuccuacgggcagcagagcuccuuccggcaggaccaccccagcagcaugggcguguacggccaggaguccgggggcuucagcgggcccggcgagaaccgcuccaugagcgggccggacaaccggggccgcggccgggggggcuucgaccgcgggggcaugucccgggggggccgcggcgggggccgggggggcaugggcagcgccggggagcgcggcggguucaacaagcccggcgggcccauggacgagggccccgaccucgaccugggcccgcccguggaccccgacgaggacuccgacaacagcgccaucuacguccaggggcugaacgacuccgugacccucgacgaccuggccgacuucuucaagcagugcggcguggucaagaugaacaagcggaccgggcagcccaugauccacaucuaccuggacaaggagaccggcaagccgaagggggacgccaccgugagcuacgaggacccccccacggcgaaggccgccguggagugguucgacggcaaggacuuccagggcuccaagcucaaggucagccuggcccgcaagaagcccccgaugaacuccaugcgggggggccugcccccccgcgaggggcggggcaugcccccgccccuccgcgggggccccggcgggcccggcgggccgggcgggcccaugggccggaugggcgggcgcggcggggaccggggcggcuuccccccccgcgggccgcggggcagccgcgggaaccccuccggcgggggcaacgugcagcaccgcgcgggcgacuggcagugccccaacccggggugcggcaaccagaacuucgccuggcggaccgagugcaaccagugcaaggcccccaagcccgagggguuccugcccccgcccuucccccccccgggcggggaccgcggccggggcgggcccggcgggaugcgcggcgggcggggcggccugauggaccgcgggggccccgggggcauguuccggggcgggcgcggcggggaccggggcggguuccgcggcggccgggggauggaccgcggcggguucggcgggggccggcgcggcgggcccggcgggccgcccggcccccucauggagcagauggggggccggcgcggcgggcggggcgggcccggcaagauggacaagggggagcaccgccaggagcggcgcgaccgcccguacuga

SEQ ID NO: 1486 - RNA, 1971 nt, Artificial Sequence
  derived and/or modified sequence opt2 from EWS__Homo_sapiens__AAH04817
auggccuccaccgacuacuccaccuacucccaggccgccgcccagcagggcuacuccgccuacaccgcccagcccacccagggcuacgcccagaccacccaggccuacggccagcaguccuacggcaccuacggccagcccaccgacgucuccuacacccaggcccagaccaccgccaccuacggccagaccgccuacgccaccuccuacggccagccccccaccggcuacaccacccccaccgccccccaggccuacucccagcccguccagggcuacggcaccggcgccuacgacaccaccaccgccaccgucaccaccacccaggccuccuacgccgcccaguccgccuacggcacccagcccgccuaccccgccuacggccagcagcccgccgccaccgcccccacccgcccccaggacggcaacaagcccaccgagaccucccagccccaguccuccaccggcggcuacaaccagcccucccucggcuacggccaguccaacuacuccuacccccagguccccggcuccuaccccaugcagcccgucaccgccccccccuccuacccccccaccuccuacuccuccacccagcccaccuccuacgaccaguccuccuacucccagcagaacaccuacggccagcccuccuccuacggccagcaguccuccuacggccagcaguccuccuacggccagcagccccccaccuccuaccccccccagaccggcuccuacucccaggcccccucccaguacucccagcaguccuccuccuacggccagcaguccuccuuccgccaggaccaccccuccuccaugggcgucuacggccaggaguccggcggcuucuccggccccggcgagaaccgcuccauguccggccccgacaaccgcggccgcggccgcggcggcuucgaccgcggcggcaugucccgcggcggccgcggcggcggccgcggcggcaugggcuccgccggcgagcgcggcggcuucaacaagcccggcggccccauggacgagggccccgaccucgaccucggcccccccgucgaccccgacgaggacuccgacaacuccgccaucuacguccagggccucaacgacuccgucacccucgacgaccucgccgacuucuucaagcagugcggcgucgucaagaugaacaagcgcaccggccagcccaugauccacaucuaccucgacaaggagaccggcaagcccaagggcgacgccaccgucuccuacgaggacccccccaccgccaaggccgccgucgagugguucgacggcaaggacuuccagggcuccaagcucaaggucucccucgcccgcaagaagccccccaugaacuccaugcgcggcggccuccccccccgcgagggccgcggcaugccccccccccuccgcggcggccccggcggccccggcggccccggcggccccaugggccgcaugggcggccgcggcggcgaccgcggcggcuuccccccccgcggcccccgcggcucccgcggcaaccccuccggcggcggcaacguccagcaccgcgccggcgacuggcagugccccaaccccggcugcggcaaccagaacuucgccuggcgcaccgagugcaaccagugcaaggcccccaagcccgagggcuuccuccccccccccuuccccccccccggcggcgaccgcggccgcggcggccccggcggcaugcgcggcggccgcggcggccucauggaccgcggcggccccggcggcauguuccgcggcggccgcggcggcgaccgcggcggcuuccgcggcggccgcggcauggaccgcggcggcuucggcggcggccgccgcggcggccccggcggcccccccggcccccucauggagcagaugggcggccgccgcggcggccgcggcggccccggcaagauggacaagggcgagcaccgccaggagcgccgcgaccgccccuacuga

SEQ ID NO: 1487 - RNA, 1971 nt, Artificial Sequence
  derived and/or modified sequence opt3 from EWS__Homo_sapiens__AAH04817
auggccagcaccgacuacuccacauauucucaggcugcagcccaacagggcuacucagcguauacugcucagcccacgcagggguacgcccaaaccacacaggcauauggacagcagaguuacgguacuuauggccaaccuaccgaugugagcuacacacaggcccagaccacugcuacauacgggcagaccgcauaugccacguccuacggacaaccaccgacuggcuauaccacacccacugcuccucaggccuacucucagccaguccaagguuaugggaccggagcguacgacacaaccacggcaacuguuacaaccacucaggccucguaugcugcccagucagcauacggcacacagcccgcuuacccugccuauggccaacagccagcggccaccgcacccacgagaccucaggaugggaacaagccaaccgagacaagccagccgcaaaguuccacuggagguuacaaucagcccucucugggcuaugggcagagcaacuacuccuauccucaggugccaggaucauaccccaugcaaccuguaaccgcuccacccaguuauccgccuacaagcuacucuuccacucagcccaccucauacgaccagagcaguuauucucagcaaaauacauacggccagccauccagcuauggucagcaaucgucuuacgggcagcaguccucauauggacagcaaccucccaccaguuacccaccccagacuggcagcuauucccaggccccuucucaguacagccaacagucaaguuccuacggccagcagagcucuuucaggcaagaucacccaucaaguauggggguguauggacaggaaagcgguggcuuuuccgggccgggagagaaccggucuaugucgggccccgacaaucgcggucgagggcguggcggauucgauagaggcgggaugagcaggggaggucggggcgggggacgcggcgguaugggguccgcuggcgaaagaggaggcuuuaacaaaccugggggaccaauggacgagggucccgaucucgaccuuggcccuccagucgaucccgacgaagauucagacaauagugccaucuacgugcaggggcugaacgacucuguuacguuggaugacuuagcagauuucuuuaagcaaugcggaguggucaaaaugaauaagaggacaggccagccgaugauucauauauaucuggacaaagagaccgguaagccuaagggggaugccacugugagcuacgaggacccacccaccgcuaaagcggcaguagaaugguucgauggcaaggacuuucagggauccaaacuaaagguuucacucgcccggaaaaagccucccaugaacagcaugcgcggcgggcugccaccucgagagggaagaggcaugcccccaccgcuuaggggugggccuggaggccccgguggcccagggggacccaugggccggaugggagggcguggcggugaucgcgggggauucccuccaagaggccccagggguucucggggcaauccuuccgggggaggcaacgugcagcaccgagcuggggacuggcaauguccgaauccaggaugcggcaaccagaauuuugccuggcgcacagaauguaaccagugcaaggcacccaaaccugaggguuuccugccacccccuuuuccgcccccagggggagauagaggcagggguggcccugggggaaugcggggcgggcgcggaggcuugauggacagaggugggcccggaggcauguucaggggcgggcguggaggugaccggggcggguuucgaggaggcagagguauggaucgcgggggauucggcggcgggaggcggggagguccaggcgggccucccggaccacucauggagcagaugggcgguagacgcgggggaaggggcggcccggggaagauggacaaaggagaacaucgacaagagcggcgugauagaccuuauuga

SEQ ID NO: 1488 - RNA, 1971 nt, Artificial Sequence
  derived and/or modified sequence opt4 from EWS__Homo_sapiens__AAH04817
auggccagcaccgacuacagcaccuacagccaggccgccgcccagcagggcuacagcgccuacaccgcccagcccacccagggcuacgcccagaccacccaggccuacggccagcagagcuacggcaccuacggccagcccaccgacgugagcuacacccaggcccagaccaccgccaccuacggccagaccgccuacgccaccagcuacggccagccccccaccggcuacaccacccccaccgccccccaggccuacagccagcccgugcagggcuacggcaccggcgccuacgacaccaccaccgccaccgugaccaccacccaggccagcuacgccgcccagagcgccuacggcacccagcccgccuaccccgccuacggccagcagcccgccgccaccgcccccaccagaccccaggacggcaacaagcccaccgagaccagccagccccagagcagcaccggcggcuacaaccagcccagccugggcuacggccagagcaacuacagcuacccccaggugcccggcagcuaccccaugcagcccgugaccgccccccccagcuacccccccaccagcuacagcagcacccagcccaccagcuacgaccagagcagcuacagccagcagaacaccuacggccagcccagcagcuacggccagcagagcagcuacggccagcagagcagcuacggccagcagccccccaccagcuaccccccccagaccggcagcuacagccaggcccccagccaguacagccagcagagcagcagcuacggccagcagagcagcuucagacaggaccaccccagcagcaugggcguguacggccaggagagcggcggcuucagcggccccggcgagaacagaagcaugagcggccccgacaacagaggcagaggcagaggcggcuucgacagaggcggcaugagcagaggcggcagaggcggcggcagaggcggcaugggcagcgccggcgagagaggcggcuucaacaagcccggcggccccauggacgagggccccgaccuggaccugggcccccccguggaccccgacgaggacagcgacaacagcgccaucuacgugcagggccugaacgacagcgugacccuggacgaccuggccgacuucuucaagcagugcggcguggugaagaugaacaagagaaccggccagcccaugauccacaucuaccuggacaaggagaccggcaagcccaagggcgacgccaccgugagcuacgaggacccccccaccgccaaggccgccguggagugguucgacggcaaggacuuccagggcagcaagcugaaggugagccuggccagaaagaagccccccaugaacagcaugagaggcggccugccccccagagagggcagaggcaugccccccccccugagaggcggccccggcggccccggcggccccggcggccccaugggcagaaugggcggcagaggcggcgacagaggcggcuucccccccagaggccccagaggcagcagaggcaaccccagcggcggcggcaacgugcagcacagagccggcgacuggcagugccccaaccccggcugcggcaaccagaacuucgccuggagaaccgagugcaaccagugcaaggcccccaagcccgagggcuuccugcccccccccuuccccccccccggcggcgacagaggcagaggcggccccggcggcaugagaggcggcagaggcggccugauggacagaggcggccccggcggcauguucagaggcggcagaggcggcgacagaggcggcuucagaggcggcagaggcauggacagaggcggcuucggcggcggcagaagaggcggccccggcggcccccccggcccccugauggagcagaugggcggcagaagaggcggcagaggcggccccggcaagauggacaagggcgagcacagacaggagagaagagacagacccuacuga

SEQ ID NO: 1489 - RNA, 1971 nt, Artificial Sequence
  derived and/or modified sequence opt5 from EWS__Homo_sapiens__AAH04817
auggccagcaccgacuacuccacauauucucaggcugccgcgcaacagggcuacagcgcuuauacggcccagcccacccagggguacgcccaaacaacccaggcuuauggacagcaguccuacggcacauaugggcaaccuaccgaugugucuuacacacaggcccagaccacggcuaccuacggacagacagccuaugcgaccagcuacggccaaccgcccacaggguauaccacgccuacagcuccccaggccuacucccagccuguccaaggauauggcaccggcgccuacgacacaaccaccgcuacaguuacgaccacacaggccucuuaugcggcccagagcgcuuacgggacccagcccgccuacccugcuuauggacaacagccggccgccacagcucccaccagaccucaggauggcaacaagcccacggagacaucccagccucaaagcucuaccgggggauacaaucagcccucccugggcuaugggcagagcaacuacucuuauccccaggugccuggauccuaccccaugcaaccugugaccgcgccgcccagcuauccuccgacaucuuacuccagcacccagcccacauccuacgaccagucuagcuauucccagcaaaauacguacggccagccuagcucuuauggccagcaauccagcuacgggcagcagucuagcuauggacagcaacccccuaccuccuaucccccgcagacaggcucuuacagccaggccccuucccaguacagccaacagucuuccagcuacgggcagcagucuuccuuccggcaagaucaccccagcuccaugggagucuauggccaggaaucugggggauuuagcggcccuggcgagaaccgcuccaugucugggcccgacaauagaggacggggccgcgggggauucgauagaggcgggaugagccggggcggacgcggcgggggaagaggcgggaugggauccgcuggcgaaagagggggcuuuaacaaaccuggaggccccauggacgaggggccggaucucgaccugggaccucccguggaucccgacgaagauagcgacaauucugccaucuacguucagggccuuaacgacuccgugacccuggaugaccucgccgauuucuuuaagcaaugcggggucgugaaaaugaauaagcgcacaggacagccuaugauucauaucuaucuggacaaagagaccggcaagccgaagggggaugcuacgguuagcuacgaggaucccccuaccgccaaagcggcuguggaaugguucgacggcaaggacuuucagggaucuaaacuuaaggucucccuggcccggaaaaagcccccuaugaacagcaugcggggcgggcugcccccucgcgagggaagaggcaugcccccgccucuccgcgggggacccggcgggccuggcggacccggcgggccgaugggacggaugggcgggagaggaggcgaucggggcggguucccucccagaggaccucgcggcucucgggggaaucccagcggaggcgggaacgugcagcacagagccggagacuggcaaugucccaauccuggcugcggcaaccagaauuuugcuuggcgcacagaauguaaccagugcaaggccccgaaacccgagggguuccugccucccccuuuucccccuccgggaggcgaucgggggagaggaggccccgggggaaugcgcggcggcagagggggacucauggaccggggcgggccuggaggcauguuccgcgggggacggggcggcgacagagggggauuucgcggcgggcggggaauggauagaggcggguucggaggcggccggcgcgggggacccggcgggccucccggaccgcugauggagcagaugggcgggagacggggaggcagaggcgggccuggaaagauggacaaaggcgaacaucgccaagagcggagagaucgccccuauuga

SEQ ID NO: 1490 - protein, 665 aa, Artificial Sequence
  EZH2__Homo_sapiens__F2YMM1
MGQTGKKSEKGPVCWRKRVKSEYMRLRQLKRFRRADEVKSMFSSNRQKILERTEILNQEWKQRRIQPVHILTSVSSLRGTREVEDETVLHNIPYMGDEVLDQDGTFIEELIKNYDGKVHGDRECGFINDEIFVELVNALGQYNDDDDDDDGDDPEEREEKQKDLEDHRDDKESRPPRKFPSDKIFEAISSMFPDKGTAEELKEKYKELTEQQLPGALPPECTPNIDGPNAKSVQREQSLHSFHTLFCRRCFKYDCFLHPFHATPNTYKRKNTETALDNKPCGPQCYQHLEGAKEFAAALTAERIKTPPKRPGGRRRGRLPNNSSRPSTPTINVLESKDTDSDREAGTETGGENNDKEEEEKKDETSSSSEANSRCQTPIKMKPNIEPPENVEWSGAEASMFRVLIGTYYDNFCAIARLIGTKTCRQVYEFRVKESSIIAPAPAEDVDTPPRKKKRKHRLWAAHCRKIQLKKGQNRFPGCRCKAQCNTKQCPCYLAVRECDPDLCLTCGAADHWDSKNVSCKNCSIQRGSKKHLLLAPSDVAGWGIFIKDPVQKNEFISEYCGEIISQDEADRRGKVYDKYMCSFLFNLNNDFVVDATRKGNKIRFANHSVNPNCYAKVMMVNGDHRIGIFAKRAIQTGEELFFDYRYSQADALKYVGIEREMEIP

SEQ ID NO: 1491 - RNA, 1998 nt, Artificial Sequence
  EZH2__Homo_sapiens__AEA07595
augggccagacugggaagaaaucugagaagggaccaguuuguuggcggaagcguguaaaaucagaguacaugcgacugagacagcucaagagguucagacgagcugaugaaguaaagaguauguuuaguuccaaucgucagaaaauuuuggaaagaacggaaaucuuaaaccaagaauggaaacagcgaaggauacagccugugcacauccugacuucugugagcucauugcgcgggacuagggagguggaagaugaaacuguuuuacauaacauuccuuauaugggagaugaaguuuuagaucaggaugguacuuucauugaagaacuaauaaaaaauuaugaugggaaaguacacggggauagagaauguggguuuauaaaugaugaaauuuuuguggaguuggugaaugcccuuggucaauauaaugaugaugacgaugaugaugauggagacgauccugaagaaagagaagaaaagcagaaagaucuggaggaucaccgagaugauaaagaaagccgcccaccucggaaauuuccuucugauaaaauuuuugaagccauuuccucaauguuuccagauaagggcacagcagaagaacuaaaggaaaaauauaaagaacucaccgaacagcagcucccaggcgcacuuccuccugaauguacccccaacauagauggaccaaaugcuaaaucuguucagagagagcaaagcuuacacuccuuucauacgcuuuucuguaggcgauguuuuaaauaugacugcuuccuacauccuuuucaugcaacacccaacacuuauaagcggaagaacacagaaacagcucuagacaacaaaccuuguggaccacaguguuaccagcauuuggagggagcaaaggaguuugcugcugcucucaccgcugagcggauaaagaccccaccaaaacguccaggaggccgcagaagaggacggcuucccaauaacaguagcaggcccagcacccccaccauuaaugugcuggaaucaaaggauacagacagugauagggaagcagggacugaaacggggggagagaacaaugauaaagaagaagaagagaagaaagaugaaacuucgagcuccucugaagcaaauucucggugucaaacaccaauaaagaugaagccaaauauugaaccuccugagaauguggaguggaguggugcugaagccucaauguuuagaguccucauuggcacuuacuaugacaauuucugugccauugcuagguuaauugggaccaaaacauguagacagguguaugaguuuagagucaaagaaucuagcaucauagcuccagcucccgcugaggauguggauacuccuccaaggaaaaagaagaggaaacaccgguugugggcugcacacugcagaaagauacagcugaaaaagggucaaaaccgcuuuccgggaugccgcugcaaagcacagugcaacaccaagcagugcccgugcuaccuggcuguccgagagugugacccugaccucugucuuacuuguggagccgcugaccauugggacaguaaaaauguguccugcaagaacugcaguauucagcggggcuccaaaaagcaucuauugcuggcaccaucugacguggcaggcugggggauuuuuaucaaagauccugugcagaaaaaugaauucaucucagaauacuguggagagauuauuucucaagaugaagcugacagaagagggaaaguguaugauaaauacaugugcagcuuucuguucaacuugaacaaugauuuugugguggaugcaacccgcaaggguaacaaaauucguuuugcaaaucauucgguaaauccaaacugcuaugcaaaaguuaugaugguuaacggugaucacaggauagguauuuuugccaagagagccauccagacuggcgaagagcuguuuuuugauuacagauacagccaggcugaugcccugaaguaugucggcaucgaaagagaaauggaaaucccuuga

SEQ ID NO: 1492 - RNA, 1998 nt, Artificial Sequence
  derived and/or modified sequence opt1 from EZH2__Homo_sapiens__AEA07595
augggccagaccgggaagaaguccgagaagggccccgugugcuggcgcaagcgggucaagagcgaguacaugcgccugcggcagcucaagcgcuuccggcgcgccgacgaggucaagagcauguucuccagcaaccggcagaagauccuggagcgcaccgagauccugaaccaggaguggaagcagcggcgcauccagccggugcacauccucacguccgugagcucccugcgggggacccgcgagguggaggacgagaccgugcugcacaacauccccuacaugggcgacgagguccucgaccaggacgggaccuucaucgaggagcugaucaagaacuacgacggcaaggugcacggcgaccgggagugcggguucaucaacgacgagaucuucguggagcuggucaacgcccucggccaguacaacgacgacgacgacgacgacgacggggacgaccccgaggagcgcgaggagaagcagaaggaccuggaggaccaccgggacgacaaggagagccggcccccgcgcaaguuccccuccgacaagaucuucgaggcgaucagcuccauguuccccgacaagggcacggccgaggagcugaaggagaaguacaaggagcucaccgagcagcagcugcccggggcccugccgcccgagugcacccccaacaucgacggccccaacgccaagagcgugcagcgcgagcagucccuccacagcuuccacacccuguucugccggcgcugcuucaaguacgacugcuuccugcacccguuccacgccacgcccaacaccuacaagcggaagaacaccgagaccgcgcucgacaacaagcccugcggcccccagugcuaccagcaccuggagggggccaaggaguucgccgccgcgcugacggccgagcgcaucaagaccccgcccaagcgccccggcgggcggcgccggggccgccuccccaacaacuccagccggccguccacccccaccaucaacgugcuggagagcaaggacacggacuccgaccgcgaggccggcaccgagaccgggggcgagaacaacgacaaggaggaggaggagaagaaggacgagaccagcagcuccagcgaggccaacucccggugccagacgcccaucaagaugaagcccaacaucgagccgcccgagaacgucgaguggagcggggccgaggcguccauguuccgcgugcugaucggcaccuacuacgacaacuucugcgccaucgcccggcucaucgggaccaagaccugccgccagguguacgaguuccgggucaaggagagcuccaucaucgcccccgcccccgcggaggacguggacacgccgccccgcaagaagaagcggaagcaccgccugugggccgcccacugccggaagauccagcugaagaagggccagaaccgcuuccccggcugccggugcaaggcccagugcaacaccaagcagugcccgugcuaccucgccgugcgcgagugcgaccccgaccugugccugaccugcggggcggccgaccacugggacagcaagaacgucuccugcaagaacugcagcauccagcggggcuccaagaagcaccuccugcuggcccccagcgacguggccggguggggcaucuucaucaaggaccccgugcagaagaacgaguucaucuccgaguacugcggggagaucaucagccaggacgaggccgaccgccgcggcaaggucuacgacaaguacaugugcuccuuccucuucaaccugaacaacgacuucgugguggacgcgacccggaagggcaacaagauccgcuucgccaaccacagcgucaacccgaacugcuacgccaaggugaugauggucaacggggaccaccggaucggcaucuucgccaagcgcgcgauccagacgggggaggagcuguucuucgacuaccgguacucccaggccgacgcccucaaguacgugggcaucgagcgcgagauggagauccccuga

SEQ ID NO: 1493 - RNA, 1998 nt, Artificial Sequence
  derived and/or modified sequence opt2 from EZH2__Homo_sapiens__AEA07595
augggccagaccggcaagaaguccgagaagggccccgucugcuggcgcaagcgcgucaaguccgaguacaugcgccuccgccagcucaagcgcuuccgccgcgccgacgaggucaaguccauguucuccuccaaccgccagaagauccucgagcgcaccgagauccucaaccaggaguggaagcagcgccgcauccagcccguccacauccucaccuccgucuccucccuccgcggcacccgcgaggucgaggacgagaccguccuccacaacauccccuacaugggcgacgagguccucgaccaggacggcaccuucaucgaggagcucaucaagaacuacgacggcaagguccacggcgaccgcgagugcggcuucaucaacgacgagaucuucgucgagcucgucaacgcccucggccaguacaacgacgacgacgacgacgacgacggcgacgaccccgaggagcgcgaggagaagcagaaggaccucgaggaccaccgcgacgacaaggagucccgccccccccgcaaguuccccuccgacaagaucuucgaggccaucuccuccauguuccccgacaagggcaccgccgaggagcucaaggagaaguacaaggagcucaccgagcagcagcuccccggcgcccucccccccgagugcacccccaacaucgacggccccaacgccaaguccguccagcgcgagcagucccuccacuccuuccacacccucuucugccgccgcugcuucaaguacgacugcuuccuccaccccuuccacgccacccccaacaccuacaagcgcaagaacaccgagaccgcccucgacaacaagcccugcggcccccagugcuaccagcaccucgagggcgccaaggaguucgccgccgcccucaccgccgagcgcaucaagaccccccccaagcgccccggcggccgccgccgcggccgccuccccaacaacuccucccgccccuccacccccaccaucaacguccucgaguccaaggacaccgacuccgaccgcgaggccggcaccgagaccggcggcgagaacaacgacaaggaggaggaggagaagaaggacgagaccuccuccuccuccgaggccaacucccgcugccagacccccaucaagaugaagcccaacaucgagccccccgagaacgucgagugguccggcgccgaggccuccauguuccgcguccucaucggcaccuacuacgacaacuucugcgccaucgcccgccucaucggcaccaagaccugccgccaggucuacgaguuccgcgucaaggaguccuccaucaucgcccccgcccccgccgaggacgucgacacccccccccgcaagaagaagcgcaagcaccgccucugggccgcccacugccgcaagauccagcucaagaagggccagaaccgcuuccccggcugccgcugcaaggcccagugcaacaccaagcagugccccugcuaccucgccguccgcgagugcgaccccgaccucugccucaccugcggcgccgccgaccacugggacuccaagaacgucuccugcaagaacugcuccauccagcgcggcuccaagaagcaccuccuccucgcccccuccgacgucgccggcuggggcaucuucaucaaggaccccguccagaagaacgaguucaucuccgaguacugcggcgagaucaucucccaggacgaggccgaccgccgcggcaaggucuacgacaaguacaugugcuccuuccucuucaaccucaacaacgacuucgucgucgacgccacccgcaagggcaacaagauccgcuucgccaaccacuccgucaaccccaacugcuacgccaaggucaugauggucaacggcgaccaccgcaucggcaucuucgccaagcgcgccauccagaccggcgaggagcucuucuucgacuaccgcuacucccaggccgacgcccucaaguacgucggcaucgagcgcgagauggagauccccuga

SEQ ID NO: 1494 - RNA, 1998 nt, Artificial Sequence
  derived and/or modified sequence opt3 from EZH2__Homo_sapiens__AEA07595
augggccagaccgggaagaaaagcgagaagggacccgugugcuggagaaaaagggucaaguccgaauacaugcggcugcgccaacucaaacgauuccguagagccgacgagguuaagucuauguuuucaaguaacaggcagaagauccuugaacggacagagauucugaaucaggaauggaaacagcgcagaauacaaccugugcacaucuugacuagcguauccucuuuaagggguacgcgggagguggaggaugaaaccguccugcauaacauuccauauaugggcgacgaggugcuagaucaggacgggacauucaucgaagaacucauuaagaauuacgauggaaaaguucacggcgaccgcgagugugguuuuaucaacgaugaaauauucguggagcuggucaaugcucuugggcaguauaacgacgaugacgaugacgaugacggagacgauccggaggagcgagaagagaagcagaaagaccuggaggaucauagagacgauaaggaaucgaggcccccucggaaguuuccaucagacaaaaucuucgaggcaauuagcaguauguuucccgauaagggcacugccgaagaguugaaagaaaaguacaaagagcucaccgagcaacagcugccuggcgcgcugccacccgaaugcacaccuaauaucgacgggccaaacgcuaaguccgugcagcgugagcagucucuccacagcuuccauaccuuauuuugucgcagaugcuucaaauaugauuguuuucugcacccguuccacgccacucccaauacauacaagaggaagaacaccgaaacggcacuugacaauaaaccuugcggaccacaauguuaucagcauuuggagggugccaaggaauuugcugcagcccugacugcugagcggauuaaaacacccccuaagcgaccaggcgggcgcagaaggggacggcuacccaacaauuccucacgcccgaguaccccuacuaucaacguacucgagagcaaagauaccgacucugacagagaagccggcacagagaccgguggggaaaauaacgauaaggaggaggaagagaagaaagacgaaacguccucaagcagugaggcgaacucuaggugccagacucccauaaagaugaaaccaaauauugaaccucccgagaacguugagugguccggagcagaagccagcauguuccgugugcugaucggcacauacuacgauaauuucugugcuauugcccggcuuaucggcaccaagacuugccgacaagucuaugaguuuagagugaaagaaucgucuaucauugcaccagcucccgccgaggacguggauacaccuccaaggaagaagaaacgcaagcaccggcugugggcggcccauuguagaaaaauacaguugaagaaagggcagaacagguucccgggaugccgcugcaaggcacaguguaauaccaagcaaugccccuguuaccucgcuguccgagaaugcgacccugaucuguguuuaacgugcggugccgcugaccacugggauuccaaaaacguuucauguaagaauugcaguauccagcggggcagcaaaaagcaucugcuccuugccccauccgacguggcaggguggggaauuuuuaucaaagaucccguacagaagaacgaguucauaucugaguauuguggcgaaauuaucagccaggacgaggccgaucguagagguaaaguguacgacaaguauaugugcucauuucuguucaauuugaacaaugacuuugucguggaugcuaccaggaaggggaacaaaauccgcuucgcgaaucacaguguuaacccuaauuguuacgcaaaggugaugauggucaacggcgaccaccggauuggaaucuuugccaaaagagcuauucaaacaggcgaggaacuauucuuugauuauagguacucccaggccgacgcacugaaguacguggggauagaacgagagauggagaucccauga

SEQ ID NO: 1495 - RNA, 1998 nt, Artificial Sequence
  derived and/or modified sequence opt4 from EZH2__Homo_sapiens__AEA07595
augggccagaccggcaagaagagcgagaagggccccgugugcuggagaaagagagugaagagcgaguacaugagacugagacagcugaagagauucagaagagccgacgaggugaagagcauguucagcagcaacagacagaagauccuggagagaaccgagauccugaaccaggaguggaagcagagaagaauccagcccgugcacauccugaccagcgugagcagccugagaggcaccagagagguggaggacgagaccgugcugcacaacauccccuacaugggcgacgaggugcuggaccaggacggcaccuucaucgaggagcugaucaagaacuacgacggcaaggugcacggcgacagagagugcggcuucaucaacgacgagaucuucguggagcuggugaacgcccugggccaguacaacgacgacgacgacgacgacgacggcgacgaccccgaggagagagaggagaagcagaaggaccuggaggaccacagagacgacaaggagagcagaccccccagaaaguuccccagcgacaagaucuucgaggccaucagcagcauguuccccgacaagggcaccgccgaggagcugaaggagaaguacaaggagcugaccgagcagcagcugcccggcgcccugccccccgagugcacccccaacaucgacggccccaacgccaagagcgugcagagagagcagagccugcacagcuuccacacccuguucugcagaagaugcuucaaguacgacugcuuccugcaccccuuccacgccacccccaacaccuacaagagaaagaacaccgagaccgcccuggacaacaagcccugcggcccccagugcuaccagcaccuggagggcgccaaggaguucgccgccgcccugaccgccgagagaaucaagaccccccccaagagacccggcggcagaagaagaggcagacugcccaacaacagcagcagacccagcacccccaccaucaacgugcuggagagcaaggacaccgacagcgacagagaggccggcaccgagaccggcggcgagaacaacgacaaggaggaggaggagaagaaggacgagaccagcagcagcagcgaggccaacagcagaugccagacccccaucaagaugaagcccaacaucgagccccccgagaacguggaguggagcggcgccgaggccagcauguucagagugcugaucggcaccuacuacgacaacuucugcgccaucgccagacugaucggcaccaagaccugcagacagguguacgaguucagagugaaggagagcagcaucaucgcccccgcccccgccgaggacguggacaccccccccagaaagaagaagagaaagcacagacugugggccgcccacugcagaaagauccagcugaagaagggccagaacagauuccccggcugcagaugcaaggcccagugcaacaccaagcagugccccugcuaccuggccgugagagagugcgaccccgaccugugccugaccugcggcgccgccgaccacugggacagcaagaacgugagcugcaagaacugcagcauccagagaggcagcaagaagcaccugcugcuggcccccagcgacguggccggcuggggcaucuucaucaaggaccccgugcagaagaacgaguucaucagcgaguacugcggcgagaucaucagccaggacgaggccgacagaagaggcaagguguacgacaaguacaugugcagcuuccuguucaaccugaacaacgacuucgugguggacgccaccagaaagggcaacaagaucagauucgccaaccacagcgugaaccccaacugcuacgccaaggugaugauggugaacggcgaccacagaaucggcaucuucgccaagagagccauccagaccggcgaggagcuguucuucgacuacagauacagccaggccgacgcccugaaguacgugggcaucgagagagagauggagauccccuga

SEQ ID NO: 1496 - RNA, 1998 nt, Artificial Sequence
  derived and/or modified sequence opt5 from EZH2__Homo_sapiens__AEA07595
augggccagaccgggaagaaaagcgagaagggacccgugugcuggagaaaacgggucaaguccgaauacaugcgccugagacaacucaaacgguuccgcagagccgacgagguuaagucuauguuuagcuccaaccggcagaagauccuggaacgcacagagauucuuaaucaggaauggaaacagagacggauccaaccugugcacauucugacgucugugagcucccuccgcggcaccagagaggucgaggaugaaacagugcugcauaacaucccguauaugggggacgagguucuugaucaggacggaaccuucauugaagaacugaucaagaauuacgauggcaaagugcacggggaccgggaguguggauuuaucaacgaugaaauuuucgucgagcucgugaaugcucugggccaguauaacgacgaugacgaugacgaugacggcgacgaucccgaagaacgcgaagagaagcagaaagaccuggaggaucauagagacgauaaggaaucucggccuccccgcaaguuuccuagcgacaaaaucuucgaggccauuuccagcauguuucccgauaaggggacagcggaggagcucaaagaaaaguacaaagagcugaccgagcaacagcuuccuggagcucugccgcccgaaugcacaccuaauaucgacggccccaacgccaagucuguucagagagagcagucccuccacagcuuccauacccuguuuugucggagaugcuucaaauaugauuguuuucuucacccuuuccacgccacgcccaauaccuacaagcgcaagaacacagaaaccgcucuggacaauaaaccgugcgggccucaauguuaucagcaucucgagggagccaaggaauuugcugccgcgcugacagccgagcggauuaaaacgcccccuaagagacccggcgggcgccggagaggacgccugcccaacaauucuucccggccuagcaccccgacaaucaacgugcucgagucuaaagauaccgacuccgacagagaagcuggcacagagaccggcggggaaaauaacgauaaggaggaggaagagaagaaagacgaaaccagcuccucuagcgaggccaacucccgcugccagacacccauuaagaugaaaccuaauaucgaacccccugagaacgucgaguggagcggagcugaagccucuauguuccgggugcugaucggcacguacuacgauaauuucugugcgauugccagacuuaucgggaccaagacaugccgccaaguguaugaguuucgggucaaagaauccagcauuaucgcucccgccccggcugaggacguugauaccccucccagaaagaagaaacggaagcaccgccugugggccgcccauuguagaaaaauucagcucaagaaaggacagaaccgguucccuggcugcagaugcaaggcucaguguaauacaaagcaaugccccuguuaccuggcggugcgcgaaugcgacccugaucuuugucugaccugcggggccgcugaccacugggauucuaaaaacgugagcuguaagaauugcuccauccagcggggaucuaaaaagcaccuccugcuggcccccagcgacgucgccggcuggggcaucuuuauuaaagauccggugcagaagaacgaguucaucuccgaguauuguggggaaauuaucagccaggacgaggcugauagacgcggaaaaguuuacgacaaguauaugugcucuuuucucuucaaucugaacaaugacuuuguggucgaugccacgagaaagggcaacaaaauucgguucgcgaaucauuccgugaacccuaauuguuacgcuaagguuaugauggugaacggggaccaccgcaucggaaucuuugccaaaagagccauucaaacaggcgaggagcuuuucuuugauuaucgguacagccaggcugacgcccugaaguacgucgggaucgaacgcgagauggagauucccuga

SEQ ID NO: 1497 - protein, 334 aa, Artificial Sequence
  EZH2__Homo_sapiens__G3XAL2
MGQTGKKSEKGPVCWRKRVKSEYMRLRQLKRFRRADEVKSMFSSNRQKILERTEILNQEWKQRRIQPVHILTSVSSLRGTRECSVTSDLDFPTQVIPLKTLNAVASVPIMYSWSPLQQNFMVEDETVLHNIPYMGDEVLDQDGTFIEELIKNYDGKVHGDRECGFINDEIFVELVNALGQYNDDDDDDDGDDPEEREEKQKDLEDHRDDKESRPPRKFPSDKIFEAISSMFPDKGTAEELKEKYKELTEQQLPGALPPECTPNIDGPNAKSVQREQSLHSFHTLFCRRCFKYDCFLHPFHATPNTYKRKNTETALDNKPCGPQCYQHLPLLPRN

SEQ ID NO: 1498 - RNA, 1005 nt, Artificial Sequence
  EZH2__Homo_sapiens__EAW80068
augggccagacugggaagaaaucugagaagggaccaguuuguuggcggaagcguguaaaaucagaguacaugcgacugagacagcucaagagguucagacgagcugaugaaguaaagaguauguuuaguuccaaucgucagaaaauuuuggaaagaacggaaaucuuaaaccaagaauggaaacagcgaaggauacagccugugcacauccugacuucugugagcucauugcgcgggacuagggaguguucggugaccagugacuuggauuuuccaacacaagucaucccauuaaagacucugaaugcaguugcuucaguacccauaauguauucuuggucuccccuacagcagaauuuuaugguggaagaugaaacuguuuuacauaacauuccuuauaugggagaugaaguuuuagaucaggaugguacuuucauugaagaacuaauaaaaaauuaugaugggaaaguacacggggauagagaauguggguuuauaaaugaugaaauuuuuguggaguuggugaaugcccuuggucaauauaaugaugaugacgaugaugaugauggagacgauccugaagaaagagaagaaaagcagaaagaucuggaggaucaccgagaugauaaagaaagccgcccaccucggaaauuuccuucugauaaaauuuuugaagccauuuccucaauguuuccagauaagggcacagcagaagaacuaaaggaaaaauauaaagaacucaccgaacagcagcucccaggcgcacuuccuccugaauguacccccaacauagauggaccaaaugcuaaaucuguucagagagagcaaagcuuacacuccuuucauacgcuuuucuguaggcgauguuuuaaauaugacugcuuccuacauccuuuucaugcaacacccaacacuuauaagcggaagaacacagaaacagcucuagacaacaaaccuuguggaccacaguguuaccagcauuugccacuccuaccuaggaacuaa

SEQ ID NO: 1499 - RNA, 1005 nt, Artificial Sequence
  derived and/or modified sequence opt1 from EZH2__Homo_sapiens__EAW80068
augggccagaccgggaagaaguccgagaagggccccgugugcuggcgcaagcgggucaagagcgaguacaugcgccugcggcagcucaagcgcuuccggcgcgccgacgaggucaagagcauguucuccagcaaccggcagaagauccuggagcgcaccgagauccugaaccaggaguggaagcagcggcgcauccagccggugcacauccucacguccgugagcucccugcgggggacccgcgagugcagcgugaccuccgaccuggacuuccccacccaggugaucccccucaagacgcugaacgccgucgcgagcgugcccaucauguacuccuggagcccgcugcagcagaacuucaugguggaggacgagaccguccuccacaacauccccuacaugggcgacgaggugcuggaccaggacgggaccuucaucgaggagcugaucaagaacuacgacggcaaggugcacggcgaccgggagugcggguucaucaacgacgagaucuucgucgagcucgugaacgcccugggccaguacaacgacgacgacgacgacgacgacggggacgaccccgaggagcgcgaggagaagcagaaggaccuggaggaccaccgggacgacaaggagucccggcccccgcgcaaguuccccagcgacaagaucuucgaggccaucuccagcauguuccccgacaagggcaccgccgaggagcucaaggagaaguacaaggagcugacggagcagcagcugcccggggcccucccgcccgagugcacccccaacaucgacggccccaacgcgaaguccgugcagcgcgagcagagccugcacuccuuccacacccuguucugccggcgcugcuucaaguacgacugcuuccuccacccguuccacgccacccccaacacguacaagcggaagaacaccgagaccgcccuggacaacaagcccugcggcccccagugcuaccagcaccucccgcugcugccccgcaacuga

SEQ ID NO: 1500 - RNA, 1005 nt, Artificial Sequence
  derived and/or modified sequence opt2 from EZH2__Homo_sapiens__EAW80068
augggccagaccggcaagaaguccgagaagggccccgucugcuggcgcaagcgcgucaaguccgaguacaugcgccuccgccagcucaagcgcuuccgccgcgccgacgaggucaaguccauguucuccuccaaccgccagaagauccucgagcgcaccgagauccucaaccaggaguggaagcagcgccgcauccagcccguccacauccucaccuccgucuccucccuccgcggcacccgcgagugcuccgucaccuccgaccucgacuuccccacccaggucaucccccucaagacccucaacgccgucgccuccguccccaucauguacuccugguccccccuccagcagaacuucauggucgaggacgagaccguccuccacaacauccccuacaugggcgacgagguccucgaccaggacggcaccuucaucgaggagcucaucaagaacuacgacggcaagguccacggcgaccgcgagugcggcuucaucaacgacgagaucuucgucgagcucgucaacgcccucggccaguacaacgacgacgacgacgacgacgacggcgacgaccccgaggagcgcgaggagaagcagaaggaccucgaggaccaccgcgacgacaaggagucccgccccccccgcaaguuccccuccgacaagaucuucgaggccaucuccuccauguuccccgacaagggcaccgccgaggagcucaaggagaaguacaaggagcucaccgagcagcagcuccccggcgcccucccccccgagugcacccccaacaucgacggccccaacgccaaguccguccagcgcgagcagucccuccacuccuuccacacccucuucugccgccgcugcuucaaguacgacugcuuccuccaccccuuccacgccacccccaacaccuacaagcgcaagaacaccgagaccgcccucgacaacaagcccugcggcccccagugcuaccagcaccucccccuccucccccgcaacuga

SEQ ID NO: 1501 - RNA, 1005 nt, Artificial Sequence
  derived and/or modified sequence opt3 from EZH2__Homo_sapiens__EAW80068
augggccagaccgggaagaaaagcgagaagggacccgugugcuggagaaaaagggucaaguccgaauacaugcggcugcgccaacucaaacgauuccguagagccgacgagguuaagucuauguuuucaaguaacaggcagaagauccuugaacggacagagauucugaaucaggaauggaaacagcgcagaauacaaccugugcacaucuugacuagcguauccucuuuaagggguacgcgggaguguucggugaccucagaucuggacuucccaacacaggucauuccgcuaaagacucucaacgcuguggcaagcguucccaucauguauaguugguccccucugcagcagaauuuuaugguggaggaugaaaccguccuucauaacauuccauacaugggcgacgaggugcuggaucaagacgggacauucaucgaagaguugaucaaaaauuaugauggaaagguacacggcgaccgcgagugcgguuuuauaaacgaugaaauuuucguugagcucgugaaugcccuggggcaguacaacgacgaugacgaugacgacgauggagacgaucccgaagaacgagaagagaaacagaaggaccuggaggaucauagagacgauaaggaaucuaggccuccacggaaauuucccagcgacaagaucuucgaggcgauuuccucaauguuuccugauaaaggcaccgcugaggagcucaaggaaaaauauaaggaguuaacugagcagcaacugccaggcgcccuuccgcccgaauguacaccuaauaucgacgggccaaacgcaaaaaguguccagcgugagcagagcuugcacucuuuccauacccuguuuugccgcagauguuucaaguacgauugcuuucuacaccccuuccacgccacgccuaauacuuauaagaggaaaaacaccgaaacagcucucgacaauaagccauguggaccccaaugcuaccagcaucugccgcuucugccucggaacuga

SEQ ID NO: 1502 - RNA, 1005 nt, Artificial Sequence
  derived and/or modified sequence opt4 from EZH2__Homo_sapiens__EAW80068
augggccagaccggcaagaagagcgagaagggccccgugugcuggagaaagagagugaagagcgaguacaugagacugagacagcugaagagauucagaagagccgacgaggugaagagcauguucagcagcaacagacagaagauccuggagagaaccgagauccugaaccaggaguggaagcagagaagaauccagcccgugcacauccugaccagcgugagcagccugagaggcaccagagagugcagcgugaccagcgaccuggacuuccccacccaggugaucccccugaagacccugaacgccguggccagcgugcccaucauguacagcuggagcccccugcagcagaacuucaugguggaggacgagaccgugcugcacaacauccccuacaugggcgacgaggugcuggaccaggacggcaccuucaucgaggagcugaucaagaacuacgacggcaaggugcacggcgacagagagugcggcuucaucaacgacgagaucuucguggagcuggugaacgcccugggccaguacaacgacgacgacgacgacgacgacggcgacgaccccgaggagagagaggagaagcagaaggaccuggaggaccacagagacgacaaggagagcagaccccccagaaaguuccccagcgacaagaucuucgaggccaucagcagcauguuccccgacaagggcaccgccgaggagcugaaggagaaguacaaggagcugaccgagcagcagcugcccggcgcccugccccccgagugcacccccaacaucgacggccccaacgccaagagcgugcagagagagcagagccugcacagcuuccacacccuguucugcagaagaugcuucaaguacgacugcuuccugcaccccuuccacgccacccccaacaccuacaagagaaagaacaccgagaccgcccuggacaacaagcccugcggcccccagugcuaccagcaccugccccugcugcccagaaacuga

SEQ ID NO: 1503 - RNA, 1005 nt, Artificial Sequence
  derived and/or modified sequence opt5 from EZH2__Homo_sapiens__EAW80068
augggccagaccgggaagaaaagcgagaagggacccgugugcuggagaaaacgggucaaguccgaauacaugcgccugagacaacucaaacgguuccgcagagccgacgagguuaagucuauguuuagcuccaaccggcagaagauccuggaacgcacagagauucuuaaucaggaauggaaacagagacggauccaaccugugcacauucugacgucugugagcucccuccgcggcaccagagaguguucugucacaagcgaucuggacuucccgacccaggugaucccccuuaagacacugaacgcuguugccuccgugccuauuauguauagcuggucuccccuccagcagaauuuuauggucgaggaugaaaccgugcugcauaacaucccuuacaugggggacgagguucuggaucaagacggaacauucaucgaagaacucauuaaaaauuaugauggcaaggugcacggggaccgggagugcggauuuaucaacgaugaaauuuucgucgagcuggugaaugcgcuuggccaguacaacgacgaugacgaugacgacgauggcgacgaucccgaggagcgcgaagagaaacagaaggaccuggaggaucauagagacgauaaggaaucccggccuccgcgcaaauuucccagcgacaagaucuucgaggcuauuucuuccauguuuccugauaaagggaccgccgaggaacucaaggaaaaauauaaggagcugacggagcagcaacuucccggagcccugccucccgaauguaccccgaauaucgacggcccuaacgcuaaaagcgugcagagagagcagucucuccacuccuuccauacacuguuuugccggagauguuucaaguacgauugcuuucugcaccccuuccacgccaccccuaauacauauaagcgcaaaaacaccgaaacggcucucgacaauaagcccugugggccccaaugcuaccagcaucugccucuucugccgcggaacuga

SEQ ID NO: 1504 - protein, 64 aa, Artificial Sequence
  EZH2__Homo_sapiens__L0R855
MPLVNIMMMTMMMMETILKKEKKSRKIWRITEMIKKAAHLGNFLLIKFLKPFPQCFQIRAQQKN

SEQ ID NO: 1505 - RNA, 195 nt, Artificial Sequence
  EZH2__Homo_sapiens__CCO13726
augcccuuggucaauauaaugaugaugacgaugaugaugauggagacgauccugaagaaagagaagaaaagcagaaagaucuggaggaucaccgagaugauaaagaaagccgcccaccucggaaauuuccuucugauaaaauuuuugaagccauuuccucaauguuuccagauaagggcacagcagaagaacuaa

SEQ ID NO: 1506 - RNA, 195 nt, Artificial Sequence
  derived and/or modified sequence opt1 from EZH2__Homo_sapiens__CCO13726
augccccuggugaacaucaugaugaugaccaugaugaugauggagaccauccucaagaaggagaagaagagccgcaagaucuggcggaucacggagaugaucaagaaggccgcccaccugggcaacuuccugcucaucaaguuccugaagccguucccccagugcuuccagauccgcgcgcagcagaagaacuga

SEQ ID NO: 1507 - RNA, 195 nt, Artificial Sequence
  derived and/or modified sequence opt2 from EZH2__Homo_sapiens__CCO13726
augccccucgucaacaucaugaugaugaccaugaugaugauggagaccauccucaagaaggagaagaagucccgcaagaucuggcgcaucaccgagaugaucaagaaggccgcccaccucggcaacuuccuccucaucaaguuccucaagcccuucccccagugcuuccagauccgcgcccagcagaagaacuga

SEQ ID NO: 1508 - RNA, 195 nt, Artificial Sequence
  derived and/or modified sequence opt3 from EZH2__Homo_sapiens__CCO13726
augccccuggugaacaucaugaugaugaccaugaugaugauggagacaauucucaagaaagaaaagaaaagcagaaagauauggaggaucacugagaugauuaaaaaggccgcucaccuuggcaauuuccuguugaucaaguuuuuaaaaccuuucccacagugcuuucaaauucgggcacagcagaagaacuga

SEQ ID NO: 1509 - RNA, 195 nt, Artificial Sequence
  derived and/or modified sequence opt4 from EZH2__Homo_sapiens__CCO13726
augccccuggugaacaucaugaugaugaccaugaugaugauggagaccauccugaagaaggagaagaagagcagaaagaucuggagaaucaccgagaugaucaagaaggccgcccaccugggcaacuuccugcugaucaaguuccugaagcccuucccccagugcuuccagaucagagcccagcagaagaacuga

SEQ ID NO: 1510 - RNA, 195 nt, Artificial Sequence
  derived and/or modified sequence opt5 from EZH2__Homo_sapiens__CCO13726
augccccuggugaacaucaugaugaugaccaugaugaugauggagacaauucucaagaaagaaaagaaaagcagaaagaucuggcggauuacggagaugaucaaaaaggccgcucaccugggcaauuuccuucugauuaaguuucucaaaccuuucccgcagugcuuucaaauccgcgcccagcagaagaacuga

SEQ ID NO: 1511 - protein, 746 aa, Artificial Sequence
  EZH2__Homo_sapiens__Q15910
MGQTGKKSEKGPVCWRKRVKSEYMRLRQLKRFRRADEVKSMFSSNRQKILERTEILNQEWKQRRIQPVHILTSVSSLRGTRECSVTSDLDFPTQVIPLKTLNAVASVPIMYSWSPLQQNFMVEDETVLHNIPYMGDEVLDQDGTFIEELIKNYDGKVHGDRECGFINDEIFVELVNALGQYNDDDDDDDGDDPEEREEKQKDLEDHRDDKESRPPRKFPSDKIFEAISSMFPDKGTAEELKEKYKELTEQQLPGALPPECTPNIDGPNAKSVQREQSLHSFHTLFCRRCFKYDCFLHPFHATPNTYKRKNTETALDNKPCGPQCYQHLEGAKEFAAALTAERIKTPPKRPGGRRRGRLPNNSSRPSTPTINVLESKDTDSDREAGTETGGENNDKEEEEKKDETSSSSEANSRCQTPIKMKPNIEPPENVEWSGAEASMFRVLIGTYYDNFCAIARLIGTKTCRQVYEFRVKESSIIAPAPAEDVDTPPRKKKRKHRLWAAHCRKIQLKKDGSSNHVYNYQPCDHPRQPCDSSCPCVIAQNFCEKFCQCSSECQNRFPGCRCKAQCNTKQCPCYLAVRECDPDLCLTCGAADHWDSKNVSCKNCSIQRGSKKHLLLAPSDVAGWGIFIKDPVQKNEFISEYCGEIISQDEADRRGKVYDKYMCSFLFNLNNDFVVDATRKGNKIRFANHSVNPNCYAKVMMVNGDHRIGIFAKRAIQTGEELFFDYRYSQADALKYVGIEREMEIP

SEQ ID NO: 1512 - RNA, 2241 nt, Artificial Sequence
  EZH2__Homo_sapiens__AAC51520
augggccagacugggaagaaaucugagaagggaccaguuuguuggcggaagcguguaaaaucagaguacaugcgacugagacagcucaagagguucagacgagcugaugaaguaaagaguauguuuaguuccaaucgucagaaaauuuuggaaagaacggaaaucuuaaaccaagaauggaaacagcgaaggauacagccugugcacauccugacuucugugagcucauugcgcgggacuagggaguguucggugaccagugacuuggauuuuccaacacaagucaucccauuaaagacucugaaugcaguugcuucaguacccauaauguauucuuggucuccccuacagcagaauuuuaugguggaagaugaaacuguuuuacauaacauuccuuauaugggagaugaaguuuuagaucaggaugguacuuucauugaagaacuaauaaaaaauuaugaugggaaaguacacggggauagagaauguggguuuauaaaugaugaaauuuuuguggaguuggugaaugcccuuggucaauauaaugaugaugacgaugaugaugauggagacgauccugaagaaagagaagaaaagcagaaagaucuggaggaucaccgagaugauaaagaaagccgcccaccucggaaauuuccuucugauaaaauuuuugaagccauuuccucaauguuuccagauaagggcacagcagaagaacuaaaggaaaaauauaaagaacucaccgaacagcagcucccaggcgcacuuccuccugaauguacccccaacauagauggaccaaaugcuaaaucuguucagagagagcaaagcuuacacuccuuucauacgcuuuucuguaggcgauguuuuaaauaugacugcuuccuacauccuuuucaugcaacacccaacacuuauaagcggaagaacacagaaacagcucuagacaacaaaccuuguggaccacaguguuaccagcauuuggagggagcaaaggaguuugcugcugcucucaccgcugagcggauaaagaccccaccaaaacguccaggaggccgcagaagaggacggcuucccaauaacaguagcaggcccagcacccccaccauuaaugugcuggaaucaaaggauacagacagugauagggaagcagggacugaaacggggggagagaacaaugauaaagaagaagaagagaagaaagaugaaacuucgagcuccucugaagcaaauucucggugucaaacaccaauaaagaugaagccaaauauugaaccuccugagaauguggaguggaguggugcugaagccucaauguuuagaguccucauuggcacuuacuaugacaauuucugugccauugcuagguuaauugggaccaaaacauguagacagguguaugaguuuagagucaaagaaucuagcaucauagcuccagcucccgcugaggauguggauacuccuccaaggaaaaagaagaggaaacaccgguugugggcugcacacugcagaaagauacagcugaaaaaggacggcuccucuaaccauguuuacaacuaucaacccugugaucauccacggcagccuugugacaguucgugcccuugugugauagcacaaaauuuuugugaaaaguuuugucaauguaguucagagugucaaaaccgcuuuccgggaugccgcugcaaagcacagugcaacaccaagcagugcccgugcuaccuggcuguccgagagugugacccugaccucugucuuacuuguggagccgcugaccauugggacaguaaaaauguguccugcaagaacugcaguauucagcggggcuccaaaaagcaucuauugcuggcaccaucugacguggcaggcugggggauuuuuaucaaagauccugugcagaaaaaugaauucaucucagaauacuguggagagauuauuucucaagaugaagcugacagaagagggaaaguguaugauaaauacaugugcagcuuucuguucaacuugaacaaugauuuugugguggaugcaacccgcaaggguaacaaaauucguuuugcaaaucauucgguaaauccaaacugcuaugcaaaaguuaugaugguuaacggugaucacaggauagguauuuuugccaagagagccauccagacuggcgaagagcuguuuuuugauuacagauacagccaggcugaugcccugaaguaugucggcaucgaaagagaaauggaaaucccuuga

SEQ ID NO: 1513 - RNA, 2241 nt, Artificial Sequence
  derived and/or modified sequence opt1 from EZH2__Homo_sapiens__AAC51520
augggccagaccgggaagaaguccgagaagggccccgugugcuggcgcaagcgggucaagagcgaguacaugcgccugcggcagcucaagcgcuuccggcgcgccgacgaggucaagagcauguucuccagcaaccggcagaagauccuggagcgcaccgagauccugaaccaggaguggaagcagcggcgcauccagccggugcacauccucacguccgugagcucccugcgggggacccgcgagugcagcgugaccuccgaccuggacuuccccacccaggugaucccccucaagacgcugaacgccgucgcgagcgugcccaucauguacuccuggagcccgcugcagcagaacuucaugguggaggacgagaccguccuccacaacauccccuacaugggcgacgaggugcuggaccaggacgggaccuucaucgaggagcugaucaagaacuacgacggcaaggugcacggcgaccgggagugcggguucaucaacgacgagaucuucgucgagcucgugaacgcccugggccaguacaacgacgacgacgacgacgacgacggggacgaccccgaggagcgcgaggagaagcagaaggaccuggaggaccaccgggacgacaaggagucccggcccccgcgcaaguuccccagcgacaagaucuucgaggccaucuccagcauguuccccgacaagggcaccgccgaggagcucaaggagaaguacaaggagcugacggagcagcagcugcccggggcccucccgcccgagugcacccccaacaucgacggccccaacgcgaaguccgugcagcgcgagcagagccugcacuccuuccacacccuguucugccggcgcugcuucaaguacgacugcuuccuccacccguuccacgccacccccaacacguacaagcggaagaacaccgagaccgcccuggacaacaagcccugcggcccccagugcuaccagcaccuggagggggccaaggaguucgcggccgcccucaccgccgagcgcaucaagacgccgcccaagcgccccggcgggcggcgccggggccgccugcccaacaacagcagccggccguccacccccaccaucaacguccuggagagcaaggacaccgacuccgaccgcgaggccggcacggagaccgggggcgagaacaacgacaaggaggaggaggagaagaaggacgagaccagcuccagcuccgaggcgaacagccggugccagacccccaucaagaugaagcccaacaucgagccgcccgagaacguggagugguccggggccgaggccagcauguuccgcgugcucaucggcacguacuacgacaacuucugcgccaucgcccggcugaucgggaccaagaccugccgccaggucuacgaguuccgggugaaggaguccagcaucaucgcgcccgccccggccgaggacguggacaccccgccccgcaagaagaagcggaagcaccgccugugggccgcccacugccggaagauccagcucaagaaggacggcuccagcaaccacgucuacaacuaccagcccugcgaccacccccgccagcccugcgacuccagcugccccugcgugaucgcgcagaacuucugcgagaaguucugccagugcuccagcgagugccagaaccgguuccccggcugccgcugcaaggcccagugcaacacgaagcagugcccgugcuaccuggccgugcgggagugcgaccccgaccugugccugaccugcggggccgccgaccacugggacuccaagaacgucagcugcaagaacugcagcauccagcgcggcuccaagaagcaccuccugcucgcgcccagcgacguggccggguggggcaucuucaucaaggaccccguccagaagaacgaguucaucuccgaguacugcggggagaucaucagccaggacgaggccgaccgccggggcaagguguacgacaaguacaugugcuccuuccuguucaaccugaacaacgacuucguggucgacgccacccgcaagggcaacaagauccgguucgcgaaccacagcgugaacccgaacugcuacgccaaggugaugauggucaacggggaccaccgcaucggcaucuucgccaagcgggccauccagaccggggaggagcuguucuucgacuaccgcuacucccaggccgacgcgcucaaguacgugggcaucgagcgggagauggagauccccuga

SEQ ID NO: 1514 - RNA, 2241 nt, Artificial Sequence
  derived and/or modified sequence opt2 from EZH2__Homo_sapiens__AAC51520
augggccagaccggcaagaaguccgagaagggccccgucugcuggcgcaagcgcgucaaguccgaguacaugcgccuccgccagcucaagcgcuuccgccgcgccgacgaggucaaguccauguucuccuccaaccgccagaagauccucgagcgcaccgagauccucaaccaggaguggaagcagcgccgcauccagcccguccacauccucaccuccgucuccucccuccgcggcacccgcgagugcuccgucaccuccgaccucgacuuccccacccaggucaucccccucaagacccucaacgccgucgccuccguccccaucauguacuccugguccccccuccagcagaacuucauggucgaggacgagaccguccuccacaacauccccuacaugggcgacgagguccucgaccaggacggcaccuucaucgaggagcucaucaagaacuacgacggcaagguccacggcgaccgcgagugcggcuucaucaacgacgagaucuucgucgagcucgucaacgcccucggccaguacaacgacgacgacgacgacgacgacggcgacgaccccgaggagcgcgaggagaagcagaaggaccucgaggaccaccgcgacgacaaggagucccgccccccccgcaaguuccccuccgacaagaucuucgaggccaucuccuccauguuccccgacaagggcaccgccgaggagcucaaggagaaguacaaggagcucaccgagcagcagcuccccggcgcccucccccccgagugcacccccaacaucgacggccccaacgccaaguccguccagcgcgagcagucccuccacuccuuccacacccucuucugccgccgcugcuucaaguacgacugcuuccuccaccccuuccacgccacccccaacaccuacaagcgcaagaacaccgagaccgcccucgacaacaagcccugcggcccccagugcuaccagcaccucgagggcgccaaggaguucgccgccgcccucaccgccgagcgcaucaagaccccccccaagcgccccggcggccgccgccgcggccgccuccccaacaacuccucccgccccuccacccccaccaucaacguccucgaguccaaggacaccgacuccgaccgcgaggccggcaccgagaccggcggcgagaacaacgacaaggaggaggaggagaagaaggacgagaccuccuccuccuccgaggccaacucccgcugccagacccccaucaagaugaagcccaacaucgagccccccgagaacgucgagugguccggcgccgaggccuccauguuccgcguccucaucggcaccuacuacgacaacuucugcgccaucgcccgccucaucggcaccaagaccugccgccaggucuacgaguuccgcgucaaggaguccuccaucaucgcccccgcccccgccgaggacgucgacacccccccccgcaagaagaagcgcaagcaccgccucugggccgcccacugccgcaagauccagcucaagaaggacggcuccuccaaccacgucuacaacuaccagcccugcgaccacccccgccagcccugcgacuccuccugccccugcgucaucgcccagaacuucugcgagaaguucugccagugcuccuccgagugccagaaccgcuuccccggcugccgcugcaaggcccagugcaacaccaagcagugccccugcuaccucgccguccgcgagugcgaccccgaccucugccucaccugcggcgccgccgaccacugggacuccaagaacgucuccugcaagaacugcuccauccagcgcggcuccaagaagcaccuccuccucgcccccuccgacgucgccggcuggggcaucuucaucaaggaccccguccagaagaacgaguucaucuccgaguacugcggcgagaucaucucccaggacgaggccgaccgccgcggcaaggucuacgacaaguacaugugcuccuuccucuucaaccucaacaacgacuucgucgucgacgccacccgcaagggcaacaagauccgcuucgccaaccacuccgucaaccccaacugcuacgccaaggucaugauggucaacggcgaccaccgcaucggcaucuucgccaagcgcgccauccagaccggcgaggagcucuucuucgacuaccgcuacucccaggccgacgcccucaaguacgucggcaucgagcgcgagauggagauccccuga

SEQ ID NO: 1515 - RNA, 2241 nt, Artificial Sequence
  derived and/or modified sequence opt3 from EZH2__Homo_sapiens__AAC51520
augggccagaccgggaagaaaagcgagaagggacccgugugcuggagaaaaagggucaaguccgaauacaugcggcugcgccaacucaaacgauuccguagagccgacgagguuaagucuauguuuucaaguaacaggcagaagauccuugaacggacagagauucugaaucaggaauggaaacagcgcagaauacaaccugugcacaucuugacuagcguauccucuuuaagggguacgcgggaguguucggugaccucagaucuggacuucccaacacaggucauuccgcuaaagacucucaacgcuguggcaagcguucccaucauguauaguugguccccucugcagcagaauuuuaugguggaggaugaaaccguccuucauaacauuccauacaugggcgacgaggugcuggaucaagacgggacauucaucgaagaguugaucaaaaauuaugauggaaagguacacggcgaccgcgagugcgguuuuauaaacgaugaaauuuucguugagcucgugaaugcccuggggcaguacaacgacgaugacgaugacgacgauggagacgaucccgaagaacgagaagagaaacagaaggaccuggaggaucauagagacgauaaggaaucuaggccuccacggaaauuucccagcgacaagaucuucgaggcgauuuccucaauguuuccugauaaaggcaccgcugaagaacucaaggaaaaauauaaggaguuaacugagcagcaacugccaggcgcccuuccgcccgaauguacaccuaauaucgacgggccaaacgcaaaaaguguccagcgugagcagagcuugcacucuuuccauacccuguuuugccgcagauguuucaaguacgauugcuuucuacaccccuuccacgccacgccuaauacuuauaagaggaaaaacaccgaaacagcucucgacaauaagccauguggaccccaaugcuaccagcaucuggagggugcaaaagaguucgccgcugcccuuacugcggagcggauaaagaccccgccuaaacgacccggcgggcgcagaaggggacggcugccaaacaauuccucacgcccuagcacacccaccauuaacguguuggagaguaaggacacggauucugacagagaagcaggcacugagacagguggggaaaacaaugauaaggaggaggaagagaaaaaggacgaaaccuccagcucgucugaggccaacuccaggugucagacuccaaucaaaaugaagcccaauauugaaccuccagagaacguggaguggucaggagcugaagccaguauguuucguguccucaucggcacauacuaugauaauuucugcgcaaucgcucggcugauuggcaccaaaacgugucgacagguuuacgaguuuagagugaaggaaagcuccauaaucgccccggcgcccgccgaggacguagauaccccuccaaggaagaaaaagcgcaaacaccgguuaugggcagcucauugcagaaagauucaacugaaaaaggacgggucuagcaaccacguguauaauuaccagcccugcgaucacccuaggcagccaugugacucaaguugccccugugucaucgcccagaacuucugcgaaaaguuuugucaaugcuccagcgagugucagaaucgcuucccgggaugccgauguaaagcucagugcaacacaaagcaguguccuugcuaucucgccgugcgggagugcgauccagaccuuugucugacuugcggugcagccgaucauugggacucuaaaaauguuucauguaagaacugcaguauacaacguggcagcaaaaagcacuugcuacuggcucccuccgacguggcgggguggggaauuuuuaucaaagauccuguccagaagaaugaguucaucucugaguacuguggcgaaauuaucucgcaggacgaggcagauagaagggguaagguguaugacaaauacaugugcagcuuucucuucaaccugaauaacgauuuuguaguugacgccacccgcaaggggaacaaaauucgguucgcuaaucauuccgugaaccccaauuguuacgccaaggucaugauggugaacggcgaucacagaauaggaaucuuugcaaaaagggccauucagacaggcgaggaacuuuucuucgacuaucgauacucacaagcugaugcccugaaguaugucgggaucgagcgcgaaauggagaucccauga

SEQ ID NO: 1516 - RNA, 2241 nt, Artificial Sequence
  derived and/or modified sequence opt4 from EZH2__Homo_sapiens__AAC51520
augggccagaccggcaagaagagcgagaagggccccgugugcuggagaaagagagugaagagcgaguacaugagacugagacagcugaagagauucagaagagccgacgaggugaagagcauguucagcagcaacagacagaagauccuggagagaaccgagauccugaaccaggaguggaagcagagaagaauccagcccgugcacauccugaccagcgugagcagccugagaggcaccagagagugcagcgugaccagcgaccuggacuuccccacccaggugaucccccugaagacccugaacgccguggccagcgugcccaucauguacagcuggagcccccugcagcagaacuucaugguggaggacgagaccgugcugcacaacauccccuacaugggcgacgaggugcuggaccaggacggcaccuucaucgaggagcugaucaagaacuacgacggcaaggugcacggcgacagagagugcggcuucaucaacgacgagaucuucguggagcuggugaacgcccugggccaguacaacgacgacgacgacgacgacgacggcgacgaccccgaggagagagaggagaagcagaaggaccuggaggaccacagagacgacaaggagagcagaccccccagaaaguuccccagcgacaagaucuucgaggccaucagcagcauguuccccgacaagggcaccgccgaggagcugaaggagaaguacaaggagcugaccgagcagcagcugcccggcgcccugccccccgagugcacccccaacaucgacggccccaacgccaagagcgugcagagagagcagagccugcacagcuuccacacccuguucugcagaagaugcuucaaguacgacugcuuccugcaccccuuccacgccacccccaacaccuacaagagaaagaacaccgagaccgcccuggacaacaagcccugcggcccccagugcuaccagcaccuggagggcgccaaggaguucgccgccgcccugaccgccgagagaaucaagaccccccccaagagacccggcggcagaagaagaggcagacugcccaacaacagcagcagacccagcacccccaccaucaacgugcuggagagcaaggacaccgacagcgacagagaggccggcaccgagaccggcggcgagaacaacgacaaggaggaggaggagaagaaggacgagaccagcagcagcagcgaggccaacagcagaugccagacccccaucaagaugaagcccaacaucgagccccccgagaacguggaguggagcggcgccgaggccagcauguucagagugcugaucggcaccuacuacgacaacuucugcgccaucgccagacugaucggcaccaagaccugcagacagguguacgaguucagagugaaggagagcagcaucaucgcccccgcccccgccgaggacguggacaccccccccagaaagaagaagagaaagcacagacugugggccgcccacugcagaaagauccagcugaagaaggacggcagcagcaaccacguguacaacuaccagcccugcgaccaccccagacagcccugcgacagcagcugccccugcgugaucgcccagaacuucugcgagaaguucugccagugcagcagcgagugccagaacagauuccccggcugcagaugcaaggcccagugcaacaccaagcagugccccugcuaccuggccgugagagagugcgaccccgaccugugccugaccugcggcgccgccgaccacugggacagcaagaacgugagcugcaagaacugcagcauccagagaggcagcaagaagcaccugcugcuggcccccagcgacguggccggcuggggcaucuucaucaaggaccccgugcagaagaacgaguucaucagcgaguacugcggcgagaucaucagccaggacgaggccgacagaagaggcaagguguacgacaaguacaugugcagcuuccuguucaaccugaacaacgacuucgugguggacgccaccagaaagggcaacaagaucagauucgccaaccacagcgugaaccccaacugcuacgccaaggugaugauggugaacggcgaccacagaaucggcaucuucgccaagagagccauccagaccggcgaggagcuguucuucgacuacagauacagccaggccgacgcccugaaguacgugggcaucgagagagagauggagauccccuga

SEQ ID NO: 1517 - RNA, 2241 nt, Artificial Sequence
  derived and/or modified sequence opt5 from EZH2__Homo_sapiens__AAC51520
augggccagaccgggaagaaaagcgagaagggacccgugugcuggagaaaacgggucaaguccgaauacaugcgccugagacaacucaaacgguuccgcagagccgacgagguuaagucuauguuuagcuccaaccggcagaagauccuggaacgcacagagauucuuaaucaggaauggaaacagagacggauccaaccugugcacauucugacgucugugagcucccuccgcggcaccagagaguguucugucacaagcgaucuggacuucccgacccaggugaucccccuuaagacacugaacgcuguugccuccgugccuauuauguauagcuggucuccccuccagcagaauuuuauggucgaggaugaaaccgugcugcauaacaucccuuacaugggggacgagguucuggaucaagacggaacauucaucgaagaacucauuaaaaauuaugauggcaaggugcacggggaccgggagugcggauuuaucaacgaugaaauuuucgucgagcuggugaaugcgcuuggccaguacaacgacgaugacgaugacgacgauggcgacgaucccgaagaacgcgaagagaaacagaaggaccuggaggaucauagagacgauaaggaaucccggccuccgcgcaaauuucccagcgacaagaucuucgaggcuauuucuuccauguuuccugauaaagggaccgccgaagaacucaaggaaaaauauaaggagcugacggagcagcaacuucccggagcccugccucccgaauguaccccgaauaucgacggcccuaacgcuaaaagcgugcagagagagcagucucuccacuccuuccauacacuguuuugccggagauguuucaaguacgauugcuuucugcaccccuuccacgccaccccuaauacauauaagcgcaaaaacaccgaaacggcucucgacaauaagcccugugggccccaaugcuaccagcaucuggagggagccaaagaguucgcggccgcucuuacagccgagcggauuaagaccccuccgaaaagacccggcgggcgccggagaggacgccugccuaacaauagcucccggcccucuacaccuaccaucaacguccucgagagcaaggacaccgauuccgacagagaagcuggcacagagacgggcggggaaaacaaugauaaggaggaggaagagaaaaaggacgaaaccucuagcuccagcgaggccaacucucgcugucagacacccaucaaaaugaagccgaauauugaaccucccgagaacguugaguggagcggagcggaagccuccauguuucgggugcugaucggcaccuacuaugauaauuucugcgcuauugccagacuuaucgggacaaaaaccugucgccagguguacgaguuucgggucaaggaaucuagcauuaucgcuccugcccccgccgaggacguggauacgccucccagaaagaaaaagcggaaacaccgccugugggcugcgcauugcagaaagauccaacucaaaaaggacggauccagcaaccacguuuauaauuaccagccgugcgaucacccucggcagcccugugacucuuccugccccugugugauugcccagaacuucugcgaaaaguuuugucaaugcagcucugagugucagaauagauucccuggcugccgcuguaaagcucagugcaacacaaagcaguguccgugcuaucuggccguccgggagugcgaucccgaccugugucugaccugcggggccgcugaucauugggacuccaaaaaugugagcuguaagaacugcuccauccaaagaggaucuaaaaagcaucuccuucuggccccuagcgacguugcgggcuggggcauuuuuaucaaagaucccgugcagaagaaugaguucauuuccgaguacuguggggaaaucaucucucaggacgaggcugaucgcagaggaaaggucuaugacaaauacaugugcagcuuucucuucaaccugaauaacgauuuuguggucgacgccacccggaagggcaacaaaauucgcuucgccaaucacuccgugaacccuaauuguuacgcuaagguuaugauggugaacggggaucacagaaucggaauuuuugccaaacgggcuauccagacaggcgaggagcuuuucuucgacuaucgcuacagccaagccgaugcgcugaaguaugucgggauugagagagaaauggagauccccuga

SEQ ID NO: 1518 - protein, 707 aa, Artificial Sequence
  EZH2__Homo_sapiens__S4S3R8
MGQTGKKSEKGPVCWRKRVKSEYMRLRQLKRFRRADEVKSMFSSNRQKILERTEILNQEWKQRRIQPVHILTSVSSLRGTREVEDETVLHNIPYMGDEVLDQDGTFIEELIKNYDGKVHGDRECGFINDEIFVELVNALGQYNDDDDDDDGDDPEEREEKQKDLEDHRDDKESRPPRKFPSDKIFEAISSMFPDKGTAEELKEKYKELTEQQLPGALPPECTPNIDGPNAKSVQREQSLHSFHTLFCRRCFKYDCFLHPFHATPNTYKRKNTETALDNKPCGPQCYQHLEGAKEFAAALTAERIKTPPKRPGGRRRGRLPNNSSRPSTPTINVLESKDTDSDREAGTETGGENNDKEEEEKKDETSSSSEANSRCQTPIKMKPNIEPPENVEWSGAEASMFRVLIGTYYDNFCAIARLIGTKTCRQVYEFRVKESSIIAPAPAEDVDTPPRKKKRKHRLWAAHCRKIQLKKDGSSNHVYNYQPCDHPRQPCDSSCPCVIAQNFCEKFCQCSSECQNRFPGCRCKAQCNTKQCPCYLAVRECDPDLCLTCGAADHWDSKNVSCKNCSIQRGSKKHLLLAPSDVAGWGIFIKDPVQKNEFISEYCGEIISQDEADRRGKVYDKYMCSFLFNLNNDFVVDATRKGNKIRFANHSVNPNCYAKVMMVNGDHRIGIFAKRAIQTGEELFFDYRYSQADALKYVGIEREMEIP

SEQ ID NO: 1519 - RNA, 2124 nt, Artificial Sequence
  EZH2__Homo_sapiens__AEN79481
augggccagacugggaagaaaucugagaagggaccaguuuguuggcggaagcguguaaaaucagaguacaugcgacugagacagcucaagagguucagacgagcugaugaaguaaagaguauguuuaguuccaaucgucagaaaauuuuggaaagaacggaaaucuuaaaccaagaauggaaacagcgaaggauacagccugugcacauccugacuucugugagcucauugcgcgggacuagggagguggaagaugaaacuguuuuacauaacauuccuuauaugggagaugaaguuuuagaucaggaugguacuuucauugaagaacuaauaaaaaauuaugaugggaaaguacacggggauagagaauguggguuuauaaaugaugaaauuuuuguggaguuggugaaugcccuuggucaauauaaugaugaugacgaugaugaugauggagacgauccugaagaaagagaagaaaagcagaaagaucuggaggaucaccgagaugauaaagaaagccgcccaccucggaaauuuccuucugauaaaauuuuugaagccauuuccucaauguuuccagauaagggcacagcagaagaacuaaaggaaaaauauaaagaacucaccgaacagcagcucccaggcgcacuuccuccugaauguacccccaacauagauggaccaaaugcuaaaucuguucagagagagcaaagcuuacacuccuuucauacgcuuuucuguaggcgauguuuuaaauaugacugcuuccuacauccuuuucaugcaacacccaacacuuauaagcggaagaacacagaaacagcucuagacaacaaaccuuguggaccacaguguuaccagcauuuggagggagcaaaggaguuugcugcugcucucaccgcugagcggauaaagaccccaccaaaacguccaggaggccgcagaagaggacggcuucccaauaacaguagcaggcccagcacccccaccauuaaugugcuggaaucaaaggauacagacagugauagggaagcagggacugaaacggggggagagaacaaugauaaagaagaagaagagaagaaagaugaaacuucgagcuccucugaagcaaauucucggugucaaacaccaauaaagaugaagccaaauauugaaccuccugagaauguggaguggaguggugcugaagccucaauguuuagaguccucauuggcacuuacuaugacaauuucugugccauugcuagguuaauugggaccaaaacauguagacagguguaugaguuuagagucaaagaaucuagcaucauagcuccagcucccgcugaggauguggauacuccuccaaggaaaaagaagaggaaacaccgguugugggcugcacacugcagaaagauacagcugaaaaaggacggcuccucuaaccauguuuacaacuaucaacccugugaucauccacggcagccuugugacaguucgugcccuugugugauagcacaaaauuuuugugaaaaguuuugucaauguaguucagagugucaaaaccgcuuuccgggaugccgcugcaaagcacagugcaacaccaagcagugcccgugcuaccuggcuguccgagagugugacccugaccucugucuuacuuguggagccgcugaccauugggacaguaaaaauguguccugcaagaacugcaguauucagcggggcuccaaaaagcaucuauugcuggcaccaucugacguggcaggcugggggauuuuuaucaaagauccugugcagaaaaaugaauucaucucagaauacuguggagagauuauuucucaagaugaagcugacagaagagggaaaguguaugauaaauacaugugcagcuuucuguucaacuugaacaaugauuuugugguggaugcaacccgcaaggguaacaaaauucguuuugcaaaucauucgguaaauccaaacugcuaugcaaaaguuaugaugguuaacggugaucacaggauagguauuuuugccaagagagccauccagacuggcgaagagcuguuuuuugauuacagauacagccaggcugaugcccugaaguaugucggcaucgaaagagaaauggaaaucccuuga

SEQ ID NO: 1520 - RNA, 2124 nt, Artificial Sequence
  derived and/or modified sequence opt1 from EZH2__Homo_sapiens__AEN79481
augggccagaccgggaagaaguccgagaagggccccgugugcuggcgcaagcgggucaagagcgaguacaugcgccugcggcagcucaagcgcuuccggcgcgccgacgaggucaagagcauguucuccagcaaccggcagaagauccuggagcgcaccgagauccugaaccaggaguggaagcagcggcgcauccagccggugcacauccucacguccgugagcucccugcgggggacccgcgagguggaggacgagaccgugcugcacaacauccccuacaugggcgacgagguccucgaccaggacgggaccuucaucgaggagcugaucaagaacuacgacggcaaggugcacggcgaccgggagugcggguucaucaacgacgagaucuucguggagcuggucaacgcccucggccaguacaacgacgacgacgacgacgacgacggggacgaccccgaggagcgcgaggagaagcagaaggaccuggaggaccaccgggacgacaaggagagccggcccccgcgcaaguuccccuccgacaagaucuucgaggcgaucagcuccauguuccccgacaagggcacggccgaggagcugaaggagaaguacaaggagcucaccgagcagcagcugcccggggcccugccgcccgagugcacccccaacaucgacggccccaacgccaagagcgugcagcgcgagcagucccuccacagcuuccacacccuguucugccggcgcugcuucaaguacgacugcuuccugcacccguuccacgccacgcccaacaccuacaagcggaagaacaccgagaccgcgcucgacaacaagcccugcggcccccagugcuaccagcaccuggagggggccaaggaguucgccgccgcgcugacggccgagcgcaucaagaccccgcccaagcgccccggcgggcggcgccggggccgccuccccaacaacuccagccggccguccacccccaccaucaacgugcuggagagcaaggacacggacuccgaccgcgaggccggcaccgagaccgggggcgagaacaacgacaaggaggaggaggagaagaaggacgagaccagcagcuccagcgaggccaacucccggugccagacgcccaucaagaugaagcccaacaucgagccgcccgagaacgucgaguggagcggggccgaggcguccauguuccgcgugcugaucggcaccuacuacgacaacuucugcgccaucgcccggcucaucgggaccaagaccugccgccagguguacgaguuccgggucaaggagagcuccaucaucgcccccgcccccgcggaggacguggacacgccgccccgcaagaagaagcggaagcaccgccugugggccgcccacugccggaagauccagcugaagaaggacggcagcuccaaccacguguacaacuaccagcccugcgaccacccgcgccagcccugcgacagcuccugccccugcgucaucgcccagaacuucugcgagaaguucugccagugcagcuccgagugccagaaccgguuccccggcugccgcugcaaggcccagugcaacaccaagcagugcccgugcuaccucgcggugcgggagugcgaccccgaccugugccugaccugcggggccgccgaccacugggacagcaagaacguguccugcaagaacugcagcauccagcgcggcuccaagaagcaccuccugcuggcccccagcgacgucgccggguggggcaucuucaucaaggaccccgugcagaagaacgaguucaucuccgaguacugcggggagaucaucagccaggacgaggcggaccgccggggcaagguguacgacaaguacaugugcagcuuccucuucaaccugaacaacgacuucgucguggacgccacccgcaagggcaacaagauccgguucgccaaccacuccgucaacccgaacugcuacgccaaggugaugauggugaacggggaccaccgcaucggcaucuucgcgaagcgggccauccagacgggggaggagcuguucuucgacuaccgcuacagccaggccgacgcccucaaguacgucggcaucgagcgggagauggagauccccuga

SEQ ID NO: 1521 - RNA, 2124 nt, Artificial Sequence
  derived and/or modified sequence opt2 from EZH2__Homo_sapiens__AEN79481
augggccagaccggcaagaaguccgagaagggccccgucugcuggcgcaagcgcgucaaguccgaguacaugcgccuccgccagcucaagcgcuuccgccgcgccgacgaggucaaguccauguucuccuccaaccgccagaagauccucgagcgcaccgagauccucaaccaggaguggaagcagcgccgcauccagcccguccacauccucaccuccgucuccucccuccgcggcacccgcgaggucgaggacgagaccguccuccacaacauccccuacaugggcgacgagguccucgaccaggacggcaccuucaucgaggagcucaucaagaacuacgacggcaagguccacggcgaccgcgagugcggcuucaucaacgacgagaucuucgucgagcucgucaacgcccucggccaguacaacgacgacgacgacgacgacgacggcgacgaccccgaggagcgcgaggagaagcagaaggaccucgaggaccaccgcgacgacaaggagucccgccccccccgcaaguuccccuccgacaagaucuucgaggccaucuccuccauguuccccgacaagggcaccgccgaggagcucaaggagaaguacaaggagcucaccgagcagcagcuccccggcgcccucccccccgagugcacccccaacaucgacggccccaacgccaaguccguccagcgcgagcagucccuccacuccuuccacacccucuucugccgccgcugcuucaaguacgacugcuuccuccaccccuuccacgccacccccaacaccuacaagcgcaagaacaccgagaccgcccucgacaacaagcccugcggcccccagugcuaccagcaccucgagggcgccaaggaguucgccgccgcccucaccgccgagcgcaucaagaccccccccaagcgccccggcggccgccgccgcggccgccuccccaacaacuccucccgccccuccacccccaccaucaacguccucgaguccaaggacaccgacuccgaccgcgaggccggcaccgagaccggcggcgagaacaacgacaaggaggaggaggagaagaaggacgagaccuccuccuccuccgaggccaacucccgcugccagacccccaucaagaugaagcccaacaucgagccccccgagaacgucgagugguccggcgccgaggccuccauguuccgcguccucaucggcaccuacuacgacaacuucugcgccaucgcccgccucaucggcaccaagaccugccgccaggucuacgaguuccgcgucaaggaguccuccaucaucgcccccgcccccgccgaggacgucgacacccccccccgcaagaagaagcgcaagcaccgccucugggccgcccacugccgcaagauccagcucaagaaggacggcuccuccaaccacgucuacaacuaccagcccugcgaccacccccgccagcccugcgacuccuccugccccugcgucaucgcccagaacuucugcgagaaguucugccagugcuccuccgagugccagaaccgcuuccccggcugccgcugcaaggcccagugcaacaccaagcagugccccugcuaccucgccguccgcgagugcgaccccgaccucugccucaccugcggcgccgccgaccacugggacuccaagaacgucuccugcaagaacugcuccauccagcgcggcuccaagaagcaccuccuccucgcccccuccgacgucgccggcuggggcaucuucaucaaggaccccguccagaagaacgaguucaucuccgaguacugcggcgagaucaucucccaggacgaggccgaccgccgcggcaaggucuacgacaaguacaugugcuccuuccucuucaaccucaacaacgacuucgucgucgacgccacccgcaagggcaacaagauccgcuucgccaaccacuccgucaaccccaacugcuacgccaaggucaugauggucaacggcgaccaccgcaucggcaucuucgccaagcgcgccauccagaccggcgaggagcucuucuucgacuaccgcuacucccaggccgacgcccucaaguacgucggcaucgagcgcgagauggagauccccuga

SEQ ID NO: 1522 - RNA, 2124 nt, Artificial Sequence
  derived and/or modified sequence opt3 from EZH2__Homo_sapiens__AEN79481
augggccagaccgggaagaaaagcgagaagggacccgugugcuggagaaaaagggucaaguccgaauacaugcggcugcgccaacucaaacgauuccguagagccgacgagguuaagucuauguuuucaaguaacaggcagaagauccuugaacggacagagauucugaaucaggaauggaaacagcgcagaauacaaccugugcacaucuugacuagcguauccucuuuaagggguacgcgggagguggaggaugaaaccguccugcauaacauuccauauaugggcgacgaggugcuagaucaggacgggacauucaucgaagaacucauuaagaauuacgauggaaaaguucacggcgaccgcgagugugguuuuaucaacgaugaaauauucguggagcuggucaaugcucuugggcaguauaacgacgaugacgaugacgaugacggagacgauccggaagaacgagaagagaagcagaaagaccuggaggaucauagagacgauaaggaaucgaggcccccucggaaguuuccaucagacaaaaucuucgaggcaauuagcaguauguuucccgauaagggcacugccgaagaguugaaagaaaaguacaaagagcucaccgagcaacagcugccuggcgcgcugccacccgaaugcacaccuaauaucgacgggccaaacgcuaaguccgugcagcgugagcagucucuccacagcuuccauaccuuauuuugucgcagaugcuucaaauaugauuguuuucugcacccguuccacgccacucccaauacauacaagaggaagaacaccgaaacggcacuugacaauaaaccuugcggaccacaauguuaucagcauuuggagggugccaaggaauuugcugcagcccugacugcugagcggauuaaaacacccccuaagcgaccaggcgggcgcagaaggggacggcuacccaacaauuccucacgcccgaguaccccuacuaucaacguacucgagagcaaagauaccgacucugacagagaagccggcacagagaccgguggggaaaauaacgauaaggaggaggaagagaagaaagacgaaacguccucaagcagugaggcgaacucuaggugccagacucccauaaagaugaaaccaaauauugaaccucccgagaacguugagugguccggagcagaagccagcauguuccgugugcugaucggcacauacuacgauaauuucugugcuauugcccggcuuaucggcaccaagacuugccgacaagucuaugaguuuagagugaaagaaucgucuaucauugcaccagcucccgccgaggacguggauacaccuccaaggaagaagaaacgcaagcaccggcugugggcggcccauuguagaaaaauacaguugaagaaagacggguccucaaaccacgucuacaauuaucagccgugcgaucaccccaggcagccuugcgacaguagcuguccaugcguuaucgcacaaaacuucugugaaaaguuuugccaguguuccucugagugccagaaucgcuuccccggaugucgaugcaaggcucaguguaacaccaaacaaugcccuuguuaccucgccgugcgggagugcgauccagaccugugcuuaacguguggugcugccgaucauugggacagcaagaauguaucaugcaaaaacuguaguauucagcguggcuccaagaaacaucugcuccuugcacccagcgauguggccggguggggaaucuuuauaaaggacccgguccagaaaaaugaguucauuucugaguauugcggcgaaaucaucucacaggacgaggcugauagaagggguaagguguacgacaaguauauguguaguuuucuguucaacuugaauaacgauuuuguuguggacgcgacccgcaaagggaauaagauucgguucgcaaaccacagcgucaacccuaauugcuacgccaaagugaugaugguaaacggcgaucacagaaucggaauuuuugcuaagagggccauacaaacaggcgaggagcuauucuuugacuaccgauauucccaggcagaugcccugaaauacguugggaucgagcgcgaaauggagauuccauga

SEQ ID NO: 1523 - RNA, 2124 nt, Artificial Sequence
  derived and/or modified sequence opt4 from EZH2__Homo_sapiens__AEN79481
augggccagaccggcaagaagagcgagaagggccccgugugcuggagaaagagagugaagagcgaguacaugagacugagacagcugaagagauucagaagagccgacgaggugaagagcauguucagcagcaacagacagaagauccuggagagaaccgagauccugaaccaggaguggaagcagagaagaauccagcccgugcacauccugaccagcgugagcagccugagaggcaccagagagguggaggacgagaccgugcugcacaacauccccuacaugggcgacgaggugcuggaccaggacggcaccuucaucgaggagcugaucaagaacuacgacggcaaggugcacggcgacagagagugcggcuucaucaacgacgagaucuucguggagcuggugaacgcccugggccaguacaacgacgacgacgacgacgacgacggcgacgaccccgaggagagagaggagaagcagaaggaccuggaggaccacagagacgacaaggagagcagaccccccagaaaguuccccagcgacaagaucuucgaggccaucagcagcauguuccccgacaagggcaccgccgaggagcugaaggagaaguacaaggagcugaccgagcagcagcugcccggcgcccugccccccgagugcacccccaacaucgacggccccaacgccaagagcgugcagagagagcagagccugcacagcuuccacacccuguucugcagaagaugcuucaaguacgacugcuuccugcaccccuuccacgccacccccaacaccuacaagagaaagaacaccgagaccgcccuggacaacaagcccugcggcccccagugcuaccagcaccuggagggcgccaaggaguucgccgccgcccugaccgccgagagaaucaagaccccccccaagagacccggcggcagaagaagaggcagacugcccaacaacagcagcagacccagcacccccaccaucaacgugcuggagagcaaggacaccgacagcgacagagaggccggcaccgagaccggcggcgagaacaacgacaaggaggaggaggagaagaaggacgagaccagcagcagcagcgaggccaacagcagaugccagacccccaucaagaugaagcccaacaucgagccccccgagaacguggaguggagcggcgccgaggccagcauguucagagugcugaucggcaccuacuacgacaacuucugcgccaucgccagacugaucggcaccaagaccugcagacagguguacgaguucagagugaaggagagcagcaucaucgcccccgcccccgccgaggacguggacaccccccccagaaagaagaagagaaagcacagacugugggccgcccacugcagaaagauccagcugaagaaggacggcagcagcaaccacguguacaacuaccagcccugcgaccaccccagacagcccugcgacagcagcugccccugcgugaucgcccagaacuucugcgagaaguucugccagugcagcagcgagugccagaacagauuccccggcugcagaugcaaggcccagugcaacaccaagcagugccccugcuaccuggccgugagagagugcgaccccgaccugugccugaccugcggcgccgccgaccacugggacagcaagaacgugagcugcaagaacugcagcauccagagaggcagcaagaagcaccugcugcuggcccccagcgacguggccggcuggggcaucuucaucaaggaccccgugcagaagaacgaguucaucagcgaguacugcggcgagaucaucagccaggacgaggccgacagaagaggcaagguguacgacaaguacaugugcagcuuccuguucaaccugaacaacgacuucgugguggacgccaccagaaagggcaacaagaucagauucgccaaccacagcgugaaccccaacugcuacgccaaggugaugauggugaacggcgaccacagaaucggcaucuucgccaagagagccauccagaccggcgaggagcuguucuucgacuacagauacagccaggccgacgcccugaaguacgugggcaucgagagagagauggagauccccuga

SEQ ID NO: 1524 - RNA, 2124 nt, Artificial Sequence
  derived and/or modified sequence opt5 from EZH2__Homo_sapiens__AEN79481
augggccagaccgggaagaaaagcgagaagggacccgugugcuggagaaaacgggucaaguccgaauacaugcgccugagacaacucaaacgguuccgcagagccgacgagguuaagucuauguuuagcuccaaccggcagaagauccuggaacgcacagagauucuuaaucaggaauggaaacagagacggauccaaccugugcacauucugacgucugugagcucccuccgcggcaccagagaggucgaggaugaaacagugcugcauaacaucccguauaugggggacgagguucuugaucaggacggaaccuucauugaagaacugaucaagaauuacgauggcaaagugcacggggaccgggaguguggauuuaucaacgaugaaauuuucgucgagcucgugaaugcucugggccaguauaacgacgaugacgaugacgaugacggcgacgaucccgaagaacgcgaagagaagcagaaagaccuggaggaucauagagacgauaaggaaucucggccuccccgcaaguuuccuagcgacaaaaucuucgaggccauuuccagcauguuucccgauaaggggacagcggaggagcucaaagaaaaguacaaagagcugaccgagcaacagcuuccuggagcucugccgcccgaaugcacaccuaauaucgacggccccaacgccaagucuguucagagagagcagucccuccacagcuuccauacccuguuuugucggagaugcuucaaauaugauuguuuucuucacccuuuccacgccacgcccaauaccuacaagcgcaagaacacagaaaccgcucuggacaauaaaccgugcgggccucaauguuaucagcaucucgagggagccaaggaauuugcugccgcgcugacagccgagcggauuaaaacgcccccuaagagacccggcgggcgccggagaggacgccugcccaacaauucuucccggccuagcaccccgacaaucaacgugcucgagucuaaagauaccgacuccgacagagaagcuggcacagagaccggcggggaaaauaacgauaaggaggaggaagagaagaaagacgaaaccagcuccucuagcgaggccaacucccgcugccagacacccauuaagaugaaaccuaauaucgaacccccugagaacgucgaguggagcggagcugaagccucuauguuccgggugcugaucggcacguacuacgauaauuucugugcgauugccagacuuaucgggaccaagacaugccgccaaguguaugaguuucgggucaaagaauccagcauuaucgcucccgccccggcugaggacguugauaccccucccagaaagaagaaacggaagcaccgccugugggccgcccauuguagaaaaauucagcucaagaaagacggaucuagcaaccacguguacaauuaucagccuugcgaucacccccggcagccuugcgacuccucuugucccugcgugaucgcucaaaacuucugugaaaaguuuugccaguguagcuccgagugccagaauagauucccgggcugucgcugcaaggcgcaguguaacacaaaacaaugcccuuguuaccuggccguccgggagugcgaucccgaccuuugccugaccuguggggcugccgaucauugggacagcaagaaugugucuugcaaaaacuguuccauccagagaggaagcaagaaacaccuccugcuggcccccucugauguugcuggcuggggcauuuuuaucaaggacccugugcagaaaaaugaguucauuuccgaguauugcggggaaaucauuagccaggacgaggccgaucgcagaggaaaggucuacgacaaguauauguguuccuuucucuucaaccugaauaacgauuuugugguugacgcgacgcggaaaggcaauaagauccgcuucgcuaaccauucugugaacccgaauugcuacgccaaagucaugauggugaacggggaucacagaaucggaauuuuugccaagcgggcuauccaaacaggcgaggaacuuuucuuugacuaccgcuauagccaggccgaugcucugaaauacgucgggauugagagagaaauggagauccccuga

SEQ ID NO: 1525 - protein, 132 aa, Artificial Sequence
  FABP7__Homo_sapiens__O15540
MVEAFCATWKLTNSQNFDEYMKALGVGFATRQVGNVTKPTVIISQEGDKVVIRTLSTFKNTEISFQLGEEFDETTADDRNCKSVVSLDGDKLVHIQKWDGKETNFVREIKDGKMVMTLTFGDVVAVRHYEKA

SEQ ID NO: 1526 - RNA, 399 nt, Artificial Sequence
  FABP7__Homo_sapiens__AAB87141
augguggaggcuuucugugcuaccuggaagcugaccaacagucagaacuuugaugaguacaugaaggcucuaggcgugggcuuugccacuaggcaggugggaaaugugaccaaaccaacgguaauuaucagucaagaaggagacaaaguggucaucaggacucucagcacauucaagaacacggagauuaguuuccagcugggagaagaguuugaugaaaccacugcagaugauagaaacuguaagucuguuguuagccuggauggagacaaacuuguucacauacagaaaugggauggcaaagaaacaaauuuuguaagagaaauuaaggauggcaaaaugguuaugacccuuacuuuuggugaugugguugcuguucgccacuaugagaaggcauaa

SEQ ID NO: 1527 - RNA, 399 nt, Artificial Sequence
  derived and/or modified sequence opt1 from FABP7__Homo_sapiens__AAB87141
augguggaggccuucugcgccaccuggaagcugaccaacagccagaacuucgacgaguacaugaaggcgcucggcgucggguucgccacgcgccaggugggcaacgugaccaagcccaccgucaucaucucccaggagggggacaagguggugauccggacccugagcacguucaagaacaccgagaucuccuuccagcugggcgaggaguucgacgagaccaccgccgacgaccgcaacugcaagagcgucgugucccucgacggggacaagcuggugcacauccagaagugggacggcaaggagacgaacuucguccgggagaucaaggacggcaagauggugaugacccugaccuucggggacguggucgccgugcgccacuacgagaaggccuga

SEQ ID NO: 1528 - RNA, 399 nt, Artificial Sequence
  derived and/or modified sequence opt2 from FABP7__Homo_sapiens__AAB87141
auggucgaggccuucugcgccaccuggaagcucaccaacucccagaacuucgacgaguacaugaaggcccucggcgucggcuucgccacccgccaggucggcaacgucaccaagcccaccgucaucaucucccaggagggcgacaaggucgucauccgcacccucuccaccuucaagaacaccgagaucuccuuccagcucggcgaggaguucgacgagaccaccgccgacgaccgcaacugcaaguccgucgucucccucgacggcgacaagcucguccacauccagaagugggacggcaaggagaccaacuucguccgcgagaucaaggacggcaagauggucaugacccucaccuucggcgacgucgucgccguccgccacuacgagaaggccuga

SEQ ID NO: 1529 - RNA, 399 nt, Artificial Sequence
  derived and/or modified sequence opt3 from FABP7__Homo_sapiens__AAB87141
augguggaggccuucugcgcuaccuggaagcugacaaacagccagaauuuugacgaauacaugaaagcacucggcgucggguucgccacuagacaaguuggaaacgugacgaagcccaccguaaucauuucccaggagggugauaaaguggucauaaggacacuuucuacuuuuaagaauaccgaaaucucauuccagcugggcgaggaauuugacgagacaaccgcggaugaccggaacuguaaaagugugguuagcuuggauggggacaaguuagugcacauucagaagugggauggaaaagagacuaauuucguccgcgaaaucaaggacggcaaaauggugaugacacugaccuuuggugauguaguugcugugcgacauuaugagaaggccuga

SEQ ID NO: 1530 - RNA, 399 nt, Artificial Sequence
  derived and/or modified sequence opt4 from FABP7__Homo_sapiens__AAB87141
augguggaggccuucugcgccaccuggaagcugaccaacagccagaacuucgacgaguacaugaaggcccugggcgugggcuucgccaccagacaggugggcaacgugaccaagcccaccgugaucaucagccaggagggcgacaagguggugaucagaacccugagcaccuucaagaacaccgagaucagcuuccagcugggcgaggaguucgacgagaccaccgccgacgacagaaacugcaagagcguggugagccuggacggcgacaagcuggugcacauccagaagugggacggcaaggagaccaacuucgugagagagaucaaggacggcaagauggugaugacccugaccuucggcgacgugguggccgugagacacuacgagaaggccuga

SEQ ID NO: 1531 - RNA, 399 nt, Artificial Sequence
  derived and/or modified sequence opt5 from FABP7__Homo_sapiens__AAB87141
augguggaggccuucugcgcuaccuggaagcugacaaacagccagaauuuugacgaauacaugaaagcccucggcgucggguucgcgacgagacaaguuggaaacgugaccaagcccacagugaucauuucccaggagggcgauaaagucgugauccggacccugucuacauuuaagaauaccgaaauuagcuuccagcuuggggaggaauuugacgagacaaccgcugaugaccgcaacuguaaauccguugugucucuggauggagacaagcucguccacauccagaagugggauggcaaagagacgaauuucgugagagaaauuaaggacgggaaaaugguuaugacccugacauuuggagauguggucgccgugcggcauuaugagaaggccuga

SEQ ID NO: 1532 - protein, 254 aa, Artificial Sequence
  FCGR3A_Version_1__Homo_sapiens__P08637
MWQLLLPTALLLLVSAGMRTEDLPKAVVFLEPQWYRVLEKDSVTLKCQGAYSPEDNSTQWFHNESLISSQASSYFIDAATVDDSGEYRCQTNLSTLSDPVQLEVHIGWLLLQAPRWVFKEEDPIHLRCHSWKNTALHKVTYLQNGKGRKYFHHNSDFYIPKATLKDSGSYFCRGLFGSKNVSSETVNITITQGLAVSTISSFFPPGYQVSFCLVMVLLFAVDTGLYFSVKTNIRSSTRDWKDHKFKWRKDPQDK

SEQ ID NO: 1533 - RNA, 765 nt, Artificial Sequence
  FCGR3A_Version_1__Homo_sapiens__CAA36870
auguggcagcugcuccucccaacugcucugcuacuucuaguuucagcuggcaugcggacugaagaucucccaaaggcugugguguuccuggagccucaaugguacagggugcucgagaaggacagugugacucugaagugccagggagccuacuccccugaggacaauuccacacagugguuucacaaugagagccucaucucaagccaggccucgagcuacuucauugacgcugccacagucgacgacaguggagaguacaggugccagacaaaccucuccacccucagugacccggugcagcuagaaguccauaucggcuggcuguugcuccaggccccucgguggguguucaaggaggaagacccuauucaccugaggugucacagcuggaagaacacugcucugcauaaggucacauauuuacagaauggcaaaggcaggaaguauuuucaucauaauucugacuucuacauuccaaaagccacacucaaagacagcggcuccuacuucugcagggggcuuuuugggaguaaaaaugugucuucagagacugugaacaucaccaucacucaagguuuggcagugucaaccaucucaucauucuuuccaccuggguaccaagucucuuucugcuuggugaugguacuccuuuuugcaguggacacaggacuauauuucucugugaagacaaacauucgaagcucaacaagagacuggaaggaccauaaauuuaaauggagaaaggacccucaagacaaauga

SEQ ID NO: 1534 - RNA, 765 nt, Artificial Sequence
  derived and/or modified sequence opt1 from FCGR3A_Version_1__Homo_sapiens__CAA36870
auguggcagcugcuccugcccaccgcccugcuccugcuggugagcgccggcaugcgcaccgaggaccucccgaaggcggucguguuccuggagccccagugguaccgggugcuggagaaggacuccgucacgcucaagugccagggggccuacagccccgaggacaacuccacccagugguuccacaacgagagccugaucuccagccaggccuccagcuacuucaucgacgccgccaccguggacgacuccggcgaguaccgcugccagaccaaccugagcacgcucuccgaccccgugcagcuggagguccacaucggguggcugcuccugcaggcgccgcgguggguguucaaggaggaggaccccauccaccuccgcugccacagcuggaagaacaccgcccugcacaaggugaccuaccugcagaacggcaaggggcggaaguacuuccaccacaacuccgacuucuacauccccaaggccacccugaaggacagcggcuccuacuucugccgcggccucuucgggagcaagaacgucuccagcgagacggugaacaucaccaucacccagggccuggccguguccaccaucagcagcuucuucccgcccggguaccaggucuccuucugccuggugauggugcuccuguucgcggucgacacgggccuguacuucagcgugaagaccaacauccgguccagcacccgcgacuggaaggaccacaaguucaaguggcggaaggacccccaggacaaguga

SEQ ID NO: 1535 - RNA, 765 nt, Artificial Sequence
  derived and/or modified sequence opt2 from FCGR3A_Version_1__Homo_sapiens__CAA36870
auguggcagcuccuccuccccaccgcccuccuccuccucgucuccgccggcaugcgcaccgaggaccuccccaaggccgucgucuuccucgagccccagugguaccgcguccucgagaaggacuccgucacccucaagugccagggcgccuacucccccgaggacaacuccacccagugguuccacaacgagucccucaucuccucccaggccuccuccuacuucaucgacgccgccaccgucgacgacuccggcgaguaccgcugccagaccaaccucuccacccucuccgaccccguccagcucgagguccacaucggcuggcuccuccuccaggccccccgcugggucuucaaggaggaggaccccauccaccuccgcugccacuccuggaagaacaccgcccuccacaaggucaccuaccuccagaacggcaagggccgcaaguacuuccaccacaacuccgacuucuacauccccaaggccacccucaaggacuccggcuccuacuucugccgcggccucuucggcuccaagaacgucuccuccgagaccgucaacaucaccaucacccagggccucgccgucuccaccaucuccuccuucuucccccccggcuaccaggucuccuucugccucgucaugguccuccucuucgccgucgacaccggccucuacuucuccgucaagaccaacauccgcuccuccacccgcgacuggaaggaccacaaguucaaguggcgcaaggacccccaggacaaguga

SEQ ID NO: 1536 - RNA, 765 nt, Artificial Sequence
  derived and/or modified sequence opt3 from FCGR3A_Version_1__Homo_sapiens__CAA36870
auguggcagcugcuccuucccaccgcccuguuguuacuggugagcgcuggcaugagaacagaggaccuaccuaaggcagucguuuuccucgaaccacaaugguacagggugcuggagaaagauuccguaacucuuaagugccagggggccuauucuccggaagacaacucaacgcagugguuucacaaugagagucugaucagcucccaggcgucuucguacuucauugaugcugccaccguggacgauucaggagaauaucggugucaaacaaacuugagcacucucagugaccccguccagcuggaggugcauauagguuggcugcucuuacaggcaccucgcuggguuuuuaaagaggaagauccaauccaucugcgaugccacuccuggaagaauaccgcccuucacaaagugacauacuugcagaacggcaaggggcguaaguauuuccaucacaauucugacuuuuacauucccaaagcuacccugaaggauagcggauccuauuucuguagaggccuauuugguaguaaaaacgucucaagcgagacugugaauaucacaauuacccaagggcucgcaguaucuacgaucuccucauucuuuccuccaggauaccagguuagcuucugccuggugaugguccuucuguuugccguggacacuggcuuguacuucagugugaagaccaacauaaggucuuccacacgggauuggaaagaccacaaguuuaaguggcgcaaagauccccaggacaaguga

SEQ ID NO: 1537 - RNA, 765 nt, Artificial Sequence
  derived and/or modified sequence opt4 from FCGR3A_Version_1__Homo_sapiens__CAA36870
auguggcagcugcugcugcccaccgcccugcugcugcuggugagcgccggcaugagaaccgaggaccugcccaaggccgugguguuccuggagccccagugguacagagugcuggagaaggacagcgugacccugaagugccagggcgccuacagccccgaggacaacagcacccagugguuccacaacgagagccugaucagcagccaggccagcagcuacuucaucgacgccgccaccguggacgacagcggcgaguacagaugccagaccaaccugagcacccugagcgaccccgugcagcuggaggugcacaucggcuggcugcugcugcaggcccccagauggguguucaaggaggaggaccccauccaccugagaugccacagcuggaagaacaccgcccugcacaaggugaccuaccugcagaacggcaagggcagaaaguacuuccaccacaacagcgacuucuacauccccaaggccacccugaaggacagcggcagcuacuucugcagaggccuguucggcagcaagaacgugagcagcgagaccgugaacaucaccaucacccagggccuggccgugagcaccaucagcagcuucuucccccccggcuaccaggugagcuucugccuggugauggugcugcuguucgccguggacaccggccuguacuucagcgugaagaccaacaucagaagcagcaccagagacuggaaggaccacaaguucaaguggagaaaggacccccaggacaaguga

SEQ ID NO: 1538 - RNA, 765 nt, Artificial Sequence
  derived and/or modified sequence opt5 from FCGR3A_Version_1__Homo_sapiens__CAA36870
auguggcagcugcuccugcccaccgcccuucugcuccuggugagcgcuggcaugagaacagaggaccuuccuaaggccgucguuuuccuggaaccgcaaugguaccgggugcucgagaaagauuccgugacgcugaagugccagggggcguauucucccgaagacaacagcacccagugguuucacaaugagucccugaucucuagccaggcuuccucuuacuucauugaugccgccacagucgacgauagcggagaauaucgcugucaaaccaaccucuccacacugagcgacccugugcagcuugagguucauaucggcuggcugcuccugcaggcucccagauggguguuuaaagaggaagauccuauucaccuucggugccauucuuggaagaauaccgcccugcacaaagucacauaccuccagaacgggaagggacgcaaguauuuccaucacaauuccgacuuuuacauccccaaagcuacccugaaggauagcggcucuuauuucuguagagggcuguuuggauccaaaaacgugagcucugagacgguuaauauuaccaucacacaaggccucgccguguccaccaucagcuccuucuuuccuccgggcuaccaggucucuuucugccuggugauggugcuucuguuugcggucgacacagggcucuacuucagcguuaagaccaacauucgguccagcacgcgcgauuggaaagaccacaaguuuaaguggagaaaagauccccaggacaaguga

SEQ ID NO: 1539 - protein, 290 aa, Artificial Sequence
  FCGR3A_Version_2__Homo_sapiens__CCDS1232.1
MGGGAGERLFTSSCLVGLVPLGLRISLVTCPLQCGIMWQLLLPTALLLLVSAGMRTEDLPKAVVFLEPQWYRVLEKDSVTLKCQGAYSPEDNSTQWFHNESLISSQASSYFIDAATVDDSGEYRCQTNLSTLSDPVQLEVHIGWLLLQAPRWVFKEEDPIHLRCHSWKNTALHKVTYLQNGKGRKYFHHNSDFYIPKATLKDSGSYFCRGLFGSKNVSSETVNITITQGLAVSTISSFFPPGYQVSFCLVMVLLFAVDTGLYFSVKTNIRSSTRDWKDHKFKWRKDPQDK

SEQ ID NO: 1540 - RNA, 873 nt, Artificial Sequence
  FCGR3A_Version_2__Homo_sapiens__CCDS1232.1
auggguggaggggcuggggaaaggcuguuuacuuccuccugucuagucgguuuggucccuuuagggcuccggauaucuuuggugacuuguccacuccaguguggcaucauguggcagcugcuccucccaacugcucugcuacuucuaguuucagcuggcaugcggacugaagaucucccaaaggcugugguguuccuggagccucaaugguacagggugcucgagaaggacagugugacucugaagugccagggagccuacuccccugaggacaauuccacacagugguuucacaaugagagccucaucucaagccaggccucgagcuacuucauugacgcugccacagucgacgacaguggagaguacaggugccagacaaaccucuccacccucagugacccggugcagcuagaaguccauaucggcuggcuguugcuccaggccccucgguggguguucaaggaggaagacccuauucaccugaggugucacagcuggaagaacacugcucugcauaaggucacauauuuacagaauggcaaaggcaggaaguauuuucaucauaauucugacuucuacauuccaaaagccacacucaaagacagcggcuccuacuucugcagggggcuuuuugggaguaaaaaugugucuucagagacugugaacaucaccaucacucaagguuuggcagugucaaccaucucaucauucuuuccaccuggguaccaagucucuuucugcuuggugaugguacuccuuuuugcaguggacacaggacuauauuucucugugaagacaaacauucgaagcucaacaagagacuggaaggaccauaaauuuaaauggagaaaggacccucaagacaaauga

SEQ ID NO: 1541 - RNA, 873 nt, Artificial Sequence
  derived and/or modified sequence opt1 from FCGR3A_Version_2__Homo_sapiens__CCDS1232.1
augggcgggggcgccggggagcgccuguucaccagcuccugccucgugggccuggucccccuggggcuccggaucagccuggugaccugcccccugcagugcggcaucauguggcagcuccugcugcccacggcccuccugcugcucguguccgcgggcaugcgcaccgaggaccugcccaaggccgucguguuccuggagccccagugguaccgggugcucgagaaggacagcgucacccugaagugccagggggccuacuccccggaggacaacagcacccagugguuccacaacgagucccugaucagcucccaggccagcuccuacuucaucgacgccgcgacgguggacgacagcggcgaguaccgcugccagaccaaccucuccacccugagcgaccccgugcagcuggagguccacaucggguggcuccugcugcaggcgccccgguggguguucaaggaggaggaccccauccaccuccgcugccacuccuggaagaacaccgcccugcacaaggugacguaccugcagaacggcaaggggcggaaguacuuccaccacaacagcgacuucuacaucccgaaggccacccucaaggacuccggcagcuacuucugccgcggccuguucggguccaagaacgucagcagcgagaccgugaacaucaccaucacgcagggccuggccguguccaccaucagcuccuucuucccgcccggguaccaggucagcuucugccucgugauggugcugcuguucgccgucgacaccggccucuacuucuccgugaagaccaacauccggagcuccacgcgcgacuggaaggaccacaaguucaaguggcggaaggacccccaggacaaguga

SEQ ID NO: 1542 - RNA, 873 nt, Artificial Sequence
  derived and/or modified sequence opt2 from FCGR3A_Version_2__Homo_sapiens__CCDS1232.1
augggcggcggcgccggcgagcgccucuucaccuccuccugccucgucggccucgucccccucggccuccgcaucucccucgucaccugcccccuccagugcggcaucauguggcagcuccuccuccccaccgcccuccuccuccucgucuccgccggcaugcgcaccgaggaccuccccaaggccgucgucuuccucgagccccagugguaccgcguccucgagaaggacuccgucacccucaagugccagggcgccuacucccccgaggacaacuccacccagugguuccacaacgagucccucaucuccucccaggccuccuccuacuucaucgacgccgccaccgucgacgacuccggcgaguaccgcugccagaccaaccucuccacccucuccgaccccguccagcucgagguccacaucggcuggcuccuccuccaggccccccgcugggucuucaaggaggaggaccccauccaccuccgcugccacuccuggaagaacaccgcccuccacaaggucaccuaccuccagaacggcaagggccgcaaguacuuccaccacaacuccgacuucuacauccccaaggccacccucaaggacuccggcuccuacuucugccgcggccucuucggcuccaagaacgucuccuccgagaccgucaacaucaccaucacccagggccucgccgucuccaccaucuccuccuucuucccccccggcuaccaggucuccuucugccucgucaugguccuccucuucgccgucgacaccggccucuacuucuccgucaagaccaacauccgcuccuccacccgcgacuggaaggaccacaaguucaaguggcgcaaggacccccaggacaaguga

SEQ ID NO: 1543 - RNA, 873 nt, Artificial Sequence
  derived and/or modified sequence opt3 from FCGR3A_Version_2__Homo_sapiens__CCDS1232.1
augggcgggggagccggugagagacuguucaccagcuccugccucgugggccuugucccccugggguugaggaucucuuuaguuacauguccucugcagugcggaauuauguggcaacuacuccugccaacugcccuucuguugcucgugucagcaggcaugcggacggaagaccugccgaaggccguaguguuucuggagccccagugguaccgcguccucgaaaaagauagugugaccuuaaagugucagggugcguauagcccugaggacaacuccacacagugguuccacaaugaaucucugauaucgucacaagcuagcaguuacuuuaucgaugccgcaacuguugacgauuccggggaguaucgaugccagaccaaccuuucuacauugagcgacccagugcagcuggagguccauauuggauggcuacuccugcaggcuccccguuggguguucaaagaagaggauccuauccaccuuagaugucauuccuggaagaauaccgcucugcacaaaguaacuuacuugcaaaacggcaagggcaggaaguauuuucaucacaauucagacuucuacauuccaaaagcaacacucaaggauagugggagcuauuuuugccggggacuguucgguucuaaaaacguuuccucagaaaccgugaauaucacgauaacucagggcuuagccgucagcaccaucaguucuuucuuucccccuggguaccagguguccuuuugucuggugaugguccuccuuuucgcuguugacacaggacuguacuuuagcgugaagacuaacauucgcucgucuaccagagauuggaaagaccacaaguucaaguggaggaaagauccacaggacaaguga

SEQ ID NO: 1544 - RNA, 873 nt, Artificial Sequence
  derived and/or modified sequence opt4 from FCGR3A_Version_2__Homo_sapiens__CCDS1232.1
augggcggcggcgccggcgagagacuguucaccagcagcugccuggugggccuggugccccugggccugagaaucagccuggugaccugcccccugcagugcggcaucauguggcagcugcugcugcccaccgcccugcugcugcuggugagcgccggcaugagaaccgaggaccugcccaaggccgugguguuccuggagccccagugguacagagugcuggagaaggacagcgugacccugaagugccagggcgccuacagccccgaggacaacagcacccagugguuccacaacgagagccugaucagcagccaggccagcagcuacuucaucgacgccgccaccguggacgacagcggcgaguacagaugccagaccaaccugagcacccugagcgaccccgugcagcuggaggugcacaucggcuggcugcugcugcaggcccccagauggguguucaaggaggaggaccccauccaccugagaugccacagcuggaagaacaccgcccugcacaaggugaccuaccugcagaacggcaagggcagaaaguacuuccaccacaacagcgacuucuacauccccaaggccacccugaaggacagcggcagcuacuucugcagaggccuguucggcagcaagaacgugagcagcgagaccgugaacaucaccaucacccagggccuggccgugagcaccaucagcagcuucuucccccccggcuaccaggugagcuucugccuggugauggugcugcuguucgccguggacaccggccuguacuucagcgugaagaccaacaucagaagcagcaccagagacuggaaggaccacaaguucaaguggagaaaggacccccaggacaaguga

SEQ ID NO: 1545 - RNA, 873 nt, Artificial Sequence
  derived and/or modified sequence opt5 from FCGR3A_Version_2__Homo_sapiens__CCDS1232.1
augggcgggggagccggcgagagacuguucaccagcuccugccucguggggcuggucccccuuggacugcggaucucucucguuacauguccucugcagugcggcauuauguggcaacuucugcucccgacggcucugcugcuccuggugagcgccgggaugcgcaccgaagaccuucccaaggcgguggucuuucuggagccucagugguacagagugcucgaaaaagauuccguuacacugaagugucagggagcuuauucucccgaggacaacagcacccagugguuccacaaugaaucccuuaucucuagccaagccuccagcuacuuuauugaugccgcuacaguggacgauucuggcgaguaucggugccagaccaaccuguccacacucagcgacccuguccagcuggaggugcauaucggcuggcugcuccugcaggcuccccgcuggguuuucaaagaagaggauccuauucaccuuagaugucauucuuggaagaauaccgcccugcacaaagugacguaccuccaaaacgggaagggacggaaguauuuucaucacaauuccgacuucuacaucccgaaagccacccugaaggauagcggcucuuauuuuugccgcgggcuuuucggauccaaaaacgucagcuccgaaacagugaauaucaccauuacacagggccuggcggugucuaccaucagcuccuuuuucccucccggguaccaggucagcuuuugucucguuauggugcugcuguucgccguggacacgggacucuacuuuucugucaagacaaacauuagauccagcacccgggauuggaaagaccacaaguucaaguggcgcaaagauccccaggacaaguga

SEQ ID NO: 1546 - protein, 268 aa, Artificial Sequence
  FGF5__Homo_sapiens__P12034
MSLSFLLLLFFSHLILSAWAHGEKRLAPKGQPGPAATDRNPRGSSSRQSSSSAMSSSSASSSPAASLGSQGSGLEQSSFQWSPSGRRTGSLYCRVGIGFHLQIYPDGKVNGSHEANMLSVLEIFAVSQGIVGIRGVFSNKFLAMSKKGKLHASAKFTDDCKFRERFQENSYNTYASAIHRTEKTGREWYVALNKRGKAKRGCSPRVKPQHISTHFLPRFKQSEQPELSFTVTVPEKKKPPSPIKPKIPLSAPRKNTNSVKYRLKFRFG

SEQ ID NO: 1547 - RNA, 807 nt, Artificial Sequence
  FGF5__Homo_sapiens__AAH74858
augagcuuguccuuccuccuccuccucuucuucagccaccugauccucagcgccugggcucacggggagaagcgucucgcccccaaagggcaacccggacccgcugccacugauaggaacccuagaggcuccagcagcagacagagcagcaguagcgcuaugucuuccucuucugccuccuccucccccgcagcuucucugggcagccaaggaaguggcuuggagcagagcaguuuccaguggagccccucggggcgccggaccggcagccucuacugcagagugggcaucgguuuccaucugcagaucuacccggauggcaaagucaauggaucccacgaagccaauauguuaaguguuuuggaaauauuugcugugucucaggggauuguaggaauacgaggaguuuucagcaacaaauuuuuagcgaugucaaaaaaaggaaaacuccaugcaagugccaaguucacagaugacugcaaguucagggagcguuuucaagaaaauagcuauaauaccuaugccucagcaauacauagaacugaaaaaacagggcgggagugguauguggcccugaauaaaagaggaaaagccaaacgagggugcagcccccggguuaaaccccagcauaucucuacccauuuucugccaagauucaagcagucggagcagccagaacuuucuuucacgguuacuguuccugaaaagaaaaagccaccuagcccuaucaagccaaagauuccccuuucugcaccucggaaaaauaccaacucagugaaauacagacucaaguuucgcuuuggauaa

SEQ ID NO: 1548 - RNA, 807 nt, Artificial Sequence
  derived and/or modified sequence opt1 from FGF5__Homo_sapiens__AAH74858
augagccuguccuuccuccugcugcuguucuucagccaccugauccuguccgccugggcccacggcgagaagcgccucgcgcccaaggggcagccgggccccgccgccaccgaccggaacccccgcgggagcuccagccggcaguccagcuccagcgccauguccagcuccagcgccuccagcucccccgcggccagccugggcucccaggggagcggccuggagcagagcuccuuccaguggagcccguccggccgccggaccgggagccucuacugccgcgugggcaucggguuccaccuccagaucuaccccgacggcaaggucaacgggucccacgaggccaacaugcugagcgugcucgagaucuucgccgugucccagggcaucgucggcauccgcgggguguucagcaacaaguuccuggcgauguccaagaagggcaagcugcacgccagcgccaaguucacggacgacugcaaguuccgggagcgguuccaggagaacuccuacaacaccuacgccagcgccauccaccgcaccgagaagaccgggcgggagugguacguggcgcucaacaagcgcggcaaggccaagcggggcugcagcccccgcgucaagccccagcacaucuccacgcacuuccugccgcgguucaagcaguccgagcagcccgagcugagcuucaccgugaccgugcccgagaagaagaagcccccgucccccaucaagcccaagaucccccucagcgccccgcgcaagaacaccaacuccgucaaguaccggcugaaguuccgcuucggguga

SEQ ID NO: 1549 - RNA, 807 nt, Artificial Sequence
  derived and/or modified sequence opt2 from FGF5__Homo_sapiens__AAH74858
augucccucuccuuccuccuccuccucuucuucucccaccucauccucuccgccugggcccacggcgagaagcgccucgcccccaagggccagcccggccccgccgccaccgaccgcaacccccgcggcuccuccucccgccaguccuccuccuccgccauguccuccuccuccgccuccuccucccccgccgccucccucggcucccagggcuccggccucgagcaguccuccuuccaguggucccccuccggccgccgcaccggcucccucuacugccgcgucggcaucggcuuccaccuccagaucuaccccgacggcaaggucaacggcucccacgaggccaacaugcucuccguccucgagaucuucgccgucucccagggcaucgucggcauccgcggcgucuucuccaacaaguuccucgccauguccaagaagggcaagcuccacgccuccgccaaguucaccgacgacugcaaguuccgcgagcgcuuccaggagaacuccuacaacaccuacgccuccgccauccaccgcaccgagaagaccggccgcgagugguacgucgcccucaacaagcgcggcaaggccaagcgcggcugcuccccccgcgucaagccccagcacaucuccacccacuuccucccccgcuucaagcaguccgagcagcccgagcucuccuucaccgucaccguccccgagaagaagaagccccccucccccaucaagcccaagaucccccucuccgccccccgcaagaacaccaacuccgucaaguaccgccucaaguuccgcuucggcuga

SEQ ID NO: 1550 - RNA, 807 nt, Artificial Sequence
  derived and/or modified sequence opt3 from FGF5__Homo_sapiens__AAH74858
augagccuguccuuccuccuucuguuguuuuucucucacuuaauccugucagccugggcucauggcgaaaagagacuagcacccaaagggcagccuggaccagccgcgaccgacaggaacccgcgggguaguagcucccgccaaucuucgucaagcgcuaugaguuccucuagcgccuccucaagucccgcagccagccucggcucucagggguccggacuggaacagagcucauuucaguggaguccuucuggccgacguacagguucccuuuacugcagaguggggauuggauuccaucugcaaauauauccagauggcaaggucaauggcagccacgaggcuaacauguugucgguucucgaaaucuuugcagugucucaggggauuguaggaaucagggguguguucuccaauaaauuucuggccaugucaaagaaaggcaagcugcacgcuagugccaaguucacugacgauuguaaauuucgggagcgcuuccaggaaaacagcuacaauacguaugcguccgcaauucauagaaccgagaagacagggagggagugguacgucgcccucaacaaacggggaaaggcuaaacgcggcugcucuccccgagugaagccucagcacaucagcacucacuuuuuaccaagauucaagcaaucagaacagcccgagcugaguuuuaccguuacagugccugagaaaaagaaaccaccgucccccauaaagccuaaaaucccacuuagcgcccccaggaagaauaccaacucugucaaauaucgguugaaguuccguuucgguuga

SEQ ID NO: 1551 - RNA, 807 nt, Artificial Sequence
  derived and/or modified sequence opt4 from FGF5__Homo_sapiens__AAH74858
augagccugagcuuccugcugcugcuguucuucagccaccugauccugagcgccugggcccacggcgagaagagacuggcccccaagggccagcccggccccgccgccaccgacagaaaccccagaggcagcagcagcagacagagcagcagcagcgccaugagcagcagcagcgccagcagcagccccgccgccagccugggcagccagggcagcggccuggagcagagcagcuuccaguggagccccagcggcagaagaaccggcagccuguacugcagagugggcaucggcuuccaccugcagaucuaccccgacggcaaggugaacggcagccacgaggccaacaugcugagcgugcuggagaucuucgccgugagccagggcaucgugggcaucagaggcguguucagcaacaaguuccuggccaugagcaagaagggcaagcugcacgccagcgccaaguucaccgacgacugcaaguucagagagagauuccaggagaacagcuacaacaccuacgccagcgccauccacagaaccgagaagaccggcagagagugguacguggcccugaacaagagaggcaaggccaagagaggcugcagccccagagugaagccccagcacaucagcacccacuuccugcccagauucaagcagagcgagcagcccgagcugagcuucaccgugaccgugcccgagaagaagaagccccccagccccaucaagcccaagaucccccugagcgcccccagaaagaacaccaacagcgugaaguacagacugaaguucagauucggcuga

SEQ ID NO: 1552 - RNA, 807 nt, Artificial Sequence
  derived and/or modified sequence opt5 from FGF5__Homo_sapiens__AAH74858
augagccuguccuuccuccugcuucuguuuuucucucaccucauccugagcgccugggcccauggcgaaaagagacuugcccccaaagggcagccuggaccggcggcuaccgaccggaacccccgcggcuccucuagcagacaauccucuagcuccgccauguccucuuccagcgccucuuccagcccugcugccucucuggggucccagggaagcggccucgaacaguccucuuuucaguggagccccuccgggcggcgcacaggaagccuguacugcagagugggcauuggcuuccaucugcaaaucuauccugaugggaaggucaauggaucucacgaggcuaacaugcucuccguucuggaaauuuuugccgugagccagggcaucguggggauucggggagucuucucuaauaaauuucuugcgaugagcaagaaaggcaagcugcacgccuccgcuaaguucacggacgauuguaaauuucgcgagagauuccaggaaaacucuuacaauaccuaugccagcgcuauccaucggacagagaagaccgggcgcgagugguacguggcccucaacaaaagaggaaaggcgaaacggggcugcagcccccgcguuaagccucagcacaucagcacacacuuucugccgagauucaagcaaucugaacagcccgagcuuuccuuuaccgugacagucccugagaaaaagaaacccccuagccccauuaagccgaaaaucccucugucugcuccccggaagaauaccaacuccgugaaauaucgccucaaguucagauucggcuga

SEQ ID NO: 1553 - protein, 38 aa, Artificial Sequence
  FGF5__Homo_sapiens__Q60518
MSTRCGEAGRARGTQPHRGYRAQNQPYKMHLGPPRLEE

SEQ ID NO: 1554 - RNA, 117 nt, Artificial Sequence
  FGF5__Homo_sapiens__AAB06462
auguccacccggugcggcgaggcgggcagagccagaggcacgcagccgcacaggggcuacagagcccagaaucagcccuacaagaugcacuuaggacccccgcggcuggaagaauga

SEQ ID NO: 1555 - RNA, 117 nt, Artificial Sequence
  derived and/or modified sequence opt1 from FGF5__Homo_sapiens__AAB06462
augagcacccgcugcggcgaggccgggcgggcccgcggcacccagccccaccggggguaccgcgcgcagaaccagcccuacaagaugcaccugggcccgccccggcucgaggaguga

SEQ ID NO: 1556 - RNA, 117 nt, Artificial Sequence
  derived and/or modified sequence opt2 from FGF5__Homo_sapiens__AAB06462
auguccacccgcugcggcgaggccggccgcgcccgcggcacccagccccaccgcggcuaccgcgcccagaaccagcccuacaagaugcaccucggccccccccgccucgaggaguga

SEQ ID NO: 1557 - RNA, 117 nt, Artificial Sequence
  derived and/or modified sequence opt3 from FGF5__Homo_sapiens__AAB06462
augagcaccagaugcggcgaggccgggagggcucggggaacacagccccaccgcgguuaccgagcacaaaaccagccuuauaagaugcaucugggcccaccgcgucucgaagaguga

SEQ ID NO: 1558 - RNA, 117 nt, Artificial Sequence
  derived and/or modified sequence opt4 from FGF5__Homo_sapiens__AAB06462
augagcaccagaugcggcgaggccggcagagccagaggcacccagccccacagaggcuacagagcccagaaccagcccuacaagaugcaccugggcccccccagacuggaggaguga

SEQ ID NO: 1559 - RNA, 117 nt, Artificial Sequence
  derived and/or modified sequence opt5 from FGF5__Homo_sapiens__AAB06462
augagcaccagaugcggcgaggccgggcgggcucgcggaacacagccccacagaggcuaccgggcccaaaaccagccuuauaagaugcaucuggggccgccccgccucgaagaguga

SEQ ID NO: 1560 - protein, 821 aa, Artificial Sequence
  FGFR2__Homo_sapiens__P21802
MVSWGRFICLVVVTMATLSLARPSFSLVEDTTLEPEEPPTKYQISQPEVYVAAPGESLEVRCLLKDAAVISWTKDGVHLGPNNRTVLIGEYLQIKGATPRDSGLYACTASRTVDSETWYFMVNVTDAISSGDDEDDTDGAEDFVSENSNNKRAPYWTNTEKMEKRLHAVPAANTVKFRCPAGGNPMPTMRWLKNGKEFKQEHRIGGYKVRNQHWSLIMESVVPSDKGNYTCVVENEYGSINHTYHLDVVERSPHRPILQAGLPANASTVVGGDVEFVCKVYSDAQPHIQWIKHVEKNGSKYGPDGLPYLKVLKAAGVNTTDKEIEVLYIRNVTFEDAGEYTCLAGNSIGISFHSAWLTVLPAPGREKEITASPDYLEIAIYCIGVFLIACMVVTVILCRMKNTTKKPDFSSQPAVHKLTKRIPLRRQVTVSAESSSSMNSNTPLVRITTRLSSTADTPMLAGVSEYELPEDPKWEFPRDKLTLGKPLGEGCFGQVVMAEAVGIDKDKPKEAVTVAVKMLKDDATEKDLSDLVSEMEMMKMIGKHKNIINLLGACTQDGPLYVIVEYASKGNLREYLRARRPPGMEYSYDINRVPEEQMTFKDLVSCTYQLARGMEYLASQKCIHRDLAARNVLVTENNVMKIADFGLARDINNIDYYKKTTNGRLPVKWMAPEALFDRVYTHQSDVWSFGVLMWEIFTLGGSPYPGIPVEELFKLLKEGHRMDKPANCTNELYMMMRDCWHAVPSQRPTFKQLVEDLDRILTLTTNEEYLDLSQPLEQYSPSYPDTRSSCSSGDDSVFSPDPMPYEPCLPQYPHINGSVKT

SEQ ID NO: 1561 - RNA, 2466 nt, Artificial Sequence
  FGFR2__Homo_sapiens__AAA59470
auggucagcuggggucguuucaucugccuggucguggucaccauggcaaccuugucccuggcccggcccuccuucaguuuaguugaggauaccacauuagagccagaagagccaccaaccaaauaccaaaucucucaaccagaaguguacguggcugcgccaggggagucgcuagaggugcgcugccuguugaaagaugccgccgugaucaguuggacuaaggauggggugcacuuggggcccaacaauaggacagugcuuauuggggaguacuugcagauaaagggcgccacgccuagagacuccggccucuaugcuuguacugccaguaggacuguagacagugaaacuugguacuucauggugaaugucacagaugccaucucauccggagaugaugaggaugacaccgauggugcggaagauuuugucagugagaacaguaacaacaagagagcaccauacuggaccaacacagaaaagauggaaaagcggcuccaugcugugccugcggccaacacugucaaguuucgcugcccagccggggggaacccaaugccaaccaugcgguggcugaaaaacgggaaggaguuuaagcaggagcaucgcauuggaggcuacaagguacgaaaccagcacuggagccucauuauggaaaguguggucccaucugacaagggaaauuauaccugugugguggagaaugaauacggguccaucaaucacacguaccaccuggauguuguggagcgaucgccucaccggcccauccuccaagccggacugccggcaaaugccuccacaguggucggaggagacguagaguuugucugcaagguuuacagugaugcccagccccacauccaguggaucaagcacguggaaaagaacggcaguaaauacgggcccgacgggcugcccuaccucaagguucucaaggccgccgguguuaacaccacggacaaagagauugagguucucuauauucggaauguaacuuuugaggacgcuggggaauauacgugcuuggcggguaauucuauugggauauccuuucacucugcaugguugacaguucugccagcgccuggaagagaaaaggagauuacagcuuccccagacuaccuggagauagccauuuacugcauaggggucuucuuaaucgccuguauggugguaacagucauccugugccgaaugaagaacacgaccaagaagccagacuucagcagccagccggcugugcacaagcugaccaaacguaucccccugcggagacagguaacaguuucggcugaguccagcuccuccaugaacuccaacaccccgcuggugaggauaacaacacgccucucuucaacggcagacacccccaugcuggcaggggucuccgaguaugaacuuccagaggacccaaaaugggaguuuccaagagauaagcugacacugggcaagccccugggagaagguugcuuugggcaaguggucauggcggaagcagugggaauugacaaagacaagcccaaggaggcggucaccguggccgugaagauguugaaagaugaugccacagagaaagaccuuucugaucuggugucagagauggagaugaugaagaugauugggaaacacaagaauaucauaaaucuucuuggagccugcacacaggaugggccucucuaugucauaguugaguaugccucuaaaggcaaccuccgagaauaccuccgagcccggaggccacccgggauggaguacuccuaugacauuaaccguguuccugaggagcagaugaccuucaaggacuuggugucaugcaccuaccagcuggccagaggcauggaguacuuggcuucccaaaaauguauucaucgagauuuagcagccagaaauguuuugguaacagaaaacaaugugaugaaaauagcagacuuuggacucgccagagauaucaacaauauagacuauuacaaaaagaccaccaaugggcggcuuccagucaaguggauggcuccagaagcccuguuugauagaguauacacucaucagagugaugucugguccuucgggguguuaaugugggagaucuucacuuuagggggcucgcccuacccagggauucccguggaggaacuuuuuaagcugcugaaggaaggacacagaauggauaagccagccaacugcaccaacgaacuguacaugaugaugagggacuguuggcaugcagugcccucccagagaccaacguucaagcaguugguagaagacuuggaucgaauucucacucucacaaccaaugaggaauacuuggaccucagccaaccucucgaacaguauucaccuaguuacccugacacaagaaguucuuguucuucaggagaugauucuguuuuuucuccagaccccaugccuuacgaaccaugccuuccucaguauccacacauaaacggcaguguuaaaacauga

SEQ ID NO: 1562 - RNA, 2466 nt, Artificial Sequence
  derived and/or modified sequence opt1 from FGFR2__Homo_sapiens__AAA59470
auggugagcuggggccgcuucaucugccuggucguggugaccauggccacccucucccuggcccggcccagcuucucccuggucgaggacacgacccucgagccggaggagccgcccaccaaguaccagaucagccagcccgagguguacguggcggcccccggggagucccuggagguccgcugccugcucaaggacgccgccgugaucagcuggaccaaggacggcgugcaccuggggcccaacaaccggacgguccugaucggcgaguaccuccagaucaagggggccacgccccgcgacuccggccuguacgcgugcaccgccagccggaccguggacuccgagaccugguacuucauggugaacgucaccgacgccaucagcuccggcgacgacgaggacgacaccgacggggccgaggacuucgugagcgagaacuccaacaacaagcgcgcgcccuacuggaccaacacggagaagauggagaagcggcugcacgccgugccggccgccaacaccgucaaguuccgcugccccgccggcgggaaccccaugcccaccaugcgguggcucaagaacggcaaggaguucaagcaggagcaccgcaucgggggcuacaaggugcggaaccagcacuggagccugaucauggaguccguggucccgagcgacaagggcaacuacacgugcgugguggagaacgaguacggguccaucaaccacaccuaccaccuggacgucguggagcgcagcccccaccggcccauccuccaggcgggccugcccgccaacgccuccaccguggucgggggcgacguggaguucgucugcaagguguacagcgacgcccagccgcacauccaguggaucaagcacguggagaagaacggcagcaaguacgggcccgacggccugcccuaccucaagguccugaaggccgcgggggugaacaccaccgacaaggagaucgaggugcuguacauccgcaacgucacguucgaggacgccggcgaguacacgugccucgccgggaacuccaucggcaucagcuuccacuccgccuggcugaccgugcugcccgccccgggccgggagaaggagaucaccgcgagccccgacuaccucgagaucgccaucuacugcaucgggguguuccugaucgccugcauggucgugaccgugauccugugccgcaugaagaacaccaccaagaagcccgacuucuccagccagcccgccguccacaagcucaccaagcggaucccgcugcgccgccaggugacgguguccgccgagagcuccagcuccaugaacagcaacacgccccugguccggaucaccacccggcucuccagcaccgcggacacccccaugcuggccggcguguccgaguacgagcugcccgaggacccgaagugggaguucccccgcgacaagcucacccuggggaagccccugggcgaggggugcuucggccagguggucauggccgaggccgugggcaucgacaaggacaagccgaaggaggcggugaccgucgccgugaagaugcucaaggacgacgccacggagaaggaccugagcgaccugguguccgagauggagaugaugaagaugaucgggaagcacaagaacaucaucaaccuccugggcgccugcacccaggacgggccccuguacgucaucguggaguacgccagcaagggcaaccuccgcgaguaccugcgggcgcgccggccgcccgggauggaguacuccuacgacaucaaccgcgugcccgaggagcagaugaccuucaaggaccuggucagcugcaccuaccagcucgcccggggcauggaguaccuggccagccagaagugcauccaccgcgaccuggccgcccggaacgugcucgugaccgagaacaacgucaugaagaucgcggacuucggccuggcccgcgacaucaacaacaucgacuacuacaagaagacgaccaacgggcggcugcccgugaaguggauggcccccgaggcccuguucgaccgcguguacacccaccaguccgacgucuggagcuucggcgugcucaugugggagaucuucacccucgggggcucccccuacccgggcauccccguggaggagcuguucaagcugcugaaggaggggcaccggauggacaagcccgccaacugcacgaacgagcuguacaugaugaugcgcgacugcuggcacgcgguccccagccagcggccgaccuucaagcagcucguggaggaccuggaccgcauccugacccucaccacgaacgaggaguaccuggaccugucccagccccucgagcaguacagccccuccuaccccgacacccggagcuccugcagcuccggcgacgacagcguguucuccccggaccccaugcccuacgagcccugccugccgcaguacccccacaucaacgggagcgucaagaccuga

SEQ ID NO: 1563 - RNA, 2466 nt, Artificial Sequence
  derived and/or modified sequence opt2 from FGFR2__Homo_sapiens__AAA59470
auggucuccuggggccgcuucaucugccucgucgucgucaccauggccacccucucccucgcccgccccuccuucucccucgucgaggacaccacccucgagcccgaggagccccccaccaaguaccagaucucccagcccgaggucuacgucgccgcccccggcgagucccucgagguccgcugccuccucaaggacgccgccgucaucuccuggaccaaggacggcguccaccucggccccaacaaccgcaccguccucaucggcgaguaccuccagaucaagggcgccaccccccgcgacuccggccucuacgccugcaccgccucccgcaccgucgacuccgagaccugguacuucauggucaacgucaccgacgccaucuccuccggcgacgacgaggacgacaccgacggcgccgaggacuucgucuccgagaacuccaacaacaagcgcgcccccuacuggaccaacaccgagaagauggagaagcgccuccacgccguccccgccgccaacaccgucaaguuccgcugccccgccggcggcaaccccaugcccaccaugcgcuggcucaagaacggcaaggaguucaagcaggagcaccgcaucggcggcuacaagguccgcaaccagcacuggucccucaucauggaguccgucguccccuccgacaagggcaacuacaccugcgucgucgagaacgaguacggcuccaucaaccacaccuaccaccucgacgucgucgagcgcuccccccaccgccccauccuccaggccggccuccccgccaacgccuccaccgucgucggcggcgacgucgaguucgucugcaaggucuacuccgacgcccagccccacauccaguggaucaagcacgucgagaagaacggcuccaaguacggccccgacggccuccccuaccucaagguccucaaggccgccggcgucaacaccaccgacaaggagaucgagguccucuacauccgcaacgucaccuucgaggacgccggcgaguacaccugccucgccggcaacuccaucggcaucuccuuccacuccgccuggcucaccguccuccccgcccccggccgcgagaaggagaucaccgccucccccgacuaccucgagaucgccaucuacugcaucggcgucuuccucaucgccugcauggucgucaccgucauccucugccgcaugaagaacaccaccaagaagcccgacuucuccucccagcccgccguccacaagcucaccaagcgcaucccccuccgccgccaggucaccgucuccgccgaguccuccuccuccaugaacuccaacaccccccucguccgcaucaccacccgccucuccuccaccgccgacacccccaugcucgccggcgucuccgaguacgagcuccccgaggaccccaagugggaguucccccgcgacaagcucacccucggcaagccccucggcgagggcugcuucggccaggucgucauggccgaggccgucggcaucgacaaggacaagcccaaggaggccgucaccgucgccgucaagaugcucaaggacgacgccaccgagaaggaccucuccgaccucgucuccgagauggagaugaugaagaugaucggcaagcacaagaacaucaucaaccuccucggcgccugcacccaggacggcccccucuacgucaucgucgaguacgccuccaagggcaaccuccgcgaguaccuccgcgcccgccgcccccccggcauggaguacuccuacgacaucaaccgcguccccgaggagcagaugaccuucaaggaccucgucuccugcaccuaccagcucgcccgcggcauggaguaccucgccucccagaagugcauccaccgcgaccucgccgcccgcaacguccucgucaccgagaacaacgucaugaagaucgccgacuucggccucgcccgcgacaucaacaacaucgacuacuacaagaagaccaccaacggccgccuccccgucaaguggauggcccccgaggcccucuucgaccgcgucuacacccaccaguccgacgucugguccuucggcguccucaugugggagaucuucacccucggcggcucccccuaccccggcauccccgucgaggagcucuucaagcuccucaaggagggccaccgcauggacaagcccgccaacugcaccaacgagcucuacaugaugaugcgcgacugcuggcacgccguccccucccagcgccccaccuucaagcagcucgucgaggaccucgaccgcauccucacccucaccaccaacgaggaguaccucgaccucucccagccccucgagcaguacucccccuccuaccccgacacccgcuccuccugcuccuccggcgacgacuccgucuucucccccgaccccaugcccuacgagcccugccucccccaguacccccacaucaacggcuccgucaagaccuga

SEQ ID NO: 1564 - RNA, 2466 nt, Artificial Sequence
  derived and/or modified sequence opt3 from FGFR2__Homo_sapiens__AAA59470
auggugagcuggggcagauucaucugccuggucguugugaccauggccacacucucccuugcuaggcccucuuuuucacugguagaggacacuacguuggaaccugaggaaccaccgaccaaguaccagauuagucaacccgagguguaugucgcagccccuggggaauccuuagaggugcggugucugcuaaaagaugcggcuguuauauccuggacaaaggacggagugcaccucgguccaaacaaucgcacuguccugaucggcgaguaccuucagauuaaaggggccacaccccgagauucuggacuguaugcaugcaccgccucgcguaccguggacucagaaacuugguacuucaugguaaacguuacagaugcuaucagcaguggcgacgaugaggacgauaccgacggugcagaagauuuuguguccgaaaauucuaacaauaagagagccccuuauuggacgaacacugagaaaauggaaaagagguugcaugcugucccagccgcgaauaccgugaaguuccggugucccgcagggggaaacccuaugccaacaaugcgcuggcucaaaaauggcaaggaguuuaaacaggaacacagaauuggcggguacaaggugaggaaccagcauuggagccugaucauggaguccgucguuccgucagacaaaggaaauuauacuugcgugguagaaaacgaguacgguaguauaaaucacaccuaccaucuggauguggucgagcggagcccccaccgcccuauccuccaagccggcuuaccagcuaacgccucuacagugguugggggagacguggaguucgucuguaagguguauuccgacgcacagccccacauucaguggaucaagcauguagagaaaaauggcucaaaguacgguccugaugggcugccauaucuuaaaguuuugaaggcugccggagugaacaccacggacaaagaaauugagguccuguacauccgaaacgugacuuuugaagaugcgggcgaguauacaugccuagccggcaauagcauagggauuaguuuccacucugcauggcucaccguccugcccgcuccgggaagagagaaggaaaucacugccuccccugacuaccuugagauugcuaucuauuguaucgguguguuucugauugccugcaugguugugacaguaauauuguguaggaugaaaaacaccacgaagaagcccgauuucagcucgcagccagcaguccauaaacucaccaagcggaucccucugcgucgccaagugacaguuucugccgaauccucaaguagcaugaauagcaacacucccuuagugagaauuaccacaaggcugucuagcacugcugacaccccaaugcucgcgggcgucucagaguacgaacuucccgaggauccuaaaugggaguuuccacgggacaagcugacauuggggaaaccgcuaggagaaggcugcuucggucaggugguaauggcagaggccguggggaucgauaaggacaagcccaaagaagcuguuaccgucgccgugaagaugcugaaagaugacgcaacugagaaggaccucagugaucugguguccgagauggaaaugaugaaaaugauaggcaagcacaagaauauuaucaaccuucugggagccuguacgcaggacggcccuuuguacgucaucguugaguaugcuagcaaagggaaucuccgagaauaccugcgcgccagaaggccacccggaauggaguauucuuacgauauuaaccgggugccugaggaacagaugacauuuaaggacuuagugucaugcaccuaucaacuggcacgcgguauggaguaccuagcgagucagaaaugcauccacagagaucucgcugccaggaauguacuggucacugaaaacaaugugaugaagauugcagacuucggccuugcccgugauauaaacaauaucgacuauuacaaaaagaccacaaacgggcgguugccaguuaaguggauggcucccgaggcccuguucgaucgaguguacacccaucagagcgacgucugguccuuuggagugcucaugugggaaauuuucacucugggcgguucuccguauccugggaucccaguugaggaacuuuuuaaacuguugaaggagggccacagaauggauaaacccgcaaauuguacaaacgagcucuacaugaugaugagggacugcuggcaugcugugccuucgcaacgccccacguucaagcagcugguagaagauuuagaccggauccugacccuaacuacaaacgaggaauaucucgaccugagccagccacuugagcaguacuccccuucauaucccgauaccagaaguucuuguagcuccggagacgauucagucuuuagcccagacccgaugccuuacgaacccugcuugccacaauauccccacauuaauggcucugugaaaacauga

SEQ ID NO: 1565 - RNA, 2466 nt, Artificial Sequence
  derived and/or modified sequence opt4 from FGFR2__Homo_sapiens__AAA59470
auggugagcuggggcagauucaucugccuggugguggugaccauggccacccugagccuggccagacccagcuucagccugguggaggacaccacccuggagcccgaggagccccccaccaaguaccagaucagccagcccgagguguacguggccgcccccggcgagagccuggaggugagaugccugcugaaggacgccgccgugaucagcuggaccaaggacggcgugcaccugggccccaacaacagaaccgugcugaucggcgaguaccugcagaucaagggcgccacccccagagacagcggccuguacgccugcaccgccagcagaaccguggacagcgagaccugguacuucauggugaacgugaccgacgccaucagcagcggcgacgacgaggacgacaccgacggcgccgaggacuucgugagcgagaacagcaacaacaagagagcccccuacuggaccaacaccgagaagauggagaagagacugcacgccgugcccgccgccaacaccgugaaguucagaugccccgccggcggcaaccccaugcccaccaugagauggcugaagaacggcaaggaguucaagcaggagcacagaaucggcggcuacaaggugagaaaccagcacuggagccugaucauggagagcguggugcccagcgacaagggcaacuacaccugcgugguggagaacgaguacggcagcaucaaccacaccuaccaccuggacgugguggagagaagcccccacagacccauccugcaggccggccugcccgccaacgccagcaccguggugggcggcgacguggaguucgugugcaagguguacagcgacgcccagccccacauccaguggaucaagcacguggagaagaacggcagcaaguacggccccgacggccugcccuaccugaaggugcugaaggccgccggcgugaacaccaccgacaaggagaucgaggugcuguacaucagaaacgugaccuucgaggacgccggcgaguacaccugccuggccggcaacagcaucggcaucagcuuccacagcgccuggcugaccgugcugcccgcccccggcagagagaaggagaucaccgccagccccgacuaccuggagaucgccaucuacugcaucggcguguuccugaucgccugcaugguggugaccgugauccugugcagaaugaagaacaccaccaagaagcccgacuucagcagccagcccgccgugcacaagcugaccaagagaaucccccugagaagacaggugaccgugagcgccgagagcagcagcagcaugaacagcaacaccccccuggugagaaucaccaccagacugagcagcaccgccgacacccccaugcuggccggcgugagcgaguacgagcugcccgaggaccccaagugggaguuccccagagacaagcugacccugggcaagccccugggcgagggcugcuucggccagguggugauggccgaggccgugggcaucgacaaggacaagcccaaggaggccgugaccguggccgugaagaugcugaaggacgacgccaccgagaaggaccugagcgaccuggugagcgagauggagaugaugaagaugaucggcaagcacaagaacaucaucaaccugcugggcgccugcacccaggacggcccccuguacgugaucguggaguacgccagcaagggcaaccugagagaguaccugagagccagaagaccccccggcauggaguacagcuacgacaucaacagagugcccgaggagcagaugaccuucaaggaccuggugagcugcaccuaccagcuggccagaggcauggaguaccuggccagccagaagugcauccacagagaccuggccgccagaaacgugcuggugaccgagaacaacgugaugaagaucgccgacuucggccuggccagagacaucaacaacaucgacuacuacaagaagaccaccaacggcagacugcccgugaaguggauggcccccgaggcccuguucgacagaguguacacccaccagagcgacguguggagcuucggcgugcugaugugggagaucuucacccugggcggcagccccuaccccggcauccccguggaggagcuguucaagcugcugaaggagggccacagaauggacaagcccgccaacugcaccaacgagcuguacaugaugaugagagacugcuggcacgccgugcccagccagagacccaccuucaagcagcugguggaggaccuggacagaauccugacccugaccaccaacgaggaguaccuggaccugagccagccccuggagcaguacagccccagcuaccccgacaccagaagcagcugcagcagcggcgacgacagcguguucagccccgaccccaugcccuacgagcccugccugccccaguacccccacaucaacggcagcgugaagaccuga

SEQ ID NO: 1566 - RNA, 2466 nt, Artificial Sequence
  derived and/or modified sequence opt5 from FGFR2__Homo_sapiens__AAA59470
auggugagcuggggcagauucaucugccuggucguugugaccauggccacacucucccuggcucggcccucuuuuagccuuguggaggacacgacccuggaaccugaggaaccgcccacaaaguaccagauuucccaaccugaggucuauguggccgcgcccggggaaucucucgagguucgcugucugcuuaaagaugcugccgugaucagcuggaccaaggacggaguccaccugggcccuaacaauagaacagugcucauuggggaguaccugcagaucaaaggagccacaccccgggauuccggccuguaugcuugcaccgccucucgcaccguugacagcgaaacgugguacuucauggugaacgucaccgaugcuauuuccagcggggacgaugaggacgauacagacggagccgaagauuuugugucugaaaauuccaacaauaagagagcgccuuauuggaccaacacagagaaaauggaaaagcggcuccaugccgugccggcugccaauaccgucaaguuccgcugucccgcuggcggcaacccuaugcccacgaugagauggcugaaaaaugggaaggaguuuaaacaggaacaccggaucggaggcuacaagguucgcaaccagcauuggagccuuaucauggagucuguggugccuuccgacaaagggaauuauacaugcgucguggaaaacgaguacggaagcauuaaucacaccuaccaucuggauguuguggagagaucuccccaccggccgauccuccaagccggccugccugcgaacgccuccacagucguugggggagacguggaguucguguguaaggucuauagcgacgcucagccccacauucaguggaucaagcauguggagaaaaauggcuccaaguacggcccugaugggcuucccuaucugaaaguccucaaggccgcuggagugaacaccaccgacaaagaaauugagguucuguacauccgcaacgugacauuugaagaugccggcgaguauacgugccuggccggaaauucuauuggaaucagcuuccacuccgcuuggcucaccguccugcccgcgccuggcagagagaaggaaaucacagccagcccggacuaccuugagauugcuaucuauuguauugggguguuucugaucgccugcaugguugugaccgucauucucugucggaugaaaaacacaaccaagaagcccgauuucucuucccagccugccgugcauaaacugacgaagcgcaucccccuuagacggcaagugacaguuagcgcugaaucuagcuccucuaugaauagcaacaccccucuggucagaaucaccacacgccucuccagcaccgccgacacacccaugcuggcgggagugucugaguacgaacugccggaggauccuaaaugggaguuuccccgggacaagcucacgcugggcaaaccucuuggcgaagggugcuucggacagguggucauggcugaggccgugggcauugauaaggacaagcccaaagaagccguuaccguggcugucaagaugcugaaagaugacgccacagagaaggaccucuccgaucuggugagcgagauggaaaugaugaaaaugaucgggaagcacaagaauauuaucaaccuucugggagcuuguacccaggacggcccucucuacguuauuguggaguaugccucuaaagggaaucugagagaauaccugcgcgcgcggagacccccgggcauggaguauuccuacgauaucaaccgcgucccugaggaacagaugacauuuaaggaccucgugagcugcaccuaucaacuggcccggggaauggaguaccuugcuucccagaaaugcauccacagagaucuggccgcucgcaauguucucgugacggaaaacaaugucaugaagauugccgacuucggccuggcgcgggauaucaacaauauugacuauuacaaaaagaccacaaacgggagacugcccgugaaguggauggcccccgaggcucuuuucgaucgcguguacacccaucagucugacgucuggagcuuuggaguucucaugugggaaaucuucacacugggcggguccccuuauccggggauucccguggaggaacuguuuaaacuccugaaggagggccaccggauggauaaaccugccaauuguaccaacgagcuuuacaugaugaugagagacugcuggcaugcugugcccucucaacggccuacguucaagcagcuggucgaagaucucgaccgcauccugacacugaccacaaacgaggaauaucuugaccucagccagccccuggagcaguacuccccuagcuaucccgauaccagaucuuccuguagcucuggggacgauuccguguuuagcccggacccuaugcccuacgaaccuugccugccccaauauccgcacauuaauggcucuguuaaaaccuga

SEQ ID NO: 1567 - protein, 635 aa, Artificial Sequence
  fibronectin__Homo_sapiens__A0A024R5I6
MAPPLLLLLLASGAAACPLPCVCQNLSESLSTLCAHRGLLFVPPNVDRRTVELRLADNFIQALGPPDFRNMTGLVDLTLSRNAITRIGARAFGDLESLRSLHLDGNRLVELGTGSLRGPVNLQHLILSGNQLGRIAPGAFDDFLESLEDLDLSYNNLRQVPWAGIGAMPALHTLNLDHNLIDALPPGAFAQLGQLSRLDLTSNRLATLAPDPLFSRGRDAEASPAPLVLSFSGNPLHCNCELLWLRRLARPDDLETCASPPGLAGRYFWAVPEGEFSCEPPLIARHTQRLWVLEGQRATLRCRALGDPAPTMHWVGPDDRLVGNSSRARAFPNGTLEIGVTGAGDAGGYTCIATNPAGEATARVELRVLALPHGGNSSAEGGRPGPSDIAASARTAAEGEGTLESEPAVQVTEVTATSGLVSWGPGRPADPVWMFQIQYNSSEDETLIYRIVPASSHHFLLKHLVPGADYDLCLLALSPAAGPSDLTATRLLGCAHFSTLPASPLCHALQAHVLGGTLTVAVGGVLVAALLVFTVALLVRGRGAGNGRLPLKLSHVQSQTNGGPSPTPKAHPPRSPPPRPQRSCSLDLGDAGCYGYARRLGGAWARRSHSVHGGLLGAGCRGVGGSAERLEESVV

SEQ ID NO: 1568 - RNA, 1908 nt, Artificial Sequence
  fibronectin__Homo_sapiens__EAW74574
auggccccgccgcuccugcugcugcugcuggccaguggagcggccgccugcccgcugcccugcgucugccagaaccuguccgagucgcucagcacccucugugcccaccgaggccugcuguuugugccgcccaacguggaccggcgcacaguggagcugcggcuggcugacaacuucauccaggcccuggggcccccugacuuccgcaacaugacgggacugguggaccugacacugucucgcaaugccaucacccgcauuggggcccgcgccuuuggggaccucgagagccugcguucccuccaccuugacggcaacaggcugguggagcugggcaccgggagccuccggggccccgucaaucugcagcaccucauccucagcggcaaccagcugggccgcaucgcgccgggagccuucgacgacuuccuagagagccuggaggaccuggaccuguccuacaacaaccuccggcaggugcccugggccggcaucggcgccaugccugcccugcacacccucaaccuggaccauaaccuuauugacgcacugcccccaggcgccuucgcccagcucggucagcucucccgccuggaccucaccuccaaccgccuggccacgcuggcuccggacccgcuuuucucucgugggcgugaugcagaggccucucccgccccccuggugcugagcuuuagcgggaacccccugcacugcaacugugagcugcuguggcugcggcggcuggcgcggccggacgaccuggaaacgugcgccuccccgcccggccuggccggccgcuacuucugggcagugcccgagggcgaguucuccugugagccgccccucauugcccgccacacgcagcgccucugggugcuggaaggccagcgggccacgcugcggugccgggcccugggugaccccgcgccuaccaugcacugggucgguccugacgaccgguugguuggcaacuccucccgagcccgggcuuuccccaacgggaccuuagagauuggggugaccggcgcuggggacgcugggggcuacaccugcaucgccaccaacccugcuggugaggccacagcccgaguagaacugcgggugcuggccuugccccauggugggaacagcagugccgaggggggccgccccgggcccucggacaucgccgccuccgcucgcacugcugccgagggugaggggacgcuggagucugagccagccgugcaggugacggaggugaccgccaccucagggcuggugagcuggggucccgggcggccagccgacccaguguggauguuccaaauccaguacaacagcagcgaagaugagacccucaucuaccggauugucccagccuccagccaccacuuccugcugaagcaccucguccccggcgcugacuaugaccucugccugcuggccuugucaccggccgcugggcccucugaccucacggccaccaggcugcugggcugugcccauuucuccacgcugccggccucgccccugugccacgcccugcaggcccacgugcugggcgggacccugaccguggccguggggggugugcugguggcugccuuacuggucuucacuguggccuugcugguucggggccggggggccggaaauggccgccucccccucaagcucagccacguccagucccagaccaauggaggccccagccccacacccaaggcccacccgccgcggagccccccgccccggccgcagcgcagcugcucucuggaccugggagaugccgggugcuacgguuaugccaggcgccugggaggagcuugggcccgacggagccacucugugcauggggggcugcucggggcagggugccgggggguaggaggcagcgccgagcggcuggaagagagugugguguga

SEQ ID NO: 1569 - RNA, 1908 nt, Artificial Sequence
  derived and/or modified sequence opt1 from fibronectin__Homo_sapiens__EAW74574
auggccccgccccugcuccugcugcuccuggccagcggcgcggccgccugcccccugcccugcgugugccagaaccucuccgagagccuguccacccugugcgcccaccgcgggcuccuguucgugcccccgaacgucgaccggcgcaccguggagcugcggcucgccgacaacuucauccaggcgcugggcccgcccgacuuccgcaacaugacggggcuggucgaccucacccugagccggaacgccaucacccgcaucggcgcccgggccuucggggaccuggagucccuccgcagccugcaccuggacggcaaccggcucguggagcugggcaccgggucccugcgcggccccgugaaccuccagcaccugauccugagcgggaaccagcucggccggaucgcgcccggggccuucgacgacuuccuggagucccuggaggaccucgaccugagcuacaacaaccugcgccagguccccugggccggcaucggcgccaugcccgcccuccacacgcugaaccuggaccacaaccucaucgacgcgcugcccccgggggccuucgcccagcugggccagcucucccggcuggaccugaccagcaaccgccucgccacccuggcccccgacccccuguucucccgggggcgcgacgcggaggccagccccgccccgcucgugcuguccuucagcggcaacccccugcacugcaacugcgagcuccuguggcugcggcgccuggcccggcccgacgaccucgagaccugcgccuccccgcccggccuggcggggcgcuacuucugggccgugcccgagggcgaguucagcugcgagccgccccugaucgcccggcacacgcagcgccucuggguccuggaggggcagcgcgccacccugcggugccgcgcccucggcgaccccgcgcccaccaugcacuggguggggcccgacgaccggcuggugggcaacuccagccgcgcccgggccuuccccaacggcacccuggagaucggggucacgggcgccggggacgcgggcggguacacgugcaucgccaccaaccccgccggcgaggccaccgcccgcguggagcuccgggugcuggcgcugccccacggcgggaacagcuccgccgagggcgggcgccccggcccgagcgacaucgccgccuccgcccggaccgcggccgagggggagggcacccucgagagcgagcccgccguccaggugaccgaggugaccgccacguccggccuggucagcugggggcccggccgccccgccgacccgguguggauguuccagauccaguacaacuccagcgaggacgagacccugaucuaccggaucgugcccgcguccagccaccacuuccuccugaagcaccugguccccggggccgacuacgaccucugccugcuggcccucucccccgccgcgggcccgagcgaccugaccgccacccgccugcucggcugcgcccacuucuccacgcugcccgccagcccccugugccacgcccuccaggcgcacgugcucgggggcacccugaccguggccgucgggggcgugcuggucgccgcccugcugguguucaccguggcccuccugguccgggggcgcggcgcgggcaacgggcggcugccccucaagcugucccacgugcagagccagacgaacggcgggccgucccccacccccaaggcccacccgccccgcagcccgccgccccggccccagcgcuccugcagccuggaccucggcgacgccgggugcuacggcuacgcccggcgccugggcggggccugggcgcgccggagccacuccgugcacggcgggcugcucggcgccgggugccgcggcgucggcgggagcgccgagcggcuggaggaguccgugguguga

SEQ ID NO: 1570 - RNA, 1908 nt, Artificial Sequence
  derived and/or modified sequence opt2 from fibronectin__Homo_sapiens__EAW74574
auggcccccccccuccuccuccuccuccucgccuccggcgccgccgccugcccccuccccugcgucugccagaaccucuccgagucccucuccacccucugcgcccaccgcggccuccucuucgucccccccaacgucgaccgccgcaccgucgagcuccgccucgccgacaacuucauccaggcccucggcccccccgacuuccgcaacaugaccggccucgucgaccucacccucucccgcaacgccaucacccgcaucggcgcccgcgccuucggcgaccucgagucccuccgcucccuccaccucgacggcaaccgccucgucgagcucggcaccggcucccuccgcggccccgucaaccuccagcaccucauccucuccggcaaccagcucggccgcaucgcccccggcgccuucgacgacuuccucgagucccucgaggaccucgaccucuccuacaacaaccuccgccagguccccugggccggcaucggcgccaugcccgcccuccacacccucaaccucgaccacaaccucaucgacgcccucccccccggcgccuucgcccagcucggccagcucucccgccucgaccucaccuccaaccgccucgccacccucgcccccgacccccucuucucccgcggccgcgacgccgaggccucccccgccccccucguccucuccuucuccggcaacccccuccacugcaacugcgagcuccucuggcuccgccgccucgcccgccccgacgaccucgagaccugcgccuccccccccggccucgccggccgcuacuucugggccguccccgagggcgaguucuccugcgagcccccccucaucgcccgccacacccagcgccucuggguccucgagggccagcgcgccacccuccgcugccgcgcccucggcgaccccgcccccaccaugcacugggucggccccgacgaccgccucgucggcaacuccucccgcgcccgcgccuuccccaacggcacccucgagaucggcgucaccggcgccggcgacgccggcggcuacaccugcaucgccaccaaccccgccggcgaggccaccgcccgcgucgagcuccgcguccucgcccucccccacggcggcaacuccuccgccgagggcggccgccccggccccuccgacaucgccgccuccgcccgcaccgccgccgagggcgagggcacccucgaguccgagcccgccguccaggucaccgaggucaccgccaccuccggccucgucuccuggggccccggccgccccgccgaccccgucuggauguuccagauccaguacaacuccuccgaggacgagacccucaucuaccgcaucguccccgccuccucccaccacuuccuccucaagcaccucguccccggcgccgacuacgaccucugccuccucgcccucucccccgccgccggccccuccgaccucaccgccacccgccuccucggcugcgcccacuucuccacccuccccgccuccccccucugccacgcccuccaggcccacguccucggcggcacccucaccgucgccgucggcggcguccucgucgccgcccuccucgucuucaccgucgcccuccucguccgcggccgcggcgccggcaacggccgccucccccucaagcucucccacguccagucccagaccaacggcggccccucccccacccccaaggcccaccccccccgcuccccccccccccgcccccagcgcuccugcucccucgaccucggcgacgccggcugcuacggcuacgcccgccgccucggcggcgccugggcccgccgcucccacuccguccacggcggccuccucggcgccggcugccgcggcgucggcggcuccgccgagcgccucgaggaguccgucgucuga

SEQ ID NO: 1571 - RNA, 1908 nt, Artificial Sequence
  derived and/or modified sequence opt3 from fibronectin__Homo_sapiens__EAW74574
auggcacccccucugcuccuucuguuguuagcuagcggcgcagccgcgugcccacugccgugugugugccagaaccuauccgagucucucucaacccugugugcucacagagggcuucuguucguucccccuaaugucgacaggcggacaguggaauugcgccucgccgauaacuuuauccaagcacugggaccacccgacuuccgaaauaugacuggucugguagaucucacguuaagucguaacgccauuaccagaauaggcgcuagggcauuuggggaccuggagagccuucgguccuugcaucuggauggaaaucgccuaguggaacucggcacagguucucugagagggccugucaaccuucagcaccugaucuugucgggaaaucagcucggcaggauugccccaggcgcuuucgacgauuuucuggagucauuagaagaccuggaucucagcuacaacaaucuucgccaggugcccugggccgggaucggagcgaugccugcacugcauacuuugaaccuagaccacaaucugauugaugcccucccaccgggugcuuucgcccaacugggccagcuuagucggcuggacuugaccuccaaccgacucgcaacacuggcucccgauccuuuauuuucuagagggagggacgccgaggcgagcccagcaccccugguucuauccuucucaggaaauccucuccauugcaacugugagcugcuuugguugcggcgucuggcccgcccagacgaucucgaaaccugcgcuagucccccgggccuggccgguagauauuuuugggcugugccugagggggaguucagcugugaacccccacuuaucgccaggcacacucagcggcugugggucuuggagggacagcgagcaacacuccgcugcagagcccugggcgacccugcucccaccaugcacugggugggcccagaugacagguuaguaggaaauucuucccgggcgcgcgcauuucccaacgggacgcuggaaauagguguuacuggcgccggggaugcuggaggcuacaccuguaucgccacaaacccugccggugaggccacugcuagaguggaacuaaggguccucgcccugccacaugggggcaauucaagcgcagagggaggccguccggggcccagugacauugcggcuucugcccggaccgcagccgaaggagaggguacacuugaguccgaaccugcugugcaagugaccgaggucacggccacuagcggcuugguuucgugggggccaggacgacccgcagauccuguguggauguuccagauccaguauaacucuuccgaagacgagacacugauuuacagaaucguaccagcuucaagucaccauuuucuccugaagcacuuagugcccggcgccgauuaugaccugugccuuuuggcgcucagcccggccgcugguccuuccgaucugaccgcaacuaggcuacuggggugugcccacuucucuacacucccagcuagcccccugugccaugcccuucaggcacacgucuugggcggaacccugacgguggcgguuggcgggguguuagucgccgcucuccugguguucaccguagcccuucugguucgcggacggggugcaggcaaugggagauugccucucaaacugucacaugugcaaagucagacaaacggaggccccuccccaacuccuaaggcucaucccccaaggagcccgccuccccgcccacagcgaucuugcucacuagaccugggugacgccggguguuacggcuaugcacggcgucucggaggcgccugggcuagaaggagucacagcguccacgggggacugcuuggcgcggguugccgcggggugggaggcuccgccgaacgguuggaggagucugucguguga

SEQ ID NO: 1572 - RNA, 1908 nt, Artificial Sequence
  derived and/or modified sequence opt4 from fibronectin__Homo_sapiens__EAW74574
auggcccccccccugcugcugcugcugcuggccagcggcgccgccgccugcccccugcccugcgugugccagaaccugagcgagagccugagcacccugugcgcccacagaggccugcuguucgugccccccaacguggacagaagaaccguggagcugagacuggccgacaacuucauccaggcccugggcccccccgacuucagaaacaugaccggccugguggaccugacccugagcagaaacgccaucaccagaaucggcgccagagccuucggcgaccuggagagccugagaagccugcaccuggacggcaacagacugguggagcugggcaccggcagccugagaggccccgugaaccugcagcaccugauccugagcggcaaccagcugggcagaaucgcccccggcgccuucgacgacuuccuggagagccuggaggaccuggaccugagcuacaacaaccugagacaggugcccugggccggcaucggcgccaugcccgcccugcacacccugaaccuggaccacaaccugaucgacgcccugccccccggcgccuucgcccagcugggccagcugagcagacuggaccugaccagcaacagacuggccacccuggcccccgacccccuguucagcagaggcagagacgccgaggccagccccgccccccuggugcugagcuucagcggcaacccccugcacugcaacugcgagcugcuguggcugagaagacuggccagacccgacgaccuggagaccugcgccagcccccccggccuggccggcagauacuucugggccgugcccgagggcgaguucagcugcgagcccccccugaucgccagacacacccagagacugugggugcuggagggccagagagccacccugagaugcagagcccugggcgaccccgcccccaccaugcacugggugggccccgacgacagacuggugggcaacagcagcagagccagagccuuccccaacggcacccuggagaucggcgugaccggcgccggcgacgccggcggcuacaccugcaucgccaccaaccccgccggcgaggccaccgccagaguggagcugagagugcuggcccugccccacggcggcaacagcagcgccgagggcggcagacccggccccagcgacaucgccgccagcgccagaaccgccgccgagggcgagggcacccuggagagcgagcccgccgugcaggugaccgaggugaccgccaccagcggccuggugagcuggggccccggcagacccgccgaccccguguggauguuccagauccaguacaacagcagcgaggacgagacccugaucuacagaaucgugcccgccagcagccaccacuuccugcugaagcaccuggugcccggcgccgacuacgaccugugccugcuggcccugagccccgccgccggccccagcgaccugaccgccaccagacugcugggcugcgcccacuucagcacccugcccgccagcccccugugccacgcccugcaggcccacgugcugggcggcacccugaccguggccgugggcggcgugcugguggccgcccugcugguguucaccguggcccugcuggugagaggcagaggcgccggcaacggcagacugccccugaagcugagccacgugcagagccagaccaacggcggccccagccccacccccaaggcccacccccccagaagccccccccccagaccccagagaagcugcagccuggaccugggcgacgccggcugcuacggcuacgccagaagacugggcggcgccugggccagaagaagccacagcgugcacggcggccugcugggcgccggcugcagaggcgugggcggcagcgccgagagacuggaggagagcgugguguga

SEQ ID NO: 1573 - RNA, 1908 nt, Artificial Sequence
  derived and/or modified sequence opt5 from fibronectin__Homo_sapiens__EAW74574
auggcucccccucugcuccugcuucugcucgccagcggcgccgcggcuugcccgcugcccugugugugccagaaccuuuccgagucucugagcacccucugugcccacagagggcugcuguucgucccucccaauguugaccggcgcacaguggaacucagacuggccgauaacuuuauccaagcucuuggaccucccgacuuccggaauaugacgggccugguggaucucacccugucccgcaacgccauuacaagaaucggggcucgggccuuuggagaccuugagucucugcgcagccuccaucuggauggcaauagacuggucgaacucgggaccggaucccugcggggcccugugaaccuucagcaccugauucucucuggcaaucagcuggggcgcaucgcgccgggagccuucgacgauuuucuugagagccuggaagaccucgaucuguccuacaacaaucugagacagguucccugggcuggcauuggggccaugccugcucuccauacacugaaccuugaccacaaucugaucgaugcccugcccccuggagcguucgcccaacucggccagcuuagccggcuggaccucaccucuaaccgccuggcuacacuggcccccgauccgcucuuuuccagagggcgggacgcugaggccagcccugcuccccuggugcuuucuuucuccggaaauccucugcauugcaacugugagcuccuguggcugcgcagacuugcccggcccgacgaucucgaaaccugcgcgucucccccuggccuggccggcagauauuuuugggcugucccggagggggaguucagcugugaacccccucugaucgcccgccacacgcagcggcucugggugcuggagggacagagagccacccuucgcugccgggcucugggcgaccccgccccuacaaugcacuggguugggcccgaugacagacucgugggaaauuccagccgcgcgcgggcuuuuccgaacggcacccuggaaauuggggucacaggagccggcgaugccggcggguacaccuguaucgcuacgaacccugccggagaggcuacagccagaguggaacugcgcgugcuugcgcucccccauggcgggaacuccucugccgagggaggccggccugggcccagcgacauugcugccuccgcuagaaccgccgcggaaggcgagggaacacuggagagcgaaccugccguccaaguuaccgaggugaccgcuacaucuggccugguguccugggggcccggacgcccggccgauccugucuggauguuccagauccaguauaauagcucugaagacgagacgcucauuuaccggaucgugcccgcuagcucccaccauuuucugcuuaagcaccugguucccggcgccgauuaugaccucugccugcuggcccuuucuccugcugcggggccgagcgaucucaccgccacaagacugcugggaugugcucacuucuccacccuccccgccagcccucugugccaugcccuucaggcucacgugcugggcgggacacucaccgucgccgugggcggaguucugguggcggcucugcuugucuucacgguggcccuccugguccggggccgcggggccggaaauggcagacugccccucaaacugucucaugugcaaucccagacaaacgggggaccuagccccaccccuaaggcucaucccccgcggucuccucccccuagaccccagcgcuccugcagccuugaccugggcgacgccggguguuacggcuaugcgcggagacucggaggcgcuugggcccgcagaucccacucuguucacgggggacugcugggcgccgggugccggggagugggcgggagcgcugaacgccuugaggaguccgucguguga

SEQ ID NO: 1574 - protein, 1098 aa, Artificial Sequence
  fibronectin__Homo_sapiens__A0A024RB01
MPPRQPPRQAGGGLSREFGKLLPALSHSPLGGLGSGSGSVAPGQGRAGAMGSRTPESPLHAVQLRWGPRRRPPLLPLLLLLLPPPPRVGGFNLDAEAPAVLSGPPGSFFGFSVEFYRPGTDGVSVLVGAPKANTSQPGVLQGGAVYLCPWGASPTQCTPIEFDSKGSRLLESSLSSSEGEEPVEYKSLQWFGATVRAHGSSILACAPLYSWRTEKEPLSDPVGTCYLSTDNFTRILEYAPCRSDFSWAAGQGYCQGGFSAEFTKTGRVVLGGPGSYFWQGQILSATQEQIAESYYPEYLINLVQGQLQTRQASSIYDDSYLGYSVAVGEFSGDDTEDFVAGVPKGNLTYGYVTILNGSDIRSLYNFSGEQMASYFGYAVAATDVNGDGLDDLLVGAPLLMDRTPDGRPQEVGRVYVYLQHPAGIEPTPTLTLTGHDEFGRFGSSLTPLGDLDQDGYNDVAIGAPFGGETQQGVVFVFPGGPGGLGSKPSQVLQPLWAASHTPDFFGSALRGGRDLDGNGYPDLIVGSFGVDKAVVYRGRPIVSASASLTIFPAMFNPEERSCSLEGNPVACINLSFCLNASGKHVADSIGFTVELQLDWQKQKGGVRRALFLASRQATLTQTLLIQNGAREDCREMKIYLRNESEFRDKLSPIHIALNFSLDPQAPVDSHGLRPALHYQSKSRIEDKAQILLDCGEDNICVPDLQLEVFGEQNHVYLGDKNALNLTFHAQNVGEGGAYEAELRVTAPPEAEYSGLVRHPGNFSSLSCDYFAVNQSRLLVCDLGNPMKAGASLWGGLRFTVPHLRDTKKTIQFDFQILSKNLNNSQSDVVSFRLSVEAQAQVTLNGVSKPEAVLFPVSDWHPRDQPQKEEDLGPAVHHVYELINQGPSSISQGVLELSCPQALEGQQLLYVTRVTGLNCTTNHPINPKGLELDPEGSLHHQQKREAPSRSSASSGPQILKCPEAECFRLRCELGPLHQQESQSLQLHFRVWAKTFLQREHQPFSLQCEAVYKALKMPYRILPRQLPQKERQVATAVQWTKAEGSYGVPLWIIILAILFGLLLLGLLIYILYKLGFFKRSLPYGTAMEKAQLKPPATSDA

SEQ ID NO: 1575 - RNA, 3297 nt, Artificial Sequence
  fibronectin__Homo_sapiens__EAW96782
augcccccccgccagcccccucggcaggcggggggagggcucagccgggaguuuggcaaacuccuccccgcguugagucauucgccucugggagguuuaggaagcggcuccgggucgguggccccaggacagggaagagcgggcgcuauggggagccggacgccagaguccccucuccacgccgugcagcugcgcuggggcccccggcgccgacccccgcugcugccgcugcuguugcugcugcugccgccgccacccagggucgggggcuucaacuuagacgcggaggccccagcaguacucucggggcccccgggcuccuucuucggauucucaguggaguuuuaccggccgggaacagacggggucagugugcuggugggagcacccaaggcuaauaccagccagccaggagugcugcaggguggugcugucuaccucuguccuuggggugccagccccacacagugcacccccauugaauuugacagcaaaggcucucggcuccuggaguccucacuguccagcucagagggagaggagccuguggaguacaaguccuugcagugguucggggcaacaguucgagcccauggcuccuccaucuuggcaugcgcuccacuguacagcuggcgcacagagaaggagccacugagcgaccccgugggcaccugcuaccucuccacagauaacuucacccgaauucuggaguaugcacccugccgcucagauuucagcugggcagcaggacaggguuacugccaaggaggcuucagugccgaguucaccaagacuggccgugugguuuuagguggaccaggaagcuauuucuggcaaggccagauccugucugccacucaggagcagauugcagaaucuuauuaccccgaguaccugaucaaccugguucaggggcagcugcagacucgccaggccaguuccaucuaugaugacagcuaccuaggauacucuguggcuguuggugaauucaguggugaugacacagaagacuuuguugcuggugugcccaaagggaaccucacuuacggcuaugucaccauccuuaauggcucagacauucgaucccucuacaacuucucaggggaacagauggccuccuacuuuggcuaugcaguggccgccacagacgucaauggggacgggcuggaugacuugcuggugggggcaccccugcucauggaucggaccccugacgggcggccucaggaggugggcagggucuacgucuaccugcagcacccagccggcauagagcccacgcccacccuuacccucacuggccaugaugaguuuggccgauuuggcagcuccuugaccccccugggggaccuggaccaggauggcuacaaugauguggccaucggggcucccuuugguggggagacccagcagggaguaguguuuguauuuccugggggcccaggagggcugggcucuaagccuucccagguucugcagccccugugggcagccagccacaccccagacuucuuuggcucugcccuucgaggaggccgagaccuggauggcaauggauauccugaucugauugugggguccuuugguguggacaaggcugugguauacaggggccgccccaucguguccgcuagugccucccucaccaucuuccccgccauguucaacccagaggagcggagcugcagcuuagaggggaacccuguggccugcaucaaccuuagcuucugccucaaugcuucuggaaaacacguugcugacuccauugguuucacaguggaacuucagcuggacuggcagaagcagaagggagggguacggcgggcacuguuccuggccuccaggcaggcaacccugacccagacccugcucauccagaauggggcucgagaggauugcagagagaugaagaucuaccucaggaacgagucagaauuucgagacaaacucucgccgauucacaucgcucucaacuucuccuuggacccccaagccccaguggacagccacggccucaggccagcccuacauuaucagagcaagagccggauagaggacaaggcucagaucuugcuggacuguggagaagacaacaucugugugccugaccugcagcuggaaguguuuggggagcagaaccauguguaccugggugacaagaaugcccugaaccucacuuuccaugcccagaaugugggugaggguggcgccuaugaggcugagcuucgggucaccgccccuccagaggcugaguacucaggacucgucagacacccagggaacuucuccagccugagcugugacuacuuugccgugaaccagagccgccugcuggugugugaccugggcaaccccaugaaggcaggagccagucugugggguggccuucgguuuacagucccucaucuccgggacacuaagaaaaccauccaguuugacuuccagauccucagcaagaaucucaacaacucgcaaagcgacgugguuuccuuucggcucuccguggaggcucaggcccaggucacccugaacggugucuccaagccugaggcagugcuauucccaguaagcgacuggcauccccgagaccagccucagaaggaggaggaccugggaccugcuguccaccaugucuaugagcucaucaaccaaggccccagcuccauuagccagggugugcuggaacucagcuguccccaggcucuggaaggucagcagcuccuauaugugaccagaguuacgggacucaacugcaccaccaaucaccccauuaacccaaagggccuggaguuggaucccgaggguucccugcaccaccagcaaaaacgggaagcuccaagccgcagcucugcuuccucgggaccucagauccugaaaugcccggaggcugaguguuucaggcugcgcugugagcucgggccccugcaccaacaagagagccaaagucugcaguugcauuuccgagucugggccaagacuuucuugcagcgggagcaccagccauuuagccugcagugugaggcuguguacaaagcccugaagaugcccuaccgaauccugccucggcagcugccccaaaaagagcgucagguggccacagcugugcaauggaccaaggcagaaggcagcuauggcgucccacuguggaucaucauccuagccauccuguuuggccuccugcuccuaggucuacucaucuacauccucuacaagcuuggauucuucaaacgcucccucccauauggcaccgccauggaaaaagcucagcucaagccuccagccaccucugaugccuga

SEQ ID NO: 1576 - RNA, 3297 nt, Artificial Sequence
  derived and/or modified sequence opt1 from fibronectin__Homo_sapiens__EAW96782
augcccccgcgccagcccccccggcaggccggcgggggccugagccgcgaguucgggaagcuccugcccgcccugucccacagcccgcucggcgggcugggcuccggcagcggguccguggcgcccggccaggggcgggccggcgccauggggagccgcacccccgaguccccccugcacgccguccagcuccgguggggcccgcgccggcgccccccccugcugccccuccugcugcuccugcugccgccccccccccgggugggcggguucaaccucgacgccgaggcgccggccgugcugagcggcccccccggguccuucuucggcuucagcgucgaguucuaccgccccggcaccgacgggguguccgugcuggucggcgccccgaaggccaacacgagccagcccggggugcuccagggcggggcgguguaccugugccccuggggcgccucccccacccagugcaccccgaucgaguucgacagcaagggcucccggcugcucgagagcucccugagcuccagcgagggggaggagcccgucgaguacaagagccugcagugguucggcgccaccgugcgcgcccacggguccagcauccucgccugcgcgccccuguacuccuggcggacggagaaggagccccugagcgacccggugggcaccugcuaccucuccaccgacaacuucacccgcauccuggaguacgcccccugccggagcgacuucuccugggccgccgggcagggcuacugccagggcggguucagcgccgaguucacgaagaccggccgcgucgugcuggggggccccggguccuacuucuggcagggccagauccucagcgcgacccaggagcagaucgccgaguccuacuacccggaguaccugaucaaccuggugcagggccagcuccagacccggcaggccagcuccaucuacgacgacagcuaccugggguacuccgucgccgugggcgaguucagcggggacgacacggaggacuucguggccggcguccccaagggcaaccugaccuacggguacgugaccauccucaacggcuccgacauccgcagccuguacaacuucuccggggagcagauggcgagcuacuucggcuacgccguggccgccaccgacgucaacggggacggccuggacgaccuccuggugggcgccccccugcucauggaccggacgcccgacgggcgcccgcaggaggugggccgggucuacguguaccugcagcaccccgcggggaucgagcccacccccacccugacccucacgggccacgacgaguucgggcgcuucggcagcucccugaccccgcugggcgaccucgaccaggacggguacaacgacgucgccaucggcgcccccuucgggggcgagacccagcagggggugguguucgucuuccccggcggccccgggggccuggggagcaagccgucccaggugcugcagccccugugggccgcgagccacacccccgacuucuucggcuccgcccuccgcgggggccgggaccuggacggcaacggguaccccgaccugaucgugggcagcuucggggucgacaaggccgugguguaccgcggccggccgaucgucuccgccagcgccucccucacgaucuuccccgcgauguucaaccccgaggagcgcagcugcucccuggagggcaaccccguggccugcaucaaccugagcuucugccucaacgccuccgggaagcacguggccgacagcaucggcuucaccgucgagcugcagcuggacuggcagaagcagaaggggggcgugcggcgcgcccucuuccuggcgucccggcaggccacccugacccagacgcuccugauccagaacggggcccgcgaggacugccgggagaugaagaucuaccugcgcaacgagagcgaguuccgggacaagcucuccccgauccacaucgcccugaacuucagccuggacccccaggcccccguggacagccacggccuccgccccgcgcugcacuaccaguccaagagccggaucgaggacaaggcccagauccugcucgacugcggcgaggacaacaucugcgucccggaccugcagcuggagguguucggggagcagaaccacguguaccucggcgacaagaacgcccugaaccugaccuuccacgcccagaacgucggggagggcggggcguacgaggccgagcuccgcgugaccgccccccccgaggccgaguacuccggccuggugcggcacccgggcaacuucagcucccugagcugcgacuacuucgccgucaaccagucccgccuccuggugugcgaccuggggaaccccaugaaggcgggcgccagccucugggggggccugcgguucaccgugccccaccugcgcgacacgaagaagaccauccaguucgacuuccagauccucuccaagaaccugaacaacagccaguccgacgucgugagcuuccggcuguccguggaggcccaggcccaggucacccucaacggggugagcaagcccgaggccgugcuguucccggucuccgacuggcacccccgcgaccagccccagaaggaggaggaccugggccccgcggugcaccacguguacgagcucaucaaccagggcccgagcuccaucagccaggggguccuggagcuguccugcccccaggcccucgagggccagcagcugcuguacgugacccgcgugacggggcucaacugcaccaccaaccaccccaucaaccccaagggccuggagcuggacccggagggcagccuccaccaccagcagaagcgggaggcccccagccgcuccagcgccuccagcgggccccagauccugaagugccccgaggccgagugcuuccggcugcgcugcgagcucggcccgcugcaccagcaggagucccagagccugcagcuccacuuccgggucugggcgaagaccuuccugcagcgcgagcaccagcccuucucccugcagugcgaggccguguacaaggcccucaagaugcccuaccggauccugccccgccagcugccgcagaaggagcggcagguggccaccgcgguccaguggacgaaggccgaggggagcuacggcgugccccucuggaucaucauccuggccauccuguucgggcuccugcugcucggccugcugaucuacauccucuacaagcugggcuucuucaagcgcucccugcccuacgggaccgccauggagaaggcccagcucaagcccccggcgaccagcgacgccuga

SEQ ID NO: 1577 - RNA, 3297 nt, Artificial Sequence
  derived and/or modified sequence opt2 from fibronectin__Homo_sapiens__EAW96782
augcccccccgccagcccccccgccaggccggcggcggccucucccgcgaguucggcaagcuccuccccgcccucucccacuccccccucggcggccucggcuccggcuccggcuccgucgcccccggccagggccgcgccggcgccaugggcucccgcacccccgaguccccccuccacgccguccagcuccgcuggggcccccgccgccgccccccccuccucccccuccuccuccuccuccuccccccccccccccgcgucggcggcuucaaccucgacgccgaggcccccgccguccucuccggcccccccggcuccuucuucggcuucuccgucgaguucuaccgccccggcaccgacggcgucuccguccucgucggcgcccccaaggccaacaccucccagcccggcguccuccagggcggcgccgucuaccucugccccuggggcgccucccccacccagugcacccccaucgaguucgacuccaagggcucccgccuccucgaguccucccucuccuccuccgagggcgaggagcccgucgaguacaagucccuccagugguucggcgccaccguccgcgcccacggcuccuccauccucgccugcgccccccucuacuccuggcgcaccgagaaggagccccucuccgaccccgucggcaccugcuaccucuccaccgacaacuucacccgcauccucgaguacgcccccugccgcuccgacuucuccugggccgccggccagggcuacugccagggcggcuucuccgccgaguucaccaagaccggccgcgucguccucggcggccccggcuccuacuucuggcagggccagauccucuccgccacccaggagcagaucgccgaguccuacuaccccgaguaccucaucaaccucguccagggccagcuccagacccgccaggccuccuccaucuacgacgacuccuaccucggcuacuccgucgccgucggcgaguucuccggcgacgacaccgaggacuucgucgccggcguccccaagggcaaccucaccuacggcuacgucaccauccucaacggcuccgacauccgcucccucuacaacuucuccggcgagcagauggccuccuacuucggcuacgccgucgccgccaccgacgucaacggcgacggccucgacgaccuccucgucggcgccccccuccucauggaccgcacccccgacggccgcccccaggaggucggccgcgucuacgucuaccuccagcaccccgccggcaucgagcccacccccacccucacccucaccggccacgacgaguucggccgcuucggcuccucccucaccccccucggcgaccucgaccaggacggcuacaacgacgucgccaucggcgcccccuucggcggcgagacccagcagggcgucgucuucgucuuccccggcggccccggcggccucggcuccaagcccucccagguccuccagccccucugggccgccucccacacccccgacuucuucggcuccgcccuccgcggcggccgcgaccucgacggcaacggcuaccccgaccucaucgucggcuccuucggcgucgacaaggccgucgucuaccgcggccgccccaucgucuccgccuccgccucccucaccaucuuccccgccauguucaaccccgaggagcgcuccugcucccucgagggcaaccccgucgccugcaucaaccucuccuucugccucaacgccuccggcaagcacgucgccgacuccaucggcuucaccgucgagcuccagcucgacuggcagaagcagaagggcggcguccgccgcgcccucuuccucgccucccgccaggccacccucacccagacccuccucauccagaacggcgcccgcgaggacugccgcgagaugaagaucuaccuccgcaacgaguccgaguuccgcgacaagcucucccccauccacaucgcccucaacuucucccucgacccccaggcccccgucgacucccacggccuccgccccgcccuccacuaccaguccaagucccgcaucgaggacaaggcccagauccuccucgacugcggcgaggacaacaucugcguccccgaccuccagcucgaggucuucggcgagcagaaccacgucuaccucggcgacaagaacgcccucaaccucaccuuccacgcccagaacgucggcgagggcggcgccuacgaggccgagcuccgcgucaccgccccccccgaggccgaguacuccggccucguccgccaccccggcaacuucuccucccucuccugcgacuacuucgccgucaaccagucccgccuccucgucugcgaccucggcaaccccaugaaggccggcgccucccucuggggcggccuccgcuucaccgucccccaccuccgcgacaccaagaagaccauccaguucgacuuccagauccucuccaagaaccucaacaacucccaguccgacgucgucuccuuccgccucuccgucgaggcccaggcccaggucacccucaacggcgucuccaagcccgaggccguccucuuccccgucuccgacuggcacccccgcgaccagccccagaaggaggaggaccucggccccgccguccaccacgucuacgagcucaucaaccagggccccuccuccaucucccagggcguccucgagcucuccugcccccaggcccucgagggccagcagcuccucuacgucacccgcgucaccggccucaacugcaccaccaaccaccccaucaaccccaagggccucgagcucgaccccgagggcucccuccaccaccagcagaagcgcgaggcccccucccgcuccuccgccuccuccggcccccagauccucaagugccccgaggccgagugcuuccgccuccgcugcgagcucggcccccuccaccagcaggagucccagucccuccagcuccacuuccgcgucugggccaagaccuuccuccagcgcgagcaccagcccuucucccuccagugcgaggccgucuacaaggcccucaagaugcccuaccgcauccucccccgccagcucccccagaaggagcgccaggucgccaccgccguccaguggaccaaggccgagggcuccuacggcgucccccucuggaucaucauccucgccauccucuucggccuccuccuccucggccuccucaucuacauccucuacaagcucggcuucuucaagcgcucccuccccuacggcaccgccauggagaaggcccagcucaagccccccgccaccuccgacgccuga

SEQ ID NO: 1578 - RNA, 3297 nt, Artificial Sequence
  derived and/or modified sequence opt3 from fibronectin__Homo_sapiens__EAW96782
augcccccuagacagccaccgaggcaagccggcgggggacugagccgggaguucgguaagcuccuucccgcucugucccacucuccuuugggcggguuaggaucaggcagugguagcguggcaccagggcagggacgcgccggcgcgaugggcucccgaacccccgaaucuccucugcaugcuguccagcuacguugggggccaagaaggcggcccccucuccugccacuucuguugcuccugcugccgcccccuccacgcguuggagguuuuaaccucgacgccgaggcacccgccguguuaucgggcccuccagggucauucuuuggauucagcguagaauuuuacagacccggcacagauggugugaguguccuggugggggcuccgaaagcaaauacuucccagccuggaguucuucaaggcggcgccguguauuugugccccuggggagcuucuccaacgcaguguaccccuaucgaguucgacagcaagggguccaggcugcuagaaucaagucucucuagcuccgagggugaggaacccgucgaguacaaaucacugcagugguuuggcgccacagugcgggcgcacgggagcaguauucuugcaugcgccccacuguauucuuggcgcacugaaaaggagcccuuguccgauccuguaggaaccuguuaccucagcacagacaacuucacccgaauacuggaguaugcuccaugcagaucggauuuuucuugggccgcaggccaggguuacugucaagggggcuucuccgcugaauuuacuaaaacaggaaggguuguguuaggcgggccgggaucauauuucuggcagggucagauccugagugccacccaggagcaaauugcggaaagcuacuaccccgaguaucucaucaaucuuguccagggccagcugcaaacgcggcaggccuccucuauuuacgacgauagcuauuugggguacucaguggcagugggagaauuuaguggcgacgauacugaggacuucgucgcugguguuccuaaggggaaccuaaccuauggcuacgugacaauccugaauggauccgauauacguagccucuauaacuucucuggcgagcagauggccucauacuuuggguacgcuguagccgcaacugacgugaauggagauggucuggacgaccuucuggucggcgccccauugcucauggaucgcacccccgacgggagaccucaggaagugggaaggguuuauguguaccugcaacauccagcuggcaucgagcccacaccgaccuuaacgcugacuggucacgaugaguucgggcgguuuggcaguagccuaacaccucucggagaccuggaucaggacggcuauaacgaugucgcgauuggggcaccauucggaggcgagacccagcagggugugguauuuguuuuccccgggggaccuggcggucuuggcuccaagcccucucaaguguugcagccacugugggccgcuucgcauacuccugacuuuuucgggagcgcccuccgaggaggccgcgaucuggacgggaauggauaccccgaucuuaucgucggcuccuuugguguggacaaagcagucguguauagagggaggccaauuguuucagccagugcuucucugacaaucuucccggccauguuuaacccugaagaacggagcugcuccuuggagggaaaucccguggcauguauaaaccucucauucugccugaaugcgagcggcaagcacguagcugacucuauugguuuuaccgucgaauuacagcuggauuggcagaaacaaaagggcggggugcgcagagcccuauuccucgcauccaggcaggccacgcugacccagacacuuuugauccagaacggagcucgugaggacugucgggaaaugaaaauuuaccugcgaaaugagagugaguucagagauaagcucagcccaauccacaucgcccugaacuuuucuuuagacccccaagcaccuguugauucccauggccugaggccagcccuucacuaucagucaaagagucgcauugaagacaaagcucagauauugcucgauugcggggaggacaacaucugugugcccgaucugcaacuagaagucuucggagagcagaaucauguguaccugggcgacaagaacgcgcucaaucugacuuuucacgcccagaacguaggugaagggggagcuuacgaggcagagcuucgggugaccgccccuccggaagcugaguauagcggcuugguuagacacccagguaauuucucgucccugucuugcgauuacuuugccgucaaccagagcagguuacucgugugcgaccugggcaaucccaugaaagcaggggcgucacuuuggggaggccugcgcuucacagugccucauuugcgagauacuaagaaaaccauucaauuugacuuccagauccucaguaagaaccugaauaacucccagucugacgucguuagcuuucggcuauccguggaagcccaggcucaagugacacugaaugggguaucaaaaccagaggccguccucuuccccgugagcgauuggcacccucgugaccagccgcagaaggaagaggaucugggacccgcaguucaucacguguaugagcuuauaaaccagggcccaaguucuauuucccaaggugucuuggaacugagcuguccucaggcuuuagaggggcagcaacuccuguacgugaccagaguuacuggacuuaauugcacgacaaaccaucccaucaauccaaagggccuggaacuagacccugagggcucgcuccaccaccagcagaaaagggaagcccccucacgcucuagugcauccagcgggccacagauccugaaguguccggaggccgagugcuuucgguugagaugugaacugggaccuuuacaucaacaggagucucagagccuccagcugcacuucagggugugggcuaaaaccuuucuucaacgagaacaucagcccuucucccugcagugcgaggcgguauauaaggccuugaaaaugccauaccgcauucucccccggcagcugccucaaaaggaaagacaggucgcaacugcugugcaguggaccaaggccgaggguucauauggcgugccacuauggaucauuauacuggccauccuuuucgggcuccuguugcugggauuacucauuuacauccuguacaaacuuggcuuuuucaagaggagucugcccuaugguacagcuauggagaaagcacaguugaagccuccggccaccagcgaugcguga

SEQ ID NO: 1579 - RNA, 3297 nt, Artificial Sequence
  derived and/or modified sequence opt4 from fibronectin__Homo_sapiens__EAW96782
augccccccagacagccccccagacaggccggcggcggccugagcagagaguucggcaagcugcugcccgcccugagccacagcccccugggcggccugggcagcggcagcggcagcguggcccccggccagggcagagccggcgccaugggcagcagaacccccgagagcccccugcacgccgugcagcugagauggggccccagaagaagacccccccugcugccccugcugcugcugcugcugccccccccccccagagugggcggcuucaaccuggacgccgaggcccccgccgugcugagcggcccccccggcagcuucuucggcuucagcguggaguucuacagacccggcaccgacggcgugagcgugcuggugggcgcccccaaggccaacaccagccagcccggcgugcugcagggcggcgccguguaccugugccccuggggcgccagccccacccagugcacccccaucgaguucgacagcaagggcagcagacugcuggagagcagccugagcagcagcgagggcgaggagcccguggaguacaagagccugcagugguucggcgccaccgugagagcccacggcagcagcauccuggccugcgccccccuguacagcuggagaaccgagaaggagccccugagcgaccccgugggcaccugcuaccugagcaccgacaacuucaccagaauccuggaguacgcccccugcagaagcgacuucagcugggccgccggccagggcuacugccagggcggcuucagcgccgaguucaccaagaccggcagaguggugcugggcggccccggcagcuacuucuggcagggccagauccugagcgccacccaggagcagaucgccgagagcuacuaccccgaguaccugaucaaccuggugcagggccagcugcagaccagacaggccagcagcaucuacgacgacagcuaccugggcuacagcguggccgugggcgaguucagcggcgacgacaccgaggacuucguggccggcgugcccaagggcaaccugaccuacggcuacgugaccauccugaacggcagcgacaucagaagccuguacaacuucagcggcgagcagauggccagcuacuucggcuacgccguggccgccaccgacgugaacggcgacggccuggacgaccugcuggugggcgccccccugcugauggacagaacccccgacggcagaccccaggaggugggcagaguguacguguaccugcagcaccccgccggcaucgagcccacccccacccugacccugaccggccacgacgaguucggcagauucggcagcagccugaccccccugggcgaccuggaccaggacggcuacaacgacguggccaucggcgcccccuucggcggcgagacccagcagggcgugguguucguguuccccggcggccccggcggccugggcagcaagcccagccaggugcugcagccccugugggccgccagccacacccccgacuucuucggcagcgcccugagaggcggcagagaccuggacggcaacggcuaccccgaccugaucgugggcagcuucggcguggacaaggccgugguguacagaggcagacccaucgugagcgccagcgccagccugaccaucuuccccgccauguucaaccccgaggagagaagcugcagccuggagggcaaccccguggccugcaucaaccugagcuucugccugaacgccagcggcaagcacguggccgacagcaucggcuucaccguggagcugcagcuggacuggcagaagcagaagggcggcgugagaagagcccuguuccuggccagcagacaggccacccugacccagacccugcugauccagaacggcgccagagaggacugcagagagaugaagaucuaccugagaaacgagagcgaguucagagacaagcugagccccauccacaucgcccugaacuucagccuggacccccaggcccccguggacagccacggccugagacccgcccugcacuaccagagcaagagcagaaucgaggacaaggcccagauccugcuggacugcggcgaggacaacaucugcgugcccgaccugcagcuggagguguucggcgagcagaaccacguguaccugggcgacaagaacgcccugaaccugaccuuccacgcccagaacgugggcgagggcggcgccuacgaggccgagcugagagugaccgccccccccgaggccgaguacagcggccuggugagacaccccggcaacuucagcagccugagcugcgacuacuucgccgugaaccagagcagacugcuggugugcgaccugggcaaccccaugaaggccggcgccagccuguggggcggccugagauucaccgugccccaccugagagacaccaagaagaccauccaguucgacuuccagauccugagcaagaaccugaacaacagccagagcgacguggugagcuucagacugagcguggaggcccaggcccaggugacccugaacggcgugagcaagcccgaggccgugcuguuccccgugagcgacuggcaccccagagaccagccccagaaggaggaggaccugggccccgccgugcaccacguguacgagcugaucaaccagggccccagcagcaucagccagggcgugcuggagcugagcugcccccaggcccuggagggccagcagcugcuguacgugaccagagugaccggccugaacugcaccaccaaccaccccaucaaccccaagggccuggagcuggaccccgagggcagccugcaccaccagcagaagagagaggcccccagcagaagcagcgccagcagcggcccccagauccugaagugccccgaggccgagugcuucagacugagaugcgagcugggcccccugcaccagcaggagagccagagccugcagcugcacuucagagugugggccaagaccuuccugcagagagagcaccagcccuucagccugcagugcgaggccguguacaaggcccugaagaugcccuacagaauccugcccagacagcugccccagaaggagagacagguggccaccgccgugcaguggaccaaggccgagggcagcuacggcgugccccuguggaucaucauccuggccauccuguucggccugcugcugcugggccugcugaucuacauccuguacaagcugggcuucuucaagagaagccugcccuacggcaccgccauggagaaggcccagcugaagccccccgccaccagcgacgccuga

SEQ ID NO: 1580 - RNA, 3297 nt, Artificial Sequence
  derived and/or modified sequence opt5 from fibronectin__Homo_sapiens__EAW96782
augcccccuagacagccgccccggcaagccggcgggggacugagccgcgaguucggcaagcuccugccugcucuuucccacucuccccucgggggacucggcagcggguccggaucuguggccccuggccagggcagagcgggggcuaugggaagccggacccccgaauccccucugcaugccguccagcuucgcuggggcccgagacggagacccccucugcucccccugcugcuccugcuucugccucccccgccucgcguugggggauuuaaccucgacgccgaggcucccgccgugcugucuggcccucccgggagcuucuuuggauucuccguggaauuuuaccggcccggcacagauggcgucagcgugcuuguuggggcuccuaaagccaauacgucucagccgggagugcugcaaggcggggcggucuaucucugccccuggggagccuccccuacccaguguacacccaucgaguucgacagcaagggcucucgccugcuggaauccagccucucuuccagcgagggggaggaaccuguggaguacaaaucccugcagugguuuggagcuaccguuagagcccacggcucuagcauucuugcuugcgcgccccuguauuccuggcggacagaaaaggagccgcucagcgauccugugggcaccuguuaccugucuacagacaacuucacccgcauccuugaguaugcccccugcagauccgauuuuagcugggccgcugggcagggauacugucaaggcggguucucugccgaauuuacgaaaaccggacgggucgugcugggcgggccuggcagcuauuucuggcagggacagauucucuccgcuacacaggagcaaaucgccgaaucuuacuaccccgaguaucugauuaaucuggugcagggccagcuccaaacccgccaggccagcuccaucuacgacgauagcuaucugggguacucugucgcuguuggagaauuuuccggcgacgauacagaggacuucguggcgggggugccuaagggaaaccuuaccuauggcuacgucacgauccugaaugggagcgauauuagaucucucuauaacuucuccggcgagcagauggccagcuacuuuggauacgcuguggccgccacagacguuaauggcgaugggcuggacgaccuucuggugggagcuccccuccugauggaucggaccccggacggcagaccucaggaagucgggcgcguguauguuuaccugcaacaucccgccggaaucgagcccacaccuacccucacccugacaggccacgaugaguucgggcgguuuggcuccucucuuacgccgcugggagaccucgaucaggacggcuauaacgauguggcgauuggggcucccuucggaggcgaaacccagcagggggucguguuugucuucccuggaggccccgggggccugggaagcaagccuucccaagugcugcagccccuuugggccgccucucauacaccugacuuuuucggcagcgcucucagagggggacgcgaucuggacggcaauggguaccccgaucugaucguuggauccuuuggcguggacaaagccgucguguaucggggcagaccgauuguuagcgcuucugccucccucaccaucuucccugcgauguuuaaccccgaggaacgcagcugcucucuggaggggaauccuguggccuguauuaaccuuuccuucugccugaaugcuagcggaaagcacgucgccgacucuaucggcuuuacaguggaacuccagcuggauuggcagaaacaaaaagggggagugcggagagcucuguuccuugccagccgccaggcgacccucacgcagacacugcugauccagaacggcgcccgggaggacuguagagaaaugaagauuuaccuccgcaaugaguccgaguuccgggauaagcugagccccauccacauugcucuuaacuuuucucuggacccgcaagccccuguugauucccaugggcucagacccgcucugcacuaucagagcaagucccggaucgaagacaaagcccagauucugcuugauugcggagaggacaacaucugugucccugaucuccaacuggaaguguucggcgagcagaaucauguguaccugggcgacaagaacgcccucaaucugaccuuucacgcucagaacgucggggaaggaggcgcguacgaggccgagcuucgcgugaccgcuccucccgaagccgaguauucugggcugguuagacaccccggaaauuucagcucccucucuugcgauuacuuugccgugaaccagagccggcugcuggucugcgaccuuggcaauccgaugaaagcuggggccucccucuggggaggccugagauucacagugccccaucugcgcgauaccaagaaaacaauccaauuugacuuccagauucucucuaagaaccugaauaacagccaguccgacguugugagcuuucggcuuucugucgaagcgcaggcucaagugacgcugaauggcguuuccaaaccugaggccgugcuguuccccgucagcgauuggcacccuagagaccagccccagaaggaagaggaucuggggccugccgugcaucacguguaugagcugaucaaccagggaccgucuuccauuagccaaggcguccuugaacugucuuguccccaggcucucgaggggcagcaacugcucuacguuacccgcgugacaggacugaauugcaccacaaaccauccuaucaaucccaagggccuugaacuggacccugaggggucccuccaccaccagcagaaaagagaagcccccagccgguccagcgcgucuagcggaccgcagauucugaaguguccugaggcugagugcuuucgccugagaugugaacuuggcccccugcaucaacaggagucccagucucuccagcugcacuuccgggugugggccaaaaccuuucuccaacgcgaacaucagcccuucagccugcagugcgaggccgucuauaaggcucuuaaaaugccuuacagaauccugccccggcagcucccucaaaaggaacgccagguggccacggcuguucaguggaccaaggccgagggcuccuauggggugccgcuguggaucauuauccuggcgauucuuuucggacugcuccugcucggccugcuuaucuacauucuguacaaacugggguuuuucaagagaucucuccccuauggaacagccauggagaaagcucagcugaagccucccgccaccagcgaugcuuga

SEQ ID NO: 1581 - protein, 1198 aa, Artificial Sequence
  fibronectin__Homo_sapiens__A0A024RDT9
MAEHPPLLDTTQILSSDISLLSAPIVSADGTQQVILVQVNPGEAFTIRREDGQFQCITGPAQVPMMSPNGSVPPIYVPPGYAPQVIEDNGVRRVVVVPQAPEFHPGSHTVLHRSPHPPLPGFIPVPTMMPPPPRHMYSPVTGAGDMTTQYMPQYQSSQVYGDVDAHSTHGRSNFRDERSSKTYERLQKKLKDRQGTQKDKMSSPPSSPQKCPSPINEHNGLIKGQIAGGINTGSAKIKSGKGKGGTQVDTEIEEKDEETKAFEALLSNIVKPVASDIQARTVVLTWSPPSSLINGETDESSVPELYGYEVLISSTGKDGKYKSVYVGEETNITLNDLKPAMDYHAKVQAEYNSIKGTPSEAEIFTTLSCEPDIPNPPRIANRTKNSLTLQWKAPSDNGSKIQNFVLEWDEGKGNGEFCQCYMGSQKQFKITKLSPAMGCKFRLSARNDYGTSGFSEEVLYYTSGCAPSMPASPVLTKAGITWLSLQWSKPSGTPSDEGISYILEMEEETSGYGFKPKYDGEDLAYTVKNLRRSTKYKFKVIAYNSEGKSNPSEVVEFTTCPDKPGIPVKPSVKGKIHSHSFKITWDPPKDNGGATINKYVVEMAEGSNGNKWEMIYSGATREHLCDRLNPGCFYRLRVYCISDGGQSAVSESLLVQTPAVPPGPCLPPRLQGRPKAKEIQLRWGPPLVDGGSPISCYSVEMSPIEKDEPREVYQGSEVECTVSSLLPGKTYSFRLRAANKMGFGPFSEKCDITTAPGPPDQCKPPQVTCRSATCAQVNWEVPLSNGTDVTEYRLEWGGVEGSMQICYCGPGLSYEIKGLSPATTYYCRVQALSVVGAGPFSEVVACVTPPSVPGIVTCLQEISDDEIENPHYSPSTCLAISWEKPCDHGSEILAYSIDFGDKQSLTVGKVTSYIINNLQPDTTYRIRIQALNSLGAGPFSHMIKLKTKPLPPDPPRLECVAFSHQNLKLKWGEGTPKTLSTDSIQYHLQMEDKNGRFVSLYRGPCHTYKVQRLNESTSYKFCIQACNEAGEGPLSQEYIFTTPKSVPAALKAPKIEKVNDHICEITWECLQPMKGDPVIYSLQVMLGKDSEFKQIYKGPDSSFRYSSLQLNCEYRFRVCAIRQCQDSLGHQDLVGPYSTTVLFISQRTEPPASTNRDTVESTRTRRALSDEQCAAVILVLFAFFSILIAFIIQYFVIK

SEQ ID NO: 1582 - RNA, 3597 nt, Artificial Sequence
  fibronectin__Homo_sapiens__EAX08808
auggcagaacauccaccacuacuggauacaacucagaucuuaaguagugauauuucucuuuugucugccccuauuguaagugcagauggaacacaacagguuauucugguacaaguuaacccaggagaagcauuuacaauaagaagagaagauggacaguuucagugcauuacagguccugcucagguuccaaugauguccccaaaugguucugugccuccuaucuaugugccuccuggauaugccccacagguuauugaagacaaugguguucgaagaguugucguggucccucaggcaccagaguuucacccugguagucacacaguucuccaccguucuccacauccuccucuaccugguuucauuccugucccaacuaugaugccgccuccaccacgucauauguacucacccgugacuggagcuggagacaugacaacacaguauaugccacaguaucagucuucacaagucuauggagauguagaugcucacucuacacauggaagguccaacuuuagagaugaacgaucuaguaaaacauaugaacguuugcagaaaaaauugaaggaucgccaaggaacacagaaagauaaaaugagcaguccaccaucaucaccccagaaaugcccuucucccauuaaugaacauaauggacuuauaaaaggacaaauugcuggugguauaaacacaggaucagcaaaaaucaagucugggaaggggaaaggugguacacaaguugauacagaaauugaagaaaaagaugaagaaacuaaagcauuugaagcacuucuuuccaacauugucaaaccaguggccuccgacauccaggcaaggacaguaguacuuaccuggucaccaccuuccagccucauuaauggugaaacagaugaaaguaguguaccagagcucuaugguuaugaaguucugaucucaaguacuggaaaagaugggaaauacaaaaguguauauguaggagaagaaacaaauaucacuuuaaaugaucucaagccagccauggauuaccaugcaaaaguccaggcagaauauaauucuauaaagggaacuccuucagaggcugaaaucuuuaccaccuugagcugugaaccugauauaccuaauccaccaaggauagccaaucggaccaaaaauucacucacuuugcaauggaaggcaccuagugacaaugguucuaaaauccaaaacuuuguauuagaaugggaugaaggaaaaggaaauggagaauuuugucaguguuacaugggcucacagaaacaauuuaaaauuacuaaacuuucaccagcaaugggcuguaaauucagacuaucggccagaaaugacuaugguacaagugguuuuagugaagaagucuuauauuacaccucaggcugugcuccuucuaugccagcaaguccuguauuaaccaaggcuggaauuacuugguuauccuuacaauggaguaagcccucaggaacaccaucagaugaaggaauuucuuacauuuuagagauggaggaagaaacuucaggauaugguuuuaagccuaaauaugauggagaagaucuugcuuacacagugaaaaaucucagacguaguacuaaguauaaauuuaagguuauugcuuacaacucagaagguaaaaguaauccaagugaaguaguagaauuuacuacuugcccugauaaaccaggcauaccuguaaagccuucagugaaaggaaagauacauucacacaguuuuaaaauaaccugggauccaccaaaagacaauggcggagcaaccaucaauaaauauguaguggagauggcagaagguucuaacggaaacaaaugggaaaugauauacaguggugcuaccagggaacaucuuugugaucgacugaauccaggcuguuucuaucguuuacgaguuuacugcaucagugauggaggacagagugcggucucugaaucuuuacuugugcagacuccagcugugccuccuggcccaugccucccucccagauuacaggguagacccaaagcaaaagaaauacaguuacgauggggacccccucugguugaugguggaucacccauuuccuguuacaguguggaaaugucuccuauagaaaaagaugaaccuagagaaguuuaccaagguucugaaguagaauguacagugagcagccuucuuccuggaaagacauacagcuucagacuacgugcagcuaacaaaaugggguuuggaccauuuucagaaaaaugugauauuacuacagccccugggccaccagaucagugcaagcccccucaagugacauguagaucugcaacuugugcacaagugaauugggagguuccuuugaguaauggaacagaugucacugaauaucgacuggaguggggaggaguugaaggaaguaugcagauauguuacugugggccuggucucaguuaugaaauaaaaggacuuucaccagcaacuaccuauuauugcaggguccaggcucugaguguugugggugcaggcccuuucagugaaguaguagccugugugacuccaccaucaguuccuggcauugugaccugucuucaagaaauaagcgaugaugagauagaaaauccccauuauucaccuucuacaugccuugcaauaagcugggaaaagccuugugaucaugguucggaaauccuugccuacagcauagacuuuggagauaaacaaucccuaacagugggaaagguuacaagcuauauuaucaacaauuugcaaccagauacaacauacagaauacgaauucaagccuugaauagccuuggagcugguccuuucagccauaugauaaaauuaaaaacuaagccucucccuccugauccaccucgucuggaauguguugccuuuagccaccagaaccuuaagcugaaauggggagaaggaacuccaaagacauugucaaccgauucuauucaguaccaccuucagauggaggauaagaauggacgguuuguaucccuauacagaggaccaugucauacauacaaaguacaaagacuuaaugagucaacauccuauaaauucuguauucaagcuuguaaugaagcuggggaagguccccucucccaagaauauauuuucacuacuccaaaaucugucccagcugccuugaaagcccccaaaauagagaaaguaaaugaucacauuugugaaauuacaugggaguguuuacagccaaugaaaggugauccaguuauuuacagucuucaaguuauguugggaaaagauucagaauucaaacagauuuacaagggucccgacucuuccuuccgguauuccagccuucagcugaacugugaauaucgcuuccguguaugugccauucgccagugccaagacucucugggacaccaggaccucguaggucccuacagcaccacagugcucuucaucucucagaggacugaaccaccagccagcaccaacagagacacuguggaaagcacaaggacccgacgggcacugagugacgagcagugugcugccgucauccuugugcuguuugcuuucuuuuccauuuugauugccuuuaucauucaguacuuuguaaucaaguga

SEQ ID NO: 1583 - RNA, 3597 nt, Artificial Sequence
  derived and/or modified sequence opt1 from fibronectin__Homo_sapiens__EAX08808
auggccgagcacccgccccugcucgacaccacccagauccugagcuccgacaucagccugcucuccgcccccaucgugagcgcggacggcacgcagcaggucauccugguccaggugaaccccggggaggccuucaccauccgccgggaggacggccaguuccagugcaucaccgggcccgcccagguccccaugaugucccccaacggcagcgugccgcccaucuacgugccgcccggguacgcgccccaggucaucgaggacaacggcgugcgccggguggucguggugccccaggcccccgaguuccaccccggcucccacaccguccugcaccgcagcccccacccgccccuccccggguucauccccgugcccacgaugaugccgcccccgccccggcacauguacucccccgugaccggcgccggggacaugaccacccaguacaugccccaguaccagagcucccaggucuacggcgacguggacgcccacagcacgcacgggcgcuccaacuuccgggacgagcgcagcuccaagaccuacgagcggcugcagaagaagcugaaggaccgccagggcacccagaaggacaagaugagcuccccgcccagcagcccccagaagugccccucccccaucaacgagcacaacggccucaucaaggggcagaucgccggcgggaucaacaccggcagcgccaagaucaaguccggcaaggggaagggcgggacccagguggacacggagaucgaggagaaggacgaggagaccaaggcguucgaggcccugcugagcaacaucgucaagccgguggccuccgacauccaggcccggaccgugguccucacguggagcccgcccuccagccugaucaacggcgagaccgacgaguccagcgugcccgagcuguacggguacgaggugcucaucuccagcaccggcaaggacggcaaguacaaguccgucuacgugggggaggagaccaacaucacgcugaacgaccugaagcccgccauggacuaccacgcgaagguccaggccgaguacaacagcaucaagggcacccccuccgaggccgagaucuucaccacccucagcugcgagcccgacauccccaacccgccccgcaucgccaaccggacgaagaacucccugacccugcaguggaaggcccccagcgacaacggguccaagauccagaacuucgugcucgagugggacgagggcaaggggaacggcgaguucugccagugcuacaugggcagccagaagcaguucaagaucaccaagcugucccccgcgauggggugcaaguuccgccugagcgcccggaacgacuacggcaccagcggguucuccgaggaggugcucuacuacacgagcggcugcgccccguccaugcccgccagccccguccugaccaaggccgggaucaccuggcugucccuccaguggagcaagcccuccggcaccccgagcgacgagggcaucuccuacauccuggagauggaggaggagacgagcggguacggcuucaagcccaaguacgacggggaggaccuggcguacaccgugaagaaccuccgccgguccaccaaguacaaguucaaggugaucgccuacaacagcgagggcaaguccaaccccagcgaggucguggaguucaccacgugccccgacaagccgggcauccccgugaagcccuccgucaaggggaagauccacagccacuccuucaagaucaccugggacccgcccaaggacaacggcggggccaccaucaacaaguacgugguggagauggccgagggcagcaacgggaacaagugggagaugaucuacagcggcgccacccgcgagcaccugugcgaccggcugaaccccggcugcuucuaccgccuccgggucuacugcaucuccgacgggggccagagcgcgguguccgagagccugcuggugcagacccccgccgucccgcccgggcccugccugcccccgcgccuccagggccgccccaaggccaaggagauccagcugcggugggggccgccccucguggacggcggcucccccaucagcugcuacuccguggagaugagccccaucgagaaggacgagccccgcgaggucuaccagggguccgagguggagugcacggugagcucccugcugcccggcaagaccuacagcuuccggcuccgcgccgcgaacaagaugggguucggcccguucuccgagaagugcgacaucaccaccgcccccgggccgcccgaccagugcaagccgccccaggucacgugccggagcgcgaccugcgcccaggugaacugggaggugccccuguccaacggcaccgacgucaccgaguaccgccuggaguggggcgggguggagggcagcaugcagaucugcuacugcgggcccggccucuccuacgagaucaaggggcugagccccgccacgaccuacuacugccgggugcaggcccuguccgucgugggcgccggccccuucagcgagguggucgccugcgugaccccgcccagcgugcccgggaucgugaccugccuccaggagaucuccgacgacgagaucgagaacccccacuacagccccuccacgugccuggccaucagcugggagaagcccugcgaccacggcuccgagauccuggccuacagcaucgacuucggggacaagcagucccugaccgugggcaaggugaccagcuacaucaucaacaaccuccagccggacaccacguaccgcauccggauccaggcgcugaacucccugggcgccgggcccuucagccacaugaucaagcucaagaccaagccccugccgcccgacccgccccgccuggagugcgucgccuucucccaccagaaccucaagcugaaguggggcgaggggacccccaagacccugagcacggacuccauccaguaccaccuccagauggaggacaagaacggccgguucgugagccuguaccgcgggcccugccacaccuacaaggugcagcggcugaacgaguccaccagcuacaaguucugcauccaggccugcaacgaggccggcgagggcccccucucccaggaguacaucuucaccacgcccaagagcgucccggcggcccugaaggcccccaagaucgagaaggugaacgaccacaucugcgagaucaccugggagugccugcagcccaugaagggggaccccgugaucuacucccuccaggucaugcugggcaaggacagcgaguucaagcagaucuacaaggggccggacagcuccuuccgcuacagcucccugcagcucaacugcgaguaccgguuccgcgugugcgccauccggcagugccaggacagccugggccaccaggaccugguggggcccuacuccaccaccguccucuucaucagccagcgcacggagccgcccgcguccaccaaccgggacaccguggagagcacccgcacgcgccgggcccuguccgacgagcagugcgccgccgugauccugguccucuucgccuucuucagcauccugaucgcguucaucauccaguacuucgugaucaaguga

SEQ ID NO: 1584 - RNA, 3597 nt, Artificial Sequence
  derived and/or modified sequence opt2 from fibronectin__Homo_sapiens__EAX08808
auggccgagcaccccccccuccucgacaccacccagauccucuccuccgacaucucccuccucuccgcccccaucgucuccgccgacggcacccagcaggucauccucguccaggucaaccccggcgaggccuucaccauccgccgcgaggacggccaguuccagugcaucaccggccccgcccagguccccaugaugucccccaacggcuccgucccccccaucuacgucccccccggcuacgccccccaggucaucgaggacaacggcguccgccgcgucgucgucgucccccaggcccccgaguuccaccccggcucccacaccguccuccaccgcuccccccaccccccccuccccggcuucauccccguccccaccaugaugcccccccccccccgccacauguacucccccgucaccggcgccggcgacaugaccacccaguacaugccccaguaccaguccucccaggucuacggcgacgucgacgcccacuccacccacggccgcuccaacuuccgcgacgagcgcuccuccaagaccuacgagcgccuccagaagaagcucaaggaccgccagggcacccagaaggacaagauguccuccccccccuccuccccccagaagugccccucccccaucaacgagcacaacggccucaucaagggccagaucgccggcggcaucaacaccggcuccgccaagaucaaguccggcaagggcaagggcggcacccaggucgacaccgagaucgaggagaaggacgaggagaccaaggccuucgaggcccuccucuccaacaucgucaagcccgucgccuccgacauccaggcccgcaccgucguccucaccugguccccccccuccucccucaucaacggcgagaccgacgaguccuccguccccgagcucuacggcuacgagguccucaucuccuccaccggcaaggacggcaaguacaaguccgucuacgucggcgaggagaccaacaucacccucaacgaccucaagcccgccauggacuaccacgccaagguccaggccgaguacaacuccaucaagggcacccccuccgaggccgagaucuucaccacccucuccugcgagcccgacauccccaaccccccccgcaucgccaaccgcaccaagaacucccucacccuccaguggaaggcccccuccgacaacggcuccaagauccagaacuucguccucgagugggacgagggcaagggcaacggcgaguucugccagugcuacaugggcucccagaagcaguucaagaucaccaagcucucccccgccaugggcugcaaguuccgccucuccgcccgcaacgacuacggcaccuccggcuucuccgaggagguccucuacuacaccuccggcugcgcccccuccaugcccgccucccccguccucaccaaggccggcaucaccuggcucucccuccagugguccaagcccuccggcacccccuccgacgagggcaucuccuacauccucgagauggaggaggagaccuccggcuacggcuucaagcccaaguacgacggcgaggaccucgccuacaccgucaagaaccuccgccgcuccaccaaguacaaguucaaggucaucgccuacaacuccgagggcaaguccaaccccuccgaggucgucgaguucaccaccugccccgacaagcccggcauccccgucaagcccuccgucaagggcaagauccacucccacuccuucaagaucaccugggacccccccaaggacaacggcggcgccaccaucaacaaguacgucgucgagauggccgagggcuccaacggcaacaagugggagaugaucuacuccggcgccacccgcgagcaccucugcgaccgccucaaccccggcugcuucuaccgccuccgcgucuacugcaucuccgacggcggccaguccgccgucuccgagucccuccucguccagacccccgccgucccccccggccccugccuccccccccgccuccagggccgccccaaggccaaggagauccagcuccgcuggggccccccccucgucgacggcggcucccccaucuccugcuacuccgucgagaugucccccaucgagaaggacgagccccgcgaggucuaccagggcuccgaggucgagugcaccgucuccucccuccuccccggcaagaccuacuccuuccgccuccgcgccgccaacaagaugggcuucggccccuucuccgagaagugcgacaucaccaccgcccccggcccccccgaccagugcaagcccccccaggucaccugccgcuccgccaccugcgcccaggucaacugggaggucccccucuccaacggcaccgacgucaccgaguaccgccucgaguggggcggcgucgagggcuccaugcagaucugcuacugcggccccggccucuccuacgagaucaagggccucucccccgccaccaccuacuacugccgcguccaggcccucuccgucgucggcgccggccccuucuccgaggucgucgccugcgucaccccccccuccguccccggcaucgucaccugccuccaggagaucuccgacgacgagaucgagaacccccacuacucccccuccaccugccucgccaucuccugggagaagcccugcgaccacggcuccgagauccucgccuacuccaucgacuucggcgacaagcagucccucaccgucggcaaggucaccuccuacaucaucaacaaccuccagcccgacaccaccuaccgcauccgcauccaggcccucaacucccucggcgccggccccuucucccacaugaucaagcucaagaccaagccccucccccccgaccccccccgccucgagugcgucgccuucucccaccagaaccucaagcucaaguggggcgagggcacccccaagacccucuccaccgacuccauccaguaccaccuccagauggaggacaagaacggccgcuucgucucccucuaccgcggccccugccacaccuacaagguccagcgccucaacgaguccaccuccuacaaguucugcauccaggccugcaacgaggccggcgagggcccccucucccaggaguacaucuucaccacccccaaguccguccccgccgcccucaaggcccccaagaucgagaaggucaacgaccacaucugcgagaucaccugggagugccuccagcccaugaagggcgaccccgucaucuacucccuccaggucaugcucggcaaggacuccgaguucaagcagaucuacaagggccccgacuccuccuuccgcuacuccucccuccagcucaacugcgaguaccgcuuccgcgucugcgccauccgccagugccaggacucccucggccaccaggaccucgucggccccuacuccaccaccguccucuucaucucccagcgcaccgagccccccgccuccaccaaccgcgacaccgucgaguccacccgcacccgccgcgcccucuccgacgagcagugcgccgccgucauccucguccucuucgccuucuucuccauccucaucgccuucaucauccaguacuucgucaucaaguga

SEQ ID NO: 1585 - RNA, 3597 nt, Artificial Sequence
  derived and/or modified sequence opt3 from fibronectin__Homo_sapiens__EAX08808
auggccgagcaucccccucugcucgacaccacacagauccuuagcuccgauauuucucuguugucagcuccaauagugagugcagacggcacucaacaggucaucuuaguucaggugaacccgggggaagccuucacgauuagaagggaggauggacaguuucaaugcaucaccggucccgcgcagguaccuaugaugagcccaaauggcuccgugcccccuauuuacgucccacccggguaugcuccucaggugaucgaagacaacggaguucggcgcguggucgugguaccacaggccccggaguuccaccccggcucucacacaguucugcaucgaucgccucacccaccccuaccugguuuuauaccagugcccacuaugaugccgccucccccacgucauauguacucaccugucaccggggcaggagauaugacaacccaauauaugccccaguaccagagcagucagguguauggcgacguggaugcccacuccacucacggcagaucuaauuucagggacgaacggagcuccaagacauacgagcgccuccaaaagaagcugaaagauagacaggggacccagaaggacaaaaugucaaguccacccagcucuccucaaaaguguccauccccgaucaacgagcauaauggacuuauuaagggucagaucgcuggcgggauuaacacgggaucagcaaaaaucaagagcggcaaagguaaagggggaacucaggucgauaccgaaauagaggaaaaagacgaggagacaaaggccuuugaagcucuguugaguaauauuguuaagcccguggccucugauauccaggcgaggacuguagugcucaccugguccccuccaagcucgcugauuaacggcgagacagacgaaucuuccguccccgagcuguauggcuacgaagugcucaucucaaguaccgggaaagacggaaaguacaaaagcguuuaugugggugaggagacgaauaucacuuuaaacgaucugaagccugcaauggacuaccacgccaaaguccaagcugaauauaauuccauuaagggcacaccaucugaggccgaaauauucaccacucuuagcugcgagcccgauaucccgaacccuccacggauugcaaaucgcaccaaaaacucauugacccugcaguggaaggcucccagugacaauggguccaagauccagaacuuugugcuagaaugggaugagggaaaaggcaacggugaguucugucagugcuacauggggagccaaaagcaguuuaaaauaacgaagcucucuccugccaugggcuguaaauuccgacugucagcgagaaaugacuauggaaccaguggcuuuagcgaagagguacuuuacuauacauccgggugcgcccccucuaugccagcaucgccuguucugacuaaggcuggaauuaccugguugagccuccagugguccaagcccucagguacaccaagugaugaaggcaucucuuacauccuggagauggaagaggagacuagcggguacggauucaaaccgaaguaugacggcgaagauuuagccuacaccgugaaaaaccugaggcgguccacaaaguauaaauuuaaggucauugcuuacaauucagaggguaagagcaacccuucugaaguggucgaguucaccacuugucccgacaaaccagggauccccgugaagccuuccguuaaaggcaagauucauagucacagcuucaaaauaacgugggauccacccaaggacaauggaggcgccacaaucaacaaguaugugguagagauggcagaagggucuaauggaaacaaaugggagaugauuuacuccggugccacccgugaacaccucugcgaccgccuuaauccuggcuguuuuuauagacugagggucuacugcaucucagaugggggacagagugcugugagcgagucguugcuaguucaaacuccggcggugccacccggcccuugucugccaccccggcuccagggucgaccuaaggcaaaagaaauccagcugcgcugggggccgccccuugucgacggcggauccccaauuucuugcuacagcguggagaugucaccuauagagaaggaugaacccagagagguauaucagggcagugaaguggagugcaccguuuccucucuguugccagggaaaacauacagcuucaggcuccgggccgcuaacaagaugggauuuggcccuuucuccgaaaaaugugacaucaccacugcccccgguccaccggaucaaugcaagccuccccaggucacaugucgcucagcaacgugcgcccaggugaauugggaggugccacugagcaacgggaccgacgucacugaguauagauuagaauggggaggcguugaggguaguaugcaaauuuguuacugcggccccgggcugucuuaugaaaucaagggacuauccccugcuacaaccuacuauuguagggugcaggcccucagcgugguaggcgcagggccauuuucggaggucguggcgugcguuacacccccuucagugccgggaauugucacuugucugcaggaaaucucugaugacgagauagagaauccacauuacagucccuccacaugccuugcuaucagcugggaaaaaccuugugaucacggcucugagauuuuggccuacagcaucgacuucggugauaagcagucccugacgguggggaaaguuaccucauauauuaucaacaaucuccaacccgacacaacuuaccguauacggauucaggcacugaacagucuuggagccggcccauuuagccauaugaucaagcugaaaaccaagccuuugcccccagauccuccgcgacucgaaugcguggcuuucucucaccagaaccugaaguuaaaauggggugagggcacacccaagacucuguccaccgacucaauucaguaucaucuacaaauggaggacaaaaaugggagauuuguaagucucuacaggggaccaugccacacguauaagguccagcgccugaacgaaagcacauccuacaaauucuguauccaggccugcaaugaggcaggcgaagggccucuuucucaggaguauauauuuaccacucccaagucggugccagcugccuugaaggcgccuaaaaucgaaaaggugaacgaucacauuugugagaucacaugggagugccugcaacccaugaaaggagacccggucauuuacagccuccagguuaugcugggcaaggauucagaguucaaacagaucuacaaggguccagacuccaguuuucgguauucuagcuuacaacugaauugugaauacagauucagggugugcgccauacgccagugucaggauucccuugggcaucaggacuugguaggaccuuauucaaccacuguccucuucauuucucaacgaaccgaacccccagcuagcacaaaccgggauacgguggagaguacccguacuagaagggcacuguccgacgaacagugcgccgcugugauccuaguucuguuugccuucuuuagcauccucauugcauucaucauucaguacuuugugauaaaguga

SEQ ID NO: 1586 - RNA, 3597 nt, Artificial Sequence
  derived and/or modified sequence opt4 from fibronectin__Homo_sapiens__EAX08808
auggccgagcaccccccccugcuggacaccacccagauccugagcagcgacaucagccugcugagcgcccccaucgugagcgccgacggcacccagcaggugauccuggugcaggugaaccccggcgaggccuucaccaucagaagagaggacggccaguuccagugcaucaccggccccgcccaggugcccaugaugagccccaacggcagcgugccccccaucuacgugccccccggcuacgccccccaggugaucgaggacaacggcgugagaagaguggugguggugccccaggcccccgaguuccaccccggcagccacaccgugcugcacagaagcccccaccccccccugcccggcuucauccccgugcccaccaugaugccccccccccccagacacauguacagccccgugaccggcgccggcgacaugaccacccaguacaugccccaguaccagagcagccagguguacggcgacguggacgcccacagcacccacggcagaagcaacuucagagacgagagaagcagcaagaccuacgagagacugcagaagaagcugaaggacagacagggcacccagaaggacaagaugagcagcccccccagcagcccccagaagugccccagccccaucaacgagcacaacggccugaucaagggccagaucgccggcggcaucaacaccggcagcgccaagaucaagagcggcaagggcaagggcggcacccagguggacaccgagaucgaggagaaggacgaggagaccaaggccuucgaggcccugcugagcaacaucgugaagcccguggccagcgacauccaggccagaaccguggugcugaccuggagcccccccagcagccugaucaacggcgagaccgacgagagcagcgugcccgagcuguacggcuacgaggugcugaucagcagcaccggcaaggacggcaaguacaagagcguguacgugggcgaggagaccaacaucacccugaacgaccugaagcccgccauggacuaccacgccaaggugcaggccgaguacaacagcaucaagggcacccccagcgaggccgagaucuucaccacccugagcugcgagcccgacauccccaacccccccagaaucgccaacagaaccaagaacagccugacccugcaguggaaggcccccagcgacaacggcagcaagauccagaacuucgugcuggagugggacgagggcaagggcaacggcgaguucugccagugcuacaugggcagccagaagcaguucaagaucaccaagcugagccccgccaugggcugcaaguucagacugagcgccagaaacgacuacggcaccagcggcuucagcgaggaggugcuguacuacaccagcggcugcgcccccagcaugcccgccagccccgugcugaccaaggccggcaucaccuggcugagccugcaguggagcaagcccagcggcacccccagcgacgagggcaucagcuacauccuggagauggaggaggagaccagcggcuacggcuucaagcccaaguacgacggcgaggaccuggccuacaccgugaagaaccugagaagaagcaccaaguacaaguucaaggugaucgccuacaacagcgagggcaagagcaaccccagcgaggugguggaguucaccaccugccccgacaagcccggcauccccgugaagcccagcgugaagggcaagauccacagccacagcuucaagaucaccugggacccccccaaggacaacggcggcgccaccaucaacaaguacgugguggagauggccgagggcagcaacggcaacaagugggagaugaucuacagcggcgccaccagagagcaccugugcgacagacugaaccccggcugcuucuacagacugagaguguacugcaucagcgacggcggccagagcgccgugagcgagagccugcuggugcagacccccgccgugccccccggccccugccugccccccagacugcagggcagacccaaggccaaggagauccagcugagauggggccccccccugguggacggcggcagccccaucagcugcuacagcguggagaugagccccaucgagaaggacgagcccagagagguguaccagggcagcgagguggagugcaccgugagcagccugcugcccggcaagaccuacagcuucagacugagagccgccaacaagaugggcuucggccccuucagcgagaagugcgacaucaccaccgcccccggcccccccgaccagugcaagcccccccaggugaccugcagaagcgccaccugcgcccaggugaacugggaggugccccugagcaacggcaccgacgugaccgaguacagacuggaguggggcggcguggagggcagcaugcagaucugcuacugcggccccggccugagcuacgagaucaagggccugagccccgccaccaccuacuacugcagagugcaggcccugagcguggugggcgccggccccuucagcgaggugguggccugcgugaccccccccagcgugcccggcaucgugaccugccugcaggagaucagcgacgacgagaucgagaacccccacuacagccccagcaccugccuggccaucagcugggagaagcccugcgaccacggcagcgagauccuggccuacagcaucgacuucggcgacaagcagagccugaccgugggcaaggugaccagcuacaucaucaacaaccugcagcccgacaccaccuacagaaucagaauccaggcccugaacagccugggcgccggccccuucagccacaugaucaagcugaagaccaagccccugccccccgacccccccagacuggagugcguggccuucagccaccagaaccugaagcugaaguggggcgagggcacccccaagacccugagcaccgacagcauccaguaccaccugcagauggaggacaagaacggcagauucgugagccuguacagaggccccugccacaccuacaaggugcagagacugaacgagagcaccagcuacaaguucugcauccaggccugcaacgaggccggcgagggcccccugagccaggaguacaucuucaccacccccaagagcgugcccgccgcccugaaggcccccaagaucgagaaggugaacgaccacaucugcgagaucaccugggagugccugcagcccaugaagggcgaccccgugaucuacagccugcaggugaugcugggcaaggacagcgaguucaagcagaucuacaagggccccgacagcagcuucagauacagcagccugcagcugaacugcgaguacagauucagagugugcgccaucagacagugccaggacagccugggccaccaggaccuggugggccccuacagcaccaccgugcuguucaucagccagagaaccgagccccccgccagcaccaacagagacaccguggagagcaccagaaccagaagagcccugagcgacgagcagugcgccgccgugauccuggugcuguucgccuucuucagcauccugaucgccuucaucauccaguacuucgugaucaaguga

SEQ ID NO: 1587 - RNA, 3597 nt, Artificial Sequence
  derived and/or modified sequence opt5 from fibronectin__Homo_sapiens__EAX08808
auggccgagcaucccccucugcucgacaccacacagauccugagcuccgauauuucucuucugagcgcuccgaucguguccgccgacggcacgcaacaggucauucucguucaggugaaccccggggaagcguucaccaucagacgggaggauggacaguuucaaugcauuacaggcccugcucaggugcccaugaugucuccuaaugggagcgugcccccuaucuacgucccgcccggauaugccccucagguuaucgaagacaacggcgugcgcagagucgugguugugccccaggccccugaguuccaccccgggucccacaccguccugcaucggucuccgcacccuccccuuccuggauuuauucccgugcccacaaugaugccuccgcccccucgccauauguacagccccgugaccggcgcuggcgauaugacaacccaauauaugccucaguaccaguccagccaggucuauggggacguugaugcccacucuacgcacggaagauccaauuuccgggacgaacgcagcucuaagaccuacgagagacugcaaaagaagcucaaagaucggcagggcacacagaaggacaaaauguccucucccccgagcuccccucaaaagugucccagcccuaucaacgagcauaaugggcugauuaagggacagaucgcuggcgggauuaacaccggauccgccaaaaucaagucuggcaaaggcaaagggggaacacagguggauaccgaaauugaggaaaaagacgaggagacgaaggcguuugaagcccugcucagcaauaucgugaagcccgucgcuuccgauauccaggcccgcacagugguucugaccuggagcccucccucuucccuuauuaacggcgagacagacgaaagcucugugccggagcuguauggguacgaaguccucaucagcuccaccggaaaagacggcaaguacaaaucuguguauguuggggaggagaccaauauuacacugaacgaucuuaagccugcuauggacuaccacgccaaagugcaagcggaauauaauagcaucaagggaacgcccuccgaggccgaaauuuucaccacacugagcugcgagcccgauaucccuaacccgcccagaaucgcuaaucggaccaaaaacucucucacacugcaguggaaggccccuuccgacaauggcagcaagauucagaacuuuguccuggaaugggaugagggcaaagggaacggagaguucugucagugcuacaugggcucucaaaagcaguuuaaaaucaccaagcucucccccgcuaugggguguaaauuccgccugagcgccagaaaugacuauggaacguccggcuuuucugaagaggugcuuuacuauacaagcgggugcgccccuuccaugcccgcuucuccuguccugaccaaggcgggcauuaccuggcucagccugcagugguccaagcccagcggaacaccgucugaugaaggcaucuccuacauucuugagauggaagaggagaccagcggguacggauucaaaccuaaguaugacggcgaagaucuggccuacacagugaaaaaccuccggcgcucuacgaaguauaaauuuaagguuaucgcuuacaauuccgagggaaagagcaaccccucugaaguggucgaguucaccacauguccugacaaacccgggaucccggugaagccuagcguuaaaggcaagauucauucccacagcuucaaaaucaccugggaucccccuaaggacaaugggggcgccacaauuaacaaguauguggucgagauggccgaaggaucuaauggcaacaaaugggagaugaucuacuccggggcuaccagagaacaccugugcgaccggcugaaucccggauguuuuuauagacuccgcguguacugcauuagcgauggcgggcaguccgccgugucugagagccugcuuguucaaacgcccgcggucccuccgggacccugucugccuccccggcuccagggcagaccuaaggcuaaagaaauccagcugcgcugggggcccccucuuguggacggcggauccccgauuucuugcuacagcguggagaugucccccaucgagaaggaugaaccucgggaggucuaucagggcucugaaguggagugcaccguuagcucccugcuccccgggaaaacauacagcuucagacugcgcgccgccaacaagaugggauuuggcccuuucucugaaaaaugugacaucaccacagcucccgggccgccugaucaaugcaagccuccccaggugaccugucgguccgccacgugcgcucaggucaauugggaggugccccugagcaacggaacagacguuaccgaguauagacucgaauggggcgggguggagggcucuaugcaaauuuguuacugcggacccggccuguccuaugaaaucaaggggcuuagcccugccacaaccuacuauugucgcguccaggcgcugucugugguuggagccggcccguuuuccgagguggucgcuugcgugacacccccuagcgugcccgggauugucaccugucuccaggaaaucuccgaugacgagauugagaauccucauuacagccccucuacgugccuggccaucagcugggaaaaaccgugugaucacggauccgagauccuggcuuacucuauugacuucggcgauaagcagagccuuaccguuggcaaagugacauccuauaucauuaacaaucuccaaccugacaccacauaccggauccgcauucaggcccugaacucucugggggcgggacccuuuagccauaugaucaagcucaaaaccaagccucugcccccugaucccccgagacuugaaugcguggccuucucccaccagaaccugaagcucaaauggggcgaggggacgccuaagacacugucuaccgacagcauccaguaucaucugcaaauggaggacaaaaauggacgguuugucucccuuuacagaggccccugccacaccuauaaggugcagcggcucaacgaaagcacaucuuacaaauucuguauucaggcuugcaaugaggccggggaaggaccccugucccaggaguauaucuuuaccacaccuaagagcguuccggcugcccugaaggcccccaaaauugaaaaggugaacgaucacaucugugagauuacgugggagugccuccaaccuaugaaaggcgaccccgucaucuacucucuucaggugaugcugggcaaggauuccgaguucaaacagaucuacaaggggccugacagcuccuuucgcuauucuagccugcaacucaauugugaauacagauuccggguuugcgcuauuagacagugucaggauucccugggacaucaggaccuggugggccccuauagcaccacaguccuuuucaucucucaacgcaccgaaccuccggcguccacaaaccgggauaccguggagagcacgagaacccgcagagcccucucugacgaacagugcgcugccguuauucuggugcuguuugccuucuuuagcauccucauugcuuucaucauucaguacuuugucaucaaguga

SEQ ID NO: 1588 - protein, 1142 aa, Artificial Sequence
  fibronectin__Homo_sapiens__A0A024RDV5
MSGPAQVPMMSPNGSVPPIYVPPGYAPQVIEDNGVRRVVVVPQAPEFHPGSHTVLHRSPHPPLPGFIPVPTMMPPPPRHMYSPVTGAGDMTTQYMPQYQSSQVYGDVDAHSTHGRSNFRDERSSKTYERLQKKLKDRQGTQKDKMSSPPSSPQKCPSPINEHNGLIKGQIAGGINTGSAKIKSGKGKGGTQVDTEIEEKDEETKAFEALLSNIVKPVASDIQARTVVLTWSPPSSLINGETDESSVPELYGYEVLISSTGKDGKYKSVYVGEETNITLNDLKPAMDYHAKVQAEYNSIKGTPSEAEIFTTLSCEPDIPNPPRIANRTKNSLTLQWKAPSDNGSKIQNFVLEWDEGKGNGEFCQCYMGSQKQFKITKLSPAMGCKFRLSARNDYGTSGFSEEVLYYTSGCAPSMPASPVLTKAGITWLSLQWSKPSGTPSDEGISYILEMEEETSGYGFKPKYDGEDLAYTVKNLRRSTKYKFKVIAYNSEGKSNPSEVVEFTTCPDKPGIPVKPSVKGKIHSHSFKITWDPPKDNGGATINKYVVEMAEGSNGNKWEMIYSGATREHLCDRLNPGCFYRLRVYCISDGGQSAVSESLLVQTPAVPPGPCLPPRLQGRPKAKEIQLRWGPPLVDGGSPISCYSVEMSPIEKDEPREVYQGSEVECTVSSLLPGKTYSFRLRAANKMGFGPFSEKCDITTAPGPPDQCKPPQVTCRSATCAQVNWEVPLSNGTDVTEYRLEWGGVEGSMQICYCGPGLSYEIKGLSPATTYYCRVQALSVVGAGPFSEVVACVTPPSVPGIVTCLQEISDDEIENPHYSPSTCLAISWEKPCDHGSEILAYSIDFGDKQSLTVGKVTSYIINNLQPDTTYRIRIQALNSLGAGPFSHMIKLKTKPLPPDPPRLECVAFSHQNLKLKWGEGTPKTLSTDSIQYHLQMEDKNGRFVSLYRGPCHTYKVQRLNESTSYKFCIQACNEAGEGPLSQEYIFTTPKSVPAALKAPKIEKVNDHICEITWECLQPMKGDPVIYSLQVMLGKDSEFKQIYKGPDSSFRYSSLQLNCEYRFRVCAIRQCQDSLGHQDLVGPYSTTVLFISQRTEPPASTNRDTVESTRTRRALSDEQCAAVILVLFAFFSILIAFIIQYFVIK

SEQ ID NO: 1589 - RNA, 3429 nt, Artificial Sequence
  fibronectin__Homo_sapiens__EAX08809
augagugguccugcucagguuccaaugauguccccaaaugguucugugccuccuaucuaugugccuccuggauaugccccacagguuauugaagacaaugguguucgaagaguugucguggucccucaggcaccagaguuucacccugguagucacacaguucuccaccguucuccacauccuccucuaccugguuucauuccugucccaacuaugaugccgccuccaccacgucauauguacucacccgugacuggagcuggagacaugacaacacaguauaugccacaguaucagucuucacaagucuauggagauguagaugcucacucuacacauggaagguccaacuuuagagaugaacgaucuaguaaaacauaugaacguuugcagaaaaaauugaaggaucgccaaggaacacagaaagauaaaaugagcaguccaccaucaucaccccagaaaugcccuucucccauuaaugaacauaauggacuuauaaaaggacaaauugcuggugguauaaacacaggaucagcaaaaaucaagucugggaaggggaaaggugguacacaaguugauacagaaauugaagaaaaagaugaagaaacuaaagcauuugaagcacuucuuuccaacauugucaaaccaguggccuccgacauccaggcaaggacaguaguacuuaccuggucaccaccuuccagccucauuaauggugaaacagaugaaaguaguguaccagagcucuaugguuaugaaguucugaucucaaguacuggaaaagaugggaaauacaaaaguguauauguaggagaagaaacaaauaucacuuuaaaugaucucaagccagccauggauuaccaugcaaaaguccaggcagaauauaauucuauaaagggaacuccuucagaggcugaaaucuuuaccaccuugagcugugaaccugauauaccuaauccaccaaggauagccaaucggaccaaaaauucacucacuuugcaauggaaggcaccuagugacaaugguucuaaaauccaaaacuuuguauuagaaugggaugaaggaaaaggaaauggagaauuuugucaguguuacaugggcucacagaaacaauuuaaaauuacuaaacuuucaccagcaaugggcuguaaauucagacuaucggccagaaaugacuaugguacaagugguuuuagugaagaagucuuauauuacaccucaggcugugcuccuucuaugccagcaaguccuguauuaaccaaggcuggaauuacuugguuauccuuacaauggaguaagcccucaggaacaccaucagaugaaggaauuucuuacauuuuagagauggaggaagaaacuucaggauaugguuuuaagccuaaauaugauggagaagaucuugcuuacacagugaaaaaucucagacguaguacuaaguauaaauuuaagguuauugcuuacaacucagaagguaaaaguaauccaagugaaguaguagaauuuacuacuugcccugauaaaccaggcauaccuguaaagccuucagugaaaggaaagauacauucacacaguuuuaaaauaaccugggauccaccaaaagacaauggcggagcaaccaucaauaaauauguaguggagauggcagaagguucuaacggaaacaaaugggaaaugauauacaguggugcuaccagggaacaucuuugugaucgacugaauccaggcuguuucuaucguuuacgaguuuacugcaucagugauggaggacagagugcggucucugaaucuuuacuugugcagacuccagcugugccuccuggcccaugccucccucccagauuacaggguagacccaaagcaaaagaaauacaguuacgauggggacccccucugguugaugguggaucacccauuuccuguuacaguguggaaaugucuccuauagaaaaagaugaaccuagagaaguuuaccaagguucugaaguagaauguacagugagcagccuucuuccuggaaagacauacagcuucagacuacgugcagcuaacaaaaugggguuuggaccauuuucagaaaaaugugauauuacuacagccccugggccaccagaucagugcaagcccccucaagugacauguagaucugcaacuugugcacaagugaauugggagguuccuuugaguaauggaacagaugucacugaauaucgacuggaguggggaggaguugaaggaaguaugcagauauguuacugugggccuggucucaguuaugaaauaaaaggacuuucaccagcaacuaccuauuauugcaggguccaggcucugaguguugugggugcaggcccuuucagugaaguaguagccugugugacuccaccaucaguuccuggcauugugaccugucuucaagaaauaagcgaugaugagauagaaaauccccauuauucaccuucuacaugccuugcaauaagcugggaaaagccuugugaucaugguucggaaauccuugccuacagcauagacuuuggagauaaacaaucccuaacagugggaaagguuacaagcuauauuaucaacaauuugcaaccagauacaacauacagaauacgaauucaagccuugaauagccuuggagcugguccuuucagccauaugauaaaauuaaaaacuaagccucucccuccugauccaccucgucuggaauguguugccuuuagccaccagaaccuuaagcugaaauggggagaaggaacuccaaagacauugucaaccgauucuauucaguaccaccuucagauggaggauaagaauggacgguuuguaucccuauacagaggaccaugucauacauacaaaguacaaagacuuaaugagucaacauccuauaaauucuguauucaagcuuguaaugaagcuggggaagguccccucucccaagaauauauuuucacuacuccaaaaucugucccagcugccuugaaagcccccaaaauagagaaaguaaaugaucacauuugugaaauuacaugggaguguuuacagccaaugaaaggugauccaguuauuuacagucuucaaguuauguugggaaaagauucagaauucaaacagauuuacaagggucccgacucuuccuuccgguauuccagccuucagcugaacugugaauaucgcuuccguguaugugccauucgccagugccaagacucucugggacaccaggaccucguaggucccuacagcaccacagugcucuucaucucucagaggacugaaccaccagccagcaccaacagagacacuguggaaagcacaaggacccgacgggcacugagugacgagcagugugcugccgucauccuugugcuguuugcuuucuuuuccauuuugauugccuuuaucauucaguacuuuguaaucaaguga

SEQ ID NO: 1590 - RNA, 3429 nt, Artificial Sequence
  derived and/or modified sequence opt1 from fibronectin__Homo_sapiens__EAX08809
augagcggccccgcccaggugcccaugaugucccccaacgggagcgucccgcccaucuacgugccgcccggcuacgcgccccaggugaucgaggacaacgggguccgccgggugguggucgugccccaggcccccgaguuccaccccggcucccacaccgugcugcaccgcagcccccacccgccccuccccggguucauccccguccccaccaugaugccgcccccgccccggcacauguacucccccgugacgggcgccggcgacaugaccacccaguacaugccccaguaccagagcucccagguguacggggacgucgacgcccacagcacccacggccgcuccaacuuccgggacgagcgcagcuccaagacguacgagcggcugcagaagaagcugaaggaccgccaggggacccagaaggacaagaugagcuccccgcccagcagcccccagaagugccccucccccaucaacgagcacaacggccucaucaaggggcagaucgccggcggcaucaacaccggguccgccaagaucaagagcggcaaggggaagggcggcacccagguggacacggagaucgaggagaaggacgaggagaccaaggcguucgaggcccugcuguccaacaucgugaagcccgucgccagcgacauccaggcccggaccguggugcucaccuggagcccgcccuccagccugaucaacggggagacggacgaguccagcguccccgagcuguacggcuacgaggugcucaucuccagcaccgggaaggacggcaaguacaaguccguguacgucggggaggagaccaacaucacccugaacgaccugaagccggcgauggacuaccacgccaaggugcaggccgaguacaacagcaucaagggcacgcccuccgaggccgagaucuucaccacccucagcugcgagcccgacauccccaacccgccccgcaucgccaaccggaccaagaacucccugacgcugcaguggaaggcgcccagcgacaacggcuccaagauccagaacuucgugcucgagugggacgaggggaagggcaacggggaguucugccagugcuacaugggcagccagaagcaguucaagaucaccaagcugucccccgccauggggugcaaguuccgccugagcgcccggaacgacuacggcaccuccggcuucagcgaggagguccucuacuacaccuccgggugcgccccgagcaugcccgccagccccgugcugacgaaggcgggcaucaccuggcugucccuccaguggagcaagcccuccgggaccccgagcgacgagggcaucuccuacauccuggagauggaggaggagaccagcggguacggcuucaagcccaaguacgacggcgaggaccuggccuacacggucaagaaccuccgccgguccaccaaguacaaguucaaggugaucgccuacaacagcgaggggaaguccaaccccagcgagguggucgaguucacgaccugccccgacaagccgggcauccccgugaagcccuccgugaaggggaagauccacagccacuccuucaagaucaccugggacccgcccaaggacaacggcggcgccaccaucaacaaguacgucguggagauggccgaggggagcaacggcaacaagugggagaugaucuacuccggggcgacccgcgagcaccugugcgaccggcugaaccccggcugcuucuaccgccuccggguguacugcaucagcgacgggggccaguccgccgucagcgagagccugcuggugcagacccccgccgugcccccgggccccugccugcccccgcgccuccaggggcggcccaaggccaaggagauccagcugcgcuggggcccgccccucgucgacgggggcucccccaucagcugcuacuccguggagaugagccccaucgagaaggacgagccccgcgagguguaccagggguccgaggucgagugcacggugagcucccugcugcccggcaagaccuacagcuuccggcuccgcgccgcgaacaagaugggcuucgggccguucuccgagaagugcgacaucaccaccgcccccggcccgcccgaccagugcaagccgccccaggugaccugccggagcgccacgugcgcccaggucaacugggaggugccccuguccaacgggaccgacgugaccgaguaccgccuggaguggggcggggucgagggcagcaugcagaucugcuacugcggccccgggcucuccuacgagaucaagggccugagccccgcgaccacguacuacugccgggugcaggcccuguccguggucggggccggccccuucagcgaggugguggccugcgucaccccgcccuccgugcccgggaucgugaccugccuccaggagaucagcgacgacgagaucgagaacccccacuacucccccuccacgugccuggccaucagcugggagaagcccugcgaccacggcagcgagauccuggcguacagcaucgacuucggcgacaagcagucccucaccgucgggaaggugaccagcuacaucaucaacaaccugcagccggacaccaccuaccgcauccggauccaggcccugaacucccucggcgccgggcccuucagccacaugaucaagcugaagacgaagccccugcccccggacccgccccgccuggagugcguggccuucucccaccagaaccucaagcugaaguggggcgagggcacccccaagacccugagcaccgacuccauccaguaccaccuccagauggaggacaagaacgggcgguucgucagccuguaccgcggccccugccacacguacaaggugcagcggcugaacgaguccaccagcuacaaguucugcauccaggccugcaacgaggcgggggagggcccccucucccaggaguacaucuucaccacccccaagagcgugccggccgcccugaaggcccccaagaucgagaaggucaacgaccacaucugcgagaucacgugggagugccugcagcccaugaagggggaccccgugaucuacucccuccaggugaugcugggcaaggacagcgaguucaagcagaucuacaagggcccggacuccagcuuccgcuacuccagccugcagcucaacugcgaguaccgguuccgcgucugcgccauccggcagugccaggacagccuggggcaccaggaccuggugggccccuacuccaccaccguccucuucaucagccagcgcaccgagccgcccgcguccacgaaccgggacaccguggagagcacccgcacccggcgcgcccuguccgacgagcagugcgccgccgugauccugguccucuucgcguucuucagcauccugaucgccuucaucauccaguacuucgugaucaaguga

SEQ ID NO: 1591 - RNA, 3429 nt, Artificial Sequence
  derived and/or modified sequence opt2 from fibronectin__Homo_sapiens__EAX08809
auguccggccccgcccagguccccaugaugucccccaacggcuccgucccccccaucuacgucccccccggcuacgccccccaggucaucgaggacaacggcguccgccgcgucgucgucgucccccaggcccccgaguuccaccccggcucccacaccguccuccaccgcuccccccaccccccccuccccggcuucauccccguccccaccaugaugcccccccccccccgccacauguacucccccgucaccggcgccggcgacaugaccacccaguacaugccccaguaccaguccucccaggucuacggcgacgucgacgcccacuccacccacggccgcuccaacuuccgcgacgagcgcuccuccaagaccuacgagcgccuccagaagaagcucaaggaccgccagggcacccagaaggacaagauguccuccccccccuccuccccccagaagugccccucccccaucaacgagcacaacggccucaucaagggccagaucgccggcggcaucaacaccggcuccgccaagaucaaguccggcaagggcaagggcggcacccaggucgacaccgagaucgaggagaaggacgaggagaccaaggccuucgaggcccuccucuccaacaucgucaagcccgucgccuccgacauccaggcccgcaccgucguccucaccugguccccccccuccucccucaucaacggcgagaccgacgaguccuccguccccgagcucuacggcuacgagguccucaucuccuccaccggcaaggacggcaaguacaaguccgucuacgucggcgaggagaccaacaucacccucaacgaccucaagcccgccauggacuaccacgccaagguccaggccgaguacaacuccaucaagggcacccccuccgaggccgagaucuucaccacccucuccugcgagcccgacauccccaaccccccccgcaucgccaaccgcaccaagaacucccucacccuccaguggaaggcccccuccgacaacggcuccaagauccagaacuucguccucgagugggacgagggcaagggcaacggcgaguucugccagugcuacaugggcucccagaagcaguucaagaucaccaagcucucccccgccaugggcugcaaguuccgccucuccgcccgcaacgacuacggcaccuccggcuucuccgaggagguccucuacuacaccuccggcugcgcccccuccaugcccgccucccccguccucaccaaggccggcaucaccuggcucucccuccagugguccaagcccuccggcacccccuccgacgagggcaucuccuacauccucgagauggaggaggagaccuccggcuacggcuucaagcccaaguacgacggcgaggaccucgccuacaccgucaagaaccuccgccgcuccaccaaguacaaguucaaggucaucgccuacaacuccgagggcaaguccaaccccuccgaggucgucgaguucaccaccugccccgacaagcccggcauccccgucaagcccuccgucaagggcaagauccacucccacuccuucaagaucaccugggacccccccaaggacaacggcggcgccaccaucaacaaguacgucgucgagauggccgagggcuccaacggcaacaagugggagaugaucuacuccggcgccacccgcgagcaccucugcgaccgccucaaccccggcugcuucuaccgccuccgcgucuacugcaucuccgacggcggccaguccgccgucuccgagucccuccucguccagacccccgccgucccccccggccccugccuccccccccgccuccagggccgccccaaggccaaggagauccagcuccgcuggggccccccccucgucgacggcggcucccccaucuccugcuacuccgucgagaugucccccaucgagaaggacgagccccgcgaggucuaccagggcuccgaggucgagugcaccgucuccucccuccuccccggcaagaccuacuccuuccgccuccgcgccgccaacaagaugggcuucggccccuucuccgagaagugcgacaucaccaccgcccccggcccccccgaccagugcaagcccccccaggucaccugccgcuccgccaccugcgcccaggucaacugggaggucccccucuccaacggcaccgacgucaccgaguaccgccucgaguggggcggcgucgagggcuccaugcagaucugcuacugcggccccggccucuccuacgagaucaagggccucucccccgccaccaccuacuacugccgcguccaggcccucuccgucgucggcgccggccccuucuccgaggucgucgccugcgucaccccccccuccguccccggcaucgucaccugccuccaggagaucuccgacgacgagaucgagaacccccacuacucccccuccaccugccucgccaucuccugggagaagcccugcgaccacggcuccgagauccucgccuacuccaucgacuucggcgacaagcagucccucaccgucggcaaggucaccuccuacaucaucaacaaccuccagcccgacaccaccuaccgcauccgcauccaggcccucaacucccucggcgccggccccuucucccacaugaucaagcucaagaccaagccccucccccccgaccccccccgccucgagugcgucgccuucucccaccagaaccucaagcucaaguggggcgagggcacccccaagacccucuccaccgacuccauccaguaccaccuccagauggaggacaagaacggccgcuucgucucccucuaccgcggccccugccacaccuacaagguccagcgccucaacgaguccaccuccuacaaguucugcauccaggccugcaacgaggccggcgagggcccccucucccaggaguacaucuucaccacccccaaguccguccccgccgcccucaaggcccccaagaucgagaaggucaacgaccacaucugcgagaucaccugggagugccuccagcccaugaagggcgaccccgucaucuacucccuccaggucaugcucggcaaggacuccgaguucaagcagaucuacaagggccccgacuccuccuuccgcuacuccucccuccagcucaacugcgaguaccgcuuccgcgucugcgccauccgccagugccaggacucccucggccaccaggaccucgucggccccuacuccaccaccguccucuucaucucccagcgcaccgagccccccgccuccaccaaccgcgacaccgucgaguccacccgcacccgccgcgcccucuccgacgagcagugcgccgccgucauccucguccucuucgccuucuucuccauccucaucgccuucaucauccaguacuucgucaucaaguga

SEQ ID NO: 1592 - RNA, 3429 nt, Artificial Sequence
  derived and/or modified sequence opt3 from fibronectin__Homo_sapiens__EAX08809
augagcggccccgcccaggugccuaugauguccccaaacgggucugucccgcccaucuacguuccuccaggauaugcuccccaagugauugaggacaaugguguaagaaggguggucgugguuccucaggcaccagaguuccaccccggcucacauaccgugcugcaccggaguccucauccaccgcuccccggguuuauaccugucccaacaaugaugcccccuccaccccgccacauguacagcccggugacuggagccggcgauaugacgacccaguauaugccucaguaccaauccucucagguauauggugacguugaugcgcauucgacacacgggcgaucaaacuuccgugacgaaagaagcaguaagacuuacgaaaggcuucagaaaaagcugaaagaucggcagggaacccaaaaggacaaaauguccucucccccaagcuccccucagaagugccccucaccaaucaaugagcacaacggcuugauuaagggccagaucgcugggggaauuaauacagguagugccaaaaucaagagcggcaaagggaagggaggcacccagguggauacugaaauagaggagaaagacgaagagacaaaggcauuugaagccuuacugucuaacaucgucaagcccguggcuuccgauauucaagcacgcaccgugguccuaacguggucaccuccaagcagucucaucaauggugagacugacgagucuuccguuccggaacuguauggguacgaggugcuuauuagcucgaccggaaaagauggcaaguacaaaucuguauaugugggcgaagagacaaacaucacucugaaugacuugaagcccgccauggauuaccaugcuaaaguccaggccgaauauaacuccauaaaggggaccccuucagaggcggagauuuucacaacccucaguugugaaccagacauccccaauccuccaagaauugcaaacaggacgaaaaauagccugacucugcaguggaaggcccccuccgacaacggaucuaagauccaaaauuuugugcucgagugggaugaagguaaaggcaacggggaguucugccaguguuacaugggaagccagaagcaguuuaaaaucacaaaguuaucaccggcuaugggcugcaaauuccggcugagugcccgcaacgacuaugguaccuccggguuuagcgaagagguucuuuacuauacuucuggcugugcaccuucaaugccagcuagucccguguugacaaaggccggaauuaccuggcugagccuacaaugguccaagccuucuggcacgcccucggaugaggggauaagcuacauccucgaaauggaggaagagaccuccggauacgguuucaaaccaaaguaugacggcgaagaucuggcguacacagucaaaaaucuucgaagaucaacuaaguauaaauuuaaggugauugccuacaacagugaggggaagucuaauccuagcgagguaguugaguucaccacaugccccgacaaaccaggaaucccggugaagccuuccgucaaaggcaagauacacucacauagcuuuaaaauuacuugggaucccccaaaggacaacgguggggcaaccaucaauaaguauguggucgaaauggcugaaggcucuaacggaaauaaaugggagaugaucuacuccggcgccacaagggagcaccugugugaucgguugaaccccgggugcuucuaucgucuccgcguguacuguauuagugacggaggucagagcgcuguuucugaaucccuguuagugcagaccccugccguaccacccggcccuugccugccgccaagacuccaggggaggcccaaggcaaaagagauccaacuucgguggggaccuccacuggucgauggcgguucacccauuaguuguuacagcguggaaaugucgccuauagagaaggacgaaccgcgagagguuuaucagggguccgagguggaaugcacugucucuagcuugcuacccggcaaaacguacucauuccgccugagagccgcuaauaagaugggauuuggcccauucagugagaaaugcgacaucacaaccgcgccugggcccccagaucaguguaagccuccccaggugacuugcagguccgcaaccugugcccaaguaaacugggaagugccacucucuaauggaacagacguuaccgaguaucggcuggaauggggcggugucgaggggagcaugcagauuugcuacuguggaccgggccuuuccuaugagaucaagggucugagcccugcuacuacauacuauugccgcgugcaggccuugucaguggucggcgcagggcccuuuagugaaguuguggccugugugacgccacccucuguaccuggaaucgugaccugccuccaggagauuuccgaugacgaaauagagaacccacacuacagccccucgacuugucuggcuaucucaugggaaaaaccuugcgaucauggcucugagauuuuagccuacaguaucgacuucggggauaagcaaucccugacagucggaaaaguuaccagcuauauuaucaauaaccuacagccggacacaacuuacagaauaaggauccaggcacucaauucucugggcgcggguccauuuagccacaugauuaagcugaaaaccaagcccuugccucccgauccaccucgucuggaguguguggcuuucucccaucaaaaccucaagcugaaauggggagaagggacgcccaagacccuuucaacagacaguauccaguaucaccuucagauggaggauaaaaacggccgguuugucagcuuguaccgagguccaugccauacuuauaaggugcagagacucaaugaaucuaccuccuacaaauucugcauucaagccuguaacgaggcaggcgaggggccucugucacaggaauauaucuuuacaacuccgaagaguguucccgccgcuuuaaaggccccaaaaauagagaaggugaaugaccacauuugcgaaaucaccugggagugucugcagccuaugaaaggagaucccguaauuuacagccuacaggucaugcucggcaaggacuccgaguucaaacaaaucuacaaggggccagacucuucguuuagguauagcucacugcagcuuaacugcgaauaccgcuuccgggugugugcaauaagacagugccaggauuccuugggacaccaagaccuggugggcccuuauaguacgacaguccucuuuaucucucagaggaccgagcccccggcuagcacuaaucgcgauacaguugaauccacccgaacucggcgugcccugucagacgagcagugugcggccgugauuuuaguacuguucgcuuucuuuucuauccuuauugcauucaucauacaauacuuugugauuaaguga

SEQ ID NO: 1593 - RNA, 3429 nt, Artificial Sequence
  derived and/or modified sequence opt4 from fibronectin__Homo_sapiens__EAX08809
augagcggccccgcccaggugcccaugaugagccccaacggcagcgugccccccaucuacgugccccccggcuacgccccccaggugaucgaggacaacggcgugagaagaguggugguggugccccaggcccccgaguuccaccccggcagccacaccgugcugcacagaagcccccaccccccccugcccggcuucauccccgugcccaccaugaugccccccccccccagacacauguacagccccgugaccggcgccggcgacaugaccacccaguacaugccccaguaccagagcagccagguguacggcgacguggacgcccacagcacccacggcagaagcaacuucagagacgagagaagcagcaagaccuacgagagacugcagaagaagcugaaggacagacagggcacccagaaggacaagaugagcagcccccccagcagcccccagaagugccccagccccaucaacgagcacaacggccugaucaagggccagaucgccggcggcaucaacaccggcagcgccaagaucaagagcggcaagggcaagggcggcacccagguggacaccgagaucgaggagaaggacgaggagaccaaggccuucgaggcccugcugagcaacaucgugaagcccguggccagcgacauccaggccagaaccguggugcugaccuggagcccccccagcagccugaucaacggcgagaccgacgagagcagcgugcccgagcuguacggcuacgaggugcugaucagcagcaccggcaaggacggcaaguacaagagcguguacgugggcgaggagaccaacaucacccugaacgaccugaagcccgccauggacuaccacgccaaggugcaggccgaguacaacagcaucaagggcacccccagcgaggccgagaucuucaccacccugagcugcgagcccgacauccccaacccccccagaaucgccaacagaaccaagaacagccugacccugcaguggaaggcccccagcgacaacggcagcaagauccagaacuucgugcuggagugggacgagggcaagggcaacggcgaguucugccagugcuacaugggcagccagaagcaguucaagaucaccaagcugagccccgccaugggcugcaaguucagacugagcgccagaaacgacuacggcaccagcggcuucagcgaggaggugcuguacuacaccagcggcugcgcccccagcaugcccgccagccccgugcugaccaaggccggcaucaccuggcugagccugcaguggagcaagcccagcggcacccccagcgacgagggcaucagcuacauccuggagauggaggaggagaccagcggcuacggcuucaagcccaaguacgacggcgaggaccuggccuacaccgugaagaaccugagaagaagcaccaaguacaaguucaaggugaucgccuacaacagcgagggcaagagcaaccccagcgaggugguggaguucaccaccugccccgacaagcccggcauccccgugaagcccagcgugaagggcaagauccacagccacagcuucaagaucaccugggacccccccaaggacaacggcggcgccaccaucaacaaguacgugguggagauggccgagggcagcaacggcaacaagugggagaugaucuacagcggcgccaccagagagcaccugugcgacagacugaaccccggcugcuucuacagacugagaguguacugcaucagcgacggcggccagagcgccgugagcgagagccugcuggugcagacccccgccgugccccccggccccugccugccccccagacugcagggcagacccaaggccaaggagauccagcugagauggggccccccccugguggacggcggcagccccaucagcugcuacagcguggagaugagccccaucgagaaggacgagcccagagagguguaccagggcagcgagguggagugcaccgugagcagccugcugcccggcaagaccuacagcuucagacugagagccgccaacaagaugggcuucggccccuucagcgagaagugcgacaucaccaccgcccccggcccccccgaccagugcaagcccccccaggugaccugcagaagcgccaccugcgcccaggugaacugggaggugccccugagcaacggcaccgacgugaccgaguacagacuggaguggggcggcguggagggcagcaugcagaucugcuacugcggccccggccugagcuacgagaucaagggccugagccccgccaccaccuacuacugcagagugcaggcccugagcguggugggcgccggccccuucagcgaggugguggccugcgugaccccccccagcgugcccggcaucgugaccugccugcaggagaucagcgacgacgagaucgagaacccccacuacagccccagcaccugccuggccaucagcugggagaagcccugcgaccacggcagcgagauccuggccuacagcaucgacuucggcgacaagcagagccugaccgugggcaaggugaccagcuacaucaucaacaaccugcagcccgacaccaccuacagaaucagaauccaggcccugaacagccugggcgccggccccuucagccacaugaucaagcugaagaccaagccccugccccccgacccccccagacuggagugcguggccuucagccaccagaaccugaagcugaaguggggcgagggcacccccaagacccugagcaccgacagcauccaguaccaccugcagauggaggacaagaacggcagauucgugagccuguacagaggccccugccacaccuacaaggugcagagacugaacgagagcaccagcuacaaguucugcauccaggccugcaacgaggccggcgagggcccccugagccaggaguacaucuucaccacccccaagagcgugcccgccgcccugaaggcccccaagaucgagaaggugaacgaccacaucugcgagaucaccugggagugccugcagcccaugaagggcgaccccgugaucuacagccugcaggugaugcugggcaaggacagcgaguucaagcagaucuacaagggccccgacagcagcuucagauacagcagccugcagcugaacugcgaguacagauucagagugugcgccaucagacagugccaggacagccugggccaccaggaccuggugggccccuacagcaccaccgugcuguucaucagccagagaaccgagccccccgccagcaccaacagagacaccguggagagcaccagaaccagaagagcccugagcgacgagcagugcgccgccgugauccuggugcuguucgccuucuucagcauccugaucgccuucaucauccaguacuucgugaucaaguga

SEQ ID NO: 1594 - RNA, 3429 nt, Artificial Sequence
  derived and/or modified sequence opt5 from fibronectin__Homo_sapiens__EAX08809
augagcggccccgcccaggugccuaugauguccccgaacgggucugugcccccuaucuacguucccccuggauaugcuccccaagugauugaggacaauggcgugagacgggucgugguugugccucaggccccggaguuccaccccgggagccauaccguccugcaccgcuccccucaucccccucuccccggauuuaucccggugccuacaaugaugcccccuccucccagacacauguacucucccguuacgggcgcgggggauaugaccacacaguauaugccgcaguaccaaagcucccagguguauggagacgucgaugcucauucuacccacggccggagcaacuuccgcgacgaaagauccagcaagacauacgaacggcugcagaaaaagcucaaagaucgccagggcacccaaaaggacaaaaugucuuccccucccagcucuccccagaagugcccuucccccauuaaugagcacaacgggcugaucaagggacagauugccggcgggaucaauacaggaagcgccaaaaucaagucuggcaaagggaagggaggcacccagguggauacggaaauugaggagaaagacgaagagaccaaggcuuuugaagcccuccuguccaacaucgugaagccggucgcuagcgauauucaagccagaacaguugugcuuaccugguccccucccucuagccugaucaauggcgagacagacgaguccagcgugccugaacucuauggguacgagguccugauuucuuccaccggaaaagauggcaaguacaaaagcguguauguuggggaagagacgaacaucacacugaaugaccucaagcccgcgauggauuaccaugccaaagugcaggcugaauauaacucuauuaagggaaccccuagcgaggccgagaucuucacaacccuguccugugaacccgacaucccgaauccuccccggauugcuaaccgcaccaaaaauucucuuacacugcaguggaaggcccccagcgacaacggcuccaagauccaaaauuuuguccucgagugggaugaagggaaaggaaacggcgaguucugccaguguuacaugggcagccagaagcaguuuaaaauuacgaagcugucuccugcgauggggugcaaauucagacuuuccgcccggaacgacuauggaaccagcggcuuuucugaagaggugcuguacuauacauccgggugugcuccgagcaugcccgccuccccuguucucaccaaggcuggaaucacauggcugucucugcaauggagcaagcccuccggcaccccuucugaugaggggauuagcuacauccucgaaauggaggaagagacguccggcuacggauucaaacccaaguaugacggcgaagaucuggccuacacagugaaaaaucuucgcagaagcaccaaguauaaauuuaaggucaucgccuacaacucugaggggaaguccaauccuagcgagguggucgaguucaccacaugccccgacaaaccgggcauuccugugaagcccucuguuaaaggaaagauccacucccauagcuuuaaaauuaccugggauccucccaaggacaacgggggagcuacaaucaauaaguauguggucgaaauggcggaaggcucuaacgggaauaaaugggagaugauuuacagcggcgccacgcgggagcaccugugugaucgccucaacccgggaugcuucuauagacugcggguguacuguaucuccgacggcgggcagagcgcuguuucugaaucccuucuggugcagaccccugccgugcccccuggacccugccuucccccuagacugcagggccgcccgaaggccaaagagauccaacugcggugggggcccccucucgucgauggaggcagccccauuuccuguuacucuguggaaaugagcccuaucgagaaggacgaacccagagagguuuaucagggguccgaggucgaaugcacagugucuagccugcuuccuggcaaaaccuacuccuuccgccugcgggcugccaauaagaugggauuuggcccguucucugagaaaugcgacauuacaaccgcgcccgggccucccgaucaguguaagccuccccaggugacgugcagaagcgcuaccugugcccaagucaacugggaagugccgcucuccaauggaacagacguuaccgaguaucgccuggaauggggcgggguggagggaagcaugcagaucugcuacuguggcccugggcuuucuuaugagauuaagggccugucccccgccacaaccuacuauugccggguccaggcucucagcgugguuggagccggccccuuuucugaaguggucgcuugugugacgccucccuccguuccugggaucgugacaugccugcaggagauuagcgaugacgaaaucgagaacccgcacuacucucccuccaccugucuggccaucagcugggaaaaaccuugcgaucauggauccgagauucucgcguacagcaucgacuucggcgauaagcaaucucugacagucgggaaagugaccagcuauauuaucaauaaccuucagcccgacaccacauaccgcauuagaauccaggcccucaauucccugggagcuggcccuuuuucucacaugaucaagcugaaaacgaagccccugccgccugaucccccucggcuugaguguguggccuucagccaucaaaaccucaagcugaaauggggcgaagggacccccaagacacuguccaccgacucuauucaguaucaccuccagauggaggauaaaaacggaagauuugucagccuguaccgcggcccuugccauacauauaagguucagcggcuuaaugaauccaccucuuacaaauucugcauccaggcuuguaacgaggccggggagggaccccugagccaagaauauauuuuuacgacaccgaaguccgugccugcggcccucaaggcucccaaaaucgagaaggugaaugaccacauuugcgaaaucaccugggagugucugcagcccaugaaaggcgauccugucaucuacagccuucaggugaugcuggggaaggacucugaguucaaacaaauuuacaagggaccggacuccagcuuuagauauucuucccuccagcugaacugcgaauaccgguuccgcguuugugccaucagacagugccaggauagccugggccaccaagaccucgugggccccuauuccaccacaguccuguuuauuucucagcggaccgagccucccgcuagcacaaauagagauacgguggaauccacccgcacacggagagcccuuagcgacgagcagugugccgcuguuauccugguccucuucgcguucuuuucuauucugaucgccuucaucauucaauacuuugucaucaaguga

SEQ ID NO: 1595 - protein, 339 aa, Artificial Sequence
  fibronectin__Homo_sapiens__A6NH44
MPPSKPHPPVVGKVTHHSIELYWDLEKKAKRQGPQEQWFRFSIEEEDPKMHTYGIIYTGYATKHVVEGLEPRTLYRFRLKVTSPSGECEYSPLVSVSTTREPISSEHLHRAVSVNDEDLLVRILQGGRVKVDVPNKFGFTALMVAAQKGYTRLVKILVSNGTDVNLKNGSGKDSLMLACYAGHLDVVKYLRRHGASWQARDLGGCTALHWAADGGHCSVIEWMIKDGCEVDVVDTGSGWTPLMRVSAVSGNQRVASLLIDAGANVNVKDRNGKTPLMVAVLNNHEELVQLLLDKGADASVKNEFGKGVLEMARVFDRQSVVSLLEERKKKQRPKKSCVC

SEQ ID NO: 1596 - RNA, 1020 nt, Artificial Sequence
  fibronectin__Homo_sapiens__EAW49214
augccacccucaaagccucauccaccugucgugggcaaagugacucaucacagcauugaauuauacugggaucuggaaaagaaagccaaacgccaaggaccucaagagcagugguucagguucucgauugaagaagaagaccccaaaaugcacacuuaugguaucauuuauacgggauaugcaacgaagcauguuguugaaggucuggaaccaaggacgcuguacagauuucgccugaaggucaccagccccucuggggagugugaguacagcccacucgucucagugucuacaaccagagagcccauaaguagugagcacuugcaccgggcugucagugugaaugaugaagauuugcugguccgaauacuucaaggaggccguguuaagguugauguucccaauaaguuuggcuuuaccgcucugaugguugcugcccagaaaggauacaccaggcuugugaaaauccuaguuucuaauggcacagacgugaaucugaagaauggaaguggcaaggacagucuaaugcuggcgugcuaugcgggacaccuagauguugugaaauaucuccgaagacauggcgcuucuuggcaggcuagagaccugggaggcuguacagcucugcacugggcugcagauggaggccacugcagugugauugaguggaugauaaaggauggcugugagguagacgucguggacacugguucaggauggaccccacucaugagagucucugcggugucgggaaaucagaggguggccucucuucuaauugaugcuggggccaaugugaaugugaaggacagaaauggaaagacgccccuuaugguggcuguguuaaauaaucaugaagaguuaguucaguuacuucuugacaaaggggcagaugcaaguguaaaaaaugaguucggcaaagguguccuagaaauggccagaguuuuugacagacagaguguagucuccuuauuagaagaaaggaaaaaaaagcagaggccaaagaagucuugugucugcuga

SEQ ID NO: 1597 - RNA, 1020 nt, Artificial Sequence
  derived and/or modified sequence opt1 from fibronectin__Homo_sapiens__EAW49214
augcccccgagcaagccccacccgcccguggucggcaaggugacccaccacagcaucgagcuguacugggaccucgagaagaaggccaagcgccaggggccccaggagcagugguuccgguucagcaucgaggaggaggaccccaagaugcacaccuacggcaucaucuacacgggguacgccaccaagcacguggucgagggccuggagccccgcacccuguaccgguuccgccucaaggugaccucccccagcggggagugcgaguacuccccgcuggugagcgucuccacgacccgggagcccaucagcuccgagcaccuccaccgcgcggugagcgugaacgacgaggaccugcugguccggauccugcagggcggccgcgugaagguggacguccccaacaaguucggguucaccgcccucaugguggccgcccagaagggcuacacccggcuggugaagauccuggucuccaacgggacggacgugaaccucaagaacggcagcgggaaggacucccugaugcuggccugcuacgcgggccaccucgacguggucaaguaccugcgccggcacggcgccagcuggcaggcccgcgaccucgggggcugcaccgcccugcacugggcggccgacgggggccacugcuccgugaucgaguggaugaucaaggacggcugcgagguggacgucguggacaccgggagcggcuggacgccccugaugcggguguccgccgucagcgggaaccagcgcguggccucccugcucaucgacgccggcgcgaacgucaacgugaaggaccggaacgggaagaccccgcugaugguggccguccugaacaaccacgaggagcucgugcagcugcugcucgacaagggcgccgacgccagcgugaagaacgaguucggcaaggggguccuggagauggcccgcguguucgaccggcagagcguggucucccugcucgaggagcgcaagaagaagcagcggcccaagaaguccugcgugugcuga

SEQ ID NO: 1598 - RNA, 1020 nt, Artificial Sequence
  derived and/or modified sequence opt2 from fibronectin__Homo_sapiens__EAW49214
augccccccuccaagccccacccccccgucgucggcaaggucacccaccacuccaucgagcucuacugggaccucgagaagaaggccaagcgccagggcccccaggagcagugguuccgcuucuccaucgaggaggaggaccccaagaugcacaccuacggcaucaucuacaccggcuacgccaccaagcacgucgucgagggccucgagccccgcacccucuaccgcuuccgccucaaggucaccucccccuccggcgagugcgaguacuccccccucgucuccgucuccaccacccgcgagcccaucuccuccgagcaccuccaccgcgccgucuccgucaacgacgaggaccuccucguccgcauccuccagggcggccgcgucaaggucgacguccccaacaaguucggcuucaccgcccucauggucgccgcccagaagggcuacacccgccucgucaagauccucgucuccaacggcaccgacgucaaccucaagaacggcuccggcaaggacucccucaugcucgccugcuacgccggccaccucgacgucgucaaguaccuccgccgccacggcgccuccuggcaggcccgcgaccucggcggcugcaccgcccuccacugggccgccgacggcggccacugcuccgucaucgaguggaugaucaaggacggcugcgaggucgacgucgucgacaccggcuccggcuggaccccccucaugcgcgucuccgccgucuccggcaaccagcgcgucgccucccuccucaucgacgccggcgccaacgucaacgucaaggaccgcaacggcaagaccccccucauggucgccguccucaacaaccacgaggagcucguccagcuccuccucgacaagggcgccgacgccuccgucaagaacgaguucggcaagggcguccucgagauggcccgcgucuucgaccgccaguccgucgucucccuccucgaggagcgcaagaagaagcagcgccccaagaaguccugcgucugcuga

SEQ ID NO: 1599 - RNA, 1020 nt, Artificial Sequence
  derived and/or modified sequence opt3 from fibronectin__Homo_sapiens__EAW49214
augcccccuagcaagccacacccgcccguggucggcaaaguuacccaucacuccaucgagcuguacugggaccucgaaaagaaagccaagagacaggggccucaagagcagugguucagguuuucuauugaagaggaagauccaaaaaugcauacauauggaauaaucuacacugguuaugcuacgaagcacgugguagagggccuugagccccggacccuguaccgcuuccgauugaaggugacaucaccuaguggggaaugcgaguauagcccauuagucuccgugucuacuacccgugaacccauuucgucagagcaucugcacagagcaguuagcgugaacgacgaggaucuacucgucaggauccugcagggaggccgggugaaaguagacguuccuaauaaguuugguuucacagcccuuaugguggcggcucagaaaggguacacccgccuggucaagauuuuggugaguaacggaacugaugugaaucucaaaaacggcuccggcaaggacucucugaugcuggccuguuaugcagggcaccucgaugucguuaaguacuuaagaaggcauggagccagcuggcaagcucgggaccuggguggcugcacagcacuucacugggccgcugaugggggacauuguuccgugaucgaauggaugauaaaagacggcugcgagguagauguggucgacaccgguucaggguggacgccauugaugcgcgugagugccguuagcggaaaucagcgaguggcgucucugcuaaucgaugcaggcgccaacgucaaugugaaggacagaaacggcaaaacuccgcucaugguagcuguucugaauaaccacgaggaacuugugcagcuguugcucgacaagggggccgaugcauccgucaaaaaugaauuuggaaagggugugcuggagauggcuagggucuucgaccggcagucagugguuagcuuacuggaggaacguaaaaagaagcaacgccccaaaaagaguugugugugcuga

SEQ ID NO: 1600 - RNA, 1020 nt, Artificial Sequence
  derived and/or modified sequence opt4 from fibronectin__Homo_sapiens__EAW49214
augccccccagcaagccccacccccccguggugggcaaggugacccaccacagcaucgagcuguacugggaccuggagaagaaggccaagagacagggcccccaggagcagugguucagauucagcaucgaggaggaggaccccaagaugcacaccuacggcaucaucuacaccggcuacgccaccaagcacgugguggagggccuggagcccagaacccuguacagauucagacugaaggugaccagccccagcggcgagugcgaguacagcccccuggugagcgugagcaccaccagagagcccaucagcagcgagcaccugcacagagccgugagcgugaacgacgaggaccugcuggugagaauccugcagggcggcagagugaagguggacgugcccaacaaguucggcuucaccgcccugaugguggccgcccagaagggcuacaccagacuggugaagauccuggugagcaacggcaccgacgugaaccugaagaacggcagcggcaaggacagccugaugcuggccugcuacgccggccaccuggacguggugaaguaccugagaagacacggcgccagcuggcaggccagagaccugggcggcugcaccgcccugcacugggccgccgacggcggccacugcagcgugaucgaguggaugaucaaggacggcugcgagguggacgugguggacaccggcagcggcuggaccccccugaugagagugagcgccgugagcggcaaccagagaguggccagccugcugaucgacgccggcgccaacgugaacgugaaggacagaaacggcaagaccccccugaugguggccgugcugaacaaccacgaggagcuggugcagcugcugcuggacaagggcgccgacgccagcgugaagaacgaguucggcaagggcgugcuggagauggccagaguguucgacagacagagcguggugagccugcuggaggagagaaagaagaagcagagacccaagaagagcugcgugugcuga

SEQ ID NO: 1601 - RNA, 1020 nt, Artificial Sequence
  derived and/or modified sequence opt5 from fibronectin__Homo_sapiens__EAW49214
augcccccuagcaagccgcaucccccuguggucggcaaaguuacccaccacuccaucgagcuguacugggaccucgaaaagaaagccaagagacaggggccccaagagcagugguuccgguuuucuauugaagaggaagauccuaaaaugcauacauauggaaucauuuacacgggcuaugcuaccaagcacgugguggaggggcuggagccccgcacacuuuacagauuccggcugaaggucaccagcccuuccggagaaugcgaguauucuccgcucgugagcguuuccacaacccgcgaacccaucucuagcgagcaucugcacagagccguguccgucaacgacgaggaucuucuggugcggauucuccagggcgggcgcguuaaaguggacgucccuaauaaguuuggauucacagcgcugaugguggcugcccagaaaggcuacaccagacuggugaagauccucgucagcaacggcacggauguuaaucugaaaaacgggucuggaaaggacucccuuaugcuggccuguuaugcuggccaccucgauguggugaaguaccugcggcgccauggggccagcuggcaagcuagagaccuuggaggcugcaccgcccugcacugggcggccgaugggggacauuguucugucaucgaauggaugauuaaagacggcugcgagguggauguuguggacacaggcuccggguggacaccccucaugcgggucagcgcugugucuggaaaucagcgcguugccucccugcugaucgaugcuggcgccaacgugaaugucaaggacagaaacgggaaaaccccucucaugguggcgguccugaauaaccacgaggaacuugugcagcugcuccuggacaagggagccgaugcuagcguuaaaaaugaauuuggcaagggggugcuugagauggcccgggucuucgaccgccaguccgugguuucucugcucgaggaacggaaaaagaagcaaagacccaaaaagagcugugugugcuga

SEQ ID NO: 1602 - protein, 1049 aa, Artificial Sequence [sequence omitted]

SEQ ID NO: 1603 - RNA, 3150 nt, Artificial Sequence
  fibronectin__Homo_sapiens__BAF84259
auggggagccggacgccagaguccccucuccacgccgugcagcugcgcuggggcccccggcgccgacccccgcugcugccgcugcuguugcugcugcugccgccgccacccagggucgggggcuucaacuuagacgcggaggccccagcaguacucucggggcccccgggcuccuucuucggauucucaguggaguuuuaccggccgggaacagacggggucagugugcuggugggagcacccaaggcuaauaccagccagccaggagugcugcaggguggugcugucuaccucuguccuuggggugccagccccacucagugcacccccauugaauuugacagcaaaggcucucggcuccuggaguccucacuguccagcucagagggagaggagccuguggaguacaaguccuugcagugguucggggcaacaguucgagcccauggcuccuccaucuuggcaugcgcuccacuguacagcuggcgcacagagaaggagccacugagcgaccccgugggcaccugcuaccucuccacagauaacuucacccgaauucuggaguaugcacccugccgcucagauuucagcugggcagcaggacaggguuacugccaaggaggcuucagugccgaguucaccaagacuggccgugugguuuuagguggaccaggaagcuauuucuggcaaggccagauccugucugccacucaggagcagauugcagaaucuuauuaccccgaguaccugaucaaccugguucaggggcagcugcagacucgccaggccaguuccaucuaugaugacagcuaccuaggauacucuguggcuguuggugaauucaguggugaugacacagaagacuuuguugcuggugugcccaaagggaaccucacuuacggcuaugucaccauccuuaauggcucagacauucgaucccucuacaacuucucaggggaacagauggccuccuacuuugccuaugcaguggccgccacagacgucaauggggacgggcuggaugacuugcuggugggggcaccccugcucauggaucggaccccugacgggcggccucaggaggugggcagggucuacgucuaccugcagcacccagccggcauagaguccacgcccacccuuacccucacuggccaugaugaguuuggccgauuuggcagcuccuugaccccccugggggaccuggaccaggauggcuacaaugauguggccaucggggcucccuuugguggggagacccagcagggaguaguguuuguauuuccugggggcccaggagggcugggcucuaagccuucccagguucugcagccccugugggcagccagccacaccccagacuucuuuggcucugcccuucgaggaggccgagaccuggauggcaauggauauccugaucugauugugggguccuuugguguggacaaggcugugguauacaggggccgccccaucguguccgcuagugccucccucaccaucuuccccgccauguucaacccagaggagcggagcugcagcuuagaggggaacccuguggccugcaucaaccuuagcuucugccucaaugcuucuggaaaacacguugcugacuccauugguuucacaguggaacuucagcuggacuggcagaagcagaagggagggguacggcgggcacuguuccuggccuccaggcaggcaacccugacccagacccugcucauccagaauggggcucgagaggauugcagagagaugaagaucuaccucaggaacgagucagaauuucgagacaaacucucgccgauucacaucgcucucaacuucuccuuggacccccaagccccaguggacagccacggccucaggccagcccuacauuaucagagcaagagccggauagaggacaaggcucagaucuugcugggcuguggagaagacaacaucugugugccugaccugcagcuggaaguguuuggggagcagaaccauguguaccugggugacaagaaugcccugaaccucacuuuccaugcccagaaugugggugaggguggcgccuaugaggcugagcuucgggucaccgccccuccagaggcugaguacucaggacucgucagacacccagggaacuucuccagccugagcugugacuacuuugccgugaaccagagccgccugcuggugugugaccugggcaaccccaugaaggcaggagccagucugugggguggccuucgguuuacagucccucaucuccgggacacuaagaaaaccauccaguuugacuuccagauccucagcaagaaucucaacaacucgcaaagcgacgugguuuccuuucggcucuccguggaggcucaggcccaggucacccugaacggugucuccaagccugaggcagugcuauucccaguaagcgacuggcauccccgagaccagccucaggaggaggaggaccugggaccugcuguccaccaugucuaugagcucaucaaccaaggccccagcuccauuagccagggugugcuggaacucagcuguccccaggcucuggaaggucagcagcuccuauaugugaccagaguuacgggacucaacugcaccaccaaucaccccauuaacccaaagggccuggaguuggaucccgaggguucccugcaccaccagcaaaaacgggaagcuccaagccgcagcucugcuuccucgggaccucagauccugaaaugcccggaggcugaguguuucaggcugcgcugugagcucgggccccugcaccaacaagagagccaaagucugcaguugcauuuccgagucugggccaagacuuucuugcagcgggagcaccagccauuuagccugcagugugaggcuguguacaaagcccugaagaugcccuaccgaauccugccucggcagcugccccaaaaagagcgucagguggccacagcugugcaauggaccaaggcagaaggcagcuauggcgucccacuguggaucaucauccuagccauccuguuuggccuccugcuccuaggucuacucaucuacauccucuacaagcuuggauucuucaaacgcucccucccauauggcaccgccauggaaaaagcucagcucaagccuccagccaccucugaugccuga

SEQ ID NO: 1604 - RNA, 3150 nt, Artificial Sequence
  derived and/or modified sequence opt1 from fibronectin__Homo_sapiens__BAF84259
augggcagccgcacccccgaguccccgcugcacgccgugcagcuccggugggggccccgccggcgccccccccugcugccgcuccugcugcuccugcugcccccccccccgcgggucggcggguucaaccucgacgccgaggcgcccgccgugcugagcggcccccccggguccuucuucggcuucagcguggaguucuaccgcccgggcaccgacggggucuccgugcuggugggcgcccccaaggccaacacgagccagcccgggguccuccagggcggggccguguaccugugccccuggggcgcguccccgacccagugcacccccaucgaguucgacagcaagggcucccggcugcucgagagcucccugagcuccagcgagggggaggagcccguggaguacaagucccugcagugguucggcgccaccguccgcgcccacgggagcuccauccucgccugcgcgccccuguacagcuggcggacggagaaggagccgcuguccgaccccgugggcaccugcuaccucagcaccgacaacuucacccgcauccuggaguacgcccccugccggagcgacuucuccugggccgccggccagggguacugccagggcggguucagcgccgaguucacgaagaccggccgcgugguccuggggggccccggcuccuacuucuggcaggggcagauccucagcgcgacccaggagcagaucgccgaguccuacuacccggaguaccugaucaaccuggugcagggccagcuccagacccggcaggccagcuccaucuacgacgacagcuaccugggguacuccguggccgucggcgaguucagcggggacgacacggaggacuucguggccggcgugcccaagggcaaccugaccuacggguacgucaccauccucaacggcuccgacauccgcagccuguacaacuucuccggggagcagauggcgagcuacuucgccuacgccguggccgccaccgacgugaacggcgacgggcuggacgaccuccuggucggcgcgccccugcucauggaccggacgcccgacggccgcccgcaggagguggggcggguguacgucuaccugcagcaccccgccggcaucgaguccacccccacccugacccucacggggcacgacgaguucggccgcuucggcagcucccugaccccgcugggggaccucgaccaggacggcuacaacgacguggccaucggggcccccuucggcggggagacccagcagggcgucguguucguguuccccggcgggcccggcgggcugggcagcaagccgucccagguccugcagccccucugggccgcgagccacacccccgacuucuucgggagcgcccugcggggcggccgcgaccuggacgggaacggcuaccccgaccucaucgugggguccuucggcguggacaaggccgucguguaccgggggcgcccgaucgugagcgccuccgcgagccugacgaucuuccccgccauguucaaccccgaggagcgcuccugcagccuggagggcaaccccgucgccugcaucaaccuguccuucugccucaacgccagcggcaagcacguggccgacuccaucggguucaccguggagcugcagcuggacuggcagaagcagaagggcgggguccggcgcgcgcucuuccuggccagccggcaggccacccugacccagacgcuccugauccagaacggcgcccgcgaggacugccgggagaugaagaucuaccugcgcaacgaguccgaguuccgggacaagcucagcccgauccacaucgcccugaacuucucccuggacccccaggcgcccguggacagccacgggcuccgccccgcccugcacuaccaguccaagagccggaucgaggacaaggcccagauccugcucggcugcggcgaggacaacaucugcgugccggaccugcagcuggaggucuucggggagcagaaccacguguaccucggcgacaagaacgcccugaaccugaccuuccacgcccagaacgugggggagggcggcgcguacgaggccgagcuccgcgucaccgccccccccgaggccgaguacuccgggcuggugcggcaccccggcaacuucagcagccuguccugcgacuacuucgcggugaaccagagccgccuccuggucugcgaccuggggaacccgaugaaggccggcgccucccucugggggggccugcgguucaccgugccccaccugcgcgacacgaagaagaccauccaguucgacuuccagauccucagcaagaaccugaacaacucccagagcgacguggucuccuuccggcugagcguggaggcccaggcccaggugacccucaacggcgucuccaagcccgaggcggugcuguuccccgugagcgacuggcacccgcgcgaccagccccaggaggaggaggaccuggggcccgccguccaccacguguacgagcucaucaaccagggcccguccagcaucucccagggggugcuggagcugagcugcccccaggcccucgagggccagcagcugcuguacgucacccgggugacggggcucaacugcaccaccaaccaccccaucaaccccaagggccuggagcuggacccggagggcucccuccaccaccagcagaagcgcgaggcccccagccgguccagcgccuccagcgggccccagauccugaagugccccgaggcggagugcuuccgccugcgcugcgagcucggcccgcugcaccagcaggagagccagucccugcagcuccacuuccgggugugggccaagaccuuccugcagcgcgagcaccagcccuucagccugcagugcgaggccgucuacaaggcccucaagaugcccuaccggauccugccccgccagcugccgcagaaggagcggcagguggccaccgcggugcaguggacgaaggccgagggguccuacggcgucccccucuggaucaucauccuggccauccuguucgggcuccugcugcucggccugcugaucuacauccucuacaagcugggcuucuucaagcgcagccugcccuacgggaccgccauggagaaggcgcagcucaagcccccggccaccuccgacgccuga

SEQ ID NO: 1605 - RNA, 3150 nt, Artificial Sequence
  derived and/or modified sequence opt2 from fibronectin__Homo_sapiens__BAF84259
augggcucccgcacccccgaguccccccuccacgccguccagcuccgcuggggcccccgccgccgccccccccuccucccccuccuccuccuccuccuccccccccccccccgcgucggcggcuucaaccucgacgccgaggcccccgccguccucuccggcccccccggcuccuucuucggcuucuccgucgaguucuaccgccccggcaccgacggcgucuccguccucgucggcgcccccaaggccaacaccucccagcccggcguccuccagggcggcgccgucuaccucugccccuggggcgccucccccacccagugcacccccaucgaguucgacuccaagggcucccgccuccucgaguccucccucuccuccuccgagggcgaggagcccgucgaguacaagucccuccagugguucggcgccaccguccgcgcccacggcuccuccauccucgccugcgccccccucuacuccuggcgcaccgagaaggagccccucuccgaccccgucggcaccugcuaccucuccaccgacaacuucacccgcauccucgaguacgcccccugccgcuccgacuucuccugggccgccggccagggcuacugccagggcggcuucuccgccgaguucaccaagaccggccgcgucguccucggcggccccggcuccuacuucuggcagggccagauccucuccgccacccaggagcagaucgccgaguccuacuaccccgaguaccucaucaaccucguccagggccagcuccagacccgccaggccuccuccaucuacgacgacuccuaccucggcuacuccgucgccgucggcgaguucuccggcgacgacaccgaggacuucgucgccggcguccccaagggcaaccucaccuacggcuacgucaccauccucaacggcuccgacauccgcucccucuacaacuucuccggcgagcagauggccuccuacuucgccuacgccgucgccgccaccgacgucaacggcgacggccucgacgaccuccucgucggcgccccccuccucauggaccgcacccccgacggccgcccccaggaggucggccgcgucuacgucuaccuccagcaccccgccggcaucgaguccacccccacccucacccucaccggccacgacgaguucggccgcuucggcuccucccucaccccccucggcgaccucgaccaggacggcuacaacgacgucgccaucggcgcccccuucggcggcgagacccagcagggcgucgucuucgucuuccccggcggccccggcggccucggcuccaagcccucccagguccuccagccccucugggccgccucccacacccccgacuucuucggcuccgcccuccgcggcggccgcgaccucgacggcaacggcuaccccgaccucaucgucggcuccuucggcgucgacaaggccgucgucuaccgcggccgccccaucgucuccgccuccgccucccucaccaucuuccccgccauguucaaccccgaggagcgcuccugcucccucgagggcaaccccgucgccugcaucaaccucuccuucugccucaacgccuccggcaagcacgucgccgacuccaucggcuucaccgucgagcuccagcucgacuggcagaagcagaagggcggcguccgccgcgcccucuuccucgccucccgccaggccacccucacccagacccuccucauccagaacggcgcccgcgaggacugccgcgagaugaagaucuaccuccgcaacgaguccgaguuccgcgacaagcucucccccauccacaucgcccucaacuucucccucgacccccaggcccccgucgacucccacggccuccgccccgcccuccacuaccaguccaagucccgcaucgaggacaaggcccagauccuccucggcugcggcgaggacaacaucugcguccccgaccuccagcucgaggucuucggcgagcagaaccacgucuaccucggcgacaagaacgcccucaaccucaccuuccacgcccagaacgucggcgagggcggcgccuacgaggccgagcuccgcgucaccgccccccccgaggccgaguacuccggccucguccgccaccccggcaacuucuccucccucuccugcgacuacuucgccgucaaccagucccgccuccucgucugcgaccucggcaaccccaugaaggccggcgccucccucuggggcggccuccgcuucaccgucccccaccuccgcgacaccaagaagaccauccaguucgacuuccagauccucuccaagaaccucaacaacucccaguccgacgucgucuccuuccgccucuccgucgaggcccaggcccaggucacccucaacggcgucuccaagcccgaggccguccucuuccccgucuccgacuggcacccccgcgaccagccccaggaggaggaggaccucggccccgccguccaccacgucuacgagcucaucaaccagggccccuccuccaucucccagggcguccucgagcucuccugcccccaggcccucgagggccagcagcuccucuacgucacccgcgucaccggccucaacugcaccaccaaccaccccaucaaccccaagggccucgagcucgaccccgagggcucccuccaccaccagcagaagcgcgaggcccccucccgcuccuccgccuccuccggcccccagauccucaagugccccgaggccgagugcuuccgccuccgcugcgagcucggcccccuccaccagcaggagucccagucccuccagcuccacuuccgcgucugggccaagaccuuccuccagcgcgagcaccagcccuucucccuccagugcgaggccgucuacaaggcccucaagaugcccuaccgcauccucccccgccagcucccccagaaggagcgccaggucgccaccgccguccaguggaccaaggccgagggcuccuacggcgucccccucuggaucaucauccucgccauccucuucggccuccuccuccucggccuccucaucuacauccucuacaagcucggcuucuucaagcgcucccuccccuacggcaccgccauggagaaggcccagcucaagccccccgccaccuccgacgccuga

SEQ ID NO: 1606 - RNA, 3150 nt, Artificial Sequence
  derived and/or modified sequence opt3 from fibronectin__Homo_sapiens__BAF84259
augggcagcagaacccccgaguccccucugcacgccgugcagcucaggugggggccacggcgccgaccgccccuucugccuuuguuacugcuacuccugccacccccuccacgugucggagguuucaaccuugacgcugaagcacccgccguucugucuggcccuccagggucauuuuucggauuuaguguggaguucuacagaccgggcacagaugguguaagcguguuggucggggcgcccaaggcuaauacuucccaaccuggagugcuccagggcggcgccguuuaucugugcccauggggagcaucucccacgcaguguaccccuaucgaauuugacucgaaaggaucaaggcugcucgagagcaguuuauccucuagcgaaggugaggagccaguggaauacaagucccugcagugguucggcgccacaguccgggcucaugggucaaguauucuugcaugcgcccccuuguauagcuggcgcacugagaaagaaccgcugucugauccugugggaaccuguuaccuauccacagacaacuuuaccagaauacucgaguaugcucccugcaggucagauuucagcugggccgcgggccaagguuacugucaagggggauuuagugcagaguucacuaagacaggccggguaguucugggcgggccaggaucuuauuuuuggcagggucagauccuuuccgccacccaggaacagauugcugagagcuacuacccugaauaucugaucaauuuggugcagggccagcuccaaacgcgccaggccucgucuauuuacgacgauuccuaucugggguacucagucgcagugggagaguucaguggcgacgauacugaagacuuuguggcugguguccccaaagggaacuuaaccuauggcuacguuacaauccugaauggaagcgauauacgaucccucuauaacuucucuggcgagcagauggccagcuacuucgcguacgccguggcagcuacugacguaaauggggauggacuugacgaccuguuggugggugccccacuacugauggauagaacccccgacggcaggccucaagaggucgggcggguguauguuuaccuccagcacccagcuggaaucgaaucaacaccgacccugacgcuuacuggccaugaugaguuuggucguuucgggaguucccugacacccuugggcgaccucgaucaggacggauauaacgauguggccauuggcgcaccuuuugggggagaaacccagcaaggugucguguucguauuuccaggcgggcccggaggccuggguagcaagccuucucagguuuuacagccacugugggccgcuucacacacucccgacuucuuugggagugcgcuacgcggcggaagagaucucgacggcaauggguacccggaucugaucguggggagcuucggcgucgacaaggcaguggucuauaggggucggccuauuguguccgccucugcuucgcuuacaaucuuuccagccauguucaaccccgaggaacgaagcugcuccuuggaggggaauccuguugcauguauaaaccugucauuuugccucaaugccaguggaaaacauguggcugacucuauuggcuucaccguagagcugcagcuugauuggcaaaagcagaaagguggcguccgcagagcccuguuuuuggcaagcaggcaggcgacgcucacccagacacuguuaauccaaaacggggcucgggaagacugucgcgagaugaagauuuaccugagaaaugaauccgaguucagggauaaacuaucacccauccacaucgcccucaacuucagccuggacccacaggcaccuguggauucucacggacuucgucccgccuugcauuaucaguccaagagucggauugaagacaaggcucagauacugcucggcugcggggaggauaacaucuguguuccagaccugcaauuagagguguuuggagaacagaaucacgucuaccugggcgauaaaaacgcccuuaauuugacuuuccaugcacagaacgugggugaagggggagcuuacgaggccgagcuccgaguaaccgcgccgccugaggccgaauauagcggccuggugagacaccccgguaauuuuucuucccuaucaugcgacuacuucgcuguuaaccaaaguaggcugcucgucugcgaucugggcaauccaaugaaggcaggggccagccuuuggggaggcuugcgcuuuacagugccccacuugcgggacacuaaaaagaccauucaguucgauuuucagaucuuaucgaaaaaccucaauaacucccagucugacguggucagcuucagacugucaguugaggcucaagcccaggugacacuuaauggggugaguaagccugaagcaguacuguuuccagucuccgacuggcaucccagggaucagccucaggaggaagaggacuugggaccggcggugcaccauguuuaugagcucauaaaccaaggcccaucuagcauuucccagggugugcuggaacuaucauguccccaggcccuggaggggcagcaacuccuguacgucacccgcgugacuggacuuaauugcacgacaaaccacccuaucaauccaaaaggcuuggaacuggaucccgaggguagcuuacaucaccagcagaagcgagaagcuccuagucggucuuccgccagcucgggcccgcaaauccucaagugucccgaggcagagugcuuccgucugagaugugaacuugggccacugcaccagcaggagucacagucucuacaacuccauuuuaggguuugggcuaaaaccuuccugcagcgcgaacaccagccuuuuaguuugcagugcgaggccguguauaaggcacugaaaaugcccuaccggauuuuaccaagacaacucccucagaaggaaaggcagguagccacugcuguccaguggaccaaagcggagggauccuauggcgugccccuguggaucauuauacuugccauccuguucggguugcuccugcuaggacugcuuauuuacauccucuacaagcugggcuucuuuaagcgaagccugccauaugguacagcaauggagaaagcucaacugaagccgccugccaccucugacgccuga

SEQ ID NO: 1607 - RNA, 3150 nt, Artificial Sequence
  derived and/or modified sequence opt4 from fibronectin__Homo_sapiens__BAF84259
augggcagcagaacccccgagagcccccugcacgccgugcagcugagauggggccccagaagaagacccccccugcugccccugcugcugcugcugcugccccccccccccagagugggcggcuucaaccuggacgccgaggcccccgccgugcugagcggcccccccggcagcuucuucggcuucagcguggaguucuacagacccggcaccgacggcgugagcgugcuggugggcgcccccaaggccaacaccagccagcccggcgugcugcagggcggcgccguguaccugugccccuggggcgccagccccacccagugcacccccaucgaguucgacagcaagggcagcagacugcuggagagcagccugagcagcagcgagggcgaggagcccguggaguacaagagccugcagugguucggcgccaccgugagagcccacggcagcagcauccuggccugcgccccccuguacagcuggagaaccgagaaggagccccugagcgaccccgugggcaccugcuaccugagcaccgacaacuucaccagaauccuggaguacgcccccugcagaagcgacuucagcugggccgccggccagggcuacugccagggcggcuucagcgccgaguucaccaagaccggcagaguggugcugggcggccccggcagcuacuucuggcagggccagauccugagcgccacccaggagcagaucgccgagagcuacuaccccgaguaccugaucaaccuggugcagggccagcugcagaccagacaggccagcagcaucuacgacgacagcuaccugggcuacagcguggccgugggcgaguucagcggcgacgacaccgaggacuucguggccggcgugcccaagggcaaccugaccuacggcuacgugaccauccugaacggcagcgacaucagaagccuguacaacuucagcggcgagcagauggccagcuacuucgccuacgccguggccgccaccgacgugaacggcgacggccuggacgaccugcuggugggcgccccccugcugauggacagaacccccgacggcagaccccaggaggugggcagaguguacguguaccugcagcaccccgccggcaucgagagcacccccacccugacccugaccggccacgacgaguucggcagauucggcagcagccugaccccccugggcgaccuggaccaggacggcuacaacgacguggccaucggcgcccccuucggcggcgagacccagcagggcgugguguucguguuccccggcggccccggcggccugggcagcaagcccagccaggugcugcagccccugugggccgccagccacacccccgacuucuucggcagcgcccugagaggcggcagagaccuggacggcaacggcuaccccgaccugaucgugggcagcuucggcguggacaaggccgugguguacagaggcagacccaucgugagcgccagcgccagccugaccaucuuccccgccauguucaaccccgaggagagaagcugcagccuggagggcaaccccguggccugcaucaaccugagcuucugccugaacgccagcggcaagcacguggccgacagcaucggcuucaccguggagcugcagcuggacuggcagaagcagaagggcggcgugagaagagcccuguuccuggccagcagacaggccacccugacccagacccugcugauccagaacggcgccagagaggacugcagagagaugaagaucuaccugagaaacgagagcgaguucagagacaagcugagccccauccacaucgcccugaacuucagccuggacccccaggcccccguggacagccacggccugagacccgcccugcacuaccagagcaagagcagaaucgaggacaaggcccagauccugcugggcugcggcgaggacaacaucugcgugcccgaccugcagcuggagguguucggcgagcagaaccacguguaccugggcgacaagaacgcccugaaccugaccuuccacgcccagaacgugggcgagggcggcgccuacgaggccgagcugagagugaccgccccccccgaggccgaguacagcggccuggugagacaccccggcaacuucagcagccugagcugcgacuacuucgccgugaaccagagcagacugcuggugugcgaccugggcaaccccaugaaggccggcgccagccuguggggcggccugagauucaccgugccccaccugagagacaccaagaagaccauccaguucgacuuccagauccugagcaagaaccugaacaacagccagagcgacguggugagcuucagacugagcguggaggcccaggcccaggugacccugaacggcgugagcaagcccgaggccgugcuguuccccgugagcgacuggcaccccagagaccagccccaggaggaggaggaccugggccccgccgugcaccacguguacgagcugaucaaccagggccccagcagcaucagccagggcgugcuggagcugagcugcccccaggcccuggagggccagcagcugcuguacgugaccagagugaccggccugaacugcaccaccaaccaccccaucaaccccaagggccuggagcuggaccccgagggcagccugcaccaccagcagaagagagaggcccccagcagaagcagcgccagcagcggcccccagauccugaagugccccgaggccgagugcuucagacugagaugcgagcugggcccccugcaccagcaggagagccagagccugcagcugcacuucagagugugggccaagaccuuccugcagagagagcaccagcccuucagccugcagugcgaggccguguacaaggcccugaagaugcccuacagaauccugcccagacagcugccccagaaggagagacagguggccaccgccgugcaguggaccaaggccgagggcagcuacggcgugccccuguggaucaucauccuggccauccuguucggccugcugcugcugggccugcugaucuacauccuguacaagcugggcuucuucaagagaagccugcccuacggcaccgccauggagaaggcccagcugaagccccccgccaccagcgacgccuga

SEQ ID NO: 1608 - RNA, 3150 nt, Artificial Sequence
  derived and/or modified sequence opt5 from fibronectin__Homo_sapiens__BAF84259
augggcagcagaacccccgaguccccucugcacgccgugcagcuccggugggggccgcgcagacggcccccucugcuuccccugcuccugcuucugcucccucccccuccgcgcgucggaggcuucaaccuggacgcugaagcccccgcgguucugucugggccucccgggagcuuuuucggcuuuuccguggaguucuacagaccugggacagauggagugucuguccucgugggcgcucccaaggccaauacgagccaaccgggcguucugcagggaggagccguguaucuuugcccuuggggcgcuucccccacccaguguacaccuaucgaauuugacucuaaagggagccggcugcucgaguccagccugucuuccagcgaaggagaggagcccgucgaauacaagucucuucagugguucggcgccaccgugcgcgcucauggguccagcauucuggccugcgcgccccucuauucuuggagaacagagaaagaaccucuguccgauccgguuggaaccuguuaccugagcacagacaacuuuacccggauccucgaguaugcccccugccgcuccgauuucucuugggcugccggccaaggcuacugucaagggggauuuagcgcugaguucacgaagaccggcagagugguccuugggggaccuggcuccuauuuuuggcaggggcagauucugagcgccacacaggaacagaucgcggagucuuacuaccccgaauaucugauuaaucucgugcagggacagcugcaaacccggcaggccuccagcaucuacgacgauucuuaucuuggcuacagcguggcugucggcgaguucuccggggacgauacagaagacuuuguugccggagugccuaaaggcaaccugaccuauggguacgugacgauccucaauggaucugauauucgcagccuguauaacuucuccggcgagcagauggcuagcuacuucgccuacgccgucgcugcgacagacgugaauggggauggccuggacgaccuccugguuggagccccgcuucugauggauagaaccccggacggccggccucaagagguggggcgcgucuauguguaccuccagcaccccgcuggaaucgaaucuacaccuacccugacccuuacaggccaugaugaguuugggagauucggauccagccugacgccccucggcgaccuggaucaggacggguauaacgauguugccauuggcgccccuuuuggaggcgaaacccagcaagggguggucuucguguuucccggaggccccgggggacugggcucuaagccuucccagguccuccagccccugugggcugccagccacacacccgacuucuuuggguccgcgcuucggggcggaagagaucuggacggcaauggguacccugaucucaucgugggaucuuucggcguugacaaggcuguggucuaucgcgggcggccgauugugagcgccuccgccucucugaccaucuuucccgcuauguucaacccugaggaaagaagcugcucccuggagggaaaucccguugccuguauuaaccuuagcuuuugccucaaugcuucuggcaaacauguggccgacuccaucggguucacagucgagcugcagcuggauuggcaaaagcagaaaggcggagugcgccgggcgcucuuucuggccagcagacaggcuacccuuacgcagacacugcucauccaaaacggcgcccgcgaagacugucgggagaugaagauuuaccugagaaaugaaucugaguuccgcgauaaacuguccccuauccacauugcucuuaacuucagccucgacccccaggccccuguggauucucacgggcugcggcccgcgcugcauuaucagagcaaguccagaaucgaagacaaggcccagauucuccugggaugcggcgaggauaacaucuguguuccggaccuucaacuggaggucuuuggggaacagaaucacguguaccucggagauaaaaacgcucugaaucugaccuuccaugcccagaacgugggcgagggcggggcuuacgaagccgagcuucgcgucaccgccccucccgaggcugaauauagcggacucgugcggcacccuggcaauuuuucuucccugagcugcgacuacuucgcgguuaaccaauccagacugcucgugugcgaucuggggaaucccaugaaggccggagcuucucuuuggggcgggcugcgguuuacagucccgcaccuccgcgacaccaaaaagacaauccaguucgauuuucagauucugagcaaaaaccugaauaacucccagucugacgugguuagcuucagacuuuccguggaggcccaagcccaggucacgcucaauggagugucuaagccugaagcuguucuguuucccgugagcgacuggcauccucgggaucagccccaggaggaagaggaccugggccccgccguccaccauguguaugagcucaucaaccaaggcccuuccagcauuucucagggggugcuggaacuuuccuguccgcaggcgcuggagggacagcaacuccuguacgucaccagaguuacaggccugaauugcaccacaaaccaccccaucaauccuaaagggcuugaacuggaucccgagggaagccuccaucaccagcagaagcgcgaagcuccuucucgguccagcgccucuuccggcccccaaauucugaaguguccugaggccgagugcuucagacuccgcugugaacuggggccgcuucaccagcaggagagccagucccugcaacuccauuuuagagugugggcuaaaaccuuccugcagcgggaacaccagcccuuuagccugcagugcgaggccguguauaaggcgcuuaaaaugccuuaccgcauccugcccagacaacucccucagaaggaacggcaggucgcuacggccgugcaguggaccaaagccgagggaucuuauggcguuccccuguggaucauuauccucgcuauucuguucggccuucugcuccuggggcugcuuaucuacauucuguacaagcucggauucuuuaagcgcagccugccguauggcacagccauggagaaagcucaacucaagccucccgccaccuccgacgcguga

SEQ ID NO: 1609 - protein, 1049 aa, Artificial Sequence [sequence omitted]

SEQ ID NO: 1610 - RNA, 3150 nt, Artificial Sequence
  fibronectin__Homo_sapiens__BAG35324
auggggagccggacgccagaguccccucuccacgccgugcagcugcgcuggggcccccggcgccgacccccgcugcugccgcugcuguugcugcugcugccgccgccacccagggucgggggcuucaacuuagacgcggaggccccagcaguacucucggggcccccgggcuccuucuucggauucucaguggaguuuuaccggccgggaacagacggggucagugugcuggugggagcacccaaggcuaauaccagccagccaggagugcugcaggguggugcugucuaccucuguccuuggggugccagccccacacagugcacccccauugaauuugacagcaaaggcucucggcuccuggaguccucacuguccagcucagagggagaggagccuguggaguacaaguccuugcagugguucggggcaacaguucgagcccauggcuccuccaucuuggcaugcgcuccacuguacagcuggcgcacagagaaggagccacugagcgaccccgugggcaccugcuaccucuccacagauaacuucacccgaauucuggaguaugcacccugccgcucagauuucagcugggcagcaggacaggguuacugccaaggaggcuucagugccgaguucaccaagacuggccgugugguuuuagguggaccaggaagcuauuucuggcaaggccagauccugucugccacucaggagcagauugcagaaucuuauuaccccgaguaccugaucaaccugguucaggggcagcugcagacucgccaggccaguuccaucuaugaugacagcuaccuaggauacucuguggcuguuggugaauucaguggugaugacacagaagacuuuguugcuggugugcccaaagggaaccucacuuacggcuaugucaccauccuuaauggcucagacauucgaucccucuacaacuucucaggggaacagauggccuccuacuuuggcuaugcaguggccgccacagacgucaauggggacgggcuggaugacuugcuggugggggcaccccugcucauggaucggaccccugacgggcggccucagggggugggcagggucuacgucuaccugcagcacccagccggcauagagcccacgcccacccuuacccucacuggccaugaugaguuuggccgauuuggcagcuccuugaccccccugggggaccuggaccaggauggcuacaaugauguggccaucggggcucccuuugguggggagacccagcagggaguaguguuuguauuuccugggggcccaggagggcugggcucuaagcuuucccagguucugcagccccugugggcagccagccacaccccagacuucuuuggcucugcccuucgaggaggccgagaccuggauggcaauggauauccugaucugauugugggguccuuugguguggacaaggcugugguauacaggggccgccccaucguguccgcuagugccucccucaccaucuuccccgccauguucaacccagaggagcggagcugcagcuuagaggggaacccuguggccugcaucaaccuuagcuucugccucaaugcuucuggaaaacacguugcugacuccauugguuucacaguggaacuucagcuggacuggcagaagcagaagggagggguacggcgggcacuguuccuggccuccaggcaggcaacccugacccagacccugcucauccagaauggggcucgagaggauugcagagagaugaagaucuaccucaggaacgagucagaauuucgagacaaacucucgccgauucacaucgcucucaacuucuccuuggacccccaagccccaguggacagccacggccucaggccagcccuacauuaucagagcaagagccggauagaggacaaggcucagaucuugcuggacuguggagaagacaacaucugugugccugaccugcagcuggaaguguuuggggagcagaaccauguguaccugggugacaagaaugcccugaaccucacuuuccaugcccagaaugugggugaggguggcgccuaugaggcugagcuucgggucaccgccccuccagaggcugaguacucaggacucgucagacacccagggaacuucuccagccugagcugugacuacuuugccgugaaccagagccgccugcuggugugugaccugggcaaccccaugaaggcaggagccagucugugggguggccuucgguuuacagucccucaucuccgggacacuaagaaaaccauccaguuugacuuccagauccucagcaagaaucucaacaacucgcaaagcgacgugguuuccuuucggcucuccguggaggcucaggcccaggucacccugaacggugucuccaagccugaggcagugcuauucccaguaagcgacuggcauccccgagaccagccucagaaggaggaggaccugggaccugcuguccaccaugucuaugagcucaucaaccaaggccccagcuccauuagccagggugugcuggaacucagcuguccccaggcucuggaaggucagcagcuccuauaugugaccagaguuacgggacucaacugcaccaccaaucaccccauuaacccaaagggccuggaguuggaucccgaggguucccugcaccaccagcaaaaacgggaagcuccaagccgcagcucugcuuccucgggaccucagauccugaaaugcccggaggcugaguguuucaggcugcgcugugagcucgggccccugcaccaacaagagagccaaagucugcaguugcauuuccgagucugggccaagacuuucuugcagcgggagcaccagccauuuagccugcagugugaggcuguguacaaagcccugaagaugcccuaccgaauccugccucggcagcugccccaaaaagagcgucagguggccacagcugugcaauggaccaaggcagaaggcagcuauggcgucccacuguggaucaucauccuagccauccuguuuggccuccugcuccuaggucuacucaucuacauccucuacaagcuuggauucuucaaacgcucccucccauauggcaccgccauggaaaaagcucagcucaagccuccagccaccucugaugccuga

SEQ ID NO: 1611 - RNA, 3150 nt, Artificial Sequence
  derived and/or modified sequence opt1 from fibronectin__Homo_sapiens__BAG35324
augggcagccgcacccccgaguccccgcugcacgccgugcagcuccggugggggccccgccggcgcccgccccugcugccccuccugcugcuccugcugcccccgccgccccgggucggcggguucaaccucgacgccgaggcgcccgccgugcugagcggcccgcccggguccuucuucggcuucagcguggaguucuaccgccccggcaccgacggggucuccgugcuggugggcgcccccaaggccaacacgagccagcccgggguccuccagggcggggccguguaccugugccccuggggcgcgucccccacccagugcacccccaucgaguucgacagcaagggcucccggcugcucgagagcucccugagcuccagcgagggggaggagcccguggaguacaagucccugcagugguucggcgccaccguccgcgcccacgggagcuccauccucgccugcgcgccccuguacagcuggcggacggagaaggagccgcuguccgaccccguggggaccugcuaccucagcaccgacaacuucacccgcauccuggaguacgcccccugccggagcgacuucuccugggccgccggccagggcuacugccagggcggguucagcgccgaguucacgaagaccggccgcgugguccucgggggccccggcuccuacuucuggcaggggcagauccugagcgcgacccaggagcagaucgccgaguccuacuacccggaguaccugaucaaccuggugcagggccagcuccagacccggcaggccagcuccaucuacgacgacagcuaccugggguacuccguggccgucggcgaguucagcggggacgacacggaggacuucguggccggcgugcccaagggcaaccugaccuacggguacgucaccauccucaacggcuccgacauccgcagccuguacaacuucuccggggagcagauggcgagcuacuucggcuacgccguggccgccaccgacgugaacggggacggccuggacgaccuccuggucggcgcgccccugcucauggaccggacgcccgacgggcgcccgcagggcguggggcggguguacgucuaccugcagcaccccgccggcaucgagcccaccccgacccugacccucacgggccacgacgaguucgggcgcuucggcuccagccugacgccccugggggaccucgaccaggacggcuacaacgacguggccaucggggcccccuucggcggcgagacccagcagggggucguguucguguuccccggcgggccgggcgggcugggcuccaagcugagccagguccuccagccccugugggccgccucccacacccccgacuucuucggcagcgcgcugcgcgggggccgggaccucgacgggaacggcuaccccgaccugaucguggggagcuucggcguggacaaggccgucguguaccggggccgcccgaucguguccgccagcgccucccugaccaucuuccccgcgauguucaaccccgaggagcgcagcugcucccuggaggggaaccccgucgccugcaucaaccucagcuucugccugaacgccuccggcaagcacguggccgacagcaucggguucaccguggagcugcagcucgacuggcagaagcagaagggcgggguccggcgcgcccuguuccuggcgucccggcaggccacccucacccagacgcugcugauccagaacggcgcccgcgaggacugccgggagaugaagaucuaccuccgcaacgagagcgaguuccgggacaagcuguccccgauccacaucgcccugaacuucagccucgacccccaggcccccguggacucccacggccugcgccccgcgcugcacuaccagagcaagucccggaucgaggacaaggcccagauccuccuggacugcggggaggacaacaucugcgugccggaccugcagcucgaggucuucggcgagcagaaccacguguaccugggggacaagaacgcccugaaccucaccuuccacgcccagaacgugggcgagggcggggccuacgaggcggagcugcgcgucaccgccccgcccgaggccgaguacagcggccuggugcggcaccccgggaacuucuccagccucagcugcgacuacuucgccgugaaccagucccgccugcuggucugcgaccucggcaaccccaugaaggcgggggccagccuguggggcggccugcgguucaccgugccccaccuccgcgacacgaagaagaccauccaguucgacuuccagauccuguccaagaaccugaacaacagccaguccgacguggucagcuuccggcucuccguggaggcccaggcccaggugacccugaacggggucagcaagcccgaggccgugcuguuccccguguccgacuggcacccgcgcgaccagccccagaaggaggaggaccucggccccgcgguccaccacguguacgagcugaucaaccaggggccgagcuccaucagccagggcgugcuggagcucuccugcccccaggcccuggaggggcagcagcugcucuacgucacccgggugacgggccugaacugcaccaccaaccaccccaucaaccccaagggccuggagcucgacccggaggggagccugcaccaccagcagaagcgcgaggcccccucccggagcuccgccagcuccggcccccagauccugaagugccccgaggccgagugcuuccgccuccgcugcgagcuggggccgcugcaccagcaggagagccagagccuccagcugcacuuccgggugugggcgaagaccuuccugcagcgcgagcaccagcccuucucccuccagugcgaggccgucuacaaggcccugaagaugcccuaccggauccugccccgccagcucccgcagaaggagcgccagguggccaccgccgugcaguggacgaaggcggagggcagcuacggggucccccuguggaucaucauccuggccauccucuucggccugcugcuccugggccugcucaucuacauccuguacaagcugggguucuucaagcggucccuccccuacggcaccgccauggagaaggcccagcugaagcccccggcgaccagcgacgccuga

SEQ ID NO: 1612 - RNA, 3150 nt, Artificial Sequence
  derived and/or modified sequence opt2 from fibronectin__Homo_sapiens__BAG35324
augggcucccgcacccccgaguccccccuccacgccguccagcuccgcuggggcccccgccgccgccccccccuccucccccuccuccuccuccuccuccccccccccccccgcgucggcggcuucaaccucgacgccgaggcccccgccguccucuccggcccccccggcuccuucuucggcuucuccgucgaguucuaccgccccggcaccgacggcgucuccguccucgucggcgcccccaaggccaacaccucccagcccggcguccuccagggcggcgccgucuaccucugccccuggggcgccucccccacccagugcacccccaucgaguucgacuccaagggcucccgccuccucgaguccucccucuccuccuccgagggcgaggagcccgucgaguacaagucccuccagugguucggcgccaccguccgcgcccacggcuccuccauccucgccugcgccccccucuacuccuggcgcaccgagaaggagccccucuccgaccccgucggcaccugcuaccucuccaccgacaacuucacccgcauccucgaguacgcccccugccgcuccgacuucuccugggccgccggccagggcuacugccagggcggcuucuccgccgaguucaccaagaccggccgcgucguccucggcggccccggcuccuacuucuggcagggccagauccucuccgccacccaggagcagaucgccgaguccuacuaccccgaguaccucaucaaccucguccagggccagcuccagacccgccaggccuccuccaucuacgacgacuccuaccucggcuacuccgucgccgucggcgaguucuccggcgacgacaccgaggacuucgucgccggcguccccaagggcaaccucaccuacggcuacgucaccauccucaacggcuccgacauccgcucccucuacaacuucuccggcgagcagauggccuccuacuucggcuacgccgucgccgccaccgacgucaacggcgacggccucgacgaccuccucgucggcgccccccuccucauggaccgcacccccgacggccgcccccagggcgucggccgcgucuacgucuaccuccagcaccccgccggcaucgagcccacccccacccucacccucaccggccacgacgaguucggccgcuucggcuccucccucaccccccucggcgaccucgaccaggacggcuacaacgacgucgccaucggcgcccccuucggcggcgagacccagcagggcgucgucuucgucuuccccggcggccccggcggccucggcuccaagcucucccagguccuccagccccucugggccgccucccacacccccgacuucuucggcuccgcccuccgcggcggccgcgaccucgacggcaacggcuaccccgaccucaucgucggcuccuucggcgucgacaaggccgucgucuaccgcggccgccccaucgucuccgccuccgccucccucaccaucuuccccgccauguucaaccccgaggagcgcuccugcucccucgagggcaaccccgucgccugcaucaaccucuccuucugccucaacgccuccggcaagcacgucgccgacuccaucggcuucaccgucgagcuccagcucgacuggcagaagcagaagggcggcguccgccgcgcccucuuccucgccucccgccaggccacccucacccagacccuccucauccagaacggcgcccgcgaggacugccgcgagaugaagaucuaccuccgcaacgaguccgaguuccgcgacaagcucucccccauccacaucgcccucaacuucucccucgacccccaggcccccgucgacucccacggccuccgccccgcccuccacuaccaguccaagucccgcaucgaggacaaggcccagauccuccucgacugcggcgaggacaacaucugcguccccgaccuccagcucgaggucuucggcgagcagaaccacgucuaccucggcgacaagaacgcccucaaccucaccuuccacgcccagaacgucggcgagggcggcgccuacgaggccgagcuccgcgucaccgccccccccgaggccgaguacuccggccucguccgccaccccggcaacuucuccucccucuccugcgacuacuucgccgucaaccagucccgccuccucgucugcgaccucggcaaccccaugaaggccggcgccucccucuggggcggccuccgcuucaccgucccccaccuccgcgacaccaagaagaccauccaguucgacuuccagauccucuccaagaaccucaacaacucccaguccgacgucgucuccuuccgccucuccgucgaggcccaggcccaggucacccucaacggcgucuccaagcccgaggccguccucuuccccgucuccgacuggcacccccgcgaccagccccagaaggaggaggaccucggccccgccguccaccacgucuacgagcucaucaaccagggccccuccuccaucucccagggcguccucgagcucuccugcccccaggcccucgagggccagcagcuccucuacgucacccgcgucaccggccucaacugcaccaccaaccaccccaucaaccccaagggccucgagcucgaccccgagggcucccuccaccaccagcagaagcgcgaggcccccucccgcuccuccgccuccuccggcccccagauccucaagugccccgaggccgagugcuuccgccuccgcugcgagcucggcccccuccaccagcaggagucccagucccuccagcuccacuuccgcgucugggccaagaccuuccuccagcgcgagcaccagcccuucucccuccagugcgaggccgucuacaaggcccucaagaugcccuaccgcauccucccccgccagcucccccagaaggagcgccaggucgccaccgccguccaguggaccaaggccgagggcuccuacggcgucccccucuggaucaucauccucgccauccucuucggccuccuccuccucggccuccucaucuacauccucuacaagcucggcuucuucaagcgcucccuccccuacggcaccgccauggagaaggcccagcucaagccccccgccaccuccgacgccuga

SEQ ID NO: 1613 - RNA, 3150 nt, Artificial Sequence
  derived and/or modified sequence opt3 from fibronectin__Homo_sapiens__BAG35324
augggcagcagaacccccgaguccccucugcacgccgugcagcucaggugggggccacggcgccgaccgccccuucugccuuuguuacugcuacuccugccacccccuccacgugucggagguuucaaccuugacgcugaagcacccgccguucugucuggcccuccagggucauuuuucggauuuaguguggaguucuacagaccgggcacagaugguguaagcguguuggucggggcgcccaaggcuaauacuucccaaccuggagugcuccagggcggcgccguuuaucugugcccauggggagcaucucccacgcaguguaccccuaucgaauuugacucgaaagggucaaggcugcucgagagcaguuuauccucuagcgaaggugaggagccaguggaauacaagucccugcagugguucggcgccacaguccgggcucaugggucaaguauucuugcaugcgcccccuuguauagcuggcgcacugagaaagaaccgcugucugauccugugggaaccuguuaccuauccacagacaacuuuaccagaauacucgaguaugcucccugcaggucagauuucagcugggccgcgggccaagguuacugucaagggggauuuagugcagaguucacuaagacaggccggguaguucugggcgggccaggaucuuauuuuuggcagggucagauccuuuccgccacccaggaacagauugcugagagcuacuacccugaauaucugaucaauuuggugcagggccagcuccaaacgcgccaggccucgucuauuuacgacgauuccuaucugggguacucagucgcagugggagaguucaguggcgacgauacugaagacuuuguggcugguguccccaaagggaacuuaaccuauggcuacguuacaauccugaauggaagcgauauacgaucccucuauaacuucucuggcgagcagauggccagcuacuucggguacgcgguggccgcaacugacguaaauggagauggucuugacgaccuguuggugggcgcuccacuacugauggauagaacccccgacgggaggccucaaggagucggccggguguauguuuaccuccagcacccagccgguaucgagccgacacccacccugacgcuuacugggcaugaugaauuuggccguuucggaucaagucugacaccuuugggcgaccucgaucaggacggguauaacgauguggcuauuggagccccauuugguggcgagacccagcaaggggucguguucguauuucccggaggcccuggugggcugggcuccaaguuaagccagguucugcagccacuaugggcagccucucacacucccgacuucuuuggaucagcucuccgcggcgggagagaucuggacggaaauggcuacccggaucuuaucguggguaguuucggggucgacaaggcgguggucuauaggggacggccuauugugagcgcauccgccucuuugacaaucuuuccagcuauguucaaccccgaagaacgaucgugcagccuggaaggcaauccuguugccuguauaaaccucuccuuuugccugaaugcaucagguaaacauguggccgacaguauuggcuucaccguagagcuucagcuggauuggcaaaagcagaaagggggaguccgcagagcuuuguuucucgccucuaggcaggcaacgcugacccagacauuacugauccaaaacggcgcgcgggaggacugucgcgaaaugaagauuuaccuaagaaaugagagcgaguucagggauaaacucucccccauccacaucgcucugaacuucucacuugacccacaggccccuguggauagccacggguugcgucccgcacugcauuaucagucuaagucccggauugaggacaaggcccagauacuccuggauugcggagaagacaacaucuguguuccagauuuacaacuggagguguuuggcgagcagaaucacgucuaccuuggugacaaaaacgcuuugaaucucacuuuccaugcccagaacgugggggaaggaggcgcauacgaggcugaacugcgaguaaccgccccgccugaggcggaguauaguggucuagugagacaccccggcaauuuuagcucucuguccugcgauuacuucgccguuaaccaaucaaggcuccuggucugcgaccuugggaauccaaugaaggcuggagcaaguuuguggggcgggcugcgcuuuacagugccccacuuacgggauacuaaaaagaccauucaguucgacuuucagauccucagcaaaaaccugaauaacucgcaguccgacguggucucuuucagacuuagcguugaagcccaagcucaggugacacugaauggagugucaaagccugaggccguauuguuuccagucagugauuggcaucccagggaccagccucagaaagaagaggaucucggcccggcagugcaccauguuuaugaacugauaaaccaagguccauccucuauuagccagggggugcuagagcuguccuguccccaggcgcucgagggacagcaacugcuuuacgucacccgcgugacuggcuugaauugcacgacaaaccacccuaucaauccaaagggucuggaauuagaccccgagggcucacuccaucaccagcagaagcgagaagccccuagccggaguucugcuuccagcgggccgcaaauccugaaaugucccgaggccgaaugcuuccgucuuagaugugagcugggaccacuacaccagcaggagucgcagucacuccaacugcauuuuaggguuugggcaaagaccuucuugcagcgcgaacaccagccuuuuucucugcagugcgaggcuguguauaaagccuuaaagaugcccuaccggauucucccaagacaacugccucagaaagaaaggcagguagcaacugccguccaguggaccaaggcugagggcaguuauggggugccccuuuggaucauuauacuggcgaucuuguucggacuccugcuacugggccuucucauuuacauccuguacaaguuggguuucuuuaaacgaucccugccauaugggacagccauggaaaaggcacaauuaaaaccgccugcuaccagcgaugccuga

SEQ ID NO: 1614 - RNA, 3150 nt, Artificial Sequence
  derived and/or modified sequence opt4 from fibronectin__Homo_sapiens__BAG35324
augggcagcagaacccccgagagcccccugcacgccgugcagcugagauggggccccagaagaagacccccccugcugccccugcugcugcugcugcugccccccccccccagagugggcggcuucaaccuggacgccgaggcccccgccgugcugagcggcccccccggcagcuucuucggcuucagcguggaguucuacagacccggcaccgacggcgugagcgugcuggugggcgcccccaaggccaacaccagccagcccggcgugcugcagggcggcgccguguaccugugccccuggggcgccagccccacccagugcacccccaucgaguucgacagcaagggcagcagacugcuggagagcagccugagcagcagcgagggcgaggagcccguggaguacaagagccugcagugguucggcgccaccgugagagcccacggcagcagcauccuggccugcgccccccuguacagcuggagaaccgagaaggagccccugagcgaccccgugggcaccugcuaccugagcaccgacaacuucaccagaauccuggaguacgcccccugcagaagcgacuucagcugggccgccggccagggcuacugccagggcggcuucagcgccgaguucaccaagaccggcagaguggugcugggcggccccggcagcuacuucuggcagggccagauccugagcgccacccaggagcagaucgccgagagcuacuaccccgaguaccugaucaaccuggugcagggccagcugcagaccagacaggccagcagcaucuacgacgacagcuaccugggcuacagcguggccgugggcgaguucagcggcgacgacaccgaggacuucguggccggcgugcccaagggcaaccugaccuacggcuacgugaccauccugaacggcagcgacaucagaagccuguacaacuucagcggcgagcagauggccagcuacuucggcuacgccguggccgccaccgacgugaacggcgacggccuggacgaccugcuggugggcgccccccugcugauggacagaacccccgacggcagaccccagggcgugggcagaguguacguguaccugcagcaccccgccggcaucgagcccacccccacccugacccugaccggccacgacgaguucggcagauucggcagcagccugaccccccugggcgaccuggaccaggacggcuacaacgacguggccaucggcgcccccuucggcggcgagacccagcagggcgugguguucguguuccccggcggccccggcggccugggcagcaagcugagccaggugcugcagccccugugggccgccagccacacccccgacuucuucggcagcgcccugagaggcggcagagaccuggacggcaacggcuaccccgaccugaucgugggcagcuucggcguggacaaggccgugguguacagaggcagacccaucgugagcgccagcgccagccugaccaucuuccccgccauguucaaccccgaggagagaagcugcagccuggagggcaaccccguggccugcaucaaccugagcuucugccugaacgccagcggcaagcacguggccgacagcaucggcuucaccguggagcugcagcuggacuggcagaagcagaagggcggcgugagaagagcccuguuccuggccagcagacaggccacccugacccagacccugcugauccagaacggcgccagagaggacugcagagagaugaagaucuaccugagaaacgagagcgaguucagagacaagcugagccccauccacaucgcccugaacuucagccuggacccccaggcccccguggacagccacggccugagacccgcccugcacuaccagagcaagagcagaaucgaggacaaggcccagauccugcuggacugcggcgaggacaacaucugcgugcccgaccugcagcuggagguguucggcgagcagaaccacguguaccugggcgacaagaacgcccugaaccugaccuuccacgcccagaacgugggcgagggcggcgccuacgaggccgagcugagagugaccgccccccccgaggccgaguacagcggccuggugagacaccccggcaacuucagcagccugagcugcgacuacuucgccgugaaccagagcagacugcuggugugcgaccugggcaaccccaugaaggccggcgccagccuguggggcggccugagauucaccgugccccaccugagagacaccaagaagaccauccaguucgacuuccagauccugagcaagaaccugaacaacagccagagcgacguggugagcuucagacugagcguggaggcccaggcccaggugacccugaacggcgugagcaagcccgaggccgugcuguuccccgugagcgacuggcaccccagagaccagccccagaaggaggaggaccugggccccgccgugcaccacguguacgagcugaucaaccagggccccagcagcaucagccagggcgugcuggagcugagcugcccccaggcccuggagggccagcagcugcuguacgugaccagagugaccggccugaacugcaccaccaaccaccccaucaaccccaagggccuggagcuggaccccgagggcagccugcaccaccagcagaagagagaggcccccagcagaagcagcgccagcagcggcccccagauccugaagugccccgaggccgagugcuucagacugagaugcgagcugggcccccugcaccagcaggagagccagagccugcagcugcacuucagagugugggccaagaccuuccugcagagagagcaccagcccuucagccugcagugcgaggccguguacaaggcccugaagaugcccuacagaauccugcccagacagcugccccagaaggagagacagguggccaccgccgugcaguggaccaaggccgagggcagcuacggcgugccccuguggaucaucauccuggccauccuguucggccugcugcugcugggccugcugaucuacauccuguacaagcugggcuucuucaagagaagccugcccuacggcaccgccauggagaaggcccagcugaagccccccgccaccagcgacgccuga

SEQ ID NO: 1615 - RNA, 3150 nt, Artificial Sequence
  derived and/or modified sequence opt5 from fibronectin__Homo_sapiens__BAG35324
augggcagcagaacccccgaguccccucugcacgccgugcagcuccggugggggccgcgcagacggcccccucugcuuccccugcuccugcuucugcucccucccccuccgcgcgucggaggcuucaaccuggacgcugaagcccccgcgguucugucugggccucccgggagcuuuuucggcuuuuccguggaguucuacagaccugggacagauggagugucuguccucgugggcgcucccaaggccaauacgagccaaccgggcguucugcaagggggagccguguaucuuugcccuuggggcgcuucccccacccaguguacaccuaucgaauuugacucuaaagggagccggcugcucgaguccagccugucuuccagcgaaggagaggagcccgucgaauacaagucucuucagugguucggcgccaccgugcgcgcucauggguccagcauucuggccugcgcgccccucuauucuuggagaacagagaaagaaccucuguccgauccgguuggaaccuguuaccugagcacagacaacuuuacccggauccucgaguaugcccccugccgcuccgauuucucuugggcugccggccagggcuacugucaagggggauuuagcgcugaguucacgaagaccggcagagugguccuugggggaccuggcuccuauuuuuggcaggggcagauucugagcgccacacaggaacagaucgcggagucuuacuaccccgaauaucugauuaaucucgugcagggacagcugcaaacccggcaggccuccagcaucuacgacgauucuuaucuuggcuacagcguggcugucggcgaguucuccggggacgauacagaagacuuuguugccggagugccuaaaggcaaccugaccuauggguacgugacgauccucaauggaucugauauucgcagccuguauaacuucuccggcgagcagauggcuagcuacuucggguacgccgucgccgcuacagacgugaauggcgauggacuggacgaccuccugguuggcgcgccccuucugauggauagaaccccggacgggcggccucaaggagugggccgcgucuauguguaccuccagcaccccgccgggaucgagccuacacccacccugacccuuacaggacaugaugaauuuggcagauucgggucuucccugacgccucucggcgaccuggaucaggacggauauaacgauguugcuauuggcgcccccuuugggggagagacccagcaaggcguggucuucguguuuccugggggaccgggcgggcugggcagcaagcucucucagguccugcagccccuuugggccgcuucccacacacccgacuucuuuggaagcgcccugcggggcgggagagaucucgacggaaauggcuacccugaucugaucgugggguccuucggaguugacaaggcgguggucuaucgcggccggccgauugugucugcuagcgccucccugaccaucuuucccgccauguucaacccugaagagagaucuugcagccuugaagggaaucccguugcuuguauuaaccucuccuuuugccugaaugccagcggcaaacauguggcugacucuaucggauucacagucgagcugcagcucgauuggcaaaagcagaaaggcggggugcgccgggcccuguuucuugcguccagacaggccacccugacgcagacacuccugauccaaaacggagcucgcgaggacugucgggaaaugaagauuuaccugagaaaugagagcgaguuccgcgauaaacuuucuccuauccacauugcccucaacuucucccuggacccccaggcuccuguggauagccacggccugcggcccgcccuccauuaucagucuaagagcagaaucgaagacaaggcgcagauucugcuugauugcggggaagacaacaucuguguuccggaucugcaacucgaggucuuuggagagcagaaucacguguaccugggcgacaaaaacgcccugaaucuuaccuuccaugcucagaacgugggcgaagggggagccuacgaggcugaacuccgcgucaccgccccucccgaggccgaguauuccggccuggugcggcacccugggaauuuuagcucucuguccugcgauuacuucgcuguuaaccaaagcagacuccuggugugcgaccuuggaaaucccaugaaggcgggcgccucccuguggggaggacuccgguuuacagucccgcaucugcgcgauaccaaaaagacaauccaguucgacuuucagauucugucuaaaaaccuuaauaacagccaguccgacgugguuucuuucagacucagcguggaagcucaagcccaggucacgcugaauggcguguccaagccugaggccguucuguuucccgugucugauuggcacccucgggaccagccccagaaagaagaggaucucggccccgcuguccaccauguguaugaacugaucaaccaagggccuagcuccauuagccagggagugcuugagcugucuuguccgcaggcccucgagggccagcaacugcuguacgucaccagaguuacagggcuuaauugcaccacaaaccaccccaucaauccuaagggacuggaacucgaccccgagggcucccugcaucaccagcagaagcgcgaagcgccuagccggucuuccgcuagcucugggccccaaauucucaaauguccugaggccgaaugcuucagacugcgcugugagcuuggaccgcugcaccagcaggagucccagagccuccaacugcauuuuagagugugggccaagaccuuccugcagcgggaacaccagcccuuuucccuucagugcgaggcuguguauaaagcccugaagaugccuuaccgcauccuccccagacaacugccucagaaagaacggcaggucgcgacggcugugcaguggaccaaggccgagggcagcuauggcguuccccucuggaucauuauccuggccauucuuuucgggcugcuccugcugggacuucugaucuacauucucuacaagcugggcuucuuuaaacgcucucucccguaugggacagcuauggaaaaggcccaacugaaaccucccgcuaccagcgaugccuga

SEQ ID NO: 1616 - protein, 466 aa, Artificial Sequence
  fibronectin__Homo_sapiens__B3KXM5
MLSLRQRMMHARFRNPLSRQPARPSYRQGYNGRPNVEGKVLPGSNGKPNGQRIINGPQGTKWVVDLDRGLVLNAEGRYLQDSHGNPLRIKLGGDGRTIVDLEGTPVVSPDGLPLFGQGRHGTPLANAQDKPILSLGGKPLVGLEVIKKTTHPPTTTMQPTTTTTPLPTTTTPRPTTATTRRTTTRRPTTTVRTTTRTTTTTTPKPTTPIPTCPPGTLERHDDDGNLIMSSNGIPECYAEEDEFSGLETDTAVPTEEAYVIYDEDYEFETSRPPTTTEPSTTATTPRVIPEEGAISSFPEEEFDLAGRKRFVAPYVTYLNKDPSAPCSLTDALDHFQVDSLDEIIPNDLKKSDLPPQHAPRNITVVAVEGCHSFVIVDWDKATPGDVVTGYLVYSASYEDFIRNKWSTQASSVTHLPIENLKPNTRYYFKVQAQNPHGYGPISPSVSFVTESDNPLLVVRPPGGEPI

SEQ ID NO: 1617 - RNA, 1401 nt, Artificial Sequence
  fibronectin__Homo_sapiens__BAG54537
augcuguccuugcgccagaggaugaugcaugccagauuccguaacccucucucccgacagccugccagacccucuuacagacaagguuauaauggcagaccaaauguagaagggaaaguccuuccugguaguaauggaaaaccgaauggacagagaauuaucaauggcccucaaggaacaaaguggguuguggaccuugaucguggguuaguauugaaugcagaaggaagguaccuccaagauucacauggaaauccucuucggauuaaacuaggaggagauggucgaaccauuguagaucuggaagggacccccguggugaguccugacggccucccacucuuugggcaggggcgacauggcacaccucuggccaaugcccaagauaagccaauuuugagucuuggaggaaagccgcuggugggcuuggaggucaucaaaaaaaccacccaucccccuaccacuaccaugcagcccaccacuacuacgacgccccugccuaccacuacaaccccgaggcccaccacugccaccacccgccgcacgaccaccaggcguccaacaaccacaguccgaaccacuacgcggacaaccaccaccaccacccccaaacccaccacucccauccccaccugucccccugggaccuuggaacggcacgacgaugauggcaaccugauaaugagcuccaaugggaucccagagugcuacgcugaagaagaugaguucucaggcuuggagacugacacugcaguaccuacggaagaggccuacguuauauaugaugaagauuaugaauuugagacgucaaggccaccaaccaccacugagccuucgaccacugcuaccacaccgagggugaucccagaggaaggcgccaucaguuccuuuccugaagaagaauuugaucuggcuggaaggaaacgauuuguugcuccuuacgugacguaccuaaauaaagacccaucagccccgugcucucugacugaugcacuggaucacuuccaaguggacagccuggaugaaaucauccccaaugaccugaagaagagugaccugccuccccagcaugcuccccgcaacaucaccgugguggccguggaagguugccacucauuugucauuguggacugggacaaagccaccccaggagauguggucacagguuacuugguuuacagugcauccuaugaagacuucaucaggaacaagugguccacucaagcuucaucaguaacucacuugcccauugagaaccuaaagcccaacacgagguauuauuuuaaagugcaagcacaaaauccucauggcuacggaccuaucagcccuucggucucauuugucaccgaaucagauaauccucugcuuguugugaggcccccaggcggugagccuaucuag

SEQ ID NO: 1618 - RNA, 1401 nt, Artificial Sequence
  derived and/or modified sequence opt1 from fibronectin__Homo_sapiens__BAG54537
augcugagccuccgccagcggaugaugcacgcccgcuuccggaacccccugucccgccagccggcccggcccagcuaccgccagggcuacaacgggcggcccaacguggagggcaagguccugcccggguccaacggcaagccgaacgggcagcgcaucaucaacggcccccagggcaccaagugggugguggaccucgaccgggggcugguccugaacgcggagggccgcuaccuccaggacagccacgggaacccccugcggaucaagcugggcggggacggccgcaccaucguggaccucgagggcacgcccguggucuccccggacgggcugccccuguucggccaggggcggcacggcacgccccucgccaacgcccaggacaagcccauccugagccugggcgggaagccgcucgugggccuggaggugaucaagaagaccacccacccgcccaccaccaccaugcagcccaccacgaccaccacgccccugcccaccaccaccacgccccgccccaccaccgccaccacccggcgcacgaccacccggcgcccgaccacgaccguccggaccaccacgcgcaccaccaccacgaccacccccaagcccaccacgcccaucccgaccugcccgcccgggacccucgagcggcacgacgacgacggcaaccugaucauguccagcaacgggauccccgagugcuacgccgaggaggacgaguucuccggccuggagaccgacaccgcggugcccacggaggaggccuacgugaucuacgacgaggacuacgaguucgagaccagccgcccgcccaccaccacggagcccuccaccaccgccaccacgccccgcgucauccccgaggagggcgccaucagcuccuuccccgaggaggaguucgaccucgcggggcggaagcgcuucguggccccguacgugaccuaccugaacaaggaccccagcgcccccugcucccugaccgacgcccucgaccacuuccaggucgacagccuggacgagaucauccccaacgaccugaagaaguccgaccucccgccccagcacgcgccccggaacaucaccgugguggccgucgagggcugccacagcuucgugaucguggacugggacaaggccacgcccggggacgucgugaccggcuaccugguguacuccgccagcuacgaggacuucauccgcaacaaguggagcacccaggccuccagcgucacccaccucccgaucgagaaccugaagcccaacacgcgguacuacuucaaggugcaggcccagaacccccacggguacggccccaucuccccgagcgucuccuucgugaccgagagcgacaacccccugcuggugguccgcccgcccggcggggagcccaucuga

SEQ ID NO: 1619 - RNA, 1401 nt, Artificial Sequence
  derived and/or modified sequence opt2 from fibronectin__Homo_sapiens__BAG54537
augcucucccuccgccagcgcaugaugcacgcccgcuuccgcaacccccucucccgccagcccgcccgccccuccuaccgccagggcuacaacggccgccccaacgucgagggcaagguccuccccggcuccaacggcaagcccaacggccagcgcaucaucaacggcccccagggcaccaagugggucgucgaccucgaccgcggccucguccucaacgccgagggccgcuaccuccaggacucccacggcaacccccuccgcaucaagcucggcggcgacggccgcaccaucgucgaccucgagggcacccccgucgucucccccgacggccucccccucuucggccagggccgccacggcaccccccucgccaacgcccaggacaagcccauccucucccucggcggcaagccccucgucggccucgaggucaucaagaagaccacccacccccccaccaccaccaugcagcccaccaccaccaccaccccccuccccaccaccaccaccccccgccccaccaccgccaccacccgccgcaccaccacccgccgccccaccaccaccguccgcaccaccacccgcaccaccaccaccaccacccccaagcccaccacccccauccccaccugcccccccggcacccucgagcgccacgacgacgacggcaaccucaucauguccuccaacggcauccccgagugcuacgccgaggaggacgaguucuccggccucgagaccgacaccgccguccccaccgaggaggccuacgucaucuacgacgaggacuacgaguucgagaccucccgcccccccaccaccaccgagcccuccaccaccgccaccaccccccgcgucauccccgaggagggcgccaucuccuccuuccccgaggaggaguucgaccucgccggccgcaagcgcuucgucgcccccuacgucaccuaccucaacaaggaccccuccgcccccugcucccucaccgacgcccucgaccacuuccaggucgacucccucgacgagaucauccccaacgaccucaagaaguccgaccuccccccccagcacgccccccgcaacaucaccgucgucgccgucgagggcugccacuccuucgucaucgucgacugggacaaggccacccccggcgacgucgucaccggcuaccucgucuacuccgccuccuacgaggacuucauccgcaacaagugguccacccaggccuccuccgucacccaccuccccaucgagaaccucaagcccaacacccgcuacuacuucaagguccaggcccagaacccccacggcuacggccccaucucccccuccgucuccuucgucaccgaguccgacaacccccuccucgucguccgcccccccggcggcgagcccaucuga

SEQ ID NO: 1620 - RNA, 1401 nt, Artificial Sequence
  derived and/or modified sequence opt3 from fibronectin__Homo_sapiens__BAG54537
augcugagccucagacagaggaugaugcacgcccgguuccgcaacccccuuucccgacaaccugcucguccaucuuacagacagggcuauaaugggaggccgaacguggagggaaagguccugcccgguucaaauggcaaaccuaacgggcagcggaucauuaauggaccacagggcaccaaguggguuguggacuuggaucgcgguuuaguacugaacgcagaagggagauaccuacaagacagucauggaaauccccucaggauaaaacugggcggcgaugggcggacaaucguggaccuugagggaacuccugucgugagcccagauggucugcccuuguuuggccaggggcgccacggaacgccucucgccaacgcgcaggacaagccaauucugucccugggcgguaaaccgcucguuggguuagaagugaucaagaagaccacacaucccccuacuaccacaaugcagccaaccacuacaaccacgccccugccuacuaccacaacuccacgacccaccacagcuaccacgagaaggacuacaacccggcguccgacuacaaccguccgcacgaccacaagaacuaccacaacuaccacaccuaaacccaccacuccaauuccuacgugucccccaggaacacuugagaggcacgaugacgauggcaauuugaucaugucuucgaacggcauacccgaaugcuaugccgaggaggacgaguucucagggcuggaaaccgauacugcagugccuaccgaagaggccuacguaaucuaugacgaggauuacgaauuugagacaagccggccaccgaccacuacagaacccaguacgaccgcuacuacaccucgaguuauuccagaggaaggagcaaucuccucuuuccccgaggaggaauuugaccuagccggucgcaagagauucguggcuccuuaugucaccuaccucaauaaagacccaagcgcccccugcucccugacagaugcgcuugaccauuuucaaguggauucacuggacgagauuaucccgaacgauuugaagaaaagugaccucccuccacagcacgcacccaggaauauaacuguggucgccguugaaggcugucacagcuucgugauuguagauugggacaaggcuaccccuggggauguggucacgggauaccugguguauucugccuccuacgaggacuuuauccggaacaaguggucaacccaggcaagcaguguuacacauuuacccauugaaaaucugaaaccaaacacucgcuauuacuucaaggugcaggcucaaaacccucacggcuauggucccaucucuccauccgucagcuuugugaccgagucggauaauccgcuccuuguaguuagaccucccgggggcgagccaaucuga

SEQ ID NO: 1621 - RNA, 1401 nt, Artificial Sequence
  derived and/or modified sequence opt4 from fibronectin__Homo_sapiens__BAG54537
augcugagccugagacagagaaugaugcacgccagauucagaaacccccugagcagacagcccgccagacccagcuacagacagggcuacaacggcagacccaacguggagggcaaggugcugcccggcagcaacggcaagcccaacggccagagaaucaucaacggcccccagggcaccaagugggugguggaccuggacagaggccuggugcugaacgccgagggcagauaccugcaggacagccacggcaacccccugagaaucaagcugggcggcgacggcagaaccaucguggaccuggagggcacccccguggugagccccgacggccugccccuguucggccagggcagacacggcaccccccuggccaacgcccaggacaagcccauccugagccugggcggcaagccccuggugggccuggaggugaucaagaagaccacccacccccccaccaccaccaugcagcccaccaccaccaccaccccccugcccaccaccaccacccccagacccaccaccgccaccaccagaagaaccaccaccagaagacccaccaccaccgugagaaccaccaccagaaccaccaccaccaccacccccaagcccaccacccccauccccaccugcccccccggcacccuggagagacacgacgacgacggcaaccugaucaugagcagcaacggcauccccgagugcuacgccgaggaggacgaguucagcggccuggagaccgacaccgccgugcccaccgaggaggccuacgugaucuacgacgaggacuacgaguucgagaccagcagaccccccaccaccaccgagcccagcaccaccgccaccacccccagagugauccccgaggagggcgccaucagcagcuuccccgaggaggaguucgaccuggccggcagaaagagauucguggcccccuacgugaccuaccugaacaaggaccccagcgcccccugcagccugaccgacgcccuggaccacuuccagguggacagccuggacgagaucauccccaacgaccugaagaagagcgaccugcccccccagcacgcccccagaaacaucaccgugguggccguggagggcugccacagcuucgugaucguggacugggacaaggccacccccggcgacguggugaccggcuaccugguguacagcgccagcuacgaggacuucaucagaaacaaguggagcacccaggccagcagcgugacccaccugcccaucgagaaccugaagcccaacaccagauacuacuucaaggugcaggcccagaacccccacggcuacggccccaucagccccagcgugagcuucgugaccgagagcgacaacccccugcugguggugagaccccccggcggcgagcccaucuga

SEQ ID NO: 1622 - RNA, 1401 nt, Artificial Sequence
  derived and/or modified sequence opt5 from fibronectin__Homo_sapiens__BAG54537
augcugagccucagacagcggaugaugcacgcccgcuucagaaacccccugucccggcaaccugcucgcccgucuuacagacagggcuauaaugggcggcccaacguggagggaaagguccuuccuggcagcaaugggaaacccaacggacagcgcaucauuaauggcccucaggggaccaaguggguuguggaccuggauagaggacucgugcugaacgccgaaggccgguaccuucaagacucccauggcaauccccugcgcaucaaacucgggggagauggcagaacaauugucgaccuggaggggacgccugugguuucuccggauggacugccccucuuuggccaggggcggcacggaaccccucuggcgaacgcucaggacaagcccauccuuagccugggcggcaaaccucucguggggcuggaagucauuaagaagacaacccaucccccgacaaccacaaugcagccuaccacgaccacaacaccccuuccuaccaccacgacaccccgccccaccacagccaccaccagacggacaacgacccgcagaccuacaaccacagugcggaccacgacaagaaccaccacaaccacaacgccgaaacccaccacaccuauccccacaugcccucccggaacccuggagcgccacgaugacgauggcaaucucaucauguccucuaacgggauuccggaauguuaugccgaggaggacgaguucagcggacuggaaaccgauacggcuguuccuaccgaagaggccuacgugaucuaugacgaggauuacgaauuugagacaucccggcccccuaccacaaccgaacccagcacgacagcuaccacaccuagagucauucccgaggaaggcgccaucucuuccuucccggaggaggaauuugaccuggcggggcgcaagcgguucguggccccuuaugugaccuaccucaauaaagaccccagcgcucccugcucucugaccgaugcccuugaccauuuucaagucgauucccuggacgagauuaucccuaacgaucucaagaaaagcgaccugccgccccagcacgcuccuagaaauauuacaguuguggccguggaaggaugucacucuuucgucaucguggauugggacaaggcgacgcccggcgauguugugaccggcuaccuugucuauuccgccagcuacgaggacuuuauccgcaacaagugguccacacaggcuucuagcgugacccaucugccuauugaaaaucucaaacccaacacacgguauuacuucaagguucaggcccaaaacccucacggguauggacccaucuccccgagcgugucuuuugucaccgaguccgauaauccucugcugguggucagacccccuggcggggagcccauuuga

SEQ ID NO: 1623 - protein, 156 aa, Artificial Sequence
  fibronectin__Homo_sapiens__B4DIC5
MEEQRNEEIQSFIYSLKQMLLNVEANSAKVQEDLEAEFQSLFSLLEELKEGMLMKIKQDRASRTYELQNQLAACTRALESSEELLETANQTLQAMDSEDFPQAAKQIKDGVTMAPAFRLSLKAKVSDNMSHLMVDFAQERQMLQALKFLPGERGTH

SEQ ID NO: 1624 - RNA, 471 nt, Artificial Sequence
  fibronectin__Homo_sapiens__BAG58437
auggaagaacagaggaaugaagaaauucagagcuuuaucuacucccugaaacagaugcugcugaacguggaggcgaacucggcgaaggugcaggaggaccucgaagcagaguuccagucccucuucucccuccuggaggagcugaaagaaggcaugcuuaugaagauaaaacaggaccgugccagccgcaccuacgagcugcagaaccagcuggcugccugcacgcgggcccuggagagcuccgaggagcuucuggagacagccaaccagacucugcaggccauggacagcgaggacuuuccucaggcugccaagcaaaucaaagauggagugaccauggccccugccuuccggcuaucauugaaagcgaaggucagugacaacaugagucaccucaugguggacuucgcgcaagagcggcagaugcuacaggcacucaaguuccugccuggugagaggggcacgcacuag

SEQ ID NO: 1625 - RNA, 471 nt, Artificial Sequence
  derived and/or modified sequence opt1 from fibronectin__Homo_sapiens__BAG58437
auggaggagcagcgcaacgaggagauccagagcuucaucuacucccugaagcagaugcuccugaacguggaggccaacagcgccaagguccaggaggaccuggaggcggaguuccagucccucuucagccugcuggaggagcucaaggagggcaugcugaugaagaucaagcaggaccgggccucccgcaccuacgagcugcagaaccagcucgccgccugcacccgggcccuggagagcuccgaggagcugcucgagacggcgaaccagacccugcaggccauggacagcgaggacuucccccaggccgccaagcagaucaaggacggggugaccauggcgccggccuuccgccugucccucaaggccaaggugagcgacaacaugucccaccugauggucgacuucgcccaggagcggcagaugcugcaggcccucaaguuccugcccggcgagcgcgggacccacuga

SEQ ID NO: 1626 - RNA, 471 nt, Artificial Sequence
  derived and/or modified sequence opt2 from fibronectin__Homo_sapiens__BAG58437
auggaggagcagcgcaacgaggagauccaguccuucaucuacucccucaagcagaugcuccucaacgucgaggccaacuccgccaagguccaggaggaccucgaggccgaguuccagucccucuucucccuccucgaggagcucaaggagggcaugcucaugaagaucaagcaggaccgcgccucccgcaccuacgagcuccagaaccagcucgccgccugcacccgcgcccucgaguccuccgaggagcuccucgagaccgccaaccagacccuccaggccauggacuccgaggacuucccccaggccgccaagcagaucaaggacggcgucaccauggcccccgccuuccgccucucccucaaggccaaggucuccgacaacaugucccaccucauggucgacuucgcccaggagcgccagaugcuccaggcccucaaguuccuccccggcgagcgcggcacccacuga

SEQ ID NO: 1627 - RNA, 471 nt, Artificial Sequence
  derived and/or modified sequence opt3 from fibronectin__Homo_sapiens__BAG58437
auggaggaacagagaaacgaggaaauccagagcuucauuuacucccugaagcaaaugcuccuuaauguggaggccaacucugcuaaaguccaggaagaccuggaggcagaguuucagucauuguucaguuuacuggaggaacuaaaggaaggcaugcucaugaaaauaaagcaagauagggccagccggaccuaugagcugcagaaucagcuugcggcuugcacacgcgcccuggaguccucugaagaguugcucgaaacugcaaaccagacgcugcaagccauggacucggaggauuuuccccaggcugcaaaacagaucaaggacgggguuaccauggccccugcuuuccgacugucacucaaggccaaagugagcgauaauaugagucacuuaaugguagacuuugcgcaggaacgucaaaugcugcaggcacuuaaguucuugccaggagagagagguacacauuga

SEQ ID NO: 1628 - RNA, 471 nt, Artificial Sequence
  derived and/or modified sequence opt4 from fibronectin__Homo_sapiens__BAG58437
auggaggagcagagaaacgaggagauccagagcuucaucuacagccugaagcagaugcugcugaacguggaggccaacagcgccaaggugcaggaggaccuggaggccgaguuccagagccuguucagccugcuggaggagcugaaggagggcaugcugaugaagaucaagcaggacagagccagcagaaccuacgagcugcagaaccagcuggccgccugcaccagagcccuggagagcagcgaggagcugcuggagaccgccaaccagacccugcaggccauggacagcgaggacuucccccaggccgccaagcagaucaaggacggcgugaccauggcccccgccuucagacugagccugaaggccaaggugagcgacaacaugagccaccugaugguggacuucgcccaggagagacagaugcugcaggcccugaaguuccugcccggcgagagaggcacccacuga

SEQ ID NO: 1629 - RNA, 471 nt, Artificial Sequence
  derived and/or modified sequence opt5 from fibronectin__Homo_sapiens__BAG58437
auggaggaacagagaaacgaggaaauccagagcuucauuuacucccugaagcaaaugcuccugaauguggaggccaacucugcuaaaguccaggaagaccuugaggccgaguuucagagccuguucucccuccuggaagaacuuaaggaaggcaugcugaugaaaaucaagcaagaucgggcgucucgcaccuaugagcuccagaaucagcuggcugccugcacaagagcccuggagagcuccgaggagcuccuggaaacggcuaaccagacccuucaagccauggacucugaggauuuuccccaggcugccaaacagauuaaggacgggguuacaauggcgccugccuuccggcugagccucaaggcuaaaguguccgauaauaugagccaccugaugguggacuuugcccaggaacgccaaaugcuucaggcucugaaguuccucccgggagagagaggcacccauuga

SEQ ID NO: 1630 - protein, 306 aa, Artificial Sequence
  fibronectin__Homo_sapiens__B4DN21
MIFEEHGFRRTTPPTTATPIRHRPRPYPPNVGQEALSQTTISWAPFQDTSEYIISCHPVGTDEEPLQFRVPGTSTSATLTGLTRGATYNIIVEALKDQQRHKVREEVVTVGNSVNEGLNQPTDDSCFDPYTVSHYAVGDEWERMSESGFKLLCQCLGFGSGHFRCDSSRWCHDNGVNYKIGEKWDRQGENGQMMSCTCLGNGKGEFKCDPHEATCYDDGKTYHVGEQWQKEYLGAICSCTCFGGQRGWRCDNCRRPGGEPSPEGTTGQSYNQYSQRYHQRTNTNVNCPIECFMPLDVQADREDSRE

SEQ ID NO: 1631 - RNA, 921 nt, Artificial Sequence
  fibronectin__Homo_sapiens__BAH14721
augaucuuugaggaacaugguuuuaggcggaccacaccgcccacaacggccacccccauaaggcauaggccaagaccauacccgccgaauguaggacaagaagcucucucucagacaaccaucucaugggccccauuccaggacacuucugaguacaucauuucaugucauccuguuggcacugaugaagaacccuuacaguucaggguuccuggaacuucuaccagugccacucugacaggccucaccagaggugccaccuacaacaucauaguggaggcacugaaagaccagcagaggcauaagguucgggaagagguuguuaccgugggcaacucugucaacgaaggcuugaaccaaccuacggaugacucgugcuuugaccccuacacaguuucccauuaugccguuggagaugagugggaacgaaugucugaaucaggcuuuaaacuguugugccagugcuuaggcuuuggaaguggucauuucagaugugauucaucuagauggugccaugacaauggugugaacuacaagauuggagagaagugggaccgucagggagaaaauggccagaugaugagcugcacaugucuugggaacggaaaaggagaauucaagugugacccucaugaggcaacguguuaugaugaugggaagacauaccacguaggagaacaguggcagaaggaauaucucggugccauuugcuccugcacaugcuuuggaggccagcggggcuggcgcugugacaacugccgcagaccugggggugaacccagucccgaaggcacuacuggccaguccuacaaccaguauucucagagauaccaucagagaacaaacacuaauguuaauugcccaauugagugcuucaugccuuuagauguacaggcugacagagaagauucccgagaguaa

SEQ ID NO: 1632 - RNA, 921 nt, Artificial Sequence
  derived and/or modified sequence opt1 from fibronectin__Homo_sapiens__BAH14721
augaucuucgaggagcacggcuuccgccggaccacgcccccgaccaccgccacccccauccgccaccggccccgccccuacccgcccaacguggggcaggaggcccugagccagaccacgaucuccugggcgcccuuccaggacaccagcgaguacaucaucuccugccaccccgucggcaccgacgaggagccgcuccaguuccgggugcccgggaccagcacguccgccacccugaccggccugacccgcggggccacguacaacaucaucguggaggcccucaaggaccagcagcggcacaagguccgcgaggagguggugaccgucggcaacagcgugaacgagggccugaaccagcccaccgacgacuccugcuucgaccccuacaccgugagccacuacgccgucggggacgagugggagcggauguccgagagcggcuucaagcugcucugccagugccugggguucggcuccgggcacuuccgcugcgacagcucccgguggugccacgacaacggcgugaacuacaagaucggcgagaagugggaccgccagggggagaacggccagaugaugagcugcacgugccuggggaacggcaagggcgaguucaagugcgacccgcacgaggcgaccugcuacgacgacgggaagaccuaccacgugggcgagcaguggcagaaggaguaccucggggccaucugcuccugcacgugcuucggcgggcagcggggcuggcgcugcgacaacugccggcgccccggcggggagcccagccccgagggcaccaccgggcaguccuacaaccaguacagccagcgguaccaccagcgcaccaacaccaacgucaacugcccgaucgagugcuucaugccccuggacgugcaggccgaccgggaggacucccgcgaguga

SEQ ID NO: 1633 - RNA, 921 nt, Artificial Sequence
  derived and/or modified sequence opt2 from fibronectin__Homo_sapiens__BAH14721
augaucuucgaggagcacggcuuccgccgcaccaccccccccaccaccgccacccccauccgccaccgcccccgccccuacccccccaacgucggccaggaggcccucucccagaccaccaucuccugggcccccuuccaggacaccuccgaguacaucaucuccugccaccccgucggcaccgacgaggagccccuccaguuccgcguccccggcaccuccaccuccgccacccucaccggccucacccgcggcgccaccuacaacaucaucgucgaggcccucaaggaccagcagcgccacaagguccgcgaggaggucgucaccgucggcaacuccgucaacgagggccucaaccagcccaccgacgacuccugcuucgaccccuacaccgucucccacuacgccgucggcgacgagugggagcgcauguccgaguccggcuucaagcuccucugccagugccucggcuucggcuccggccacuuccgcugcgacuccucccgcuggugccacgacaacggcgucaacuacaagaucggcgagaagugggaccgccagggcgagaacggccagaugauguccugcaccugccucggcaacggcaagggcgaguucaagugcgacccccacgaggccaccugcuacgacgacggcaagaccuaccacgucggcgagcaguggcagaaggaguaccucggcgccaucugcuccugcaccugcuucggcggccagcgcggcuggcgcugcgacaacugccgccgccccggcggcgagcccucccccgagggcaccaccggccaguccuacaaccaguacucccagcgcuaccaccagcgcaccaacaccaacgucaacugccccaucgagugcuucaugccccucgacguccaggccgaccgcgaggacucccgcgaguga

SEQ ID NO: 1634 - RNA, 921 nt, Artificial Sequence
  derived and/or modified sequence opt3 from fibronectin__Homo_sapiens__BAH14721
augaucuucgaggaacacggcuuuagaaggaccacacccccuacuacggccaccccaauucggcaucgcccgcgacccuacccuccaaacguggggcaggaggcucugagccaaacaacuauauccugggcacccuuccaggacaccucugaauauaucauuucaugccacccugucggaacagaugaggaaccacuccaguuucguguucccgguaccaguacuagcgccacacuuaccggccugacgagaggggcgacuuacaauaucauuguggaggcuuugaaggaccagcaaaggcauaaaguacgggaggaaguggucaccgugggaaacuccguuaaugagggcuuaaaccagccuacagaugacucuuguuucgauccauauacugugucgcacuacgccgucggugacgaaugggagcgcaugucagagagcggguuuaagcugcuaugccagugucucggauucggcaguggccauuuuagaugcgauuccucuagguggugucacgacaauggggugaacuauaaaaucggagaaaagugggaucggcagggugagaauggccaaaugaugagcugcaccugucuggggaacggaaaaggcgaguucaagugcgacccgcacgaagcaacauguuacgaugacgguaagaccuaucauguaggggaacaguggcagaaagaguaccuuggagccauaugcuccuguacgugcuuuggcggccagcgcggguggcgaugcgauaauuguagaaggcccggaggugagccuucaccagaaggcacuacagggcaaaguuacaaccaguauagccagcgguaccaccaacguaccaauacuaacguuaauugccccaucgaguguuucaugccucuggacgugcaggcugaccgcgaagauucuagagaguga

SEQ ID NO: 1635 - RNA, 921 nt, Artificial Sequence
  derived and/or modified sequence opt4 from fibronectin__Homo_sapiens__BAH14721
augaucuucgaggagcacggcuucagaagaaccaccccccccaccaccgccacccccaucagacacagacccagacccuacccccccaacgugggccaggaggcccugagccagaccaccaucagcugggcccccuuccaggacaccagcgaguacaucaucagcugccaccccgugggcaccgacgaggagccccugcaguucagagugcccggcaccagcaccagcgccacccugaccggccugaccagaggcgccaccuacaacaucaucguggaggcccugaaggaccagcagagacacaaggugagagaggagguggugaccgugggcaacagcgugaacgagggccugaaccagcccaccgacgacagcugcuucgaccccuacaccgugagccacuacgccgugggcgacgagugggagagaaugagcgagagcggcuucaagcugcugugccagugccugggcuucggcagcggccacuucagaugcgacagcagcagauggugccacgacaacggcgugaacuacaagaucggcgagaagugggacagacagggcgagaacggccagaugaugagcugcaccugccugggcaacggcaagggcgaguucaagugcgacccccacgaggccaccugcuacgacgacggcaagaccuaccacgugggcgagcaguggcagaaggaguaccugggcgccaucugcagcugcaccugcuucggcggccagagaggcuggagaugcgacaacugcagaagacccggcggcgagcccagccccgagggcaccaccggccagagcuacaaccaguacagccagagauaccaccagagaaccaacaccaacgugaacugccccaucgagugcuucaugccccuggacgugcaggccgacagagaggacagcagagaguga

SEQ ID NO: 1636 - RNA, 921 nt, Artificial Sequence
  derived and/or modified sequence opt5 from fibronectin__Homo_sapiens__BAH14721
augaucuucgaggaacacggcuuuagacggaccacacccccuacgaccgccacaccgauucgccauagaccccggccuuaucccccuaacguggggcaggaggcucugagccaaaccacaaucuccugggcccccuuccaggacaccucugaauacauuaucagcugccacccugucggaacagaugaggaaccgcuccaguuucgcguucccggcaccuccacgucugcgacccugacagggcuuaccagaggagcuacauacaauauuaucguggaggcccugaaggaccagcaacggcauaaagugcgcgaggaagucgugaccguuggcaacagcgugaaugaggggcucaaccagccuacggaugacuccuguuucgaucccuauacagucucucacuacgccgugggagacgaaugggagagaaugagcgaguccggcuuuaagcugcuuugccagugucugggcuucgggagcggacauuuucggugcgauucuucccgcuggugucacgacaauggcguuaacuauaaaaucggggaaaagugggauagacagggagagaauggccaaaugaugagcugcaccugucucgggaacggaaaaggcgaguucaagugcgacccucacgaagcuacauguuacgaugacggcaagaccuaucaugugggggaacaguggcagaaagaguaccugggagccauuugcucuuguaccugcuuuggcgggcagcggggauggcgcugcgauaauuguagacggcccggcggggagccguccccugaaggaacaacgggccaaagcuacaaccaguauucucagcgcuaccaccaaagaaccaauacaaacgucaauugccccaucgaguguuucaugccucuggacgugcaggcugaccgggaagauuccagagaguga

SEQ ID NO: 1637 - protein, 639 aa, Artificial Sequence [sequence omitted]

SEQ ID NO: 1638 - RNA, 1920 nt, Artificial Sequence
  fibronectin__Homo_sapiens__BAG61560
auggaaaaaauucuuuuuuaucuguuucucauuggcauagcagugaaagcucagaucuguccaaagcguugugucugucagauuuugucuccuaaucuugcaacccuuugugccaagaaagggcuuuuauuuguuccaccaaacauugacagaagaacuguggaacugcgguuggcagacaauuuuguuacaaauauuaaaaggaaagauuuugccaauaugaccagcuugguggaccugacucuauccaggaauacaauaaguuuuauuacaccucaugcuuucgcugaccuacgaaauuugaggucuuugcauuugaauagcaacagauugacuaaaauuacaaaugauauguucaguggucuuuccaaucuucaucauuugauacugaacaacaaucagcugacuuuaauuuccucuacagcguuugaugaugucuucgcccuugaggagcuggaucuguccuauaauaaucuagaaaccauuccuugggaugcuguugagaagaugguuagcuugcauacccuuaguuuggaucacaauaugauugauaacauuccuaaggggaccuucucccauuugcacaagaugacucgguuagaugugacaucaaauaaauugcagaagcuaccaccugacccucucuuucagcgagcucagguacuagcaaccucaggaaucauaagcccaucuacuuuugcauuaaguuuugguggaaaccccuugcauugcaauugugaauuguugugguugaggcgucuguccagagaauaugacuuagagaccugugcuucuccuccacuuuuaacuggccgcuacuuuuggucaauuccugaagaagaguuuuugugugagccuccucucauuacucgucauacacaugagaugagaguccuggagggacaaagggcaacacugaggugcaaagccaggggagacccugagccugcaauucacuggauuucuccugaagggaagcuuauuucaaaugcaacaagaucucugguguaugauaacggaacacuugacauucuuaucacaacuguaaaggauacaggugcuuuuaccugcauugcuuccaauccugcuggggaagcaacacaaauaguggaucuucauauaauuaagcucccucacuuacuaaauaguacaaaccauauccaugagccugauccugguucuucagauaucucaacuucuaccaagucagguucuaauacaagcaguaguaaugauggcaucacuucccucacugccacaagagucguggguugcauccaguuuacuacggaacaggauuaugugcguugccauuucaugcagucccaguuuuugggaggcaccaugauuauuauuauugguggaaucauuguagcaucugugcugguauucaucauuauucugaugauccgguauaagguuugcaacaauaaugggcaacacaaggucaccaagguuagcaauguuuauucccaaacuaacggggcucaaauacaaggcuguaguguaacgcugccccaguccguguccaaacaagcugugggacacgaagagaaugcccaguguuguaaagcuaccagugacaaugugauucaaucuucagaaacuuguucgagucaggacuccgcuaccacuaccucugcuuugccuccuuccuggacuucaagcacuucugugucccaaaagcagaaaagaaagacuggcacaaagccaaguacagaaccacagaaugaagccgucacaaauguugaaucccaaaacacuaacaggaacaacucaacugccuugcaguuagcuagccguccucccgauucugucacagaggggcccacgucuaaaagagcacauauaaagccaaaugcuuugcugacuaauguugaccagauuguccaggaaacacagaggcuggaguuaaucuga

SEQ ID NO: 1639 - RNA, 1920 nt, Artificial Sequence
  derived and/or modified sequence opt1 from fibronectin__Homo_sapiens__BAG61560
auggagaagauccuguucuaccucuuccugaucggcaucgccgugaaggcccagaucugccccaagcgcugcgucugccagauccugagcccgaaccucgcgacccugugcgccaagaaggggcuccuguucgugccgcccaacaucgaccggcgcaccguggagcugcggcuggccgacaacuucgucacgaacaucaagcgcaaggacuucgccaacaugaccucccucguggaccugacccugagccggaacaccaucuccuucaucacgccccacgccuucgcggaccuccgcaaccugcggagccugcaccucaacuccaaccgccugaccaagaucaccaacgacauguucagcggccuguccaaccuccaccaccugauccugaacaacaaccagcucacccugaucagcuccacggccuucgacgacguguucgcccuggaggagcucgaccugagcuacaacaaccuggagaccauccccugggacgccgucgagaagauggugucccuccacacccugagccuggaccacaacaugaucgacaacauccccaaggggaccuucucccaccuccacaagaugacgcggcuggacgugaccagcaacaagcugcagaagcucccgcccgacccccuguuccagcgcgcgcagguccuggccaccuccggcaucaucagccccuccaccuucgcccucagcuucgggggcaacccccugcacugcaacugcgagcugcucuggcugcggcgccugucccgggaguacgaccucgagacgugcgccagcccgccccugcugaccggccgcuacuucuggagcauccccgaggaggaguuccucugcgagccgccccugaucacccggcacacccacgagaugcgcgugcuggaggggcagcgggccacgcuccgcugcaaggcgcggggcgaccccgagcccgccauccacuggaucucccccgaggggaagcugaucagcaacgccacccgcucccugguguacgacaacggcacccuggacauccucaucaccacggucaaggacaccggggccuucacgugcaucgccagcaaccccgcgggcgaggccacccagaucguggaccugcacaucaucaagcugccgcaccuccugaacuccaccaaccacauccacgagcccgaccccggcagcuccgacaucagcaccuccaccaagagcggguccaacaccagcuccagcaacgacggcaucacgucccugaccgccacccggguggucgggugcauccaguucaccacggagcaggacuacgugcgcugccacuucaugcagagccaguuccucggcggcaccaugaucaucaucaucgggggcaucaucguggccuccguccugguguucaucaucauccugaugauccgcuacaaggugugcaacaacaacgggcagcacaaggucaccaaggugagcaacguguacucccagaccaacggcgcccagauccaggggugcagcgucacccucccccagagcguguccaagcaggcggucggccacgaggagaacgcccagugcugcaaggccacgagcgacaacgugauccaguccagcgagaccugcuccagccaggacuccgccaccaccacgagcgcccugccgcccuccuggaccagcuccaccagcgugucccagaagcagaagcggaagaccggcacgaagcccagcaccgagccccagaacgaggcggucaccaacguggagucccagaacaccaaccgcaacaacagcacggcccugcagcucgccucccggccgcccgacagcgugaccgaggggcccaccagcaagcgcgcccacaucaagccgaacgcgcugcugaccaacgucgaccagaucgugcaggagacgcagcggcucgagcugaucuga

SEQ ID NO: 1640 - RNA, 1920 nt, Artificial Sequence
  derived and/or modified sequence opt2 from fibronectin__Homo_sapiens__BAG61560
auggagaagauccucuucuaccucuuccucaucggcaucgccgucaaggcccagaucugccccaagcgcugcgucugccagauccucucccccaaccucgccacccucugcgccaagaagggccuccucuucgucccccccaacaucgaccgccgcaccgucgagcuccgccucgccgacaacuucgucaccaacaucaagcgcaaggacuucgccaacaugaccucccucgucgaccucacccucucccgcaacaccaucuccuucaucaccccccacgccuucgccgaccuccgcaaccuccgcucccuccaccucaacuccaaccgccucaccaagaucaccaacgacauguucuccggccucuccaaccuccaccaccucauccucaacaacaaccagcucacccucaucuccuccaccgccuucgacgacgucuucgcccucgaggagcucgaccucuccuacaacaaccucgagaccauccccugggacgccgucgagaagauggucucccuccacacccucucccucgaccacaacaugaucgacaacauccccaagggcaccuucucccaccuccacaagaugacccgccucgacgucaccuccaacaagcuccagaagcucccccccgacccccucuuccagcgcgcccagguccucgccaccuccggcaucaucucccccuccaccuucgcccucuccuucggcggcaacccccuccacugcaacugcgagcuccucuggcuccgccgccucucccgcgaguacgaccucgagaccugcgccucccccccccuccucaccggccgcuacuucugguccauccccgaggaggaguuccucugcgagcccccccucaucacccgccacacccacgagaugcgcguccucgagggccagcgcgccacccuccgcugcaaggcccgcggcgaccccgagcccgccauccacuggaucucccccgagggcaagcucaucuccaacgccacccgcucccucgucuacgacaacggcacccucgacauccucaucaccaccgucaaggacaccggcgccuucaccugcaucgccuccaaccccgccggcgaggccacccagaucgucgaccuccacaucaucaagcucccccaccuccucaacuccaccaaccacauccacgagcccgaccccggcuccuccgacaucuccaccuccaccaaguccggcuccaacaccuccuccuccaacgacggcaucaccucccucaccgccacccgcgucgucggcugcauccaguucaccaccgagcaggacuacguccgcugccacuucaugcagucccaguuccucggcggcaccaugaucaucaucaucggcggcaucaucgucgccuccguccucgucuucaucaucauccucaugauccgcuacaaggucugcaacaacaacggccagcacaaggucaccaaggucuccaacgucuacucccagaccaacggcgcccagauccagggcugcuccgucacccucccccaguccgucuccaagcaggccgucggccacgaggagaacgcccagugcugcaaggccaccuccgacaacgucauccaguccuccgagaccugcuccucccaggacuccgccaccaccaccuccgcccucccccccuccuggaccuccuccaccuccgucucccagaagcagaagcgcaagaccggcaccaagcccuccaccgagccccagaacgaggccgucaccaacgucgagucccagaacaccaaccgcaacaacuccaccgcccuccagcucgccucccgcccccccgacuccgucaccgagggccccaccuccaagcgcgcccacaucaagcccaacgcccuccucaccaacgucgaccagaucguccaggagacccagcgccucgagcucaucuga

SEQ ID NO: 1641 - RNA, 1920 nt, Artificial Sequence
  derived and/or modified sequence opt3 from fibronectin__Homo_sapiens__BAG61560
auggagaagauccuguucuaccucuuucuuauuggcauagccgugaaagcucagaucugccccaagagaugugucugccaaauucugagcccuaacuuggcaaccuuaugugccaaaaaggggcugcuauucguuccaccgaauaucgacaggcggacaguggaacuccgccuggcggauaacuuuguaacuaauauuaaacgaaaggacuucgcuaacaugacgucccuuguggaucugaccuugucucguaauacaaucucauuuauaacuccccacgccuucgcagaccucagaaaccugaggagucugcaucucaauagcaaccgguuaaccaagaucacaaaugauauguuuuccggacugucuaaccuucaccauuugauucugaauaacaaucagcuaacccucaucucgucaacugccuucgacgaugucuuugcucuggaggaacuugaccugagcuauaacaauuuggagacaauuccuugggaugcaguggaaaagaugguuagucuccacacccuguccuuagaccauaacaugaucgauaacauaccaaaggguacguucucucaccuucacaaaaugacucgccucgacgugaccagcaauaagcugcagaaacugcccccugauccauuguuucagagagcccaaguccuagcuacauccggcauuaucucacccaguacuuucgcccugagcuuugggggaaacccucuccauugcaauugugagcugcuuuggcugaggcgguugucucgcgaguacgaccucgaaaccugcgcguccccaccgcuguuaacaggccgauauuucuggucaauucccgaggaagaguuccugugugagccuccacuaaucaccagacacacgcaugaaaugagggugcucgagggucagcgggcaacucugcguugcaaggcccgcggggaccccgaaccugcuauccacuggauuagcccagagggaaaacuuauaaguaacgccacaagaucuuugguauacgauaauggcacccuggacauccucauuacuacaguuaaagauaccggcgcauuuacguguaucgcuuccaaccccgccggggaagcgacccagauaguggaccugcacauuaucaaacuuccgcaucuguugaauagcacaaaccacauccaugagccugaucccggaucgucugacauuuccacuucaaccaagagugguagcaauacauccucuagcaacgauggcaucacuucacucaccgccacaagggucguggggugcauucaguucaccacugagcaagacuaugugcggugucacuuuaugcagagucaguuccugggaggcacgaugauaaucauuaucggugggaucauugucgcauccguuuuaguguuuauaaucauucugaugauccgauacaagguaugcaauaacaauggacagcauaaagugacaaaggucagcaacguguauucucaaaccaauggcgcucagauucagggcugcucaguuacucuaccacaaagugugagcaaacaggccgucgggcacgaagagaacgcucaguguugcaaggccaccuccgauaacgugauccagucuucggaaacauguagcucccaagacucagcaaccacuacaagugcccucccucccucuuggacgagcuccaccucaguaagccagaagcagaaacgcaagacuggaacaaaaccaucuaccgagccccagaaugaagcuguuacaaacguggagucccaaaauacuaacagaaauaacaguaccgcgcugcagcuugcaagcaggccuccagauucugucacggaggguccgaccuccaagcgggcccacauaaaacccaaugcuuugcugacaaacguggaccagaucguccaggaaacucaacgccucgagcugauuuga

SEQ ID NO: 1642 - RNA, 1920 nt, Artificial Sequence
  derived and/or modified sequence opt4 from fibronectin__Homo_sapiens__BAG61560
auggagaagauccuguucuaccuguuccugaucggcaucgccgugaaggcccagaucugccccaagagaugcgugugccagauccugagccccaaccuggccacccugugcgccaagaagggccugcuguucgugccccccaacaucgacagaagaaccguggagcugagacuggccgacaacuucgugaccaacaucaagagaaaggacuucgccaacaugaccagccugguggaccugacccugagcagaaacaccaucagcuucaucaccccccacgccuucgccgaccugagaaaccugagaagccugcaccugaacagcaacagacugaccaagaucaccaacgacauguucagcggccugagcaaccugcaccaccugauccugaacaacaaccagcugacccugaucagcagcaccgccuucgacgacguguucgcccuggaggagcuggaccugagcuacaacaaccuggagaccauccccugggacgccguggagaagauggugagccugcacacccugagccuggaccacaacaugaucgacaacauccccaagggcaccuucagccaccugcacaagaugaccagacuggacgugaccagcaacaagcugcagaagcugccccccgacccccuguuccagagagcccaggugcuggccaccagcggcaucaucagccccagcaccuucgcccugagcuucggcggcaacccccugcacugcaacugcgagcugcuguggcugagaagacugagcagagaguacgaccuggagaccugcgccagccccccccugcugaccggcagauacuucuggagcauccccgaggaggaguuccugugcgagcccccccugaucaccagacacacccacgagaugagagugcuggagggccagagagccacccugagaugcaaggccagaggcgaccccgagcccgccauccacuggaucagccccgagggcaagcugaucagcaacgccaccagaagccugguguacgacaacggcacccuggacauccugaucaccaccgugaaggacaccggcgccuucaccugcaucgccagcaaccccgccggcgaggccacccagaucguggaccugcacaucaucaagcugccccaccugcugaacagcaccaaccacauccacgagcccgaccccggcagcagcgacaucagcaccagcaccaagagcggcagcaacaccagcagcagcaacgacggcaucaccagccugaccgccaccagaguggugggcugcauccaguucaccaccgagcaggacuacgugagaugccacuucaugcagagccaguuccugggcggcaccaugaucaucaucaucggcggcaucaucguggccagcgugcugguguucaucaucauccugaugaucagauacaaggugugcaacaacaacggccagcacaaggugaccaaggugagcaacguguacagccagaccaacggcgcccagauccagggcugcagcgugacccugccccagagcgugagcaagcaggccgugggccacgaggagaacgcccagugcugcaaggccaccagcgacaacgugauccagagcagcgagaccugcagcagccaggacagcgccaccaccaccagcgcccugccccccagcuggaccagcagcaccagcgugagccagaagcagaagagaaagaccggcaccaagcccagcaccgagccccagaacgaggccgugaccaacguggagagccagaacaccaacagaaacaacagcaccgcccugcagcuggccagcagaccccccgacagcgugaccgagggccccaccagcaagagagcccacaucaagcccaacgcccugcugaccaacguggaccagaucgugcaggagacccagagacuggagcugaucuga

SEQ ID NO: 1643 - RNA, 1920 nt, Artificial Sequence
  derived and/or modified sequence opt5 from fibronectin__Homo_sapiens__BAG61560
auggagaagauccuguucuaccucuuucugauuggcaucgccgugaaagcucagauuugccccaagagaugugucugccaaauccuuagcccuaaccuggccacccucugugcgaaaaaggggcugcuuuucguuccgcccaauauugaccggcgcacaguggaacugagacucgcugauaacuuugugacgaauaucaaacggaaggacuucgccaacaugaccucccuggucgaucugacacucucucgcaauaccaucagcuuuauuacaccucacgccuucgcugaccugagaaaccuucggucccugcaucucaauucuaaccgccugaccaagaucacaaaugauauguuuagcggacuuuccaaccugcaccaucucauucugaauaacaaucagcugacccucaucucuagcacggccuucgacgauguguuugcucuggaggaacuugaccuguccuauaacaaucucgagaccauucccugggaugccguugagaaaauggugagccugcacacacuuucucuggaccauaacaugaucgauaacauuccuaagggcaccuucucccaccuccacaaaaugacaagacuggacgucaccagcaauaagcugcagaaacugcccccugauccgcuguuucagcgggcgcaagugcuugccacgucugggaucaucucccccagcacauucgcucugucuuuuggaggcaacccucuccauugcaauugugaacugcuuuggcugcgcagacucucccgggaguacgaccuggaaaccugcgccagcccuccccugcucacagggcgcuauuucugguccauucccgaggaagaguuccugugugagccgccucuuaucaccagacacacccaugaaaugcggguucuggagggacagcgcgcuacacucagaugcaaggcccggggcgaccccgaaccugcgauucacuggaucucucccgagggcaagcugauuagcaacgccacgagaucccugguguacgauaaugggacccuugacauccucaucacaaccgucaaagauacaggagcuuuuaccuguauugccagcaaccccgcuggcgaagccacgcagaucguggaccugcacauuaucaagcugccucaucuccucaauucuacaaaccacauucaugagccggaucccggguccagcgacaucucuaccagcaccaaauccggaucuaauacaagcuccagcaacgauggcaucaccucucuuacagccacgcgcguggucgggugcauucaguucaccacagagcaagacuauguucggugucacuuuaugcagucccaguuccugggaggcaccaugaucauuaucauuggcgggaucauuguggcuagcgugcucgucuuuaucaucauucugaugaucagauacaaggugugcaauaacaauggacagcauaaaguuacaaaggugucuaacgucuauucccaaaccaauggcgcgcagauucaggggugcagcgugacgcugccucaauccguuucuaaacaggccgugggacacgaagagaacgcucaguguugcaaggccaccagcgauaacgucauccaguccucugaaacauguagcucccaagacagcgccaccacaaccucugcccuucccccuuccuggacgagcucuacauccgugagccagaagcagaaacgcaagaccggcacaaaacccucuaccgagccgcagaaugaagcugucaccaacguggagagccaaaauacaaaccggaauaacuccacggcgcuccagcuggcuagcagaccucccgauucuguuaccgaggggccuacauccaagcgcgcccacauuaaacccaaugcccugcucaccaacguggaccagaucguccaggaaacacaacggcuggagcuuaucuga

SEQ ID NO: 1644 - protein, 337 aa, Artificial Sequence [sequence omitted]

SEQ ID NO: 1645 - RNA, 1014 nt, Artificial Sequence
  fibronectin__Homo_sapiens__BAG61984
augaucuuugaggaacaugguuuuaggcggaccacaccgcccacaacggccacccccauaaggcauaggccaagaccauacccgccgaauguaggugaggaaauccaaauuggucacauccccagggaagauguagacuaucaccuguacccacacgguccgggacucaauccaaaugccucuacaggacaagaagcucucucucagacaaccaucucaugggccccauuccaggacacuucugaguacaucauuucaugucauccuguuggcacugaugaagaacccuuacaguucaggguuccuggaacuucuaccagugccacucugacaggccucaccagaggugccaccuacaacaucauaguggaggcacugaaagaccagcagaggcauaagguucgggaagagguuguuaccgugggcaacucugucaacgaaggcuugaaccaaccuacggaugacucgugcuuugaccccuacacaguuucccauuaugccguuggagaugagugggaacgaaugucugaaucaggcuuuaaacuguugugccagugcuuaggcuuuggaaguggucauuucagaugugauucaucuagauggugccaugacaauggugugaacuacaagauuggagagaagugggaccgucagggagaaaauggccagaugaugagcugcacaugucuugggaacggaaaaggagaauucaagugugacccucaugaggcaacguguuaugaugaugggaagacauaccacguaggagaacaguggcagaaggaauaucucggugccauuugcuccugcacaugcuuuggaggccagcggggcuggcgcugugacaacugccgcagaccugggggugaacccagucccgaaggcacuacuggccaguccuacaaccaguauucucagagauaccaucagagaacaaacacuaauguuaauugcccaauugagugcuucaugccuuuagauguacaggcugacagagaagauucccgagaguaa

SEQ ID NO: 1646 - RNA, 1014 nt, Artificial Sequence
  derived and/or modified sequence opt1 from fibronectin__Homo_sapiens__BAG61984
augaucuucgaggagcacggcuuccgccggaccacgcccccgaccaccgccacccccauccgccaccggccccgccccuacccgcccaacgugggggaggagauccagaucggccacaucccccgggaggacgucgacuaccaccuguacccccacgggccgggccucaaccccaacgccagcaccgggcaggaggcccugucccagacgaccaucagcugggcccccuuccaggacaccuccgaguacaucaucagcugccaccccgugggcaccgacgaggagccgcugcaguuccgcgugcccggcacguccaccagcgccacccucaccgggcugacgcggggcgccaccuacaacaucaucgucgaggcccugaaggaccagcagcgccacaaggugcgggaggagguggucaccguggggaacuccgugaacgagggccucaaccagcccaccgacgacagcugcuucgaccccuacacggucucccacuacgcggugggggacgagugggagcgcaugagcgaguccggcuucaagcugcugugccagugccucggcuucgggagcggccacuuccggugcgacuccagccgcuggugccacgacaacggggugaacuacaagaucggcgagaagugggaccggcagggcgagaacgggcagaugauguccugcacgugccugggcaacgggaagggcgaguucaagugcgacccgcacgaggcgaccugcuacgacgacgggaagaccuaccacgucggcgagcaguggcagaaggaguaccugggcgccaucugcagcugcacgugcuucgggggccagcgcggguggcggugcgacaacugccgccggcccggcggggagcccucccccgagggcaccaccggccagagcuacaaccaguacucccagcgcuaccaccagcggaccaacaccaacgugaacugcccgaucgagugcuucaugccccucgacgugcaggccgaccgcgaggacagccgggaguga

SEQ ID NO: 1647 - RNA, 1014 nt, Artificial Sequence
  derived and/or modified sequence opt2 from fibronectin__Homo_sapiens__BAG61984
augaucuucgaggagcacggcuuccgccgcaccaccccccccaccaccgccacccccauccgccaccgcccccgccccuacccccccaacgucggcgaggagauccagaucggccacaucccccgcgaggacgucgacuaccaccucuacccccacggccccggccucaaccccaacgccuccaccggccaggaggcccucucccagaccaccaucuccugggcccccuuccaggacaccuccgaguacaucaucuccugccaccccgucggcaccgacgaggagccccuccaguuccgcguccccggcaccuccaccuccgccacccucaccggccucacccgcggcgccaccuacaacaucaucgucgaggcccucaaggaccagcagcgccacaagguccgcgaggaggucgucaccgucggcaacuccgucaacgagggccucaaccagcccaccgacgacuccugcuucgaccccuacaccgucucccacuacgccgucggcgacgagugggagcgcauguccgaguccggcuucaagcuccucugccagugccucggcuucggcuccggccacuuccgcugcgacuccucccgcuggugccacgacaacggcgucaacuacaagaucggcgagaagugggaccgccagggcgagaacggccagaugauguccugcaccugccucggcaacggcaagggcgaguucaagugcgacccccacgaggccaccugcuacgacgacggcaagaccuaccacgucggcgagcaguggcagaaggaguaccucggcgccaucugcuccugcaccugcuucggcggccagcgcggcuggcgcugcgacaacugccgccgccccggcggcgagcccucccccgagggcaccaccggccaguccuacaaccaguacucccagcgcuaccaccagcgcaccaacaccaacgucaacugccccaucgagugcuucaugccccucgacguccaggccgaccgcgaggacucccgcgaguga

SEQ ID NO: 1648 - RNA, 1014 nt, Artificial Sequence
  derived and/or modified sequence opt3 from fibronectin__Homo_sapiens__BAG61984
augaucuucgaggaacacggcuuuagaaggaccacacccccuacuacggccaccccaauucggcaucgcccgcgacccuacccuccaaacgugggggaggaaauacagaucggacacauuccccgugaggacgucgauuaucaucuguacccucacgguccaggccucaaucccaacgcuagcacagggcaagaagcacuuucccagacuaccaucucuugggccccuuuccaggacacaucagaguauauuaucaguugccauccaguuggaaccgaugaggaaccgcugcaguuuagagugcccggcacuagcacauccgcgaccuugacggguuuaacuaggggagcuaccuacaauauaaucguagaggcccugaaggaccaacagcggcacaaagugcgcgaagaggucgugacaguugggaacucugugaaugagggccuaaaccagccuacugaugacucguguuucgauccauauaccgucucacacuacgcagugggcgacgaaugggagagaaugagcgaaaguggguuuaagcuccugugccagugucuuggauucgguuccggccauuuuaggugcgauucuagccgguggugucacgacaaugggguaaacuauaaaauuggagagaagugggaucgccaaggcgaaaauggucagaugauguccugcacaugucuggggaacggaaaaggcgaguucaagugcgacccccaugaggccaccuguuacgaugacggcaagacguaccacguuggggaacaguggcagaaagaguauuugggagcuaucugcucauguacuugcuuugguggccaacgaggguggagaugcgacaauuguaggcggccuggaggcgaaccaagucccgaggguacaaccgggcagagcuacaaccaguauucucaacguuaccaccagcgcacuaauacaaacgugaauugcccgauugaauguuucaugccucucgauguccaggcagacagagaggauuccagggaguga

SEQ ID NO: 1649 - RNA, 1014 nt, Artificial Sequence
  derived and/or modified sequence opt4 from fibronectin__Homo_sapiens__BAG61984
augaucuucgaggagcacggcuucagaagaaccaccccccccaccaccgccacccccaucagacacagacccagacccuacccccccaacgugggcgaggagauccagaucggccacauccccagagaggacguggacuaccaccuguacccccacggccccggccugaaccccaacgccagcaccggccaggaggcccugagccagaccaccaucagcugggcccccuuccaggacaccagcgaguacaucaucagcugccaccccgugggcaccgacgaggagccccugcaguucagagugcccggcaccagcaccagcgccacccugaccggccugaccagaggcgccaccuacaacaucaucguggaggcccugaaggaccagcagagacacaaggugagagaggagguggugaccgugggcaacagcgugaacgagggccugaaccagcccaccgacgacagcugcuucgaccccuacaccgugagccacuacgccgugggcgacgagugggagagaaugagcgagagcggcuucaagcugcugugccagugccugggcuucggcagcggccacuucagaugcgacagcagcagauggugccacgacaacggcgugaacuacaagaucggcgagaagugggacagacagggcgagaacggccagaugaugagcugcaccugccugggcaacggcaagggcgaguucaagugcgacccccacgaggccaccugcuacgacgacggcaagaccuaccacgugggcgagcaguggcagaaggaguaccugggcgccaucugcagcugcaccugcuucggcggccagagaggcuggagaugcgacaacugcagaagacccggcggcgagcccagccccgagggcaccaccggccagagcuacaaccaguacagccagagauaccaccagagaaccaacaccaacgugaacugccccaucgagugcuucaugccccuggacgugcaggccgacagagaggacagcagagaguga

SEQ ID NO: 1650 - RNA, 1014 nt, Artificial Sequence
  derived and/or modified sequence opt5 from fibronectin__Homo_sapiens__BAG61984
augaucuucgaggaacacggcuuuagacggaccacacccccuacgaccgccacaccgauucgccauagaccccggccuuaucccccuaacgugggggaggaaauccagauuggacacaucccccgcgaggacgucgauuaccaucuguacccucacggcccggggcucaaucccaacgcuagcaccggacaagaagcccugucccagacaaccauuucuugggcgccuuuccaggacacaagcgaguauaucaucuccugccaucccguuggcaccgaugaggaaccucuucaguuuagagugcccgggacgucuaccagcgcuacacugaccggacucacacggggcgccaccuacaauauuaucguggaggcccugaaggaccaacagcgccacaaagucagagaagaggugguuacggugggcaacuccgucaaugaggggcuuaaccagccgacagaugacucuuguuucgauccuuauaccgugagccacuacgcuguuggagacgaaugggagcggauguccgaaagcggcuuuaagcugcucugccagugucugggguucggaucuggccauuuucgcugcgauuccagcagauggugucacgacaauggggugaacuauaaaauuggagagaagugggaucggcaaggcgaaaauggccagaugaugucuugcacaugucuggggaacggaaaaggcgaguucaagugcgacccccaugaggccaccuguuacgaugacgggaagaccuaccacgucggagaacaguggcagaaagaguaucucggcgcuaucugcuccuguacaugcuuugggggacaacgcggcuggagaugcgacaauugucggcgcccuggcggggaacccagccccgagggaacgaccggccagucuuacaaccaguauucccaaagauaccaccagcggacaaauaccaacgugaauugcccuauugaauguuucaugccgcuggaugugcaggccgacagagaggauagccgcgaguga

SEQ ID NO: 1651 - protein, 1014 aa, Artificial Sequence [sequence omitted]

SEQ ID NO: 1652 - RNA, 3045 nt, Artificial Sequence
  fibronectin__Homo_sapiens__BAG62013
augcgugucaccugggcuccacccccauccauugauuuaaccaacuuccuggugcguuacucaccugugaaaaaugaggaagauguugcagaguugucaauuucuccuucagacaaugcaguggucuuaacaaaucuccugccugguacagaauauguagugagugucuccagugucuacgaacaacaugagagcacaccucuuagaggaagacagaaaacaggucuugauuccccaacuggcauugacuuuucugauauuacuggcaacucuuuuacugugcacuggauugcuccucgagccaccaucacuggcuacaggauccgccaucaucccgagcacuucagugggagaccucgagaagaucgggugccccacucucggaauuccaucacccucaccaaccucacuccaggcacagaguauguggucagcaucguugcucuuaauggcagagaggaaagucccuuauugauuggccaacaaucaacaguuucugauguuccgagggaccuggaaguuguugcugcgacccccaccagccuacugaucagcugggaugcuccugcugucacagugagauauuacaggaucacuuacggagaaacaggaggaaauagcccuguccaggaguucacugugccugggagcaagucuacagcuaccaucagcggccuuaaaccuggaguugauuauaccaucacuguguaugcugucacuggccguggagacagccccgcaagcagcaagccaauuuccauuaauuaccgaacagaaauugacaaaccaucccagaugcaagugaccgauguucaggacaacagcauuagugucaaguggcugccuucaaguuccccuguuacugguuacagaguaaccaccacucccaaaaauggaccaggaccaacaaaaacuaaaacugcagguccagaucaaacagaaaugacuauugaaggcuugcagcccacaguggaguaugugguuagugucuaugcucagaauccaagcggagagagucagccucugguucagacugcaguaaccacuauuccugcaccaacugaccugaaguucacucaggucacacccacaagccugagcgcccaguggacaccacccaauguucagcucacuggauaucgagugcgggugacccccaaggagaagaccggaccaaugaaagaaaucaaccuugcuccugacagcucauccgugguuguaucaggacuuaugguggccaccaaauaugaagugagugucuaugcucuuaaggacacuuugacaagcagaccagcucaggguguugucaccacucuggagaaugucagcccaccaagaagggcucgugugacagaugcuacugagaccaccaucaccauuagcuggagaaccaagacugagacgaucacuggcuuccaaguugaugccguuccagccaauggccagacuccaauccagagaaccaucaagccagaugucagaagcuacaccaucacagguuuacaaccaggcacugacuacaagaucuaccuguacaccuugaaugacaaugcucggagcuccccuguggucaucgacgccuccacugccauugaugcaccauccaaccugcguuuccuggccaccacacccaauuccuugcugguaucauggcagccgccacgugccaggauuaccggcuacaucaucaaguaugagaagccugggucuccucccagagaaguggucccucggccccgcccuggugucacagaggcuacuauuacuggccuggaaccgggaaccgaauauacaauuuaugucauugcccugaagaauaaucagaagagcgagccccugauuggaaggaaaaagacagacgagcuuccccaacugguaacccuuccacaccccaaucuucauggaccagagaucuuggauguuccuuccacaguucaaaagaccccuuucgucacccacccuggguaugacacuggaaaugguauucagcuuccuggcacuucuggucagcaacccaguguugggcaacaaaugaucuuugaggaacaugguuuuaggcggaccacaccgcccacaacggccacccccauaaggcauaggccaaggccauacccgccgaauguaggugaggaaauccaaauuggucacauccccagggaagauguagacuaucaccuguacccacacgguccgggacucaauccaaaugccucuacaggacaagaagcucucucucagacaaccaucucaugggccccauuccaggacacuucugaguacaucauuucaugucauccuguuggcacugaugaagaacccuuacaguucaggguuccuggaacuucuaccagugccacucugacaggccucaccagaggugccaccuacaacaucauaguggaggcacugaaagaccagcagaggcauaagguucgggaagagguuguuaccgugggcaacucugucaacgaaggcuugaaccaaccuacggaugacucgugcuuugaccccuacacaguuucccauuaugccguuggagaugagugggaacgaaugucugaaucaggcuuuaaacuguugugccagugcuuaggcuuuggaaguggccauuucagaugugauucaucuagauggugccaugacaauggugugaacuacaagauuggagagaagugggaccgucagggagaaaauggccagaugaugagcugcacaugucuugggaacggaaaaggagaauucaagugugacccucaugaggcaacguguuacgaugaugggaagacauaccacguaggagaacaguggcagaaggaauaucucggugccauuugcuccugcacaugcuuuggaggccagcggggcuggcgcugugacaacugccgcagaccugggggugaacccagucccgaaggcacuacuggccaguccuacaaccaguauucucagagauaccaucagagaacaaacacuaauguuaauugcccaauugagugcuucaugccuuuagauguacaggcugacagagaagauucccgagaguaa

SEQ ID NO: 1653 - RNA, 3045 nt, Artificial Sequence
  derived and/or modified sequence opt1 from fibronectin__Homo_sapiens__BAG62013
augcgcgugaccugggcccccccgcccagcaucgaccugaccaacuuccucguccgguacucccccgugaagaacgaggaggacguggccgagcugagcaucucccccagcgacaacgcggucgugcugacgaaccuccugccgggcaccgaguacguggucuccgugagcuccguguacgagcagcacgagagcaccccccugcgcgggcggcagaagaccggccucgacucccccacggggaucgacuucagcgacaucaccggcaacuccuucaccguccacuggaucgccccccgcgccaccaucacgggguaccggauccgccaccacccggagcacuucagcggccggccccgcgaggaccgggugccccacucccgcaacagcaucacccugaccaaccugacccccggcacggaguacguggucuccaucguggcccucaacgggcgggaggagagcccgcugcugaucggccagcaguccaccgugagcgacgucccccgcgaccucgaggugguggccgcgacccccaccucccugcugaucagcugggacgcccccgccgucacggugcgguacuaccgcaucaccuacggggagaccggcgggaacagcccggugcaggaguucaccguccccggcuccaagagcacggccaccaucuccggccucaagcccgggguggacuacaccaucaccguguacgcggucacgggccggggggacagccccgccuccagcaagccgaucuccaucaacuaccgcaccgagaucgacaagcccagccagaugcaggugaccgacguccaggacaacuccaucagcgugaaguggcugcccuccagcucccccgugaccggcuaccgggucacgaccaccccgaagaacggccccgggcccaccaagacgaagaccgccggccccgaccagaccgagaugaccaucgaggggcugcagccgacgguggaguacguggucagcguguacgcccagaaccccuccggcgagagccagccccucgugcagaccgccgucaccaccaucccggcgcccaccgaccugaaguucacgcaggugacccccaccucccugagcgcccaguggacccccccgaacgugcagcucacgggguaccgcguccgggugacccccaaggagaagaccggccccaugaaggagaucaaccuggcccccgacuccagcagcguggucguguccggccugaugguggccaccaaguacgaggucagcguguacgcccucaaggacacgcugaccucccgcccggcgcaggggguggucaccacccuggagaacgugagccccccccggcgcgcccgcgugacggacgccaccgagaccaccaucacgaucuccuggcggaccaagaccgagaccaucacgggcuuccaggucgacgccgugcccgccaacgggcagaccccgauccagcgcaccaucaagcccgacgugcggagcuacaccaucacgggccuccagcccgggaccgacuacaagaucuaccuguacacccugaacgacaacgcgcgcuccagccccgucgugaucgacgccuccaccgccaucgacgccccgagcaaccuccgguuccuggccacgacccccaacucccugcucgugagcuggcagcccccccgcgcgcggaucaccggcuacaucaucaaguacgagaagccgggcucccccccccgcgaggucgugccccggccgcgccccggggugaccgaggccacgaucaccggccuggagcccgggaccgaguacaccaucuacgucaucgcccugaagaacaaccagaagagcgagccgcucaucggccggaagaagacggacgagcugccccagcuggugacccucccccaccccaaccugcacgggccggagauccuggacgugcccuccaccguccagaagacccccuucgugacccaccccggcuacgacacgggcaacgggauccagcucccgggcaccagcgggcagcagcccuccgugggccagcagaugaucuucgaggagcacggcuuccgccggaccaccccccccacgaccgccaccccgauccgccaccggccccgccccuaccccccgaacgucggggaggagauccagaucggccacaucccccgggaggacguggacuaccaccuguacccccacgggcccggccugaacccgaacgcgagcaccgggcaggaggcccucagccagacgaccaucuccugggcccccuuccaggacaccagcgaguacaucaucuccugccaccccgugggcaccgacgaggagccccugcaguuccgcgucccgggcacgagcaccuccgccacccugaccgggcucacgcggggcgccaccuacaacaucaucguggaggcgcugaaggaccagcagcgccacaaggugcgcgaggaggucgugaccguggggaacagcgucaacgagggccugaaccagcccaccgacgacuccugcuucgaccccuacacggugagccacuacgccgugggggacgagugggagcggauguccgagagcggcuucaagcugcucugccagugccugggcuucggguccggccacuuccgcugcgacagcucccgguggugccacgacaacggggucaacuacaagaucggcgagaagugggaccgccagggggagaacggccagaugaugagcugcaccugccugggcaacgggaagggcgaguucaagugcgacccccacgaggccaccugcuacgacgacgggaagaccuaccacgugggcgagcaguggcagaaggaguaccucggggccaucugcuccugcacgugcuucggcggccagcggggguggcgcugcgacaacugccggcgcccgggcggggagcccagccccgagggcaccaccggccaguccuacaaccaguacagccagcgguaccaccagcgcaccaacacgaacgucaacugcccgaucgagugcuucaugccccuggacgugcaggccgaccgggaggacucccgcgaguga

SEQ ID NO: 1654 - RNA, 3045 nt, Artificial Sequence
  derived and/or modified sequence opt2 from fibronectin__Homo_sapiens__BAG62013
augcgcgucaccugggcccccccccccuccaucgaccucaccaacuuccucguccgcuacucccccgucaagaacgaggaggacgucgccgagcucuccaucucccccuccgacaacgccgucguccucaccaaccuccuccccggcaccgaguacgucgucuccgucuccuccgucuacgagcagcacgaguccaccccccuccgcggccgccagaagaccggccucgacucccccaccggcaucgacuucuccgacaucaccggcaacuccuucaccguccacuggaucgccccccgcgccaccaucaccggcuaccgcauccgccaccaccccgagcacuucuccggccgcccccgcgaggaccgcgucccccacucccgcaacuccaucacccucaccaaccucacccccggcaccgaguacgucgucuccaucgucgcccucaacggccgcgaggaguccccccuccucaucggccagcaguccaccgucuccgacgucccccgcgaccucgaggucgucgccgccacccccaccucccuccucaucuccugggacgcccccgccgucaccguccgcuacuaccgcaucaccuacggcgagaccggcggcaacucccccguccaggaguucaccguccccggcuccaaguccaccgccaccaucuccggccucaagcccggcgucgacuacaccaucaccgucuacgccgucaccggccgcggcgacucccccgccuccuccaagcccaucuccaucaacuaccgcaccgagaucgacaagcccucccagaugcaggucaccgacguccaggacaacuccaucuccgucaaguggcuccccuccuccucccccgucaccggcuaccgcgucaccaccacccccaagaacggccccggccccaccaagaccaagaccgccggccccgaccagaccgagaugaccaucgagggccuccagcccaccgucgaguacgucgucuccgucuacgcccagaaccccuccggcgagucccagccccucguccagaccgccgucaccaccauccccgcccccaccgaccucaaguucacccaggucacccccaccucccucuccgcccaguggaccccccccaacguccagcucaccggcuaccgcguccgcgucacccccaaggagaagaccggccccaugaaggagaucaaccucgcccccgacuccuccuccgucgucgucuccggccucauggucgccaccaaguacgaggucuccgucuacgcccucaaggacacccucaccucccgccccgcccagggcgucgucaccacccucgagaacgucucccccccccgccgcgcccgcgucaccgacgccaccgagaccaccaucaccaucuccuggcgcaccaagaccgagaccaucaccggcuuccaggucgacgccguccccgccaacggccagacccccauccagcgcaccaucaagcccgacguccgcuccuacaccaucaccggccuccagcccggcaccgacuacaagaucuaccucuacacccucaacgacaacgcccgcuccucccccgucgucaucgacgccuccaccgccaucgacgcccccuccaaccuccgcuuccucgccaccacccccaacucccuccucgucuccuggcagcccccccgcgcccgcaucaccggcuacaucaucaaguacgagaagcccggcucccccccccgcgaggucgucccccgcccccgccccggcgucaccgaggccaccaucaccggccucgagcccggcaccgaguacaccaucuacgucaucgcccucaagaacaaccagaaguccgagccccucaucggccgcaagaagaccgacgagcucccccagcucgucacccucccccaccccaaccuccacggccccgagauccucgacguccccuccaccguccagaagacccccuucgucacccaccccggcuacgacaccggcaacggcauccagcuccccggcaccuccggccagcagcccuccgucggccagcagaugaucuucgaggagcacggcuuccgccgcaccaccccccccaccaccgccacccccauccgccaccgcccccgccccuacccccccaacgucggcgaggagauccagaucggccacaucccccgcgaggacgucgacuaccaccucuacccccacggccccggccucaaccccaacgccuccaccggccaggaggcccucucccagaccaccaucuccugggcccccuuccaggacaccuccgaguacaucaucuccugccaccccgucggcaccgacgaggagccccuccaguuccgcguccccggcaccuccaccuccgccacccucaccggccucacccgcggcgccaccuacaacaucaucgucgaggcccucaaggaccagcagcgccacaagguccgcgaggaggucgucaccgucggcaacuccgucaacgagggccucaaccagcccaccgacgacuccugcuucgaccccuacaccgucucccacuacgccgucggcgacgagugggagcgcauguccgaguccggcuucaagcuccucugccagugccucggcuucggcuccggccacuuccgcugcgacuccucccgcuggugccacgacaacggcgucaacuacaagaucggcgagaagugggaccgccagggcgagaacggccagaugauguccugcaccugccucggcaacggcaagggcgaguucaagugcgacccccacgaggccaccugcuacgacgacggcaagaccuaccacgucggcgagcaguggcagaaggaguaccucggcgccaucugcuccugcaccugcuucggcggccagcgcggcuggcgcugcgacaacugccgccgccccggcggcgagcccucccccgagggcaccaccggccaguccuacaaccaguacucccagcgcuaccaccagcgcaccaacaccaacgucaacugccccaucgagugcuucaugccccucgacguccaggccgaccgcgaggacucccgcgaguga

SEQ ID NO: 1655 - RNA, 3045 nt, Artificial Sequence
  derived and/or modified sequence opt3 from fibronectin__Homo_sapiens__BAG62013
augagagugaccugggccccgccuccaagcaucgaccugacaaacuuccucgucagguacuccccgguuaagaaugaggaagauguggcugagcuuucuauuucacccagugacaacgcaguagugcugacuaauuuguuaccuggcacggaauaugucgugagcguuuccucuguguacgagcagcacgaaucgaccccacugcgggggcgccagaaaacaggacuagauucacccacugguauagacuuuagcgauaucaccggcaacaguuucacaguccauuggauugccccucgagcgaccaucacuggguaucguauuagacaccauccagagcacuuuuccggaaggccccgggaggaccgcgugccucauucuagaaauagcaucacacucaccaaccugacgccaggcacugaauacguaguuuccauaguggcucuuaaugguagggaggaaucaccgcuguugaucgggcagcagaguaccgucagcgaugugccccgggaccucgagguggucgccgcaacaccuacuucucugcugauuuccugggaugccccagcuguuaccgugcgcuauuaccgaaucacauauggagagaccggcggcaacucacccguacaggaguucacggugccugggagcaagaguacugcaacaauuucuggacucaaaccaggugucgacuacaccaucacuguguacgccguuacaggcagaggggauucccccgcuagcucgaagccgauaucuauuaauuauaggaccgaaaucgacaaaccuucccaaaugcaagugacggauguccaggacaacucaauuagugugaagugguuacccagcuccucuccaguaaccggauaccggguuacaacuaccccuaagaauggccccgguccaacaaaaacuaagaccgccgggcccgaccagacagaaaugaccaucgagggacugcaaccuacuguggaauaugucgugagcgucuacgcgcagaacccaucaggcgagagucagccgcuugugcagacggcaguuacaaccauccccgccccuacugauuugaaauuuacccaagugacaccaaccucccugagcgcucaguggacucccccuaauguacagcuaacaggcuaucguguccgcgugacgccaaaggagaaaaccgggcccaugaaggaaauuaaccucgccccggacucuucaaguguuguggucagcggacugaugguggcaacuaaguacgagguauccguguaugcucuuaaagauacacugaccucuagaccugcccaagguguugucacaacuuuggaaaaugugucgccacccaggcgggcgcgagugaccgacgccacggagaccacaauaacuaucagcuggcgcaccaagacagaaacuauuaccggcuuccaggucgaugcaguuccugcuaacgggcagacgcccauccagagaacaauaaaaccagacgugagguccuacaccauuacuggacuccaaccuggcacagauuacaagaucuaucuguacaccuuaaacgacaaugcccggucaagucccgugguaaucgaugcuucuacugccauugacgcaccaagcaaccugcgcuuucucgccaccacacccaauucccuucuggucucauggcagccucccagagcuaggaucacggguuauauuauaaaauacgagaagccagggucucccccucgugaggugguuccacggccccgaccuggcgugaccgaagcgacuaucacaggauuggagccgggcaccgaauauacaauuuacgucaucgcacuaaagaacaaucagaaaagcgagccacugaucgggagaaagaaaacugaugaacucccccagcuggugacccuuccucacccaaaccugcacggacccgagauuuuggacguuccuuccacggugcaaaagacaccguucguaacccaucccgguuaugacacuggcaaugggauacagcucccaggaaccaguggccagcagccuagcgucggucaacagaugaucuuugaggaacacggguucaggcgcacaacucccccaaccacagccacgccuauucggcauagacccaggccauacccgccuaacgugggcgaggaaauccagauuggacacaucccccgcgaggauguggacuaccaccuguauccacauggccccggguuaaauccuaacgcuucuaccggacaggaggcccugucccaaacuacaauaucaugggcaccauuucaggauaccagugaauacaucauuagcugccaccccgucgguacugacgaggaaccucuacaguuccgaguuccgggcacaucgaccuccgccacgcucacugggcugacccggggagcuacauauaauaucauuguggaggcccuuaaagaucaacagcgucauaagguaagagaagagguggucaccgugggcaacucuguuaaugaggguuugaaccagccaacugacgauagcuguuuugaccccuacacagugucacacuaugcagucggggaugaaugggagaggaugagugaauccggcuucaaacugcucugccagugucugggauucggcucugggcauuuucgcugcgacagcucccgguggugucacgauaauggagugaacuacaagaucggcgagaagugggacagacaaggugaaaacgggcagaugaugucaugcaccugucuuggaaauggcaaaggugaguucaagugcgauccucacgaggcgacauguuaugacgacggcaaaacuuaccauguuggggaacaguggcagaaggaguaccugggagcuauaugcagcuguaccugcuuuggcgggcaaaggggauggcgaugcgauaacugucgccggcccggcggugaaccaaguccugaggggacgacaggacagucuuauaaucaguacucccagagauaucaccaaaggaccaacacuaaugugaacugccccauugaauguuucaugccauuggacguccaggccgaucgugaggacagccgcgaguga

SEQ ID NO: 1656 - RNA, 3045 nt, Artificial Sequence
  derived and/or modified sequence opt4 from fibronectin__Homo_sapiens__BAG62013
augagagugaccugggcccccccccccagcaucgaccugaccaacuuccuggugagauacagccccgugaagaacgaggaggacguggccgagcugagcaucagccccagcgacaacgccguggugcugaccaaccugcugcccggcaccgaguacguggugagcgugagcagcguguacgagcagcacgagagcaccccccugagaggcagacagaagaccggccuggacagccccaccggcaucgacuucagcgacaucaccggcaacagcuucaccgugcacuggaucgcccccagagccaccaucaccggcuacagaaucagacaccaccccgagcacuucagcggcagacccagagaggacagagugccccacagcagaaacagcaucacccugaccaaccugacccccggcaccgaguacguggugagcaucguggcccugaacggcagagaggagagcccccugcugaucggccagcagagcaccgugagcgacgugcccagagaccuggaggugguggccgccacccccaccagccugcugaucagcugggacgcccccgccgugaccgugagauacuacagaaucaccuacggcgagaccggcggcaacagccccgugcaggaguucaccgugcccggcagcaagagcaccgccaccaucagcggccugaagcccggcguggacuacaccaucaccguguacgccgugaccggcagaggcgacagccccgccagcagcaagcccaucagcaucaacuacagaaccgagaucgacaagcccagccagaugcaggugaccgacgugcaggacaacagcaucagcgugaaguggcugcccagcagcagccccgugaccggcuacagagugaccaccacccccaagaacggccccggccccaccaagaccaagaccgccggccccgaccagaccgagaugaccaucgagggccugcagcccaccguggaguacguggugagcguguacgcccagaaccccagcggcgagagccagccccuggugcagaccgccgugaccaccauccccgcccccaccgaccugaaguucacccaggugacccccaccagccugagcgcccaguggaccccccccaacgugcagcugaccggcuacagagugagagugacccccaaggagaagaccggccccaugaaggagaucaaccuggcccccgacagcagcagcgugguggugagcggccugaugguggccaccaaguacgaggugagcguguacgcccugaaggacacccugaccagcagacccgcccagggcguggugaccacccuggagaacgugagcccccccagaagagccagagugaccgacgccaccgagaccaccaucaccaucagcuggagaaccaagaccgagaccaucaccggcuuccagguggacgccgugcccgccaacggccagacccccauccagagaaccaucaagcccgacgugagaagcuacaccaucaccggccugcagcccggcaccgacuacaagaucuaccuguacacccugaacgacaacgccagaagcagccccguggugaucgacgccagcaccgccaucgacgcccccagcaaccugagauuccuggccaccacccccaacagccugcuggugagcuggcagccccccagagccagaaucaccggcuacaucaucaaguacgagaagcccggcagcccccccagagagguggugcccagacccagacccggcgugaccgaggccaccaucaccggccuggagcccggcaccgaguacaccaucuacgugaucgcccugaagaacaaccagaagagcgagccccugaucggcagaaagaagaccgacgagcugccccagcuggugacccugccccaccccaaccugcacggccccgagauccuggacgugcccagcaccgugcagaagacccccuucgugacccaccccggcuacgacaccggcaacggcauccagcugcccggcaccagcggccagcagcccagcgugggccagcagaugaucuucgaggagcacggcuucagaagaaccaccccccccaccaccgccacccccaucagacacagacccagacccuacccccccaacgugggcgaggagauccagaucggccacauccccagagaggacguggacuaccaccuguacccccacggccccggccugaaccccaacgccagcaccggccaggaggcccugagccagaccaccaucagcugggcccccuuccaggacaccagcgaguacaucaucagcugccaccccgugggcaccgacgaggagccccugcaguucagagugcccggcaccagcaccagcgccacccugaccggccugaccagaggcgccaccuacaacaucaucguggaggcccugaaggaccagcagagacacaaggugagagaggagguggugaccgugggcaacagcgugaacgagggccugaaccagcccaccgacgacagcugcuucgaccccuacaccgugagccacuacgccgugggcgacgagugggagagaaugagcgagagcggcuucaagcugcugugccagugccugggcuucggcagcggccacuucagaugcgacagcagcagauggugccacgacaacggcgugaacuacaagaucggcgagaagugggacagacagggcgagaacggccagaugaugagcugcaccugccugggcaacggcaagggcgaguucaagugcgacccccacgaggccaccugcuacgacgacggcaagaccuaccacgugggcgagcaguggcagaaggaguaccugggcgccaucugcagcugcaccugcuucggcggccagagaggcuggagaugcgacaacugcagaagacccggcggcgagcccagccccgagggcaccaccggccagagcuacaaccaguacagccagagauaccaccagagaaccaacaccaacgugaacugccccaucgagugcuucaugccccuggacgugcaggccgacagagaggacagcagagaguga

SEQ ID NO: 1657 - RNA, 3045 nt, Artificial Sequence
  derived and/or modified sequence opt5 from fibronectin__Homo_sapiens__BAG62013
augagagugaccugggcucccccuccgagcaucgaccugacaaacuuccucguccgguacucccccguuaagaaugaggaagauguggccgagcugucuauuagcccuuccgacaacgccgugguccuuacgaaucugcuccccggcaccgaauaugugguuucugugagcuccgucuacgagcagcacgaaucuacaccucugcgcgggagacagaaaaccggacuugauagccccacaggcaucgacuuuuccgauauuaccgggaacagcuucacagugcauuggaucgcgccucgggcuaccauuacgggauaucgcaucagacaccauccggagcacuuuucuggccggccccgcgaggacagaguuccucauucccggaauagcaucacccugacaaaccucacccccgggacagaauacguggucucuauuguggcccugaauggacgcgaggaauccccucugcucaucggccaacagagcaccgugucugauguccccagagaccuggagguuguggccgcuacgccgacaucccuucugauuagcugggaugccccugcugugaccguccgguauuaccgcaucacauauggcgagaccgggggaaacucccccgugcaggaguucaccguuccuggcucuaagagcacagccacgauuuccgggcucaaacccggaguggacuacaccaucacagucuacgcggugaccggcagaggggauagccccgccucuuccaagccuauuagcaucaauuaucggacagaaaucgacaaaccgucucaaaugcagguuaccgaugugcaggacaacagcauuuccgucaaguggcugcccucuagcuccccugugacgggauaccgcgucacaaccacccccaagaauggcccuggccccacaaaaaccaagacagcugggccggaccagacggaaaugaccaucgagggacuucaaccuacaguggaauauguugugagcgucuacgcccagaaccccucuggcgagucccagccucuggugcagaccgcuguuacaaccauucccgccccuacggaucucaaauuuacccaagugacacccaccagccugucugcgcaguggacaccgccuaauguccagcugaccggguauagagugcgggugacgcccaaggagaaaacaggacccaugaaggaaaucaaccucgccccugacuccagcuccguugucgugucuggccugaugguggcuaccaaguacgaggucagcguguaugcccuuaaagauacacugaccuccagaccggcucaagggguugugaccacacucgaaaaugucucucccccucgccgggccagagugacggacgccaccgagacaaccauuacaaucagcuggcgcaccaagacggaaacaaucaccggauuccagguugaugcugugcccgcgaacggccagaccccuauucagcggacaaucaaacccgacgucagauccuacaccauuacaggccugcaaccugggacggauuacaagaucuaucuuuacacccugaacgacaaugcccgcagcucucccgugguuauugaugcuuccacagccaucgacgccccgagcaaccuccgguuucuggcuaccacaccuaauucucugcucguguccuggcagcccccuagagcccgcaucaccggauauauuaucaaauacgagaagcccggcagcccgccucgggaggucgugcccagaccucgccccggggugacggaagcgaccauuacaggacuggagcccggcaccgaauauacaaucuacgucauugcucuuaaaaacaaucagaagucugagccucugaucgggcggaagaaaaccgaugaacucccgcagcugguuacacuuccccacccuaaccugcacggccccgagauucucgacgugccuagcaccgugcaaaagacgcccuucgucacacauccuggauaugacaccggcaaugggauccagcugccgggaaccuccggccagcagcccagcguggggcaacagaugaucuuugaggaacacggauucagacggacaaccccucccacgacagccaccccuauucgccauagaccccggccguacccucccaacguuggcgaggaaauccagauugggcacauccccagagaggauguggacuaccaccuguauccucauggccccggacucaauccuaacgccucuacaggccaggaggcucugucccaaaccacaauuagcugggccccguuucaggauaccuccgaauacaucaucucuugccaccccgucgggacggacgaggaaccucuucaguuccgcgugcccggaaccagcacauccgcuacccugacaggccucaccagaggggccacguauaauauuaucguugaggcgcugaaagaucaacagcggcauaaggugcgcgaagaggucgugacaguuggaaacucugugaaugagggccugaaccagccuaccgacgauagcuguuuugaccccuacacagucucccacuaugccgugggggaugaaugggagagaaugucugaaagcggcuucaaacuucucugccagugucugggauucggcuccgggcauuuucggugcgacagcucucgcuggugucacgauaauggagugaacuacaagauuggcgagaagugggacagacaaggggaaaacggacagaugauguccugcaccugucugggcaaugggaaaggcgaguucaagugcgauccgcacgaggcuaccuguuaugacgacggaaaaacauaccaugucggcgaacaguggcagaaggaguaccucggggccaucugcagcuguacgugcuuuggaggccaacggggguggcgcugcgauaacuguagacggccuggaggcgaacccucuccugagggcaccacagggcaguccuauaaucaguacagccagcgcuaucaccaaagaaccaacacaaauguuaacugccccauugaauguuucaugccucuggacgugcaggcugaucgggaggacucucgcgaguga

SEQ ID NO: 1658 - protein, 894 aa, Artificial Sequence [sequence omitted]

SEQ ID NO: 1659 - RNA, 2685 nt, Artificial Sequence
  fibronectin__Homo_sapiens__BAG62178
augcgugucaccugggcuccacccccauccauugauuuaaccaacuuccuggugcguuacucaccugugaaaaaugaggaagauguugcagaguugucaauuucuccuucagacaaugcaguggucuuaacaaaucuccugccugguacagaauauguagugagugucuccagugucuacgaacaacaugagagcacaccucuuagaggaagacagaaaacaggucuugauuccccaacuggcauugacuuuucugauauuacugccaacucuuuuacugugcacuggauugcuccucgagccaccaucacuggcuacaggauccgccaucaucccgagcacuucagugggagaccucgagaagaucgggugccccacucucggaauuccaucacccucaccaaccucacuccaggcacagaguauguggucagcaucguugcucuuaauggcagagaggaaagucccuuauugauuggccaacaaucaacaguuucugauguuccgagggaccuggaaguuguugcugcgacccccaccagccuacugaucagcugggaugcuccugcugucacagugagauauuacaggaucacuuacggagaaacaggaggaaauagcccuguccaggaguucacugugccugggagcaagucuacagcuaccaucagcggccuuaaaccuggaguugauuauaccaucacuguguaugcugucacuggccguggagacagccccgcaagcagcaagccaauuuccauuaauuaccgaacagaaauugacaaaccaucccagaugcaagugaccgauguucaggacaacagcauuagugucaaguggcugccuucaaguuccccuguuacugguuacagaguaaccaccacucccaaaaauggaccaggaccaacaaaaacuaaaacugcagguccagaucaaacagaaaugacuauugaaggcuugcaucccacaguggaguaugugguuagugucuaugcucagaauccaagcggagagagucagccucugguucagacugcaguaaccacuauuccugcaccaacugaccugaaguucacucaggucacacccacaagccugagcgcccaguggacaccacccaauguucagcucacuggauaucgagugcgggugacccccaaggagaagaccggaccaaugaaagaaaucaaccuugcuccugacagcucauccgugguuguaucaggacuuaugguggccaccaaauaugaagugagugucuaugcucuuaaggacacuuugacaagcagaccagcucaggguguugucaccacucuggagaaugucagcccaccaagaagggcucgugugacagaugcuacugagaccaccaucaccauuagcuggagaaccaagacugagacgaucacuggcuuccaaguugaugccguuccagccaauggccagacuccaauccagagaaccaucaagccagauguuagaagcuacaccaucacagguuuacaaccaggcacugacuacaagaucuaccuguacaccuugaaugacaaugcucggagcuccccuguggucaucgacgccuccacugccauugaugcaccauccaaccugcguuuccuggccaccacacccaauuccuugcugguaucauggcagccgccacgugccaggauuaccggcuacaucaucaaguaugagaagccugggucuccucccagagaaguggucccucggccccgcccuggugucacagaggcuacuauuacuggccuggaaccgggaaccgaauauacaauuuaugucauugcccugaagaauaaucagaagagcgagccccugauuggaaggaaaaagacaggacaagaagcucucucucagacaaccaucucaugggccccauuccaggacacuucugaguacaucauuucaugucauccuguuggcacugaugaagaacccuuacaguucaggguuccuggaacuucuaccagugccacucugacaggccucaccagaggugccaccuacaacaucauaguggaggcacugaaagaccagcagaggcauaagguucgggaagagguuauuaccgugggcaacucugucaacgaaggcuugaaccaaccuacggaugacucgugcuuugaccccuacacaguuucccauuaugccguuggagaugagugggaacgaaugucugaaucaggcuuuaaacuguugugccagugcuuaggcuuuggaaguggucauuucagaugugauucaucuagauggugccaugacaauggugugaacuacaagauuggagagaagugggaccgucagggagaaaauggccagaugaugagcugcacaugucuugggaacggaaaaggagaauucaagugugacccucaugaggcaacguguuacgaugaugggaagacauaccacguaggagaacaguggcagaaggaauaucucggugccauuugcuccugcacaugcuuuggaggccagcggggcuggcgcugugacaacugccgcagaccugggggugaacccagucccgaaggcacuacuggccaguccuacaaccaguauucucagagauaccaucagagaacaaacacuaauguuaauugcccaauugagugcuucaugccuuuagauguacaggcugacagagaagauucccgagaguaa

SEQ ID NO: 1660 - RNA, 2685 nt, Artificial Sequence
  derived and/or modified sequence opt1 from fibronectin__Homo_sapiens__BAG62178
augcgcgugaccugggcgcccccgcccagcaucgaccugaccaacuuccucguccgguacucccccgugaagaacgaggaggacguggccgagcugagcaucucccccagcgacaacgccgucgugcugacgaaccuccugccgggcaccgaguacguggucuccgugagcuccguguacgagcagcacgagagcacgccccugcgcgggcggcagaagaccggccucgacucccccaccgggaucgacuucagcgacaucaccgccaacuccuucaccguccacuggaucgcgccccgcgccaccaucacgggcuaccggauccgccaccacccggagcacuucagcgggcggccccgcgaggaccgggugccccacucccgcaacagcaucacccugaccaaccugacccccggcacggaguacguggucuccaucguggcccucaacggccgggaggagagcccgcugcugaucgggcagcaguccaccgugagcgacgucccccgcgaccucgaggugguggccgccacccccaccucccugcugaucagcugggacgcccccgccgucacggugcgguacuaccgcaucaccuacggcgagaccgggggcaacagcccggugcaggaguucaccguccccggguccaagagcacggcgaccaucuccggccucaagcccggcguggacuacaccaucaccguguacgccgucacggggcggggcgacagccccgccuccagcaagccgaucuccaucaacuaccgcaccgagaucgacaagcccagccagaugcaggucaccgacguccaggacaacuccaucagcgugaaguggcugcccuccagcucccccgugaccggguaccgggucacgaccaccccgaagaacggccccggccccaccaagacgaagaccgccgggcccgaccagaccgagaugaccaucgagggccugcacccgacgguggaguacguggugagcguguacgcccagaaccccuccggggagagccagccccucgugcagaccgccgucaccaccaucccggcccccaccgaccugaaguucacccaggugacccccaccucccugagcgcccaguggacgcccccgaacgugcagcucaccggcuaccgcguccgggugacccccaaggagaagaccgggcccaugaaggagaucaaccuggcccccgacuccagcagcguggucguguccggccugaugguggccaccaaguacgaggucagcguguacgcgcucaaggacacgcugaccucccgcccggcccagggcguggucaccacccuggagaacgugagcccgccccggcgcgcccgcgugacggacgccaccgagaccaccaucacgaucuccuggcggaccaagaccgagaccaucacgggguuccaggucgacgccgugcccgcgaacggccagaccccgauccagcgcaccaucaagcccgacgugcggagcuacaccaucacggggcuccagcccggcaccgacuacaagaucuaccuguacacccugaacgacaacgcccgcuccagccccgucgugaucgacgccuccaccgccaucgacgccccgagcaaccuccgguuccuggcgacgacccccaacucccugcucgugagcuggcagccgccccgcgcccggaucaccggguacaucaucaaguacgagaagcccggcuccccgccccgcgaggucgugccccggccccgccccggcgugaccgaggccacgaucaccgggcuggagcccggcaccgaguacaccaucuacgucaucgcccugaagaacaaccagaaguccgagccgcucaucgggcggaagaagacgggccaggaggcgcugagccagaccaccaucagcugggcccccuuccaggacaccuccgaguacaucaucagcugccaccccguggggaccgacgaggagccccugcaguuccgcgugccgggcacgagcaccuccgccacccucaccggccugacgcgcggggccaccuacaacaucaucgucgaggcccugaaggaccagcagcggcacaaggugcgggaggaggugaucaccgucggcaacagcgugaacgaggggcucaaccagcccaccgacgacuccugcuucgaccccuacacggugagccacuacgcggucggcgacgagugggagcgcauguccgagagcggcuucaagcugcugugccagugccucggguucggcuccgggcacuuccggugcgacagcucccgcuggugccacgacaacggcgugaacuacaagaucggggagaagugggaccggcagggcgagaacggccagaugaugagcugcacgugccuggggaacggcaagggggaguucaagugcgacccccacgaggcgaccugcuacgacgacggcaagaccuaccacgugggggagcaguggcagaaggaguaccugggcgccaucugcuccugcacgugcuucggcgggcagcgcggcuggcgcugcgacaacugccggcgccccgggggcgagcccagccccgaggggaccaccggccaguccuacaaccaguacagccagcgguaccaccagcgcaccaacacgaacgucaacugccccaucgagugcuucaugccgcucgacgugcaggccgaccgggaggacucccgcgaguga

SEQ ID NO: 1661 - RNA, 2685 nt, Artificial Sequence
  derived and/or modified sequence opt2 from fibronectin__Homo_sapiens__BAG62178
augcgcgucaccugggcccccccccccuccaucgaccucaccaacuuccucguccgcuacucccccgucaagaacgaggaggacgucgccgagcucuccaucucccccuccgacaacgccgucguccucaccaaccuccuccccggcaccgaguacgucgucuccgucuccuccgucuacgagcagcacgaguccaccccccuccgcggccgccagaagaccggccucgacucccccaccggcaucgacuucuccgacaucaccgccaacuccuucaccguccacuggaucgccccccgcgccaccaucaccggcuaccgcauccgccaccaccccgagcacuucuccggccgcccccgcgaggaccgcgucccccacucccgcaacuccaucacccucaccaaccucacccccggcaccgaguacgucgucuccaucgucgcccucaacggccgcgaggaguccccccuccucaucggccagcaguccaccgucuccgacgucccccgcgaccucgaggucgucgccgccacccccaccucccuccucaucuccugggacgcccccgccgucaccguccgcuacuaccgcaucaccuacggcgagaccggcggcaacucccccguccaggaguucaccguccccggcuccaaguccaccgccaccaucuccggccucaagcccggcgucgacuacaccaucaccgucuacgccgucaccggccgcggcgacucccccgccuccuccaagcccaucuccaucaacuaccgcaccgagaucgacaagcccucccagaugcaggucaccgacguccaggacaacuccaucuccgucaaguggcuccccuccuccucccccgucaccggcuaccgcgucaccaccacccccaagaacggccccggccccaccaagaccaagaccgccggccccgaccagaccgagaugaccaucgagggccuccaccccaccgucgaguacgucgucuccgucuacgcccagaaccccuccggcgagucccagccccucguccagaccgccgucaccaccauccccgcccccaccgaccucaaguucacccaggucacccccaccucccucuccgcccaguggaccccccccaacguccagcucaccggcuaccgcguccgcgucacccccaaggagaagaccggccccaugaaggagaucaaccucgcccccgacuccuccuccgucgucgucuccggccucauggucgccaccaaguacgaggucuccgucuacgcccucaaggacacccucaccucccgccccgcccagggcgucgucaccacccucgagaacgucucccccccccgccgcgcccgcgucaccgacgccaccgagaccaccaucaccaucuccuggcgcaccaagaccgagaccaucaccggcuuccaggucgacgccguccccgccaacggccagacccccauccagcgcaccaucaagcccgacguccgcuccuacaccaucaccggccuccagcccggcaccgacuacaagaucuaccucuacacccucaacgacaacgcccgcuccucccccgucgucaucgacgccuccaccgccaucgacgcccccuccaaccuccgcuuccucgccaccacccccaacucccuccucgucuccuggcagcccccccgcgcccgcaucaccggcuacaucaucaaguacgagaagcccggcucccccccccgcgaggucgucccccgcccccgccccggcgucaccgaggccaccaucaccggccucgagcccggcaccgaguacaccaucuacgucaucgcccucaagaacaaccagaaguccgagccccucaucggccgcaagaagaccggccaggaggcccucucccagaccaccaucuccugggcccccuuccaggacaccuccgaguacaucaucuccugccaccccgucggcaccgacgaggagccccuccaguuccgcguccccggcaccuccaccuccgccacccucaccggccucacccgcggcgccaccuacaacaucaucgucgaggcccucaaggaccagcagcgccacaagguccgcgaggaggucaucaccgucggcaacuccgucaacgagggccucaaccagcccaccgacgacuccugcuucgaccccuacaccgucucccacuacgccgucggcgacgagugggagcgcauguccgaguccggcuucaagcuccucugccagugccucggcuucggcuccggccacuuccgcugcgacuccucccgcuggugccacgacaacggcgucaacuacaagaucggcgagaagugggaccgccagggcgagaacggccagaugauguccugcaccugccucggcaacggcaagggcgaguucaagugcgacccccacgaggccaccugcuacgacgacggcaagaccuaccacgucggcgagcaguggcagaaggaguaccucggcgccaucugcuccugcaccugcuucggcggccagcgcggcuggcgcugcgacaacugccgccgccccggcggcgagcccucccccgagggcaccaccggccaguccuacaaccaguacucccagcgcuaccaccagcgcaccaacaccaacgucaacugccccaucgagugcuucaugccccucgacguccaggccgaccgcgaggacucccgcgaguga

SEQ ID NO: 1662 - RNA, 2685 nt, Artificial Sequence
  derived and/or modified sequence opt3 from fibronectin__Homo_sapiens__BAG62178
augagagugaccugggccccgccuccaagcaucgaccugacaaacuuccucgucagguacuccccgguuaagaaugaggaagauguggcugagcuuucuauuucacccagugacaacgcaguagugcugacuaauuuguuaccuggcacggaauaugucgugagcguuuccucuguguacgagcagcacgaaucgaccccacugcgggggcgccagaaaacaggacuagauucacccacugguauagacuuuagcgauaucaccgccaacaguuucacaguccauuggauugcgccucgagcuaccaucacuggcuaucguauuagacaccauccagagcacuuuuccgggaggccccgggaggaccgcgugccucauucuagaaauagcaucacacucaccaaccugacgccaggaacugaauacguaguuuccauaguggcccuuaauggcagggaggaaucaccgcuguugaucggucagcagaguaccgucagcgaugugccccgggaccucgagguggucgcagccacaccuacuucucugcugauuuccugggaugcuccagcaguuaccgugcgcuauuaccgaaucacauauggggagaccggaggcaacucacccguacaggaguucacggugccuggcagcaagaguacugccacaauuucugggcucaaaccaggagucgacuacaccaucacuguguacgcuguuacagguagaggcgauucccccgccagcucgaagccgauaucuauuaauuauaggaccgaaaucgacaaaccuucccaaaugcaagugacggauguccaggacaacucaauuagugugaagugguuacccagcuccucuccaguaaccggguaccggguuacaacuaccccuaagaauggacccggcccaacaaaaacuaagaccgcgggucccgaccagacagaaaugaccaucgaggggcugcacccuacuguggaauaugucgugagcgucuacgcacaaaacccaucaggagagagucagccgcuugugcagacggccguuacaaccauccccgcuccuacugauuugaaauuuacccaggugacaccaaccucccugagcgcccaauggacucccccuaauguacagcuaacaggcuaucguguccgcgugacgccaaaggagaaaaccggccccaugaaggaaauuaaccucgcaccggacucuucaaguguuguggucagcgggcugaugguggcuacuaaguacgagguauccguguaugcccuuaaagauacacugaccucuagaccugcgcagggaguugucacaacuuuggaaaaugugucgccacccaggcgggcccgagugaccgacgcaacggagaccacaauaacuaucagcuggcgcaccaagacagaaacuauuaccgguuuccaagucgaugcuguuccugccaacggccagacgcccauccagagaacaauaaaaccagacgugagguccuacaccauuacugggcuccagccuggaacagauuacaagaucuaucuguacaccuuaaacgacaaugcucggucaagucccgugguaaucgaugccucuacugcaauugacgccccaagcaaccugcgcuuucucgcuaccacacccaauucccuucuggucucauggcaaccucccagagcgaggaucacgggcuauauuauaaaauacgagaagccagguucucccccucgugaggugguuccacggccccgaccuggggugaccgaagcaacuaucacaggcuuggagccgggaaccgaauauacaauuuacgucaucgcccuaaagaacaaucagaaaagcgagccacugaucggcagaaagaaaacugggcaggaagcucucucccagaccacgauuaguugggcccccuuccaagauacaagcgaguauauaaucucuugccacccugugggaaccgacgaggaaccacugcaguuuaggguucccgguacuuccaccucagcaacacuuacuggccugacccgcggggccacauacaacauuaucguggaggcuuugaaggaccagcagcggcauaaaguaagagaagaggucauuacggugggaaauagugugaacgagggccucaaucaaccuaccgaugacagcuguuucgauccguacacugucucgcacuaugccguuggugacgaaugggagaggauguccgaaucuggguuuaagcuguuaugccagugucugggcuucggaagcggccauuuucgcugcgauucaagucgauggugucacgacaacggggugaauuacaaaaucggagagaagugggaucggcagggugaaaacggccagaugauguccugcacaugucuagggaauggaaagggcgaguucaaaugcgacccccacgaggcaaccuguuaugaugacgguaagacuuaccauguaggggaacaauggcagaaagaguaucucggcgcgauaugcucuuguacaugcuucggaggccagcguggguggagaugcgauaacuguaggcgcccaggaggcgaaccuagccccgaggguaccacggggcaauccuacaaucaguauucacagcgguaccaccagagaacuaacaccaacgugaauugcccaaucgaauguuuuaugccucuggacguccaagcugauagggaggacagccgagaguga

SEQ ID NO: 1663 - RNA, 2685 nt, Artificial Sequence
  derived and/or modified sequence opt4 from fibronectin__Homo_sapiens__BAG62178
augagagugaccugggcccccccccccagcaucgaccugaccaacuuccuggugagauacagccccgugaagaacgaggaggacguggccgagcugagcaucagccccagcgacaacgccguggugcugaccaaccugcugcccggcaccgaguacguggugagcgugagcagcguguacgagcagcacgagagcaccccccugagaggcagacagaagaccggccuggacagccccaccggcaucgacuucagcgacaucaccgccaacagcuucaccgugcacuggaucgcccccagagccaccaucaccggcuacagaaucagacaccaccccgagcacuucagcggcagacccagagaggacagagugccccacagcagaaacagcaucacccugaccaaccugacccccggcaccgaguacguggugagcaucguggcccugaacggcagagaggagagcccccugcugaucggccagcagagcaccgugagcgacgugcccagagaccuggaggugguggccgccacccccaccagccugcugaucagcugggacgcccccgccgugaccgugagauacuacagaaucaccuacggcgagaccggcggcaacagccccgugcaggaguucaccgugcccggcagcaagagcaccgccaccaucagcggccugaagcccggcguggacuacaccaucaccguguacgccgugaccggcagaggcgacagccccgccagcagcaagcccaucagcaucaacuacagaaccgagaucgacaagcccagccagaugcaggugaccgacgugcaggacaacagcaucagcgugaaguggcugcccagcagcagccccgugaccggcuacagagugaccaccacccccaagaacggccccggccccaccaagaccaagaccgccggccccgaccagaccgagaugaccaucgagggccugcaccccaccguggaguacguggugagcguguacgcccagaaccccagcggcgagagccagccccuggugcagaccgccgugaccaccauccccgcccccaccgaccugaaguucacccaggugacccccaccagccugagcgcccaguggaccccccccaacgugcagcugaccggcuacagagugagagugacccccaaggagaagaccggccccaugaaggagaucaaccuggcccccgacagcagcagcgugguggugagcggccugaugguggccaccaaguacgaggugagcguguacgcccugaaggacacccugaccagcagacccgcccagggcguggugaccacccuggagaacgugagcccccccagaagagccagagugaccgacgccaccgagaccaccaucaccaucagcuggagaaccaagaccgagaccaucaccggcuuccagguggacgccgugcccgccaacggccagacccccauccagagaaccaucaagcccgacgugagaagcuacaccaucaccggccugcagcccggcaccgacuacaagaucuaccuguacacccugaacgacaacgccagaagcagccccguggugaucgacgccagcaccgccaucgacgcccccagcaaccugagauuccuggccaccacccccaacagccugcuggugagcuggcagccccccagagccagaaucaccggcuacaucaucaaguacgagaagcccggcagcccccccagagagguggugcccagacccagacccggcgugaccgaggccaccaucaccggccuggagcccggcaccgaguacaccaucuacgugaucgcccugaagaacaaccagaagagcgagccccugaucggcagaaagaagaccggccaggaggcccugagccagaccaccaucagcugggcccccuuccaggacaccagcgaguacaucaucagcugccaccccgugggcaccgacgaggagccccugcaguucagagugcccggcaccagcaccagcgccacccugaccggccugaccagaggcgccaccuacaacaucaucguggaggcccugaaggaccagcagagacacaaggugagagaggaggugaucaccgugggcaacagcgugaacgagggccugaaccagcccaccgacgacagcugcuucgaccccuacaccgugagccacuacgccgugggcgacgagugggagagaaugagcgagagcggcuucaagcugcugugccagugccugggcuucggcagcggccacuucagaugcgacagcagcagauggugccacgacaacggcgugaacuacaagaucggcgagaagugggacagacagggcgagaacggccagaugaugagcugcaccugccugggcaacggcaagggcgaguucaagugcgacccccacgaggccaccugcuacgacgacggcaagaccuaccacgugggcgagcaguggcagaaggaguaccugggcgccaucugcagcugcaccugcuucggcggccagagaggcuggagaugcgacaacugcagaagacccggcggcgagcccagccccgagggcaccaccggccagagcuacaaccaguacagccagagauaccaccagagaaccaacaccaacgugaacugccccaucgagugcuucaugccccuggacgugcaggccgacagagaggacagcagagaguga

SEQ ID NO: 1664 - RNA, 2685 nt, Artificial Sequence
  derived and/or modified sequence opt5 from fibronectin__Homo_sapiens__BAG62178
augagagugaccugggcucccccuccgagcaucgaccugacaaacuuccucguccgguacucccccguuaagaaugaggaagauguggccgagcugucuauuagcccuuccgacaacgccgugguccuuacgaaucugcuccccggcaccgaauaugugguuucugugagcuccgucuacgagcagcacgaaucuacaccucugcgcgggagacagaaaaccggacuugauagccccacaggcaucgacuuuuccgauauuaccgcgaacagcuucacagugcauuggaucgcuccucgggccaccauuacgggguaucgcaucagacaccauccggagcacuuuucuggacggccccgcgaggacagaguuccucauucccggaauagcaucacccugacaaaccucacccccggcacagaauacguggucucuauuguggcccugaaugggcgcgaggaauccccucugcucaucggacaacagagcaccgugucugauguccccagagaccuggagguuguggcugccacgccgacaucccuucugauuagcugggaugcuccugccgugaccguccgguauuaccgcaucacauauggcgagaccggcgggaacucccccgugcaggaguucaccguuccuggaucuaagagcacagcgacgauuuccggccucaaacccgggguggacuacaccaucacagucuacgccgugaccggaagaggcgauagccccgcuucuuccaagccuauuagcaucaauuaucggacagaaaucgacaaaccgucucaaaugcagguuaccgaugugcaggacaacagcauuuccgucaaguggcugcccucuagcuccccugugacgggguaccgcgucacaaccacccccaagaauggaccuggccccacaaaaaccaagacagccggcccggaccagacggaaaugaccaucgaggggcuucacccuacaguggaauauguugugagcgucuacgcucaaaaccccucuggagagucccagccucuggugcagaccgccguuacaaccauucccgcgccuacggaucucaaauuuacccaggugacacccaccagccugucugcccaauggacaccgccuaauguccagcugaccggcuauagagugcgggugacgcccaaggagaaaacagggcccaugaaggaaaucaaccucgcuccugacuccagcuccguugucgugucuggacugaugguggccaccaaguacgaggucagcguguaugcucuuaaagauacacugaccuccagaccggcccagggcguugugaccacacucgaaaaugucucucccccucgccgggccagagugacggacgcuaccgagacaaccauuacaaucagcuggcgcaccaagacggaaacaaucaccggguuccaaguugaugcggugcccgccaacggacagaccccuauucagcggacaaucaaacccgacgucagauccuacaccauuacaggccugcagccuggcacggauuacaagaucuaucuuuacacccugaacgacaaugcucgcagcucucccgugguuauugaugccuccacagccaucgacgcuccgagcaaccuccgguuucuggccaccacaccuaauucucugcucguguccuggcaacccccuagagcgcgcaucaccggguauauuaucaaauacgagaagcccggaagcccgccucgggaggucgugcccagaccucgccccggcgugacggaagcuaccauuacagggcuggagcccggaaccgaauauacaaucuacgucauugcccuuaaaaacaaucagaagucugagccucugaucggccggaagaaaaccgggcaggaagcccucagccagacaaccauuuccugggcuccguuccaagauacgagcgaguauaucaucucuugccaccccguuggcacagacgaggaaccucugcaguuuagagugcccggaaccuccaccagcgccacacuuaccggccugacgcgcggggcuacauacaacauuaucguggaggcccucaaggaccagcagcggcauaaagucagagaagaggugauuaccguuggaaauuccgugaacgagggccugaaucaaccuacagaugacucuuguuucgaucccuacaccgucagccacuaugcggugggggacgaaugggagcggauguccgaaucuggauuuaagcugcucugccagugucugggcuucgggagcggccauuuuagaugcgauuccucucgcuggugucacgacaacggaguuaauuacaaaaucggcgagaagugggaucggcagggggaaaacggacagaugaugagcugcacaugucuuggcaaugggaagggagaguucaaaugcgacccucacgaggccaccuguuaugaugacggcaagacguaccaugugggggaacaauggcagaaagaguaucugggcgcuauuugcuccuguaccugcuucggaggccagagaggguggcgcugcgauaacuguagacggccgggaggcgaacccagcccugaggggacaaccggacaaucuuacaaucaguauucccagcgcuaccaccagagaacaaacaccaacgucaauugccccaucgaauguuuuaugccucucgacgugcaagccgaucgggaggacagccgcgaguga

SEQ ID NO: 1665 - protein, 383 aa, Artificial Sequence
  fibronectin__Homo_sapiens__B7Z3W5
MASAFRLSLKPKVSDNMTHLMVDFSQERQMLQTLKFLPVPKAPEIDPVECLVADNSVTVAWRMPEEDNKIDHFILEHRKTNFDGLPRVKDERCWEIIDNIKGTEYTLSGLKFDSKYMNFRVRACNKAVAGEYSDPVTLETKALNFNLDNSSSHLNLKVEDTCVEWDPTGGKGQESKIKGKENKGSVHVTSLKKHTSGTPSPKRTSVGSRPPAVRGSRDRFTGESYTVLGDTAIESGQHYWEVKAQKDCKSYSVGVAYKTLGKFDQLGKTNTSWCIHVNNWLQNTFAAKHNNKVKALDVTVPEKIGVFCDFDGGQLSFYDANSKQLLYSFKTKFTQPVLPGFMVWCGGLSLSTGMQVPSAVRTLQKSENGMTGSASSLNNVVTQ

SEQ ID NO: 1666 - RNA, 1152 nt, Artificial Sequence
  fibronectin__Homo_sapiens__BAH12351
auggcuucagccuuucgccuuucuuugaaaccaaaggucagugacaacaugacucauuuaaugguggauuucucacaggaaagacagaugcugcaaacuuugaaguuuuugccaguccccaaagcuccagagauagauccaguagaguguuugguggcagauaacucuguaacaguggcuuggagaaugccagaagaagauaauaagauugaccauuuuauacuggaacauaggaagacuaauuuugauggacuuccacguguaaaggaugagcgaugcugggagauaauugauaauauuaaggguacugaauauacacuaucaggcuuaaaauuugauucaaaguauaugaauuucagagugcgagcuuguaacaaggcuguggcuggagaguauucugauccagugacucuagagaccaaagcacuuaacuucaauuuggauaacuccucaucccauuugaaccugaaaguugaagauacauguguagagugggauccuacuggaggaaaaggucaagaaaguaaaauuaaaggaaaagagaacaagggcaguguccauguuacuucacugaagaaacauacaagugguacaccauccccaaaacgaacaucuguaggcuccaggccaccagcaguaagaggcaguagagaucguuuuacuggagaaucauacacagugcugggagacacugcuauugaaaguggacaacauuauugggaggucaaggcccagaaggauuguaaauccuacagugugggaguagcauacaaaacguuggggaaauuugaccaauugggaaagacaaacacuaguugguguauccaugucaacaacuggcuacaaaacacauuugcagcaaagcauaauaauaaagucaaagcuuuggauguuacuguuccugaaaaaauagguguauuuugugauuuugaugggggucaacuuucauucuaugaugcaaauucuaaacaguugcuauauuccuuuaagacaaaauuuacucagccaguacuaccugguuucaugguauggugugguggacuuucuuugaguacugggaugcagguuccaagugcugugagaacacuucagaaaagugaaaauggaaugacugguucagcuagcagccugaacaauguuguuacucaauag

SEQ ID NO: 1667 - RNA, 1152 nt, Artificial Sequence
  derived and/or modified sequence opt1 from fibronectin__Homo_sapiens__BAH12351
auggccagcgccuuccgccugucccucaagcccaaggugagcgacaacaugacccaccugauggucgacuucucccaggagcggcagaugcugcagacccucaaguuccugccggugcccaaggcgcccgagaucgaccccguggagugccuggucgccgacaacagcgugacgguggccuggcgcaugccggaggaggacaacaagaucgaccacuucauccucgagcaccggaagaccaacuucgacggccugccccgcgucaaggacgagcggugcugggagaucaucgacaacaucaaggggaccgaguacacccuguccggccucaaguucgacagcaaguacaugaacuuccgcgugcgggccugcaacaaggccguggcgggggaguacuccgaccccgucacgcuggagaccaaggcccugaacuucaaccucgacaacagcuccagccaccugaaccugaagguggaggacacgugcguggagugggaccccaccggcgggaagggccaggaguccaagaucaagggcaaggagaacaaggggagcguccacgugaccucccucaagaagcacaccagcggcaccccgucccccaagcgcaccagcguggggucccggccgcccgccguccgcggcagccgggaccgcuucacgggggaguccuacaccgugcugggcgacaccgccaucgagagcggccagcacuacugggaggugaaggcgcagaaggacugcaagagcuacuccgucgggguggccuacaagacccugggcaaguucgaccagcucgggaagacgaacaccagcuggugcauccacgugaacaacuggcugcagaacaccuucgccgccaagcacaacaacaaggucaaggcccuggacgugaccgugcccgagaagaucggcgucuucugcgacuucgacggcgggcagcucuccuucuacgacgcgaacagcaagcagcugcuguacuccuucaagacgaaguucacccagcccgugcuccccggcuucauggucuggugcgggggccugagccuguccaccgggaugcagguccccagcgccgugcggacccuccagaaguccgagaacggcaugacgggcagcgccuccagccugaacaacguggugacccaguga

SEQ ID NO: 1668 - RNA, 1152 nt, Artificial Sequence
  derived and/or modified sequence opt2 from fibronectin__Homo_sapiens__BAH12351
auggccuccgccuuccgccucucccucaagcccaaggucuccgacaacaugacccaccucauggucgacuucucccaggagcgccagaugcuccagacccucaaguuccuccccguccccaaggcccccgagaucgaccccgucgagugccucgucgccgacaacuccgucaccgucgccuggcgcaugcccgaggaggacaacaagaucgaccacuucauccucgagcaccgcaagaccaacuucgacggccucccccgcgucaaggacgagcgcugcugggagaucaucgacaacaucaagggcaccgaguacacccucuccggccucaaguucgacuccaaguacaugaacuuccgcguccgcgccugcaacaaggccgucgccggcgaguacuccgaccccgucacccucgagaccaaggcccucaacuucaaccucgacaacuccuccucccaccucaaccucaaggucgaggacaccugcgucgagugggaccccaccggcggcaagggccaggaguccaagaucaagggcaaggagaacaagggcuccguccacgucaccucccucaagaagcacaccuccggcacccccucccccaagcgcaccuccgucggcucccgcccccccgccguccgcggcucccgcgaccgcuucaccggcgaguccuacaccguccucggcgacaccgccaucgaguccggccagcacuacugggaggucaaggcccagaaggacugcaaguccuacuccgucggcgucgccuacaagacccucggcaaguucgaccagcucggcaagaccaacaccuccuggugcauccacgucaacaacuggcuccagaacaccuucgccgccaagcacaacaacaaggucaaggcccucgacgucaccguccccgagaagaucggcgucuucugcgacuucgacggcggccagcucuccuucuacgacgccaacuccaagcagcuccucuacuccuucaagaccaaguucacccagcccguccuccccggcuucauggucuggugcggcggccucucccucuccaccggcaugcagguccccuccgccguccgcacccuccagaaguccgagaacggcaugaccggcuccgccuccucccucaacaacgucgucacccaguga

SEQ ID NO: 1669 - RNA, 1152 nt, Artificial Sequence
  derived and/or modified sequence opt3 from fibronectin__Homo_sapiens__BAH12351
auggccagcgcuuucagacugucccucaagcccaaagugucugacaacaugacccaccuuauggucgauuuuucacaggagaggcaaaugcugcagacauugaaguucuuaccuguuccaaaagcaccggaaaucgaccccguggagugccugguagccgauaauagugugacugucgcguggcggaugccugaagaggacaacaagauugaucauuuuauacuagaacaccgcaaaacgaauuucgacggccucccacgagugaaggaugagcguuguugggagaucauugacaacaucaaggggaccgaauacacacugagcggacuuaaauuugauuccaaguauaugaauuucagaguuagggcuugcaacaaagccguggccggugaguacucugaccccgucacucuggaaaccaaggcauugaauuuuaaccucgauaauucgucaagccaucugaaccugaaaguggaggacacauguguagagugggauccuaccggcgggaagggacaggaaaguaagauuaaaggcaaggagaauaaagguuccguucacgugacuucucucaagaaacauacaagcgggaccccaucccccaagcggacgucagucggaagucgcccuccagcugugagaggcagcagggaccgguucacuggcgaaucuuauaccguguuaggggacacagcaaucgaguccggacagcacuacugggaagucaaagcccaaaaggauugcaagucauauagcguugguguggcuuacaaaacucugggcaaguuugaccagcuugggaaaaccaacacaaguugguguauacacguaaauaacugguugcagaauaccuucgccgcgaagcauaacaacaaagugaaggcacuggaugucacggugccggagaagaucggaguguuuugcgacuucgauggcggucagcuaucuuuuuaugacgccaauuccaaacaacuccuguacagcuucaagacuaaauucacacagcccgugcuuccuggguuuauggucugguguggaggccugucguugucuaccggcaugcagguuccauccgcuguacgcacucuccagaagucagagaacgggaugacaggaagugccagcucccugaauaacguugugacccaauga

SEQ ID NO: 1670 - RNA, 1152 nt, Artificial Sequence
  derived and/or modified sequence opt4 from fibronectin__Homo_sapiens__BAH12351
auggccagcgccuucagacugagccugaagcccaaggugagcgacaacaugacccaccugaugguggacuucagccaggagagacagaugcugcagacccugaaguuccugcccgugcccaaggcccccgagaucgaccccguggagugccugguggccgacaacagcgugaccguggccuggagaaugcccgaggaggacaacaagaucgaccacuucauccuggagcacagaaagaccaacuucgacggccugcccagagugaaggacgagagaugcugggagaucaucgacaacaucaagggcaccgaguacacccugagcggccugaaguucgacagcaaguacaugaacuucagagugagagccugcaacaaggccguggccggcgaguacagcgaccccgugacccuggagaccaaggcccugaacuucaaccuggacaacagcagcagccaccugaaccugaagguggaggacaccugcguggagugggaccccaccggcggcaagggccaggagagcaagaucaagggcaaggagaacaagggcagcgugcacgugaccagccugaagaagcacaccagcggcacccccagccccaagagaaccagcgugggcagcagaccccccgccgugagaggcagcagagacagauucaccggcgagagcuacaccgugcugggcgacaccgccaucgagagcggccagcacuacugggaggugaaggcccagaaggacugcaagagcuacagcgugggcguggccuacaagacccugggcaaguucgaccagcugggcaagaccaacaccagcuggugcauccacgugaacaacuggcugcagaacaccuucgccgccaagcacaacaacaaggugaaggcccuggacgugaccgugcccgagaagaucggcguguucugcgacuucgacggcggccagcugagcuucuacgacgccaacagcaagcagcugcuguacagcuucaagaccaaguucacccagcccgugcugcccggcuucaugguguggugcggcggccugagccugagcaccggcaugcaggugcccagcgccgugagaacccugcagaagagcgagaacggcaugaccggcagcgccagcagccugaacaacguggugacccaguga

SEQ ID NO: 1671 - RNA, 1152 nt, Artificial Sequence
  derived and/or modified sequence opt5 from fibronectin__Homo_sapiens__BAH12351
auggccagcgcuuucagacugucccucaagcccaaagugucugacaacaugacccaccugauggucgauuuuagccaggagcggcaaaugcuucagacacugaaguuccucccuguuccgaaagcccccgaaaucgacccuguggagugccugguggcggauaauuccgucacgguggcuuggcgcaugcccgaagaggacaacaagauugaucauuuuauccuugaacacagaaaaaccaauuucgacggccugccucggguuaaggaugagcgcuguugggagauuaucgacaacauuaaggggacagaauacacccucucuggacugaaauuugauagcaaguauaugaauuucagagugcgggccugcaacaaagccgucgcuggcgaguacuccgaccccgugacacuggaaaccaaggcccucaauuuuaaccuggauaauucuagcucccaucuuaaccugaaaguugaggacacauguguggagugggauccuaccgggggaaagggccaggaaagcaagaucaaagggaaggagaauaaaggaucuguccacgugacgucccucaagaaacauaccagcggcacaccgucucccaagcgcaccuccgugggcagcagaccucccgcuguccgggggucucgcgacagauucacaggagaauccuauaccguucugggcgacacggccaucgagagcgggcagcacuacugggaagugaaagcgcaaaaggauugcaaguccuauucugugggagucgccuacaaaacacuuggcaaguuugaccagcuggggaaaaccaacacaagcugguguauucacgugaauaacuggcuccagaauaccuucgcugccaagcauaacaacaaaguuaaggcucuggaugugaccgucccugagaagaucggaguguuuugcgacuucgauggcggccagcuguccuuuuaugacgccaauagcaaacaacuccuguacucuuucaagacaaaauucacgcagcccguucuuccgggguuuauggugugguguggaggccugucccucagcaccgggaugcaggucccuucugcggugcggacacugcaaaagagcgagaacggaaugaccggcuccgccucuagccuuaauaacgucgugacacaguga

SEQ ID NO: 1672 - protein, 146 aa, Artificial Sequence
  fibronectin__Homo_sapiens__B7Z939
MPPSKPHPPVVGKVTHHSIELYWDLEKKAKRQGPQEQWFRFSIEEEDPKMHTYGIIYTGYATKHVVEGLEPRTLYRFRLKVTSPSGECEYSPLVSVSTTSEYSDRPHSPLSRSMEMTSNLEKIFCLSFGLTRSRNDTIFKHCNNIC

SEQ ID NO: 1673 - RNA, 441 nt, Artificial Sequence
  fibronectin__Homo_sapiens__BAH14175
augccacccucaaagccucauccaccugucgugggcaaagugacucaucacagcauugaauuauacugggaucuggaaaagaaagccaaacgccaaggaccucaagagcagugguucagguucucgauugaagaagaagaccccaaaaugcacacuuaugguaucauuuauacgggauaugcaacgaagcauguuguugaaggucuggaaccaaggacgcuguacagauuucgccugaaggucaccagccccucuggggagugugaguacagcccacucgucucagugucuacaaccagugaguauucagaccguccacacucaccucucucuagaucaauggagaugacaagcaauuuagaaaaaauauucugccucucguuuggccuuaccagaagcagaaaugauacaauuuuuaaacacugcaauaauauuugcuag

SEQ ID NO: 1674 - RNA, 441 nt, Artificial Sequence
  derived and/or modified sequence opt1 from fibronectin__Homo_sapiens__BAH14175
augcccccgagcaagccccacccgcccguggucggcaaggugacccaccacuccaucgagcuguacugggaccucgagaagaaggccaagcgccaggggccccaggagcagugguuccgguucagcaucgaggaggaggaccccaagaugcacaccuacggcaucaucuacacgggguacgccaccaagcacguggucgagggccuggagccccgcacccuguaccgguuccgccucaaggugaccucccccagcggggagugcgaguacuccccgcuggugagcgucuccacgaccagcgaguacuccgaccggccccacagcccccugucccgcagcauggagaugaccuccaaccucgagaagaucuucugccugagcuucggccugacccggucccgcaacgacacgaucuucaagcacugcaacaacaucugcuga

SEQ ID NO: 1675 - RNA, 441 nt, Artificial Sequence
  derived and/or modified sequence opt2 from fibronectin__Homo_sapiens__BAH14175
augccccccuccaagccccacccccccgucgucggcaaggucacccaccacuccaucgagcucuacugggaccucgagaagaaggccaagcgccagggcccccaggagcagugguuccgcuucuccaucgaggaggaggaccccaagaugcacaccuacggcaucaucuacaccggcuacgccaccaagcacgucgucgagggccucgagccccgcacccucuaccgcuuccgccucaaggucaccucccccuccggcgagugcgaguacuccccccucgucuccgucuccaccaccuccgaguacuccgaccgcccccacuccccccucucccgcuccauggagaugaccuccaaccucgagaagaucuucugccucuccuucggccucacccgcucccgcaacgacaccaucuucaagcacugcaacaacaucugcuga

SEQ ID NO: 1676 - RNA, 441 nt, Artificial Sequence
  derived and/or modified sequence opt3 from fibronectin__Homo_sapiens__BAH14175
augcccccuagcaagccacacccgcccguggucggcaaaguuacccaucacuccaucgagcuguacugggaccucgaaaagaaagccaagagacaggggccucaagagcagugguucagguuuucuauugaagaggaagauccaaaaaugcauacauauggaauaaucuacacugguuaugcuacgaagcacgugguagagggccuugagccccggacccuguaccgcuuccgauugaaggugacaucaccuaguggggaaugcgaguauagcccauuagucuccgugucuacuaccucggaauacucagaccguccccauagcccucugaguagauccauggagaugacaucuaaccuagagaaaaucuuuugucucagcuucggacugaccaggucccggaaugauacuauuuuuaagcacugcaacaauauuuguuga

SEQ ID NO: 1677 - RNA, 441 nt, Artificial Sequence
  derived and/or modified sequence opt4 from fibronectin__Homo_sapiens__BAH14175
augccccccagcaagccccacccccccguggugggcaaggugacccaccacagcaucgagcuguacugggaccuggagaagaaggccaagagacagggcccccaggagcagugguucagauucagcaucgaggaggaggaccccaagaugcacaccuacggcaucaucuacaccggcuacgccaccaagcacgugguggagggccuggagcccagaacccuguacagauucagacugaaggugaccagccccagcggcgagugcgaguacagcccccuggugagcgugagcaccaccagcgaguacagcgacagaccccacagcccccugagcagaagcauggagaugaccagcaaccuggagaagaucuucugccugagcuucggccugaccagaagcagaaacgacaccaucuucaagcacugcaacaacaucugcuga

SEQ ID NO: 1678 - RNA, 441 nt, Artificial Sequence
  derived and/or modified sequence opt5 from fibronectin__Homo_sapiens__BAH14175
augcccccuagcaagccgcaucccccuguggucggcaaaguuacccaccacuccaucgagcuguacugggaccucgaaaagaaagccaagagacaggggccccaagagcagugguuccgguuuucuauugaagaggaagauccuaaaaugcauacauauggaaucauuuacacgggcuaugcuaccaagcacgugguggaggggcuggagccccgcacacuuuacagauuccggcugaaggucaccagcccuuccggagaaugcgaguauucuccgcucgugagcguuuccacaaccucugaauacagcgaccgcccccauuccccucugagcagaucuauggagaugacauccaaccuugagaaaaucuuuugucugagcuucggccucacccggucucgcaaugauacgauuuuuaagcacugcaacaauaucuguuga

SEQ ID NO: 1679 - protein, 684 aa, Artificial Sequence
  fibronectin__Homo_sapiens__G5E9X3
MAEHPPLLDTTQILSSDISLLSAPIVSADGTQQVILVQVNPGEAFTIRREDGQFQCITGPAQVPMMSPNGSVPPIYVPPGYAPQVIEDNGVRRVVVVPQAPEFHPGSHTVLHRSPHPPLPGFIPVPTMMPPPPRHMYSPVTGAGDMTTQYMPQYQSSQVYGDVDAHSTHGRSNFRDERSSKTYERLQKKLKDRQGTQKDKMSSPPSSPQKCPSPINEHNGLIKGQIAGGINTGSAKIKSGKGKGGTQVDTEIEEKDEETKAFEALLSNIVKPVASDIQARTVVLTWSPPSSLINGETDESSVPELYGYEVLISSTGKDGKYKSVYVGEETNITLNDLKPAMDYHAKVQAEYNSIKGTPSEAEIFTTLSCEPDIPNPPRIANRTKNSLTLQWKAPSDNGSKIQNFVLEWDEGKGNGEFCQCYMGSQKQFKITKLSPAMGCKFRLSARNDYGTSGFSEEVLYYTSGCAPSMPASPVLTKAGITWLSLQWSKPSGTPSDEGISYILEMEEETSGYGFKPKYDGEDLAYTVKNLRRSTKYKFKVIAYNSEGKSNPSEVVEFTTCPDKPGIPVKPSVKGKIHSHSFKITWDPPKDNGGATINKYVVEMAEGSNGNKWEMIYSGATREHLCDRLNPGCFYRLRVYCISDGGQSAVSESLLVQTPAVPPGPCLPPRLQGRPKAKEIQTPSG

SEQ ID NO: 1680 - RNA, 2055 nt, Artificial Sequence
  fibronectin__Homo_sapiens__EAX08810
auggcagaacauccaccacuacuggauacaacucagaucuuaaguagugauauuucucuuuugucugccccuauuguaagugcagauggaacacaacagguuauucugguacaaguuaacccaggagaagcauuuacaauaagaagagaagauggacaguuucagugcauuacagguccugcucagguuccaaugauguccccaaaugguucugugccuccuaucuaugugccuccuggauaugccccacagguuauugaagacaaugguguucgaagaguugucguggucccucaggcaccagaguuucacccugguagucacacaguucuccaccguucuccacauccuccucuaccugguuucauuccugucccaacuaugaugccgccuccaccacgucauauguacucacccgugacuggagcuggagacaugacaacacaguauaugccacaguaucagucuucacaagucuauggagauguagaugcucacucuacacauggaagguccaacuuuagagaugaacgaucuaguaaaacauaugaacguuugcagaaaaaauugaaggaucgccaaggaacacagaaagauaaaaugagcaguccaccaucaucaccccagaaaugcccuucucccauuaaugaacauaauggacuuauaaaaggacaaauugcuggugguauaaacacaggaucagcaaaaaucaagucugggaaggggaaaggugguacacaaguugauacagaaauugaagaaaaagaugaagaaacuaaagcauuugaagcacuucuuuccaacauugucaaaccaguggccuccgacauccaggcaaggacaguaguacuuaccuggucaccaccuuccagccucauuaauggugaaacagaugaaaguaguguaccagagcucuaugguuaugaaguucugaucucaaguacuggaaaagaugggaaauacaaaaguguauauguaggagaagaaacaaauaucacuuuaaaugaucucaagccagccauggauuaccaugcaaaaguccaggcagaauauaauucuauaaagggaacuccuucagaggcugaaaucuuuaccaccuugagcugugaaccugauauaccuaauccaccaaggauagccaaucggaccaaaaauucacucacuuugcaauggaaggcaccuagugacaaugguucuaaaauccaaaacuuuguauuagaaugggaugaaggaaaaggaaauggagaauuuugucaguguuacaugggcucacagaaacaauuuaaaauuacuaaacuuucaccagcaaugggcuguaaauucagacuaucggccagaaaugacuaugguacaagugguuuuagugaagaagucuuauauuacaccucaggcugugcuccuucuaugccagcaaguccuguauuaaccaaggcuggaauuacuugguuauccuuacaauggaguaagcccucaggaacaccaucagaugaaggaauuucuuacauuuuagagauggaggaagaaacuucaggauaugguuuuaagccuaaauaugauggagaagaucuugcuuacacagugaaaaaucucagacguaguacuaaguauaaauuuaagguuauugcuuacaacucagaagguaaaaguaauccaagugaaguaguagaauuuacuacuugcccugauaaaccaggcauaccuguaaagccuucagugaaaggaaagauacauucacacaguuuuaaaauaaccugggauccaccaaaagacaauggcggagcaaccaucaauaaauauguaguggagauggcagaagguucuaacggaaacaaaugggaaaugauauacaguggugcuaccagggaacaucuuugugaucgacugaauccaggcuguuucuaucguuuacgaguuuacugcaucagugauggaggacagagugcggucucugaaucuuuacuugugcagacuccagcugugccuccuggcccaugccucccucccagauuacaggguagacccaaagcaaaagaaauacagacccccucugguuga

SEQ ID NO: 1681 - RNA, 2055 nt, Artificial Sequence
  derived and/or modified sequence opt1 from fibronectin__Homo_sapiens__EAX08810
auggccgagcacccgccccugcucgacaccacccagauccugagcuccgacaucagccugcucuccgcccccaucgugagcgcggacggcacgcagcaggucauccugguccaggugaaccccggggaggccuucaccauccgccgggaggacggccaguuccagugcaucaccgggcccgcccaggugccgaugaugucccccaacggcagcgugccgcccaucuacgugccgcccggguacgcgccccaggucaucgaggacaacggcgugcgccggguggucguggugccccaggcccccgaguuccaccccggcucccacaccguccugcaccgcagcccccacccgccccuccccggguucauccccgugcccacgaugaugccgcccccgccccggcacauguacucccccgugaccggcgccggggacaugaccacccaguacaugccccaguaccagagcucccaggucuacggcgacguggacgcccacagcacgcacgggcgcuccaacuuccgggacgagcgcagcuccaagaccuacgagcggcugcagaagaagcugaaggaccgccagggcacccagaaggacaagaugagcuccccgcccagcagcccccagaagugccccucccccaucaacgagcacaacggccucaucaaggggcagaucgccggcgggaucaacaccggcagcgccaagaucaaguccggcaaggggaagggcgggacccagguggacacggagaucgaggagaaggacgaggagaccaaggcguucgaggcccugcugagcaacaucgucaagccgguggccuccgacauccaggcccggaccgugguccucacguggagcccgcccuccagccugaucaacggcgagaccgacgaguccagcgugcccgagcuguacggguacgaggugcucaucuccagcaccggcaaggacggcaaguacaaguccgucuacgugggggaggagaccaacaucacgcugaacgaccugaagcccgccauggacuaccacgcgaagguccaggccgaguacaacagcaucaagggcacccccuccgaggccgagaucuucaccacccucagcugcgagcccgacauccccaacccgccccgcaucgccaaccggacgaagaacucccugacccugcaguggaaggcccccagcgacaacggguccaagauccagaacuucgugcucgagugggacgagggcaaggggaacggcgaguucugccagugcuacaugggcagccagaagcaguucaagaucaccaagcugucccccgcgauggggugcaaguuccgccugagcgcccggaacgacuacggcaccagcggguucuccgaggaggugcucuacuacacgagcggcugcgccccguccaugcccgccagccccguccugaccaaggccgggaucaccuggcugucccuccaguggagcaagcccuccggcaccccgagcgacgagggcaucuccuacauccuggagauggaggaggagacgagcggguacggcuucaagcccaaguacgacggggaggaccuggcguacaccgugaagaaccuccgccgguccaccaaguacaaguucaaggugaucgccuacaacagcgagggcaaguccaaccccagcgaggucguggaguucaccacgugccccgacaagccgggcauccccgugaagcccuccgucaaggggaagauccacagccacuccuucaagaucaccugggacccgcccaaggacaacggcggggccaccaucaacaaguacgugguggagauggccgagggcagcaacgggaacaagugggagaugaucuacagcggcgccacccgcgagcaccugugcgaccggcugaaccccggcugcuucuaccgccuccgggucuacugcaucuccgacgggggccagagcgcgguguccgagagccugcuggugcagacccccgccgucccgcccgggcccugccugcccccgcgccuccagggccgccccaaggccaaggagauccagacgcccuccggguga

SEQ ID NO: 1682 - RNA, 2055 nt, Artificial Sequence
  derived and/or modified sequence opt2 from fibronectin__Homo_sapiens__EAX08810
auggccgagcaccccccccuccucgacaccacccagauccucuccuccgacaucucccuccucuccgcccccaucgucuccgccgacggcacccagcaggucauccucguccaggucaaccccggcgaggccuucaccauccgccgcgaggacggccaguuccagugcaucaccggccccgcccagguccccaugaugucccccaacggcuccgucccccccaucuacgucccccccggcuacgccccccaggucaucgaggacaacggcguccgccgcgucgucgucgucccccaggcccccgaguuccaccccggcucccacaccguccuccaccgcuccccccaccccccccuccccggcuucauccccguccccaccaugaugcccccccccccccgccacauguacucccccgucaccggcgccggcgacaugaccacccaguacaugccccaguaccaguccucccaggucuacggcgacgucgacgcccacuccacccacggccgcuccaacuuccgcgacgagcgcuccuccaagaccuacgagcgccuccagaagaagcucaaggaccgccagggcacccagaaggacaagauguccuccccccccuccuccccccagaagugccccucccccaucaacgagcacaacggccucaucaagggccagaucgccggcggcaucaacaccggcuccgccaagaucaaguccggcaagggcaagggcggcacccaggucgacaccgagaucgaggagaaggacgaggagaccaaggccuucgaggcccuccucuccaacaucgucaagcccgucgccuccgacauccaggcccgcaccgucguccucaccugguccccccccuccucccucaucaacggcgagaccgacgaguccuccguccccgagcucuacggcuacgagguccucaucuccuccaccggcaaggacggcaaguacaaguccgucuacgucggcgaggagaccaacaucacccucaacgaccucaagcccgccauggacuaccacgccaagguccaggccgaguacaacuccaucaagggcacccccuccgaggccgagaucuucaccacccucuccugcgagcccgacauccccaaccccccccgcaucgccaaccgcaccaagaacucccucacccuccaguggaaggcccccuccgacaacggcuccaagauccagaacuucguccucgagugggacgagggcaagggcaacggcgaguucugccagugcuacaugggcucccagaagcaguucaagaucaccaagcucucccccgccaugggcugcaaguuccgccucuccgcccgcaacgacuacggcaccuccggcuucuccgaggagguccucuacuacaccuccggcugcgcccccuccaugcccgccucccccguccucaccaaggccggcaucaccuggcucucccuccagugguccaagcccuccggcacccccuccgacgagggcaucuccuacauccucgagauggaggaggagaccuccggcuacggcuucaagcccaaguacgacggcgaggaccucgccuacaccgucaagaaccuccgccgcuccaccaaguacaaguucaaggucaucgccuacaacuccgagggcaaguccaaccccuccgaggucgucgaguucaccaccugccccgacaagcccggcauccccgucaagcccuccgucaagggcaagauccacucccacuccuucaagaucaccugggacccccccaaggacaacggcggcgccaccaucaacaaguacgucgucgagauggccgagggcuccaacggcaacaagugggagaugaucuacuccggcgccacccgcgagcaccucugcgaccgccucaaccccggcugcuucuaccgccuccgcgucuacugcaucuccgacggcggccaguccgccgucuccgagucccuccucguccagacccccgccgucccccccggccccugccuccccccccgccuccagggccgccccaaggccaaggagauccagacccccuccggcuga

SEQ ID NO: 1683 - RNA, 2055 nt, Artificial Sequence
  derived and/or modified sequence opt3 from fibronectin__Homo_sapiens__EAX08810
auggccgagcaucccccucugcucgacaccacacagauccuuagcuccgauauuucucuguugucagcuccaauagugagugcagacggcacucaacaggucaucuuaguucaggugaacccgggggaagccuucacgauuagaagggaggauggacaguuucaaugcaucaccggucccgcgcagguaccuaugaugagcccaaauggcuccgugcccccuauuuacgucccacccggguaugcuccucaggugaucgaagacaacggaguucggcgcguggucgugguaccacaggccccggaguuccaccccggcucucacacaguucugcaucgaucgccucacccaccccuaccugguuuuauaccagugcccacuaugaugccgccucccccacgucauauguacucaccugucaccggggcaggagauaugacaacccaauauaugccccaguaccagagcagucagguguauggcgacguggaugcccacuccacucacggcagaucuaauuucagggacgaacggagcuccaagacauacgagcgccuccaaaagaagcugaaagauagacaggggacccagaaggacaaaaugucaaguccacccagcucuccucaaaaguguccauccccgaucaacgagcauaauggacuuauuaagggucagaucgcuggcgggauuaacacgggaucagcaaaaaucaagagcggcaaagguaaagggggaacucaggucgauaccgaaauagaggaaaaagacgaggagacaaaggccuuugaagcucuguugaguaauauuguuaagcccguggccucugauauccaggcgaggacuguagugcucaccugguccccuccaagcucgcugauuaacggcgagacagacgaaucuuccguccccgagcuguauggcuacgaagugcucaucucaaguaccgggaaagacggaaaguacaaaagcguuuaugugggugaggagacgaauaucacuuuaaacgaucugaagccugcaauggacuaccacgccaaaguccaagcugaauauaauuccauuaagggcacaccaucugaggccgaaauauucaccacucuuagcugcgagcccgauaucccgaacccuccacggauugcaaaucgcaccaaaaacucauugacacugcaguggaaggcucccagugacaauggguccaagauccagaacuuugugcuagaaugggaugagggaaaaggcaacggugaguucugucagugcuacauggggagccaaaagcaguuuaaaauaacgaagcucucuccugccaugggcuguaaauuccgacugucagcgagaaaugacuauggaaccaguggcuuuagcgaagagguacuuuacuauacauccgggugcgcccccucuaugccagcaucgccuguucugacuaaggcuggaauuaccugguugagccuccagugguccaagcccucagguacaccaagugaugaaggcaucucuuacauccuggagauggaagaggagacuagcggguacggauucaaaccgaaguaugacggcgaagauuuagccuacaccgugaaaaaccugaggcgguccacaaaguauaaauuuaaggucauugcuuacaauucagaggguaagagcaacccuucugaaguggucgaguucaccacuugucccgacaaaccagggauccccgugaagccuuccguuaaaggcaagauucauagucacagcuucaaaauaacgugggauccacccaaggacaauggaggcgccacaaucaacaaguaugugguagagauggcagaagggucuaauggaaacaaaugggagaugauuuacuccggugccacccgugaacaccucugcgaccgccuuaauccuggcuguuuuuauagacugagggucuacugcaucucagaugggggacagagugcugugagcgagucguugcuaguucaaacuccggcggugccacccggcccuugucugccaccccggcuccagggucgaccuaaggcaaaagaaauccagaccccguccggguga

SEQ ID NO: 1684 - RNA, 2055 nt, Artificial Sequence
  derived and/or modified sequence opt4 from fibronectin__Homo_sapiens__EAX08810
auggccgagcaccccccccugcuggacaccacccagauccugagcagcgacaucagccugcugagcgcccccaucgugagcgccgacggcacccagcaggugauccuggugcaggugaaccccggcgaggccuucaccaucagaagagaggacggccaguuccagugcaucaccggccccgcccaggugcccaugaugagccccaacggcagcgugccccccaucuacgugccccccggcuacgccccccaggugaucgaggacaacggcgugagaagaguggugguggugccccaggcccccgaguuccaccccggcagccacaccgugcugcacagaagcccccaccccccccugcccggcuucauccccgugcccaccaugaugccccccccccccagacacauguacagccccgugaccggcgccggcgacaugaccacccaguacaugccccaguaccagagcagccagguguacggcgacguggacgcccacagcacccacggcagaagcaacuucagagacgagagaagcagcaagaccuacgagagacugcagaagaagcugaaggacagacagggcacccagaaggacaagaugagcagcccccccagcagcccccagaagugccccagccccaucaacgagcacaacggccugaucaagggccagaucgccggcggcaucaacaccggcagcgccaagaucaagagcggcaagggcaagggcggcacccagguggacaccgagaucgaggagaaggacgaggagaccaaggccuucgaggcccugcugagcaacaucgugaagcccguggccagcgacauccaggccagaaccguggugcugaccuggagcccccccagcagccugaucaacggcgagaccgacgagagcagcgugcccgagcuguacggcuacgaggugcugaucagcagcaccggcaaggacggcaaguacaagagcguguacgugggcgaggagaccaacaucacccugaacgaccugaagcccgccauggacuaccacgccaaggugcaggccgaguacaacagcaucaagggcacccccagcgaggccgagaucuucaccacccugagcugcgagcccgacauccccaacccccccagaaucgccaacagaaccaagaacagccugacccugcaguggaaggcccccagcgacaacggcagcaagauccagaacuucgugcuggagugggacgagggcaagggcaacggcgaguucugccagugcuacaugggcagccagaagcaguucaagaucaccaagcugagccccgccaugggcugcaaguucagacugagcgccagaaacgacuacggcaccagcggcuucagcgaggaggugcuguacuacaccagcggcugcgcccccagcaugcccgccagccccgugcugaccaaggccggcaucaccuggcugagccugcaguggagcaagcccagcggcacccccagcgacgagggcaucagcuacauccuggagauggaggaggagaccagcggcuacggcuucaagcccaaguacgacggcgaggaccuggccuacaccgugaagaaccugagaagaagcaccaaguacaaguucaaggugaucgccuacaacagcgagggcaagagcaaccccagcgaggugguggaguucaccaccugccccgacaagcccggcauccccgugaagcccagcgugaagggcaagauccacagccacagcuucaagaucaccugggacccccccaaggacaacggcggcgccaccaucaacaaguacgugguggagauggccgagggcagcaacggcaacaagugggagaugaucuacagcggcgccaccagagagcaccugugcgacagacugaaccccggcugcuucuacagacugagaguguacugcaucagcgacggcggccagagcgccgugagcgagagccugcuggugcagacccccgccgugccccccggccccugccugccccccagacugcagggcagacccaaggccaaggagauccagacccccagcggcuga

SEQ ID NO: 1685 - RNA, 2055 nt, Artificial Sequence
  derived and/or modified sequence opt5 from fibronectin__Homo_sapiens__EAX08810
auggccgagcaucccccucugcucgacaccacacagauccugagcuccgauauuucucuucugagcgcuccgaucguguccgccgacggcacgcaacaggucauucucguucaggugaaccccggggaagcguucaccaucagacgggaggauggacaguuucaaugcauuacaggcccugcucaggugcccaugaugucuccuaaugggagcgugcccccuaucuacgucccgcccggauaugccccucagguuaucgaagacaacggcgugcgcagagucgugguugugccccaggccccugaguuccaccccgggucccacaccguccugcaucggucuccgcacccuccccuuccuggauuuauucccgugcccacaaugaugccuccgcccccucgccauauguacagccccgugaccggcgcuggcgauaugacaacccaauauaugccucaguaccaguccagccaggucuauggggacguugaugcccacucuacgcacggaagauccaauuuccgggacgaacgcagcucuaagaccuacgagagacugcaaaagaagcucaaagaucggcagggcacacagaaggacaaaauguccucucccccgagcuccccucaaaagugucccagcccuaucaacgagcauaaugggcugauuaagggacagaucgcuggcgggauuaacaccggauccgccaaaaucaagucuggcaaaggcaaagggggaacacagguggauaccgaaauugaggaaaaagacgaggagacgaaggcguuugaagcccugcucagcaauaucgugaagcccgucgcuuccgauauccaggcccgcacagugguucugaccuggagcccucccucuucccuuauuaacggcgagacagacgaaagcucugugccggagcuguauggguacgaaguccucaucagcuccaccggaaaagacggcaaguacaaaucuguguauguuggggaggagaccaauauuacacugaacgaucuuaagccugcuauggacuaccacgccaaagugcaagcggaauauaauagcaucaagggaacgcccuccgaggccgaaauuuucaccacacugagcugcgagcccgauaucccuaacccgcccagaaucgcuaaucggaccaaaaacucucucacacugcaguggaaggccccuuccgacaauggcagcaagauucagaacuuuguccuggaaugggaugagggcaaagggaacggagaguucugucagugcuacaugggcucucaaaagcaguuuaaaaucaccaagcucucccccgcuaugggguguaaauuccgccugagcgccagaaaugacuauggaacguccggcuuuucugaagaggugcuuuacuauacaagcgggugcgccccuuccaugcccgcuucuccuguccugaccaaggcgggcauuaccuggcucagccugcagugguccaagcccagcggaacaccgucugaugaaggcaucuccuacauucuugagauggaagaggagaccagcggguacggauucaaaccuaaguaugacggcgaagaucuggccuacacagugaaaaaccuccggcgcucuacgaaguauaaauuuaagguuaucgcuuacaauuccgagggaaagagcaaccccucugaaguggucgaguucaccacauguccugacaaacccgggaucccggugaagccuagcguuaaaggcaagauucauucccacagcuucaaaaucaccugggaucccccuaaggacaaugggggcgccacaauuaacaaguauguggucgagauggccgaaggaucuaauggcaacaaaugggagaugaucuacuccggggcuaccagagaacaccugugcgaccggcugaaucccggauguuuuuauagacuccgcguguacugcauuagcgauggcgggcaguccgccgugucugagagccugcuuguucaaacgcccgcggucccuccgggacccugucugccuccccggcuccagggcagaccuaaggcuaaagaaauccagacccccuccggguga

SEQ ID NO: 1686 - protein, 163 aa, Artificial Sequence
  fibronectin__Homo_sapiens__Q9H382
MSESGFKLLCQCLGFGSGHFRCDSSRWCHDNGVNYKIGEKWDRQGENGQMMSCTCLGNGKGEFKCDPHEATCYDDGKTYHVGEQWQKEYLGAICSCTCFGGQRGWRCDNCRRPGGEPSPEGTTGQSYNQYSQRYHQRTNTNVNCPIECFMPLDVQADREDSRE

SEQ ID NO: 1687 - RNA, 492 nt, Artificial Sequence
  fibronectin__Homo_sapiens__AAG35520
augucugaaucaggcuuuaaacuguugugccagugcuuaggcuuuggaaguggucauuucagaugugauucaucuagauggugccaugacaauggugugaacuacaagauuggagagaagugggaccgucagggagaaaauggccagaugaugagcugcacaugucuugggaacggaaaaggagaauucaagugugacccucaugaggcaacguguuaugaugaugggaagacauaccacguaggagaacaguggcagaaggaauaucucggugccauuugcuccugcacaugcuuuggaggccagcggggcuggcgcugugacaacugccgcagaccugggggugaacccagucccgaaggcacuacuggccaguccuacaaccaguauucucagagauaccaucagagaacaaacacuaauguuaauugcccaauugagugcuucaugccuuuagauguacaggcugacagagaagauucccgagaguaa

SEQ ID NO: 1688 - RNA, 492 nt, Artificial Sequence
  derived and/or modified sequence opt1 from fibronectin__Homo_sapiens__AAG35520
augagcgaguccggcuucaagcugcucugccagugccugggguucggcagcgggcacuuccgcugcgacuccagccgguggugccacgacaacggcgugaacuacaagaucggggagaagugggaccgccagggcgagaacggccagaugauguccugcacgugccuggggaacggcaagggggaguucaagugcgacccccacgaggcgaccugcuacgacgacggcaagaccuaccacgucggggagcaguggcagaaggaguaccucggcgccaucugcagcugcacgugcuucggcgggcagcggggcuggcgcugcgacaacugccggcgccccgggggcgagccgucccccgagggcaccaccgggcagagcuacaaccaguacucccagcgguaccaccagcgcaccaacaccaacgugaacugccccaucgagugcuucaugccgcuggacgugcaggccgaccgggaggacagccgcgaguga

SEQ ID NO: 1689 - RNA, 492 nt, Artificial Sequence
  derived and/or modified sequence opt2 from fibronectin__Homo_sapiens__AAG35520
auguccgaguccggcuucaagcuccucugccagugccucggcuucggcuccggccacuuccgcugcgacuccucccgcuggugccacgacaacggcgucaacuacaagaucggcgagaagugggaccgccagggcgagaacggccagaugauguccugcaccugccucggcaacggcaagggcgaguucaagugcgacccccacgaggccaccugcuacgacgacggcaagaccuaccacgucggcgagcaguggcagaaggaguaccucggcgccaucugcuccugcaccugcuucggcggccagcgcggcuggcgcugcgacaacugccgccgccccggcggcgagcccucccccgagggcaccaccggccaguccuacaaccaguacucccagcgcuaccaccagcgcaccaacaccaacgucaacugccccaucgagugcuucaugccccucgacguccaggccgaccgcgaggacucccgcgaguga

SEQ ID NO: 1690 - RNA, 492 nt, Artificial Sequence
  derived and/or modified sequence opt3 from fibronectin__Homo_sapiens__AAG35520
augagcgaguccggcuucaagcugcucugccagugucuuggguuuggaucuggucacuucagaugcgacucaaguagguggugucaugauaacggcgugaauuacaaaaucggggaaaagugggaccggcaaggagagaacggccagaugaugagcugcaccugucuggguaaugggaaaggagaauuuaagugcgauccccacgaggccacauguuaugacgauggcaaaacuuaccaugucggcgaacaguggcagaaggaguauuugggggcuauuugcuccuguacgugcuucggaggucaacgcggcuggcgaugugacaacugccguagaccugggggagagccaucuccggaaggcaccacaggucagucguacaaucaguauucacagagguaccaccaacggacuaacaccaauguuaacugccccauagaguguuuuaugccuuuagaugugcaggcagaccgcgaagauagcagagaguga

SEQ ID NO: 1691 - RNA, 492 nt, Artificial Sequence
  derived and/or modified sequence opt4 from fibronectin__Homo_sapiens__AAG35520
augagcgagagcggcuucaagcugcugugccagugccugggcuucggcagcggccacuucagaugcgacagcagcagauggugccacgacaacggcgugaacuacaagaucggcgagaagugggacagacagggcgagaacggccagaugaugagcugcaccugccugggcaacggcaagggcgaguucaagugcgacccccacgaggccaccugcuacgacgacggcaagaccuaccacgugggcgagcaguggcagaaggaguaccugggcgccaucugcagcugcaccugcuucggcggccagagaggcuggagaugcgacaacugcagaagacccggcggcgagcccagccccgagggcaccaccggccagagcuacaaccaguacagccagagauaccaccagagaaccaacaccaacgugaacugccccaucgagugcuucaugccccuggacgugcaggccgacagagaggacagcagagaguga

SEQ ID NO: 1692 - RNA, 492 nt, Artificial Sequence
  derived and/or modified sequence opt5 from fibronectin__Homo_sapiens__AAG35520
augagcgaguccggcuucaagcugcucugccagugucugggguuuggaucuggccacuucagaugcgacagcucccgguggugucaugauaacggggugaauuacaaaaucggagaaaagugggaccgccaaggcgagaacgggcagaugaugucuugcaccugucuuggaaauggcaaaggcgaauuuaagugcgauccccacgaggccacauguuaugacgaugggaaaacguaccaugucggagaacaguggcagaaggaguaucugggcgcuauuugcagcuguaccugcuucgggggacaaagaggcuggcggugugacaacugccgcagaccugggggagagccgucccccgaaggcacaaccggccagucuuacaaucaguauagccagcgguaccaccaacgcacaaacaccaauguuaacugcccuaucgaguguuuuaugccccucgaugugcaggccgacagagaagauucccgggaguga

SEQ ID NO: 1693 - protein, 380 aa, Artificial Sequence
  FOS__Homo_sapiens__P01100
MMFSGFNADYEASSSRCSSASPAGDSLSYYHSPADSFSSMGSPVNAQDFCTDLAVSSANFIPTVTAISTSPDLQWLVQPALVSSVAPSQTRAPHPFGVPAPSAGAYSRAGVVKTMTGGRAQSIGRRGKVEQLSPEEEEKRRIRRERNKMAAAKCRNRRRELTDTLQAETDQLEDEKSALQTEIANLLKEKEKLEFILAAHRPACKIPDDLGFPEEMSVASLDLTGGLPEVATPESEEAFTLPLLNDPEPKPSVEPVKSISSMELKTEPFDDFLFPASSRPSGSETARSVPDMDLSGSFYAADWEPLHSGSLGMGPMATELEPLCTPVVTCTPSCTAYTSSFVFTYPEADSFPSCAAAHRKGSSSNEPSSDSLSSPTLLAL

SEQ ID NO: 1694 - RNA, 1143 nt, Artificial Sequence
  FOS__Homo_sapiens__AAA52471
augauguucucgggcuucaacgcagacuacgaggcgucauccucccgcugcagcagcgcguccccggccggggauagccucucuuacuaccacucacccgcagacuccuucuccagcaugggcucgccugucaacgcgcaggacuucugcacggaccuggccgucuccagugccaacuucauucccacggucacugccaucucgaccaguccggaccugcaguggcuggugcagcccgcccucgucuccucuguggccccaucgcagaccagagccccucacccuuucggaguccccgcccccuccgcuggggcuuacuccagggcuggcguugugaagaccaugacaggaggccgagcgcagagcauuggcaggaggggcaagguggaacaguuaucuccagaagaagaagagaaaaggagaauccgaagggaaaggaauaagauggcugcagccaaaugccgcaaccggaggagggagcugacugauacacuccaagcggagacagaccaacuagaagaugagaagucugcuuugcagaccgagauugccaaccugcugaaggagaaggaaaaacuagaguucauccuggcagcucaccgaccugccugcaagaucccugaugaccugggcuucccagaagagaugucuguggcuucccuugaucugacugggggccugccagagguugccaccccggagucugaggaggccuucacccugccucuccucaaugacccugagcccaagcccucaguggaaccugucaagagcaucagcagcauggagcugaagaccgagcccuuugaugacuuccuguucccagcaucauccaggcccaguggcucugagacagcccgcuccgugccagacauggaccuaucuggguccuucuaugcagcagacugggagccucugcacaguggcucccuggggauggggcccauggccacagagcuggagccccugugcacuccgguggucaccuguacucccagcugcacugcuuacacgucuuccuucgucuucaccuaccccgaggcugacuccuuccccagcugugcagcugcccaccgcaagggcagcagcagcaaugagccuuccucugacucgcucagcucacccacgcugcuggcccuguga

SEQ ID NO: 1695 - RNA, 1143 nt, Artificial Sequence
  derived and/or modified sequence opt1 from FOS__Homo_sapiens__AAA52471
augauguucagcggcuucaacgccgacuacgaggccuccagcucccgcugcagcuccgcgagccccgccggggacucccugagcuacuaccacuccccggccgacagcuucuccagcaugggcucccccgugaacgcccaggacuucugcaccgaccucgccgucagcuccgcgaacuucauccccaccgugacggccaucagcaccucccccgaccugcaguggcuggugcagccggcccucgucagcuccguggcccccagccagacccgggcgccccaccccuucggggugccggcccccagcgccggcgccuacucccgcgccggggucgugaagaccaugacgggcggccgggcgcagagcaucgggcgccggggcaagguggagcagcugucccccgaggaggaggagaagcgccggauccgccgggagcgcaacaagauggccgccgccaagugccggaaccgccggcgcgagcugaccgacacccuccaggccgagaccgaccagcuggaggacgagaaguccgcgcugcagacggagaucgccaaccuccugaaggagaaggagaagcuggaguucauccucgccgcccaccggcccgccugcaagaucccggacgaccugggguuccccgaggagaugagcgucgcgagccuggaccucaccggcgggcugcccgagguggccacccccgaguccgaggaggccuucacccugccgcuccugaacgaccccgagcccaagcccagcguggagccggucaaguccaucagcuccauggagcugaagacggagcccuucgacgacuuccucuuccccgccagcucccgccccagcggcuccgagaccgcccggagcgugccggacauggaccuguccggcagcuucuacgcggccgacugggagccccugcacuccgggagccucggcauggggcccauggccaccgagcuggagccccugugcaccccgguggucacgugcacccccagcugcaccgccuacaccuccagcuucguguucacguaccccgaggcggacuccuucccgagcugcgccgccgcccaccgcaagggcuccagcuccaacgagcccagcuccgacagccucuccagccccacccugcuggcccucuga

SEQ ID NO: 1696 - RNA, 1143 nt, Artificial Sequence
  derived and/or modified sequence opt2 from FOS__Homo_sapiens__AAA52471
augauguucuccggcuucaacgccgacuacgaggccuccuccucccgcugcuccuccgccucccccgccggcgacucccucuccuacuaccacucccccgccgacuccuucuccuccaugggcucccccgucaacgcccaggacuucugcaccgaccucgccgucuccuccgccaacuucauccccaccgucaccgccaucuccaccucccccgaccuccaguggcucguccagcccgcccucgucuccuccgucgcccccucccagacccgcgccccccaccccuucggcguccccgcccccuccgccggcgccuacucccgcgccggcgucgucaagaccaugaccggcggccgcgcccaguccaucggccgccgcggcaaggucgagcagcucucccccgaggaggaggagaagcgccgcauccgccgcgagcgcaacaagauggccgccgccaagugccgcaaccgccgccgcgagcucaccgacacccuccaggccgagaccgaccagcucgaggacgagaaguccgcccuccagaccgagaucgccaaccuccucaaggagaaggagaagcucgaguucauccucgccgcccaccgccccgccugcaagauccccgacgaccucggcuuccccgaggagauguccgucgccucccucgaccucaccggcggccuccccgaggucgccacccccgaguccgaggaggccuucacccucccccuccucaacgaccccgagcccaagcccuccgucgagcccgucaaguccaucuccuccauggagcucaagaccgagcccuucgacgacuuccucuuccccgccuccucccgccccuccggcuccgagaccgcccgcuccguccccgacauggaccucuccggcuccuucuacgccgccgacugggagccccuccacuccggcucccucggcaugggccccauggccaccgagcucgagccccucugcacccccgucgucaccugcacccccuccugcaccgccuacaccuccuccuucgucuucaccuaccccgaggccgacuccuuccccuccugcgccgccgcccaccgcaagggcuccuccuccaacgagcccuccuccgacucccucuccucccccacccuccucgcccucuga

SEQ ID NO: 1697 - RNA, 1143 nt, Artificial Sequence
  derived and/or modified sequence opt3 from FOS__Homo_sapiens__AAA52471
augauguucagcggcuuuaacgccgacuacgaggcuuccucuucaagaugcaguagcgcaucccccgccggggauucucugucguauuaccacagcccugcggacagcuucaguuccaugggaucuccagugaaugcucaggauuuuuguaccgaccucgccgucagcuccgcaaacuucaucccgacaguuacugccauuucaacgagucccgaucuucaauggcuggugcagccugcuuugguaagcucuguggcaccaucccagaccagggcuccccauccuuuuggugucccagcccccucagccggcgcguauagccgggcaggggugguuaagacaaugacuggaggccgcgcccagaguauaggucgacgugggaaaguggaacaauuaucuccugaggaagaggaaaagagaaggauccggcgcgagagaaauaaaauggcugccgcaaagugcaggaaccggcgccgagagcugaccgacacacuacaggcugaaaccgaucagcucgaggacgaaaaauccgcccugcagacugagauugcgaaucuucugaaggagaaggaaaaauuggaguucauccucgccgcacacagaccagcuuguaagauuccggaugaccugggauuucccgaagagaugagcgucgccucgcuggaucucacaggcggcuuaccugaaguggcuaccccagagucugaggaagccuucacgcugccccuuuugaacgacccugagccaaaacccuccguagaaccgguuaagucaaucaguagcauggagcugaaaacugaaccuuuugaugacuuccuauuucccgcauccucuaggccaagcgggucagagaccgcccggagugugccugacauggaucucuccggaucauucuacgcugcggacugggagccccugcauucugguucacuuggcauggggccaauggcaacagaacuggagcccuugugcacuccugucgugaccuguacaccaaguugcaccgccuauacgagcuccuuuguguucacuuacccggaagcugauucuuuccccucgugugccgcagcccaccguaagggaagcuccucaaaugagccuaguucugacagccucuccucaccaacacuguuagcucuguga

SEQ ID NO: 1698 - RNA, 1143 nt, Artificial Sequence
  derived and/or modified sequence opt4 from FOS__Homo_sapiens__AAA52471
augauguucagcggcuucaacgccgacuacgaggccagcagcagcagaugcagcagcgccagccccgccggcgacagccugagcuacuaccacagccccgccgacagcuucagcagcaugggcagccccgugaacgcccaggacuucugcaccgaccuggccgugagcagcgccaacuucauccccaccgugaccgccaucagcaccagccccgaccugcaguggcuggugcagcccgcccuggugagcagcguggcccccagccagaccagagccccccaccccuucggcgugcccgcccccagcgccggcgccuacagcagagccggcguggugaagaccaugaccggcggcagagcccagagcaucggcagaagaggcaagguggagcagcugagccccgaggaggaggagaagagaagaaucagaagagagagaaacaagauggccgccgccaagugcagaaacagaagaagagagcugaccgacacccugcaggccgagaccgaccagcuggaggacgagaagagcgcccugcagaccgagaucgccaaccugcugaaggagaaggagaagcuggaguucauccuggccgcccacagacccgccugcaagauccccgacgaccugggcuuccccgaggagaugagcguggccagccuggaccugaccggcggccugcccgagguggccacccccgagagcgaggaggccuucacccugccccugcugaacgaccccgagcccaagcccagcguggagcccgugaagagcaucagcagcauggagcugaagaccgagcccuucgacgacuuccuguuccccgccagcagcagacccagcggcagcgagaccgccagaagcgugcccgacauggaccugagcggcagcuucuacgccgccgacugggagccccugcacagcggcagccugggcaugggccccauggccaccgagcuggagccccugugcacccccguggugaccugcacccccagcugcaccgccuacaccagcagcuucguguucaccuaccccgaggccgacagcuuccccagcugcgccgccgcccacagaaagggcagcagcagcaacgagcccagcagcgacagccugagcagccccacccugcuggcccuguga

SEQ ID NO: 1699 - RNA, 1143 nt, Artificial Sequence
  derived and/or modified sequence opt5 from FOS__Homo_sapiens__AAA52471
augauguucagcggcuuuaacgccgacuacgaggcuuccucuagcagaugcuccucugccagccccgcgggggauucccugucuuauuaccacagcccugcugacuccuucagcucuaugggauccccggugaaugcccaggauuuuuguaccgaccucgccgucagcucugcuaacuucauccccacaguuacggccauuuccaccagcccugaucugcaauggcuugugcagcccgcucuggugucuuccgucgccccuagccagacacgggcgccccauccuuuuggcgugccggcccccuccgcuggggccuauucucgcgcuggaguugugaagaccaugacaggcgggagagcccagagcaucggacggcgcggcaaagucgaacaacucuccccugaggaagaggaaaagagacggauucgcagagagcggaauaaaauggcggccgcuaagugccgcaacagacggcgcgagcugaccgacacacuucaggccgaaaccgaucagcuggaggacgagaaaagcgcucuccagacggaaaucgccaaucugcugaaggagaaggaaaaacucgaguucauucuggccgcucacagacccgcguguaagaucccugaugaccuuggcuuucccgaagagaugucuguggccucccuggaucucaccgggggacugccggaaguugcuacaccugagagcgaggaagccuucacccuuccccugcucaacgacccugagcccaaacccucuguggaaccugucaagagcaucuccucuauggagcugaaaacagaaccguuugaugacuuccuguuucccgccagcucccggccuagcggcucugagaccgcucgcuccgugcccgacauggaucucagcgggucuuucuacgccgcggacugggagccucugcauuccggaagccuuggcauggggcccauggcuacggaacuggagccgcucugcacaccuguggucaccuguacacccuccugcaccgccuauaccucuagcuuuguuuucacauacccugaagccgauuccuuccccucuugugcugccgcucacagaaagggaagcuccagcaaugagccuucuuccgacagccugucuucccccacgcuucuggcccucuga

SEQ ID NO: 1700 - protein, 431 aa, Artificial Sequence
  FOXP3__Homo_sapiens__Q9BZS1
MPNPRPGKPSAPSLALGPSPGASPSWRAAPKASDLLGARGPGGTFQGRDLRGGAHASSSSLNPMPPSQLQLPTLPLVMVAPSGARLGPLPHLQALLQDRPHFMHQLSTVDAHARTPVLQVHPLESPAMISLTPPTTATGVFSLKARPGLPPGINVASLEWVSREPALLCTFPNPSAPRKDSTLSAVPQSSYPLLANGVCKWPGCEKVFEEPEDFLKHCQADHLLDEKGRAQCLLQREMVQSLEQQLVLEKEKLSAMQAHLAGKMALTKASSVASSDKGSCCIVAAGSQGPVVPAWSGPREAPDSLFAVRRHLWGSHGNSTFPEFLHNMDYFKFHNMRPPFTYATLIRWAILEAPEKQRTLNEIYHWFTRMFAFFRNHPATWKNAIRHNLSLHKCFVRVESEKGAVWTVDELEFRKKRSQRPSRCSNPTPGP

SEQ ID NO: 1701 - RNA, 1296 nt, Artificial Sequence
  FOXP3__Homo_sapiens__AAG53607
augcccaaccccaggccuggcaagcccucggccccuuccuuggcccuuggcccauccccaggagccucgcccagcuggagggcugcacccaaagccucagaccugcugggggcccggggcccagggggaaccuuccagggccgagaucuucgaggcggggcccaugccuccucuucuuccuugaaccccaugccaccaucgcagcugcagcugcccacacugccccuagucaugguggcacccuccggggcacggcugggccccuugccccacuuacaggcacuccuccaggacaggccacauuucaugcaccagcucucaacgguggaugcccacgcccggaccccugugcugcaggugcacccccuggagagcccagccaugaucagccucacaccacccaccaccgccacuggggucuucucccucaaggcccggccuggccucccaccugggaucaacguggccagccuggaauggguguccagggagccggcacugcucugcaccuucccaaaucccagugcacccaggaaggacagcacccuuucggcugugccccagagcuccuacccacugcuggcaaauggugucugcaaguggcccggaugugagaaggucuucgaagagccagaggacuuccucaagcacugccaggcggaccaucuucuggaugagaagggcagggcacaaugucuccuccagagagagaugguacagucucuggagcagcagcuggugcuggagaaggagaagcugagugccaugcaggcccaccuggcugggaaaauggcacugaccaaggcuucaucuguggcaucauccgacaagggcuccugcugcaucguagcugcuggcagccaaggcccugucgucccagccuggucuggcccccgggaggccccugacagccuguuugcuguccggaggcaccugugggguagccauggaaacagcacauucccagaguuccuccacaacauggacuacuucaaguuccacaacaugcgacccccuuucaccuacgccacgcucauccgcugggccauccuggaggcuccagagaagcagcggacacucaaugagaucuaccacugguucacacgcauguuugccuucuucagaaaccauccugccaccuggaagaacgccauccgccacaaccugagucugcacaagugcuuugugcggguggagagcgagaagggggcuguguggaccguggaugagcuggaguuccgcaagaaacggagccagaggcccagcagguguuccaacccuacaccuggccccuga

SEQ ID NO: 1702 - RNA, 1296 nt, Artificial Sequence
  derived and/or modified sequence opt1 from FOXP3__Homo_sapiens__AAG53607
augcccaacccgcgccccggcaagcccagcgcccccucccuggcccucgggccgagccccggcgcgucccccagcuggcgggccgcccccaaggccuccgaccugcugggggcccgcggccccgggggcaccuuccagggccgggaccuccgcgggggcgcgcacgccagcuccagcucccugaaccccaugccgcccagccagcugcagcucccgacccugccccuggugauggucgcccccuccggggcccggcucggcccccugccgcaccuccaggcgcugcugcaggaccgcccccacuucaugcaccagcugagcacgguggacgcccacgcccggacccccgugcuccagguccacccccuggaguccccggccaugaucagccugaccccgcccaccacggccaccgggguguucucccucaaggcgcgccccggccugccgcccggcaucaacguggccagccuggagugggucucccgggagcccgcccuccugugcaccuuccccaaccccagcgcgccccgcaaggacuccacccugagcgccgugccccagagcuccuacccgcuccuggccaacggggugugcaaguggcccggcugcgagaaggucuucgaggagcccgaggacuuccugaagcacugccaggccgaccaccuccuggacgagaaggggcgggcccagugccugcuccagcgcgagauggugcagagccuggagcagcagcuggugcucgagaaggagaagcuguccgccaugcaggcccaccuggcgggcaagauggcccucacgaaggccagcuccgucgccagcuccgacaagggcagcugcugcaucguggccgcggggucccagggccccguggucccggccuggagcgggccccgggaggcccccgacucccuguucgccgugcgccggcaccuguggggcagccacgggaacuccaccuuccccgaguuccuccacaacauggacuacuucaaguuccacaacaugcgcccgcccuucaccuacgcgacccugauccggugggccauccuggaggcccccgagaagcagcgcacgcucaacgagaucuaccacugguucacccggauguucgccuucuuccgcaaccaccccgccaccuggaagaacgcgauccggcacaaccugagccugcacaagugcuucgugcgcgucgaguccgagaagggcgccguguggaccguggacgagcucgaguuccgcaagaagcggagccagcgcccgucccggugcagcaaccccacgcccggccccuga

SEQ ID NO: 1703 - RNA, 1296 nt, Artificial Sequence
  derived and/or modified sequence opt2 from FOXP3__Homo_sapiens__AAG53607
augcccaacccccgccccggcaagcccuccgcccccucccucgcccucggccccucccccggcgccucccccuccuggcgcgccgcccccaaggccuccgaccuccucggcgcccgcggccccggcggcaccuuccagggccgcgaccuccgcggcggcgcccacgccuccuccuccucccucaaccccaugccccccucccagcuccagcuccccacccucccccucgucauggucgcccccuccggcgcccgccucggcccccucccccaccuccaggcccuccuccaggaccgcccccacuucaugcaccagcucuccaccgucgacgcccacgcccgcacccccguccuccagguccacccccucgagucccccgccaugaucucccucaccccccccaccaccgccaccggcgucuucucccucaaggcccgccccggccucccccccggcaucaacgucgccucccucgagugggucucccgcgagcccgcccuccucugcaccuuccccaaccccuccgccccccgcaaggacuccacccucuccgccgucccccaguccuccuacccccuccucgccaacggcgucugcaaguggcccggcugcgagaaggucuucgaggagcccgaggacuuccucaagcacugccaggccgaccaccuccucgacgagaagggccgcgcccagugccuccuccagcgcgagaugguccagucccucgagcagcagcucguccucgagaaggagaagcucuccgccaugcaggcccaccucgccggcaagauggcccucaccaaggccuccuccgucgccuccuccgacaagggcuccugcugcaucgucgccgccggcucccagggccccgucguccccgccugguccggcccccgcgaggcccccgacucccucuucgccguccgccgccaccucuggggcucccacggcaacuccaccuuccccgaguuccuccacaacauggacuacuucaaguuccacaacaugcgcccccccuucaccuacgccacccucauccgcugggccauccucgaggcccccgagaagcagcgcacccucaacgagaucuaccacugguucacccgcauguucgccuucuuccgcaaccaccccgccaccuggaagaacgccauccgccacaaccucucccuccacaagugcuucguccgcgucgaguccgagaagggcgccgucuggaccgucgacgagcucgaguuccgcaagaagcgcucccagcgccccucccgcugcuccaaccccacccccggccccuga

SEQ ID NO: 1704 - RNA, 1296 nt, Artificial Sequence
  derived and/or modified sequence opt3 from FOXP3__Homo_sapiens__AAG53607
augcccaacccuagaccaggcaagccgagcgcccccucccuggcucucgggccuucuccaggagcaucacccaguuggagggccgcgccuaaagcuagcgaccuucugggugcccggggcccagggggaaccuuccagggccgcgauuugcgagguggggcacacgccuccucuucgucauuaaaucccaugccuccaagccaacugcagcuaccgacacucccccuggugauggucgcuccuaguggagcacgucuuggcccacugccccauuugcaggcccuccugcaggacagaccucacuuuaugcaucaacuguccacuguugaugcucacgccaggacgccagugcuccagguacaucccuuagaaucuccggcgaugaucagccugaccccucccacaacugcaaccggcguguucucccuuaaggcccggccaggguugccucccggaauuaacgucgcuucacuggaaugggugagucgcgagccagcccuacucugcacauuucccaauccuagcgcaccaagaaaagacucuacccuguccgcuguuccgcagucaagcuacccccuucuggccaacgguguguguaaguggccuggcugcgaaaaagucuucgaggaaccagaggauuucuugaagcacugucaggcggaccaccuccuggaugagaaggggagggcccaaugcuuacugcagcgggaaauggugcagagucucgagcagcaacuuguacuggaaaaagagaaguugucugcaaugcaggcucaucuagccggaaaaauggcucugacuaaggccuccagcguugcaucgucugacaaaggcuccuguugcauaguggccgcugguucacaggggcccgucgugccugcguggaguggaccacgcgaggcacccgauagccucuucgccgugcgaagacaccuguggggcucccauggcaauucuacauuuccggaauuucuucacaacauggacuauuuuaaguuccacaauaugaggccuccauuuaccuacgcuacgcugauccggugggccauuuuggaggcacccgaaaagcaacguacucucaacgagaucuaucauugguucacccgcauguuugccuucuucagaaaucacccugcuacauggaaaaacgccauuaggcauaaucugagcuuacacaaguguuuuguccggguugaaucagagaaaggggcaguguggacuguagaugagcuggaguuccgaaagaaacgcagucagagacccuccaggugcagcaacccaaccccuggacccuga

SEQ ID NO: 1705 - RNA, 1296 nt, Artificial Sequence
  derived and/or modified sequence opt4 from FOXP3__Homo_sapiens__AAG53607
augcccaaccccagacccggcaagcccagcgcccccagccuggcccugggccccagccccggcgccagccccagcuggagagccgcccccaaggccagcgaccugcugggcgccagaggccccggcggcaccuuccagggcagagaccugagaggcggcgcccacgccagcagcagcagccugaaccccaugccccccagccagcugcagcugcccacccugccccuggugaugguggcccccagcggcgccagacugggcccccugccccaccugcaggcccugcugcaggacagaccccacuucaugcaccagcugagcaccguggacgcccacgccagaacccccgugcugcaggugcacccccuggagagccccgccaugaucagccugaccccccccaccaccgccaccggcguguucagccugaaggccagacccggccugccccccggcaucaacguggccagccuggagugggugagcagagagcccgcccugcugugcaccuuccccaaccccagcgcccccagaaaggacagcacccugagcgccgugccccagagcagcuacccccugcuggccaacggcgugugcaaguggcccggcugcgagaagguguucgaggagcccgaggacuuccugaagcacugccaggccgaccaccugcuggacgagaagggcagagcccagugccugcugcagagagagauggugcagagccuggagcagcagcuggugcuggagaaggagaagcugagcgccaugcaggcccaccuggccggcaagauggcccugaccaaggccagcagcguggccagcagcgacaagggcagcugcugcaucguggccgccggcagccagggccccguggugcccgccuggagcggccccagagaggcccccgacagccuguucgccgugagaagacaccuguggggcagccacggcaacagcaccuuccccgaguuccugcacaacauggacuacuucaaguuccacaacaugagaccccccuucaccuacgccacccugaucagaugggccauccuggaggcccccgagaagcagagaacccugaacgagaucuaccacugguucaccagaauguucgccuucuucagaaaccaccccgccaccuggaagaacgccaucagacacaaccugagccugcacaagugcuucgugagaguggagagcgagaagggcgccguguggaccguggacgagcuggaguucagaaagaagagaagccagagacccagcagaugcagcaaccccacccccggccccuga

SEQ ID NO: 1706 - RNA, 1296 nt, Artificial Sequence
  derived and/or modified sequence opt5 from FOXP3__Homo_sapiens__AAG53607
augcccaacccuagaccgggcaagcccagcgccccuucccuggcucucgggcccucuccuggagccagccccuccuggcgggcggcuccuaaagccucugaccugcuuggcgcccgcgggccgggaggcaccuuccaggggagagaucugcggggaggcgcucacgccagcuccucuagccucaaucccaugccucccucccaacugcagcuuccuacacugccccucgugauggucgcuccgagcggcgcccgccuggggccucugccccaucuccaggcgcugcuucaggacagaccucacuuuaugcaucaacugucuacgguugaugcccacgcucggacccccgugcuccaggugcauccccuggaauccccugccaugaucagccuuacaccgcccaccacagcuaccggagucuucucucugaaggcccgcccuggccugcccccugggauuaacguggcgucccuggaauggguuagcagagagcccgcccugcucugcacauuuccgaauccuucugcuccccggaaagacuccacccugagcgccgugccucaguccucuuacccccuucuggcuaacggagucuguaaguggccuggcugcgaaaaaguguucgaggaacccgaggauuuucucaagcacugucaggccgaccaccuccuugaugagaaggggcgcgcccaaugccugcuccagagagaaaugguucagagccuggagcagcaacuggugcucgaaaaagagaagcuguccgcuaugcaggcgcaucuugccggaaaaauggcucugacgaaggccagcucugucgccuccagcgacaaaggcucuuguugcaucguggcugccggcagccaggggccgguggucccugcgugguccggaccccgggaggcucccgauucucucuucgccguucgcagacaccuguggggcagccauggaaauuccaccuuuccugaguuccuucacaacauggacuauuuuaaguuccacaauaugcggccgcccuuuacauacgccacccugauucgcugggcuauccucgaagccccugaaaagcaaagaacacugaacgagauuuaucauugguucacccggauguuugcuuucuucagaaaucaccccgccacguggaaaaacgcgauccgccauaaucugagccuccacaaguguuuugugcggguggaaucugagaaaggggccgucuggacaguggaugagcuggaguucagaaagaaacgcucccagcggccuagcagaugcucuaaccccaccccuggccccuga

SEQ ID NO: 1707 - protein, 365 aa, Artificial Sequence
  FUT1__Homo_sapiens__P19526
MWLRSHRQLCLAFLLVCVLSVIFFLHIHQDSFPHGLGLSILCPDRRLVTPPVAIFCLPGTAMGPNASSSCPQHPASLSGTWTVYPNGRFGNQMGQYATLLALAQLNGRRAFILPAMHAALAPVFRITLPVLAPEVDSRTPWRELQLHDWMSEEYADLRDPFLKLSGFPCSWTFFHHLREQIRREFTLHDHLREEAQSVLGQLRLGRTGDRPRTFVGVHVRRGDYLQVMPQRWKGVVGDSAYLRQAMDWFRARHEAPVFVVTSNGMEWCKENIDTSQGDVTFAGDGQEATPWKDFALLTQCNHTIMTIGTFGFWAAYLAGGDTVYLANFTLPDSEFLKIFKPEAAFLPEWVGINADLSPLWTLAKP

SEQ ID NO: 1708 - RNA, 1098 nt, Artificial Sequence
  FUT1__Homo_sapiens__AAA52639
auguggcuccggagccaucgucagcucugccuggccuuccugcuagucuguguccucucuguaaucuucuuccuccauauccaucaagacagcuuuccacauggccuaggccugucgauccuguguccagaccgccgccuggugacacccccaguggccaucuucugccugccggguacugcgaugggccccaacgccuccucuuccuguccccagcacccugcuucccucuccggcaccuggacugucuaccccaauggccgguuugguaaucagaugggacaguaugccacgcugcuggcucuggcccagcucaacggccgccgggccuuuauccugccugccaugcaugccgcccuggccccgguauuccgcaucacccugcccgugcuggccccagaaguggacagccgcacgccguggcgggagcugcagcuucacgacuggaugucggaggaguacgcggacuugagagauccuuuccugaagcucucuggcuuccccugcucuuggacuuucuuccaccaucuccgggaacagauccgcagagaguucacccugcacgaccaccuucgggaagaggcgcagagugugcugggucagcuccgccugggccgcacaggggaccgcccgcgcaccuuugucggcguccacgugcgccguggggacuaucugcagguuaugccucagcgcuggaaggguguggugggcgacagcgccuaccuccggcaggccauggacugguuccgggcacggcacgaagcccccguuuucguggucaccagcaacggcauggagugguguaaagaaaacaucgacaccucccagggcgaugugacguuugcuggcgauggacaggaggcuacaccguggaaagacuuugcccugcucacacagugcaaccacaccauuaugaccauuggcaccuucggcuucugggcugccuaccuggcuggcggagacacugucuaccuggccaacuucacccugccagacucugaguuccugaagaucuuuaagccggaggcggccuuccugcccgagugggugggcauuaaugcagacuugucuccacucuggacauuggcuaagccuuga

SEQ ID NO: 1709 - RNA, 1098 nt, Artificial Sequence
  derived and/or modified sequence opt1 from FUT1__Homo_sapiens__AAA52639
auguggcugcgcagccaccggcagcucugccuggccuuccugcucgugugcguccuguccgugaucuucuuccugcacauccaccaggacagcuucccccacggccucgggcuguccauccugugcccggaccgccggcucgugaccccgcccgucgccaucuucugccugcccggcaccgcgauggggcccaacgccagcuccagcugcccccagcaccccgccucccugagcggcacguggaccguguaccccaacgggcgcuucggcaaccagaugggccaguacgccacccuccuggcccuggcgcagcucaacgggcggcgcgccuucauccugccggccaugcacgccgcgcuggcccccguguuccggaucacccuccccguccuggcccccgagguggacucccgcacgccguggcgggagcugcagcuccacgacuggaugagcgaggaguacgccgaccugcgcgaccccuuccugaagcucuccggcuuccccugcagcuggaccuucuuccaccaccuccgggagcagauccgccgggaguucacccugcacgaccaccuccgcgaggaggcccaguccgugcuggggcagcugcggcugggccgcaccggggaccggccccgcacguucgucggcgugcacgugcggcgcggcgacuaccugcaggucaugccgcagcgguggaaggggguggugggcgacagcgcguaccugcgccaggccauggacugguuccgcgcccggcacgaggcccccgucuucguggugaccuccaacgggauggaguggugcaaggagaacaucgacaccagccagggcgacgucaccuucgccggcgacgggcaggaggcgacgcccuggaaggacuucgcccuccugacccagugcaaccacaccaucaugaccaucggcacguucggguucugggccgccuaccuggccggcggggacaccguguaccucgcgaacuucacccugcccgacuccgaguuccugaagaucuucaagccggaggccgccuuccuccccgagugggugggcaucaacgccgaccugagcccccuguggacccucgccaagcccuga

SEQ ID NO: 1710 - RNA, 1098 nt, Artificial Sequence
  derived and/or modified sequence opt2 from FUT1__Homo_sapiens__AAA52639
auguggcuccgcucccaccgccagcucugccucgccuuccuccucgucugcguccucuccgucaucuucuuccuccacauccaccaggacuccuucccccacggccucggccucuccauccucugccccgaccgccgccucgucaccccccccgucgccaucuucugccuccccggcaccgccaugggccccaacgccuccuccuccugcccccagcaccccgccucccucuccggcaccuggaccgucuaccccaacggccgcuucggcaaccagaugggccaguacgccacccuccucgcccucgcccagcucaacggccgccgcgccuucauccuccccgccaugcacgccgcccucgcccccgucuuccgcaucacccuccccguccucgcccccgaggucgacucccgcacccccuggcgcgagcuccagcuccacgacuggauguccgaggaguacgccgaccuccgcgaccccuuccucaagcucuccggcuuccccugcuccuggaccuucuuccaccaccuccgcgagcagauccgccgcgaguucacccuccacgaccaccuccgcgaggaggcccaguccguccucggccagcuccgccucggccgcaccggcgaccgcccccgcaccuucgucggcguccacguccgccgcggcgacuaccuccaggucaugccccagcgcuggaagggcgucgucggcgacuccgccuaccuccgccaggccauggacugguuccgcgcccgccacgaggcccccgucuucgucgucaccuccaacggcauggaguggugcaaggagaacaucgacaccucccagggcgacgucaccuucgccggcgacggccaggaggccacccccuggaaggacuucgcccuccucacccagugcaaccacaccaucaugaccaucggcaccuucggcuucugggccgccuaccucgccggcggcgacaccgucuaccucgccaacuucacccuccccgacuccgaguuccucaagaucuucaagcccgaggccgccuuccuccccgagugggucggcaucaacgccgaccucuccccccucuggacccucgccaagcccuga

SEQ ID NO: 1711 - RNA, 1098 nt, Artificial Sequence
  derived and/or modified sequence opt3 from FUT1__Homo_sapiens__AAA52639
auguggcugagaagccacaggcagcucugccuugccuuccuguuggugugugucuuauccguuaucuuuuuccugcauauucaccaagacucuuuuccccauggccuagggcucucaauacugugcccugaucggcgccuugugaccccaccgguagcuaucuucugucugcccggaacagcaauggguccuaacgccaguagcuccugcccacagcaccccgcgucuuugucgggcacuuggacgguguacccuaaugggcgauuuggaaaccagaugggccaguaugcuacccuccuggcccuggcacaacucaauggucguagagccuucauuuuaccagcuaugcaugcagcccuggcucccgucuuuaggaucacacuuccuguguuggccccagagguugacucacggacuccguggcgcgaacugcagcuacacgauuggaugagcgaggaauacgcggaccucagagaucccuuccugaaacuuaguggguuuccuuguuccuggaccuucuuucaccaucugagggagcagauucggcgcgaguucacauugcacgaccaucuccgagaagaggcacagucugugcugggacaauuaagacugggcaggaccggcgaucggccacguacuuuugucggggugcacguacgcagaggagacuaucuccagguuaugccccagagguggaaggguguggucggcgauagcgccuaccuucggcaggcuauggacugguuccgagcccgccacgaagcaccuguguucguggucacauccaacgggauggaguggugcaaggaaaauaucgauaccucacaaggagacguuacguuugcuggcgauggucaggaggccacuccauggaaagacuucgcgcuguugacccaguguaaccauacaauaaugacuaucgggaccuuuggauucugggccgcauaucuagcuggcggcgacacaguguaccuggccaauuuuacccuccccgauagugaguuccugaagauuuuuaaaccggaagcugccuuccuuccugaguggguagggaucaacgcagaccugagccccuuguggacgcucgccaagccauga

SEQ ID NO: 1712 - RNA, 1098 nt, Artificial Sequence
  derived and/or modified sequence opt4 from FUT1__Homo_sapiens__AAA52639
auguggcugagaagccacagacagcugugccuggccuuccugcuggugugcgugcugagcgugaucuucuuccugcacauccaccaggacagcuucccccacggccugggccugagcauccugugccccgacagaagacuggugaccccccccguggccaucuucugccugcccggcaccgccaugggccccaacgccagcagcagcugcccccagcaccccgccagccugagcggcaccuggaccguguaccccaacggcagauucggcaaccagaugggccaguacgccacccugcuggcccuggcccagcugaacggcagaagagccuucauccugcccgccaugcacgccgcccuggcccccguguucagaaucacccugcccgugcuggcccccgagguggacagcagaacccccuggagagagcugcagcugcacgacuggaugagcgaggaguacgccgaccugagagaccccuuccugaagcugagcggcuuccccugcagcuggaccuucuuccaccaccugagagagcagaucagaagagaguucacccugcacgaccaccugagagaggaggcccagagcgugcugggccagcugagacugggcagaaccggcgacagacccagaaccuucgugggcgugcacgugagaagaggcgacuaccugcaggugaugccccagagauggaagggcguggugggcgacagcgccuaccugagacaggccauggacugguucagagccagacacgaggcccccguguucguggugaccagcaacggcauggaguggugcaaggagaacaucgacaccagccagggcgacgugaccuucgccggcgacggccaggaggccacccccuggaaggacuucgcccugcugacccagugcaaccacaccaucaugaccaucggcaccuucggcuucugggccgccuaccuggccggcggcgacaccguguaccuggccaacuucacccugcccgacagcgaguuccugaagaucuucaagcccgaggccgccuuccugcccgagugggugggcaucaacgccgaccugagcccccuguggacccuggccaagcccuga

SEQ ID NO: 1713 - RNA, 1098 nt, Artificial Sequence
  derived and/or modified sequence opt5 from FUT1__Homo_sapiens__AAA52639
auguggcugagaagccaccggcagcucugccuggccuuccuucugguguguguccucuccguuaucuuuuuccugcauauucaccaagacucuuuuccccauggccuugggcugagcauccucugcccugaucgcagacuggugaccccgcccguggcuauuuucugucugccuggaacagccaugggccccaacgcguccucuagcugcccucagcaccccgcuucccucucugggacguggaccgucuacccuaauggacgguuuggcaaccagauggggcaguaugccacacugcuugcccuggcucaacucaauggacgcagagccuucauccugccggcuaugcaugccgcgcuugcccccguguuucggauuacccugccuguucucgcucccgagguggacagccgcacaccuuggagagaacugcagcugcacgauuggauguccgaggaauacgccgaccuccgggaucccuuccugaaacuuagcggcuuuccguguucuuggaccuucuuucaccaucugcgcgagcagaucagacgggaguucacacuccacgaccaucugcgcgaagaggcucaguccguccuuggccaacugagacucgggcggaccggagaucgcccuagaacguuugugggcguucacgugcggagaggggacuaucugcaggucaugccccagcgcuggaagggaguggugggcgauagcgccuaccugcggcaggcgauggacugguucagagcccgccacgaagcuccugucuucguugugaccucuaacgggauggaguggugcaaggaaaauaucgauacaucccaaggagacgugaccuuugccggcgauggccaggaggcuacacccuggaaagacuucgcccuccugacccaguguaaccauacgauuaugacaaucgggaccuuuggauucugggccgcuuaucuugcgggcggggacacagucuaccuggccaauuuuacccuccccgauagcgaguuccugaagauuuuuaaaccugaagcugccuuccuuccggagugggugggaaucaacgccgaccugucuccccucuggacccuggcuaagccuuga

SEQ ID NO: 1714 - protein, 459 aa, Artificial Sequence
  G250__Homo_sapiens__Q16790
MAPLCPSPWLPLLIPAPAPGLTVQLLLSLLLLVPVHPQRLPRMQEDSPLGGGSSGEDDPLGEEDLPSEEDSPREEDPPGEEDLPGEEDLPGEEDLPEVKPKSEEEGSLKLEDLPTVEAPGDPQEPQNNAHRDKEGDDQSHWRYGGDPPWPRVSPACAGRFQSPVDIRPQLAAFCPALRPLELLGFQLPPLPELRLRNNGHSVQLTLPPGLEMALGPGREYRALQLHLHWGAAGRPGSEHTVEGHRFPAEIHVVHLSTAFARVDEALGRPGGLAVLAAFLEEGPEENSAYEQLLSRLEEIAEEGSETQVPGLDISALLPSDFSRYFQYEGSLTTPPCAQGVIWTVFNQTVMLSAKQLHTLSDTLWGPGDSRLQLNFRATQPLNGRVIEASFPAGVDSSPRAAEPVQLNSCLAAGDILALVFGLLFAVTSVAFLVQMRRQHRRGTKGGVSYRPAEVAETGA

SEQ ID NO: 1715 - RNA, 1380 nt, Artificial Sequence
  G250__Homo_sapiens__EAW58359
auggcuccccugugccccagccccuggcucccucuguugaucccggccccugcuccaggccucacugugcaacugcugcugucacugcugcuucuggugccuguccauccccagagguugccccggaugcaggaggauucccccuugggaggaggcucuucuggggaagaugacccacugggcgaggaggaucugcccagugaagaggauucacccagagaggaggauccacccggagaggaggaucuaccuggagaggaggaucuaccuggagaggaggaucuaccugaaguuaagccuaaaucagaagaagagggcucccugaaguuagaggaucuaccuacuguugaggcuccuggagauccucaagaaccccagaauaaugcccacagggacaaagaaggggaugaccagagucauuggcgcuauggaggcgacccgcccuggccccggguguccccagccugcgcgggccgcuuccaguccccgguggauauccgcccccagcucgccgccuucugcccggcccugcgcccccuggaacuccugggcuuccagcucccgccgcucccagaacugcgccugcgcaacaauggccacagugugcaacugacccugccuccugggcuagagauggcucugggucccgggcgggaguaccgggcucugcagcugcaucugcacuggggggcugcaggucguccgggcucggagcacacuguggaaggccaccguuucccugccgagauccacgugguucaccucagcaccgccuuugccagaguugacgaggccuuggggcgcccgggaggccuggccguguuggccgccuuucuggaggagggcccggaagaaaacagugccuaugagcaguugcugucucgcuuggaagaaaucgcugaggaaggcucagagacucaggucccaggacuggacauaucugcacuccugcccucugacuucagccgcuacuuccaauaugaggggucucugacuacaccgcccugugcccagggugucaucuggacuguguuuaaccagacagugaugcugagugcuaagcagcuccacacccucucugacacccuguggggaccuggugacucucggcuacagcugaacuuccgagcgacgcagccuuugaaugggcgagugauugaggccuccuucccugcuggaguggacagcaguccucgggcugcugagccaguccagcugaauuccugccuggcugcuggugacauccuagcccugguuuuuggccuccuuuuugcugucaccagcgucgcguuccuugugcagaugagaaggcagcacagaaggggaaccaaagggggugugagcuaccgcccagcagagguagccgagacuggagccuag

SEQ ID NO: 1716 - RNA, 1380 nt, Artificial Sequence
  derived and/or modified sequence opt1 from G250__Homo_sapiens__EAW58359
auggcgccccugugcccgagccccuggcucccccugcugauccccgccccggcccccggccucaccgugcagcugcugcucucccugcugcuccugguccccgugcacccccagcgccugccgcggaugcaggaggacagcccccucgggggcggguccagcggcgaggacgacccccugggggaggaggaccugcccuccgaggaggacagcccgcgcgaggaggacccgcccggcgaggaggaccuccccggcgaggaggaccugcccggggaggaggaccugcccgaggugaagcccaaguccgaggaggagggcagccucaagcuggaggaccugcccaccgucgaggccccgggggacccccaggagccccagaacaacgcccaccgggacaaggagggcgacgaccagucccacuggcgcuacgggggcgacccgcccuggccccgggugagccccgccugcgccggccgcuuccagucccccguggacauccggccgcagcucgcggccuucugccccgcccugcgcccccuggagcuccugggguuccagcugccgccccuccccgagcugcggcugcgcaacaacggccacagcguccagcucacgcugcccccggggcuggagauggcccucggccccggccgggaguaccgcgcgcugcagcugcaccuccacuggggcgccgccgggcggcccggguccgagcacaccguggagggccaccgcuuccccgccgagauccacgugguccaccugagcaccgccuucgcgcggguggacgaggcccuggggcgcccgggcggccucgccgugcuggccgccuuccuggaggaggggcccgaggagaacuccgcguacgagcagcuccugagccggcuggaggagaucgccgaggagggcuccgagacccagguccccgggcucgacaucagcgcccugcugcccuccgacuucagccgcuacuuccaguacgagggcagccucacgaccccgcccugcgcccagggggugaucuggaccguguucaaccagaccgucaugcuguccgccaagcagcugcacacgcugagcgacacccucuggggccccggcgacucccggcugcagcugaacuuccgcgcgacccagccccucaacgggcgggugaucgaggccagcuucccggccggcguggacuccagcccccgcgccgccgagcccguccagcugaacuccugccuggcggccggggacauccucgcccugguguucggccuccuguucgccgugaccagcgucgcguuccuggugcagaugcgccggcagcaccgccgggggacgaagggcggcguguccuaccgccccgccgaggucgccgagaccggggccuga

SEQ ID NO: 1717 - RNA, 1380 nt, Artificial Sequence
  derived and/or modified sequence opt2 from G250__Homo_sapiens__EAW58359
auggccccccucugccccucccccuggcucccccuccucauccccgcccccgcccccggccucaccguccagcuccuccucucccuccuccuccucguccccguccacccccagcgccucccccgcaugcaggaggacuccccccucggcggcggcuccuccggcgaggacgacccccucggcgaggaggaccuccccuccgaggaggacuccccccgcgaggaggacccccccggcgaggaggaccuccccggcgaggaggaccuccccggcgaggaggaccuccccgaggucaagcccaaguccgaggaggagggcucccucaagcucgaggaccuccccaccgucgaggcccccggcgacccccaggagccccagaacaacgcccaccgcgacaaggagggcgacgaccagucccacuggcgcuacggcggcgacccccccuggccccgcgucucccccgccugcgccggccgcuuccagucccccgucgacauccgcccccagcucgccgccuucugccccgcccuccgcccccucgagcuccucggcuuccagcuccccccccuccccgagcuccgccuccgcaacaacggccacuccguccagcucacccucccccccggccucgagauggcccucggccccggccgcgaguaccgcgcccuccagcuccaccuccacuggggcgccgccggccgccccggcuccgagcacaccgucgagggccaccgcuuccccgccgagauccacgucguccaccucuccaccgccuucgcccgcgucgacgaggcccucggccgccccggcggccucgccguccucgccgccuuccucgaggagggccccgaggagaacuccgccuacgagcagcuccucucccgccucgaggagaucgccgaggagggcuccgagacccagguccccggccucgacaucuccgcccuccuccccuccgacuucucccgcuacuuccaguacgagggcucccucaccaccccccccugcgcccagggcgucaucuggaccgucuucaaccagaccgucaugcucuccgccaagcagcuccacacccucuccgacacccucuggggccccggcgacucccgccuccagcucaacuuccgcgccacccagccccucaacggccgcgucaucgaggccuccuuccccgccggcgucgacuccuccccccgcgccgccgagcccguccagcucaacuccugccucgccgccggcgacauccucgcccucgucuucggccuccucuucgccgucaccuccgucgccuuccucguccagaugcgccgccagcaccgccgcggcaccaagggcggcgucuccuaccgccccgccgaggucgccgagaccggcgccuga

SEQ ID NO: 1718 - RNA, 1380 nt, Artificial Sequence
  derived and/or modified sequence opt3 from G250__Homo_sapiens__EAW58359
auggcuccccugugcccuagcccauggcucccgcuucugauccccgcuccugcaccaggcuugaccgugcaguuacugcuaucccuccugcuucugguccccguucacccucaaagauugccaaggaugcaggaggacucuccccucgggggagguucaaguggcgaagaugacccucugggggaggaagaucugccaagcgaggaagacuccccgcgggaggaggaucccccuggagaagaggaccucccaggcgaagaggauuuacccggugaggaagaccugccugaggugaagccaaaaucugaagaggaagggucgcuuaaguuggaggaucugcccacaguagaggccccgggagacccucaggaaccccagaacaaugcgcaucgcgauaaagagggcgacgaucaaucacacuggcgauacggcggggacccaccuuggccccgugugagcccagcuugugccggaagauuccagagucccgucgacauuaggccucagcuagcagccuuuugcccagcucuccggccgcuggaacuucuggguuuccaguugcccccucucccagagcugcgcuuaagaaacaauggccauuccgugcaacugacuuugcccccugggcuugaaauggcacugggaccaggcagggaguaucgggccuugcagcuacaucugcacuggggugcugccgggcgccccggaucugagcacacgguugaaggccaccgauuuccggcggagauacaugugguccaccucagcaccgcauucgccagaguggaugaagcucugggcaggccugggggacuugccguacuggcagcuuuucucgaggaagguccagaggagaacuccgccuacgaacagcuccugucacgguuagaggaaaucgcggaggagggcagugaaacacagguucccgggcuggacauuagcgcccuacucccuucugauuucucccguuauuuucaauacgagggaucacugacuacacccccaugugcacagggcgugaucuggaccgucuucaaucagaccgugaugcuuagcgcuaagcaauugcauacucugagugacacacucugggguccuggggauucucgccugcagcuuaacuuuagagccacccagccccugaauggcagggugauugaagccuccuucccagccggagucgacagcucgccgcgggcagccgagccuguucaguugaacucuugccucgcugcgggcgauauccuggcauuaguguuugggcugcuauucgccguaacguccguggcuuuucucguccaaaugcgacgccagcacagaaggggaacuaaagguggcgugucauaucggcccgccgaaguugcagagaccggggccuga

SEQ ID NO: 1719 - RNA, 1380 nt, Artificial Sequence
  derived and/or modified sequence opt4 from G250__Homo_sapiens__EAW58359
auggccccccugugccccagccccuggcugccccugcugauccccgcccccgcccccggccugaccgugcagcugcugcugagccugcugcugcuggugcccgugcacccccagagacugcccagaaugcaggaggacagcccccugggcggcggcagcagcggcgaggacgacccccugggcgaggaggaccugcccagcgaggaggacagccccagagaggaggacccccccggcgaggaggaccugcccggcgaggaggaccugcccggcgaggaggaccugcccgaggugaagcccaagagcgaggaggagggcagccugaagcuggaggaccugcccaccguggaggcccccggcgacccccaggagccccagaacaacgcccacagagacaaggagggcgacgaccagagccacuggagauacggcggcgacccccccuggcccagagugagccccgccugcgccggcagauuccagagccccguggacaucagaccccagcuggccgccuucugccccgcccugagaccccuggagcugcugggcuuccagcugcccccccugcccgagcugagacugagaaacaacggccacagcgugcagcugacccugccccccggccuggagauggcccugggccccggcagagaguacagagcccugcagcugcaccugcacuggggcgccgccggcagacccggcagcgagcacaccguggagggccacagauuccccgccgagauccacguggugcaccugagcaccgccuucgccagaguggacgaggcccugggcagacccggcggccuggccgugcuggccgccuuccuggaggagggccccgaggagaacagcgccuacgagcagcugcugagcagacuggaggagaucgccgaggagggcagcgagacccaggugcccggccuggacaucagcgcccugcugcccagcgacuucagcagauacuuccaguacgagggcagccugaccaccccccccugcgcccagggcgugaucuggaccguguucaaccagaccgugaugcugagcgccaagcagcugcacacccugagcgacacccuguggggccccggcgacagcagacugcagcugaacuucagagccacccagccccugaacggcagagugaucgaggccagcuuccccgccggcguggacagcagccccagagccgccgagcccgugcagcugaacagcugccuggccgccggcgacauccuggcccugguguucggccugcuguucgccgugaccagcguggccuuccuggugcagaugagaagacagcacagaagaggcaccaagggcggcgugagcuacagacccgccgagguggccgagaccggcgccuga

SEQ ID NO: 1720 - RNA, 1380 nt, Artificial Sequence
  derived and/or modified sequence opt5 from G250__Homo_sapiens__EAW58359
auggcuccccugugcccuagcccguggcucccccugcuuaucccugcccccgccccuggccugaccgugcagcuccugcuuucccugcuccugcugguccccguucacccucaaagacucccgcggaugcaggaggacucuccccucgggggaggcagcuccggggaagaugacccucuuggagaggaagaucugcccucugaggaagacagcccucgcgaggaggaucccccgggcgaagaggaccucccuggggaagaggaucugcccggagaggaagaccuuccugaggugaagcccaaauccgaagaggaaggcucucugaagcucgaggaucugcccacaguggaggcgccuggcgacccgcaggaaccccagaacaaugcucauagagauaaagagggggacgaucaaagccacuggcgguacggaggcgacccucccuggccucgcgucucccccgccugugccgggagauuccagagcccgguggacauucggccucagcuggcugccuuuugccccgcucuccgcccucuggaacuucugggauuccagcugcccccucugcccgagcuuagacugcggaacaauggccauucuguucaacucacgcugccgccugggcuggaaauggcccucggacccggccgcgaguauagagcgcugcagcuucaucugcacuggggcgccgcugggcggcccggauccgagcacaccguggaaggccaccgcuuuccugccgagauccaugucgugcaccucagcacagcuuucgccagaguugaugaagcgcuggggcggccgggaggccuugccgugcuggcugccuuucucgaggaagggcccgaggagaacucugcuuacgaacagcugcugucccgccucgaggaaauugccgaggagggaagcgaaacccaggucccuggccuggacaucucugcccuucugcccuccgauuucagcagauauuuucaauacgagggcucccucacaaccccucccugugcucagggggugauuuggacaguguucaaucagaccgucaugcugucugcgaagcaacugcauacgcuuagcgacacccucuggggaccuggcgauucccggcugcagcugaacuuuagagccacacagccccucaaugggcgcguuaucgaagcuagcuucccggccggaguggacucuuccccucgggccgcugagcccgugcagcugaacagcugccuugccgcgggcgauauccuggcucucgucuuugggcugcuguucgccgugaccucuguugccuuucuugugcaaaugagacgccagcaccggagaggcacaaaaggaggcgucagcuaucgcccugcugaaguggccgagaccggggcuuga

SEQ ID NO: 1721 - protein, 138 aa, Artificial Sequence
  GAGE-1__Homo_sapiens__AAA82744
MSWRGRSTYRPRPRRYVEPPEMIGPMRPEQFSDEVEPATPEEGEPATQRQDPAAAQEGEDEGASAGQGPKPEADSQEQGHPQTGCECEDGPDGQEMDPPNPEEVKTPEEEMRSHYVAQTGILWLLMNNCFLNLSPRKP

SEQ ID NO: 1722 - RNA, 417 nt, Artificial Sequence
  GAGE-1__Homo_sapiens__U19142.1
augaguuggcgaggaagaucgaccuaucggccuagaccaagacgcuacguagagccuccugaaaugauugggccuaugcggcccgagcaguucagugaugaaguggaaccagcaacaccugaagaaggggaaccagcaacucaacgucaggauccugcagcugcucaggagggagaggaugagggagcaucugcaggucaagggccgaagccugaagcugauagccaggaacagggucacccacagacugggugugagugugaagaugguccugaugggcaggagauggacccgccaaauccagaggaggugaaaacgccugaagaagagaugaggucucacuauguugcccagacugggauucucuggcuuuuaaugaacaauugcuucuuaaaucuuuccccacggaaaccuuga

SEQ ID NO: 1723 - RNA, 417 nt, Artificial Sequence
  derived and/or modified sequence opt1 from GAGE-1__Homo_sapiens__U19142.1
augagcuggcgcggccgguccaccuaccgcccccggccgcgccgguacguggagccgcccgagaugaucgggcccaugcgccccgagcaguucagcgacgaggucgagcccgccacccccgaggagggcgagcccgccacgcagcggcaggacccggcggccgcccaggagggggaggacgagggcgccuccgccgggcagggccccaagcccgaggcggacagccaggagcagggccacccccagaccgggugcgagugcgaggacggcccggacgggcaggagauggacccgcccaaccccgaggaggugaagacccccgaggaggagaugcgcucccacuacguggcccagaccggcauccuguggcuccugaugaacaacugcuuccugaaccucagcccccggaagcccuga

SEQ ID NO: 1724 - RNA, 417 nt, Artificial Sequence
  derived and/or modified sequence opt2 from GAGE-1__Homo_sapiens__U19142.1
auguccuggcgcggccgcuccaccuaccgcccccgcccccgccgcuacgucgagccccccgagaugaucggccccaugcgccccgagcaguucuccgacgaggucgagcccgccacccccgaggagggcgagcccgccacccagcgccaggaccccgccgccgcccaggagggcgaggacgagggcgccuccgccggccagggccccaagcccgaggccgacucccaggagcagggccacccccagaccggcugcgagugcgaggacggccccgacggccaggagauggacccccccaaccccgaggaggucaagacccccgaggaggagaugcgcucccacuacgucgcccagaccggcauccucuggcuccucaugaacaacugcuuccucaaccucuccccccgcaagcccuga

SEQ ID NO: 1725 - RNA, 417 nt, Artificial Sequence
  derived and/or modified sequence opt3 from GAGE-1__Homo_sapiens__U19142.1
augagcuggagaggcagguccaccuaccggccccgcccucgacguuauguggagccaccggaaaugaucgggcccaugagaccugagcaguucucugacgaagucgagccagccacacccgaagagggagagccugcuacucaaaggcaggacccagcagccgcgcaggaaggugaggacgaaggcgcuucagccgggcagggacccaagccugaggcagauagucaagagcagggccacccacagacggguugcgaaugugaggacgggccggauggacaggaaauggaucccccuaacccagaggaaguuaaaacccccgaggaggaaaugcggagccauuacguggcccaaacaggcauucuguggcuccuuaugaauaacugcuuucugaauuuguccccucgcaagccauga

SEQ ID NO: 1726 - RNA, 417 nt, Artificial Sequence
  derived and/or modified sequence opt4 from GAGE-1__Homo_sapiens__U19142.1
augagcuggagaggcagaagcaccuacagacccagacccagaagauacguggagccccccgagaugaucggccccaugagacccgagcaguucagcgacgagguggagcccgccacccccgaggagggcgagcccgccacccagagacaggaccccgccgccgcccaggagggcgaggacgagggcgccagcgccggccagggccccaagcccgaggccgacagccaggagcagggccacccccagaccggcugcgagugcgaggacggccccgacggccaggagauggacccccccaaccccgaggaggugaagacccccgaggaggagaugagaagccacuacguggcccagaccggcauccuguggcugcugaugaacaacugcuuccugaaccugagccccagaaagcccuga

SEQ ID NO: 1727 - RNA, 417 nt, Artificial Sequence
  derived and/or modified sequence opt5 from GAGE-1__Homo_sapiens__U19142.1
augagcuggagaggccgguccaccuaccgccccagaccucggcgcuauguggagccgcccgaaaugaucgggccuaugagacccgagcaguucucugacgaagucgagccugccacacccgaagagggagagccugcuacgcaacggcaggacccggccgcggcucaggaaggcgaggacgaaggggccagcgccggacagggccccaagccugaggcugauucccaagagcaggggcacccccagaccggaugcgaaugugaggacggcccugauggccaggaaauggaucccccgaacccugaggaaguuaaaacacccgaggaggaaaugcgcucucauuacguggcccaaaccgggauucuguggcuccugaugaauaacugcuuucuuaaucugagcccuagaaagcccuga

SEQ ID NO: 1728 - protein, 116 aa, Artificial Sequence
  GAGE-2__Homo_sapiens__Q6NT46
MSWRGRSTYRPRPRRYVEPPEMIGPMRPEQFSDEVEPATPEEGEPATQRQDPAAAQEGQDEGASAGQGPKPEAHSQEQGHPQTGCECEDGPDGQEMDPPNPEEVKTPEEGEKQSQC

SEQ ID NO: 1729 - RNA, 351 nt, Artificial Sequence
  GAGE-2__Homo_sapiens__AAH69397
augaguuggcgaggaagaucgaccuaucggccuagaccaagacgcuacguagagccuccugaaaugauugggccuaugcggcccgagcaguucagugaugaaguggaaccagcaacaccugaagaaggggaaccagcaacucaacgucaggauccugcagcugcucaggagggacaggaugagggagcaucugcaggucaagggccgaagccugaagcucauagccaggaacagggucacccacagacugggugugagugugaagaugguccugaugggcaggagauggacccgccaaauccagaggaggugaaaacgccugaagaaggugaaaagcaaucacaguguuaa

SEQ ID NO: 1730 - RNA, 351 nt, Artificial Sequence
  derived and/or modified sequence opt1 from GAGE-2__Homo_sapiens__AAH69397
augagcuggcgcggccgguccaccuaccgcccccggccgcgccgguacguggagccgcccgagaugaucgggcccaugcgccccgagcaguucagcgacgaggucgagcccgccacccccgaggagggcgagcccgccacgcagcggcaggacccggcggccgcccaggaggggcaggacgagggcgccuccgccgggcagggccccaagcccgaggcgcacagccaggagcagggccacccccagaccgggugcgagugcgaggacggcccggacgggcaggagauggacccgcccaaccccgaggaggugaagacccccgaggagggcgagaagcagucccagugcuga

SEQ ID NO: 1731 - RNA, 351 nt, Artificial Sequence
  derived and/or modified sequence opt2 from GAGE-2__Homo_sapiens__AAH69397
auguccuggcgcggccgcuccaccuaccgcccccgcccccgccgcuacgucgagccccccgagaugaucggccccaugcgccccgagcaguucuccgacgaggucgagcccgccacccccgaggagggcgagcccgccacccagcgccaggaccccgccgccgcccaggagggccaggacgagggcgccuccgccggccagggccccaagcccgaggcccacucccaggagcagggccacccccagaccggcugcgagugcgaggacggccccgacggccaggagauggacccccccaaccccgaggaggucaagacccccgaggagggcgagaagcagucccagugcuga

SEQ ID NO: 1732 - RNA, 351 nt, Artificial Sequence
  derived and/or modified sequence opt3 from GAGE-2__Homo_sapiens__AAH69397
augagcuggagaggcagguccaccuaccggccccgcccucgacguuauguggagccaccggaaaugaucgggcccaugagaccugagcaguucucugacgaagucgagccagccacacccgaagagggagagccugcuacucaaaggcaggauccagcagccgcgcaggaaggucaggacgagggcgcuucagccgggcaaggacccaagccugaagcacacagucaggagcagggccauccacagacggguugcgagugugaagaugggccggacggacaagagauggaucccccuaacccagaagagguuaaaacccccgaagagggcgagaagcagagccagugcuga

SEQ ID NO: 1733 - RNA, 351 nt, Artificial Sequence
  derived and/or modified sequence opt4 from GAGE-2__Homo_sapiens__AAH69397
augagcuggagaggcagaagcaccuacagacccagacccagaagauacguggagccccccgagaugaucggccccaugagacccgagcaguucagcgacgagguggagcccgccacccccgaggagggcgagcccgccacccagagacaggaccccgccgccgcccaggagggccaggacgagggcgccagcgccggccagggccccaagcccgaggcccacagccaggagcagggccacccccagaccggcugcgagugcgaggacggccccgacggccaggagauggacccccccaaccccgaggaggugaagacccccgaggagggcgagaagcagagccagugcuga

SEQ ID NO: 1734 - RNA, 351 nt, Artificial Sequence
  derived and/or modified sequence opt5 from GAGE-2__Homo_sapiens__AAH69397
augagcuggagaggccgguccaccuaccgccccagaccucggcgcuauguggagccgcccgaaaugaucgggccuaugagacccgagcaguucucugacgaagucgagccugccacacccgaagagggagagccugcuacgcaacggcaggauccggccgcggcucaggaaggccaggacgagggggccagcgccggacaaggccccaagccugaagcucacucccaggagcaggggcauccccagaccggaugcgagugugaagauggcccugacggccaagagauggaucccccgaacccugaagagguuaaaacacccgaagagggggagaagcagucucagugcuga

SEQ ID NO: 1735 - protein, 118 aa, Artificial Sequence
  GAGE-3__Homo_sapiens__Q13067
MNLSRGKSTYYWPRPRRYVQPPEVIGPMRPEQFSDEVEPATPEEGEPATQRQDPAAAQEGEDEGASAGQGPKPEADSQEQGHPQTGCECEDGPDGQEMDPPNPEEVKTPEEGEKQSQC

SEQ ID NO: 1736 - RNA, 357 nt, Artificial Sequence
  GAGE-3__Homo_sapiens__AAA82746
augaaucucaguagaggaaaaucgaccuauuauuggccuagaccaaggcgcuauguacagccuccugaagugauugggccuaugcggcccgagcaguucagugaugaaguggaaccagcaacaccugaagaaggggaaccagcaacucaacgucaggauccugcagcugcucaggagggagaggaugagggagcaucugcaggucaagggccgaagccugaagcugauagccaggaacagggucacccacagacugggugugagugugaagaugguccugaugggcaggagauggacccgccaaauccagaggaggugaaaacgccugaagaaggugaaaagcaaucacaguguuaa

SEQ ID NO: 1737 - RNA, 357 nt, Artificial Sequence
  derived and/or modified sequence opt1 from GAGE-3__Homo_sapiens__AAA82746
augaaccugagccgcggcaaguccaccuacuacuggccccggccgcgccgguacgugcagccgcccgaggucaucgggcccaugcgccccgagcaguucagcgacgagguggagcccgccacccccgaggagggcgagcccgccacgcagcggcaggacccggcggccgcccaggagggggaggacgagggcgccuccgccgggcagggccccaagcccgaggcggacagccaggagcagggccacccccagaccgggugcgagugcgaggacggcccggacgggcaggagauggacccgcccaaccccgaggaggugaagacccccgaggagggcgagaagcagucccagugcuga

SEQ ID NO: 1738 - RNA, 357 nt, Artificial Sequence
  derived and/or modified sequence opt2 from GAGE-3__Homo_sapiens__AAA82746
augaaccucucccgcggcaaguccaccuacuacuggccccgcccccgccgcuacguccagccccccgaggucaucggccccaugcgccccgagcaguucuccgacgaggucgagcccgccacccccgaggagggcgagcccgccacccagcgccaggaccccgccgccgcccaggagggcgaggacgagggcgccuccgccggccagggccccaagcccgaggccgacucccaggagcagggccacccccagaccggcugcgagugcgaggacggccccgacggccaggagauggacccccccaaccccgaggaggucaagacccccgaggagggcgagaagcagucccagugcuga

SEQ ID NO: 1739 - RNA, 357 nt, Artificial Sequence
  derived and/or modified sequence opt3 from GAGE-3__Homo_sapiens__AAA82746
augaaccugagcagaggcaaguccaccuacuauuggcccaggccucggcgcuacgugcagccaccggaggucaucgggcccaugcgaccugaacaauucucugacgagguugaaccagccacacccgaggaaggagagccugcuacucagcgucaggacccagcagccgcgcaggagggugaagacgagggcgcuucagccgggcaaggacccaaaccugaagcagauagucaggagcagggccacccacagacggguugcgagugugaagacgggccggauggacaagagauggaucccccuaauccagaagaggugaagacccccgaagagggcgagaaacagagccagugcuga

SEQ ID NO: 1740 - RNA, 357 nt, Artificial Sequence
  derived and/or modified sequence opt4 from GAGE-3__Homo_sapiens__AAA82746
augaaccugagcagaggcaagagcaccuacuacuggcccagacccagaagauacgugcagccccccgaggugaucggccccaugagacccgagcaguucagcgacgagguggagcccgccacccccgaggagggcgagcccgccacccagagacaggaccccgccgccgcccaggagggcgaggacgagggcgccagcgccggccagggccccaagcccgaggccgacagccaggagcagggccacccccagaccggcugcgagugcgaggacggccccgacggccaggagauggacccccccaaccccgaggaggugaagacccccgaggagggcgagaagcagagccagugcuga

SEQ ID NO: 1741 - RNA, 357 nt, Artificial Sequence
  derived and/or modified sequence opt5 from GAGE-3__Homo_sapiens__AAA82746
augaaccugagcagaggcaaguccaccuacuauuggccccggccucgcagauacgugcagccgcccgaggucaucgggccuaugcggcccgaacaauucucugacgagguugaaccugccacacccgaggaaggagagccugcuacgcagcgccaggacccggccgcggcucaggagggcgaagacgagggggccagcgccggacaaggccccaaaccugaagcugauucccaggagcaggggcacccccagaccggaugcgagugugaagacggcccugauggccaagagauggaucccccgaauccugaagaggugaagacacccgaagagggggagaaacagucucagugcuga

SEQ ID NO: 1742 - protein, 117 aa, Artificial Sequence
  GAGE-4__Homo_sapiens__Q13068
MSWRGRSTYYWPRPRRYVQPPEMIGPMRPEQFSDEVEPATPEEGEPATQRQDPAAAQEGEDEGASAGQGPKPEADSQEQGHPQTGCECEDGPDGQEMDPPNPEEVKTPEEGEGQSQC

SEQ ID NO: 1743 - RNA, 354 nt, Artificial Sequence
  GAGE-4__Homo_sapiens__AAH69470
augaguuggcgaggaagaucgaccuauuauuggccuagaccaaggcgcuauguacagccuccugaaaugauugggccuaugcggcccgagcaguucagugaugaaguggaaccagcaacaccugaagaaggggaaccagcaacucaacgucaggauccugcagcugcucaggagggagaggaugagggagcaucugcaggucaagggccgaagccugaagcugauagccaggaacagggucacccacagacugggugugagugugaagaugguccugaugggcaggagauggacccgccaaauccagaggaggugaaaacgccugaagaaggugaagggcaaucacaguguuaa

SEQ ID NO: 1744 - RNA, 354 nt, Artificial Sequence
  derived and/or modified sequence opt1 from GAGE-4__Homo_sapiens__AAH69470
augagcuggcgcggccgguccaccuacuacuggccccgcccgcggcgcuacgugcagccgcccgagaugaucgggcccaugcggcccgagcaguucagcgacgaggucgagcccgccacccccgaggagggcgagcccgccacgcagcgccaggacccggcggccgcccaggagggggaggacgagggcgccuccgccgggcagggccccaagcccgaggcggacagccaggagcagggccacccccagaccgggugcgagugcgaggacggcccggacgggcaggagauggacccgcccaaccccgaggaggugaagacccccgaggagggcgaggggcagucccagugcuga

SEQ ID NO: 1745 - RNA, 354 nt, Artificial Sequence
  derived and/or modified sequence opt2 from GAGE-4__Homo_sapiens__AAH69470
auguccuggcgcggccgcuccaccuacuacuggccccgcccccgccgcuacguccagccccccgagaugaucggccccaugcgccccgagcaguucuccgacgaggucgagcccgccacccccgaggagggcgagcccgccacccagcgccaggaccccgccgccgcccaggagggcgaggacgagggcgccuccgccggccagggccccaagcccgaggccgacucccaggagcagggccacccccagaccggcugcgagugcgaggacggccccgacggccaggagauggacccccccaaccccgaggaggucaagacccccgaggagggcgagggccagucccagugcuga

SEQ ID NO: 1746 - RNA, 354 nt, Artificial Sequence
  derived and/or modified sequence opt3 from GAGE-4__Homo_sapiens__AAH69470
augagcuggagaggcagguccaccuacuauuggccccggccucgccgauacgugcagccaccggagaugaucgggcccaugcguccugaacaauucucugacgaggucgaaccagccacacccgaggaaggagagccugcuacucagagacaggacccagcagccgcgcaggagggugaagacgagggcgcuucagccgggcaaggacccaagccugaagcagauagucaggagcagggccacccacagacggguugcgagugugaagacgggccggauggacaagagauggaucccccuaacccagaagagguuaaaacccccgaagagggcgagggccagagccagugcuga

SEQ ID NO: 1747 - RNA, 354 nt, Artificial Sequence
  derived and/or modified sequence opt4 from GAGE-4__Homo_sapiens__AAH69470
augagcuggagaggcagaagcaccuacuacuggcccagacccagaagauacgugcagccccccgagaugaucggccccaugagacccgagcaguucagcgacgagguggagcccgccacccccgaggagggcgagcccgccacccagagacaggaccccgccgccgcccaggagggcgaggacgagggcgccagcgccggccagggccccaagcccgaggccgacagccaggagcagggccacccccagaccggcugcgagugcgaggacggccccgacggccaggagauggacccccccaaccccgaggaggugaagacccccgaggagggcgagggccagagccagugcuga

SEQ ID NO: 1748 - RNA, 354 nt, Artificial Sequence
  derived and/or modified sequence opt5 from GAGE-4__Homo_sapiens__AAH69470
augagcuggagaggccgguccaccuacuauuggccccgcccuagacgguacgugcagccgcccgagaugaucgggccuaugcgccccgaacaauucucugacgaggucgaaccugccacacccgaggaaggagagccugcuacgcagagacaggacccggccgcggcucaggagggcgaagacgagggggccagcgccggacaaggccccaagccugaagcugauucccaggagcaggggcacccccagaccggaugcgagugugaagacggcccugauggccaagagauggaucccccgaacccugaagagguuaaaacacccgaagagggggagggacagucucagugcuga

SEQ ID NO: 1749 - protein, 117 aa, Artificial Sequence
  GAGE-5__Homo_sapiens__Q13069
MSWRGRSTYYWPRPRRYVQPPEVIGPMRPEQFSDEVEPATPEEGEPATQRQDPAAAQEGEDEGASAGQGPKPEADSQEQGHPQTGCECEDGPDGQEMDPPNPEEVKTPEEGEKQSQC

SEQ ID NO: 1750 - RNA, 354 nt, Artificial Sequence
  GAGE-5__Homo_sapiens__AAA82748
augaguuggcgaggaagaucgaccuauuauuggccuagaccaaggcgcuauguacagccuccugaagugauugggccuaugcggcccgagcaguucagugaugaaguggaaccagcaacaccugaagaaggggaaccagcaacucaacgucaggauccugcagcugcucaggagggagaggaugagggagcaucugcaggucaagggccgaagccugaagcugauagccaggaacagggucacccacagacugggugugagugugaagaugguccugaugggcaggagauggacccgccaaauccagaggaggugaaaacgccugaagaaggugaaaagcaaucacaguguuaa

SEQ ID NO: 1751 - RNA, 354 nt, Artificial Sequence
  derived and/or modified sequence opt1 from GAGE-5__Homo_sapiens__AAA82748
augagcuggcgcggccgguccaccuacuacuggccccgcccgcggcgcuacgugcagccgcccgaggucaucgggcccaugcggcccgagcaguucagcgacgagguggagcccgccacccccgaggagggcgagcccgccacgcagcgccaggacccggcggccgcccaggagggggaggacgagggcgccuccgccgggcagggccccaagcccgaggcggacagccaggagcagggccacccccagaccgggugcgagugcgaggacggcccggacgggcaggagauggacccgcccaaccccgaggaggugaagacccccgaggagggcgagaagcagucccagugcuga

SEQ ID NO: 1752 - RNA, 354 nt, Artificial Sequence
  derived and/or modified sequence opt2 from GAGE-5__Homo_sapiens__AAA82748
auguccuggcgcggccgcuccaccuacuacuggccccgcccccgccgcuacguccagccccccgaggucaucggccccaugcgccccgagcaguucuccgacgaggucgagcccgccacccccgaggagggcgagcccgccacccagcgccaggaccccgccgccgcccaggagggcgaggacgagggcgccuccgccggccagggccccaagcccgaggccgacucccaggagcagggccacccccagaccggcugcgagugcgaggacggccccgacggccaggagauggacccccccaaccccgaggaggucaagacccccgaggagggcgagaagcagucccagugcuga

SEQ ID NO: 1753 - RNA, 354 nt, Artificial Sequence
  derived and/or modified sequence opt3 from GAGE-5__Homo_sapiens__AAA82748
augagcuggagaggcagguccaccuacuauuggccccggccucgccgauacgugcagccaccggaggucaucgggcccaugcguccugaacaauucucugacgagguugaaccagccacacccgaggaaggagagccugcuacucagagacaggacccagcagccgcgcaggagggugaagacgagggcgcuucagccgggcaaggacccaagccugaagcagauagucaggagcagggccacccacagacggguugcgagugugaagacgggccggauggacaagagauggaucccccuaacccagaagaggugaaaacccccgaagagggcgagaagcagagccagugcuga

SEQ ID NO: 1754 - RNA, 354 nt, Artificial Sequence
  derived and/or modified sequence opt4 from GAGE-5__Homo_sapiens__AAA82748
augagcuggagaggcagaagcaccuacuacuggcccagacccagaagauacgugcagccccccgaggugaucggccccaugagacccgagcaguucagcgacgagguggagcccgccacccccgaggagggcgagcccgccacccagagacaggaccccgccgccgcccaggagggcgaggacgagggcgccagcgccggccagggccccaagcccgaggccgacagccaggagcagggccacccccagaccggcugcgagugcgaggacggccccgacggccaggagauggacccccccaaccccgaggaggugaagacccccgaggagggcgagaagcagagccagugcuga

SEQ ID NO: 1755 - RNA, 354 nt, Artificial Sequence
  derived and/or modified sequence opt5 from GAGE-5__Homo_sapiens__AAA82748
augagcuggagaggccgguccaccuacuauuggccccgcccuagacgguacgugcagccgcccgaggucaucgggccuaugcgccccgaacaauucucugacgagguugaaccugccacacccgaggaaggagagccugcuacgcagagacaggacccggccgcggcucaggagggcgaagacgagggggccagcgccggacaaggccccaagccugaagcugauucccaggagcaggggcacccccagaccggaugcgagugugaagacggcccugauggccaagagauggaucccccgaacccugaagaggugaaaacacccgaagagggggagaagcagucucagugcuga

SEQ ID NO: 1756 - protein, 117 aa, Artificial Sequence
  GAGE-6__Homo_sapiens__Q13070
MSWRGRSTYYWPRPRRYVQPPEVIGPMRPEQFSDEVEPATPEEGEPATQRQDPAAAQEGEDEGASAGQGPKPEADSQEQGHPQTGCECEDGPDGQEVDPPNPEEVKTPEEGEKQSQC

SEQ ID NO: 1757 - RNA, 354 nt, Artificial Sequence
  GAGE-6__Homo_sapiens__AAA82749
augaguuggcgaggaagaucgaccuauuauuggccuagaccaaggcgcuauguacagccuccugaagugauugggccuaugcggcccgagcaguucagugaugaaguggaaccagcaacaccugaagaaggggaaccagcaacucaacgucaggauccugcagcugcucaggagggagaggaugagggagcaucugcaggucaagggccgaagccugaagcugauagccaggaacagggucacccacagacugggugugagugugaagaugguccugaugggcaggagguggacccgccaaauccagaggaggugaaaacgccugaagaaggugaaaagcaaucacaguguuaa

SEQ ID NO: 1758 - RNA, 354 nt, Artificial Sequence
  derived and/or modified sequence opt1 from GAGE-6__Homo_sapiens__AAA82749
augagcuggcgcggccgguccaccuacuacuggccccgcccgcggcgcuacgugcagccgcccgaggucaucgggcccaugcggcccgagcaguucagcgacgagguggagcccgccacccccgaggagggcgagcccgccacgcagcgccaggacccggcggccgcccaggagggggaggacgagggcgccuccgccgggcagggccccaagcccgaggcggacagccaggagcagggccacccccagaccgggugcgagugcgaggacggcccggacgggcaggagguggacccgcccaaccccgaggaggucaagacccccgaggagggcgagaagcagucccagugcuga

SEQ ID NO: 1759 - RNA, 354 nt, Artificial Sequence
  derived and/or modified sequence opt2 from GAGE-6__Homo_sapiens__AAA82749
auguccuggcgcggccgcuccaccuacuacuggccccgcccccgccgcuacguccagccccccgaggucaucggccccaugcgccccgagcaguucuccgacgaggucgagcccgccacccccgaggagggcgagcccgccacccagcgccaggaccccgccgccgcccaggagggcgaggacgagggcgccuccgccggccagggccccaagcccgaggccgacucccaggagcagggccacccccagaccggcugcgagugcgaggacggccccgacggccaggaggucgacccccccaaccccgaggaggucaagacccccgaggagggcgagaagcagucccagugcuga

SEQ ID NO: 1760 - RNA, 354 nt, Artificial Sequence
  derived and/or modified sequence opt3 from GAGE-6__Homo_sapiens__AAA82749
augagcuggagaggcagguccaccuacuauuggccccggccucgccgauacgugcagccaccggaggucaucgggcccaugcguccugaacaauucucugacgagguugaaccagccacacccgaggaaggagagccugcuacucagagacaggacccagcagccgcgcaggagggugaagacgagggcgcuucagccgggcaaggacccaagccugaagcagauagucaggagcagggccacccacagacggguugcgagugugaagacgggccggauggacaagagguggaucccccuaacccagaagagguaaaaacccccgaagagggcgagaagcagagccagugcuga

SEQ ID NO: 1761 - RNA, 354 nt, Artificial Sequence
  derived and/or modified sequence opt4 from GAGE-6__Homo_sapiens__AAA82749
augagcuggagaggcagaagcaccuacuacuggcccagacccagaagauacgugcagccccccgaggugaucggccccaugagacccgagcaguucagcgacgagguggagcccgccacccccgaggagggcgagcccgccacccagagacaggaccccgccgccgcccaggagggcgaggacgagggcgccagcgccggccagggccccaagcccgaggccgacagccaggagcagggccacccccagaccggcugcgagugcgaggacggccccgacggccaggagguggacccccccaaccccgaggaggugaagacccccgaggagggcgagaagcagagccagugcuga

SEQ ID NO: 1762 - RNA, 354 nt, Artificial Sequence
  derived and/or modified sequence opt5 from GAGE-6__Homo_sapiens__AAA82749
augagcuggagaggccgguccaccuacuauuggccccgcccuagacgguacgugcagccgcccgaggucaucgggccuaugcgccccgaacaauucucugacgagguugaaccugccacacccgaggaaggagagccugcuacgcagagacaggacccggccgcggcucaggagggcgaagacgagggggccagcgccggacaaggccccaagccugaagcugauucccaggagcaggggcacccccagaccggaugcgagugugaagacggcccugauggccaagagguggaucccccgaacccugaagaggugaaaacacccgaagagggggagaagcagucucagugcuga

SEQ ID NO: 1763 - protein, 117 aa, Artificial Sequence
  GAGE7b__Homo_sapiens__O76087
MSWRGRSTYYWPRPRRYVQPPEMIGPMRPEQFSDEVEPATPEEGEPATQRQDPAAAQEGEDEGASAGQGPKPEAHSQEQGHPQTGCECEDGPDGQEMDPPNPEEVKTPEEGEKQSQC

SEQ ID NO: 1764 - RNA, 354 nt, Artificial Sequence
  GAGE7b__Homo_sapiens__AAC25989
augaguuggcgaggaagaucgaccuauuauuggccuagaccaaggcgcuauguacagccuccugaaaugauugggccuaugcggcccgagcaguucagugaugaaguggaaccagcaacaccugaagaaggggaaccagcaacucaacgucaggauccugcagcugcucaggagggagaggaugagggagcaucugcaggucaagggccgaagccugaagcucauagccaggaacagggucacccacagacugggugugagugugaagaugguccugaugggcaggagauggacccgccaaauccagaggaggugaaaacgccugaagaaggugaaaagcaaucacaguguuaa

SEQ ID NO: 1765 - RNA, 354 nt, Artificial Sequence
  derived and/or modified sequence opt1 from GAGE7b__Homo_sapiens__AAC25989
augagcuggcgcggccgguccaccuacuacuggccccgcccgcggcgcuacgugcagccgcccgagaugaucgggcccaugcggcccgagcaguucagcgacgaggucgagcccgccacccccgaggagggcgagcccgccacgcagcgccaggacccggcggccgcccaggagggggaggacgagggcgccuccgccgggcagggccccaagcccgaggcgcacagccaggagcagggccacccccagaccgggugcgagugcgaggacggcccggacgggcaggagauggacccgcccaaccccgaggaggugaagacccccgaggagggcgagaagcagucccagugcuga

SEQ ID NO: 1766 - RNA, 354 nt, Artificial Sequence
  derived and/or modified sequence opt2 from GAGE7b__Homo_sapiens__AAC25989
auguccuggcgcggccgcuccaccuacuacuggccccgcccccgccgcuacguccagccccccgagaugaucggccccaugcgccccgagcaguucuccgacgaggucgagcccgccacccccgaggagggcgagcccgccacccagcgccaggaccccgccgccgcccaggagggcgaggacgagggcgccuccgccggccagggccccaagcccgaggcccacucccaggagcagggccacccccagaccggcugcgagugcgaggacggccccgacggccaggagauggacccccccaaccccgaggaggucaagacccccgaggagggcgagaagcagucccagugcuga

SEQ ID NO: 1767 - RNA, 354 nt, Artificial Sequence
  derived and/or modified sequence opt3 from GAGE7b__Homo_sapiens__AAC25989
augagcuggagaggcagguccaccuacuauuggccccggccucgccgauacgugcagccaccggagaugaucgggcccaugcguccugaacaauucucugacgaggucgaaccagccacacccgaggaaggagagccugcuacucagagacaggauccagcagccgcgcaggagggugaagacgagggcgcuucagccgggcaaggacccaagccugaagcacacagucaggagcagggccauccacagacggguugcgagugugaagaugggccggacggacaagagauggaucccccuaacccagaagagguuaaaacccccgaagagggcgagaagcagagccagugcuga

SEQ ID NO: 1768 - RNA, 354 nt, Artificial Sequence
  derived and/or modified sequence opt4 from GAGE7b__Homo_sapiens__AAC25989
augagcuggagaggcagaagcaccuacuacuggcccagacccagaagauacgugcagccccccgagaugaucggccccaugagacccgagcaguucagcgacgagguggagcccgccacccccgaggagggcgagcccgccacccagagacaggaccccgccgccgcccaggagggcgaggacgagggcgccagcgccggccagggccccaagcccgaggcccacagccaggagcagggccacccccagaccggcugcgagugcgaggacggccccgacggccaggagauggacccccccaaccccgaggaggugaagacccccgaggagggcgagaagcagagccagugcuga

SEQ ID NO: 1769 - RNA, 354 nt, Artificial Sequence
  derived and/or modified sequence opt5 from GAGE7b__Homo_sapiens__AAC25989
augagcuggagaggccgguccaccuacuauuggccccgcccuagacgguacgugcagccgcccgagaugaucgggccuaugcgccccgaacaauucucugacgaggucgaaccugccacacccgaggaaggagagccugcuacgcagagacaggauccggccgcggcucaggagggcgaagacgagggggccagcgccggacaaggccccaagccugaagcucacucccaggagcaggggcauccccagaccggaugcgagugugaagauggcccugacggccaagagauggaucccccgaacccugaagagguuaaaacacccgaagagggggagaagcagucucagugcuga

SEQ ID NO: 1770 - protein, 116 aa, Artificial Sequence
  GAGE-8_(GAGE-2D)__Homo_sapiens__Q9UEU5
MSWRGRSTYRPRPRRYVEPPEMIGPMRPEQFSDEVEPATPEEGEPATQRQDPAAAQEGEDEGASAGQGPKPEADSQEQGHPQTGCECEDGPDGQEMDPPNPEEVKTPEEGEKQSQC

SEQ ID NO: 1771 - RNA, 351 nt, Artificial Sequence
  GAGE-8_(GAGE-2D)__Homo_sapiens__AAC33676
augaguuggcgaggaagaucgaccuaucggccuagaccaagacgcuacguagagccuccugaaaugauugggccuaugcggcccgagcaguucagugaugaaguggaaccagcaacaccugaagaaggggaaccagcaacucaacgucaggauccugcagcugcucaggagggagaggaugagggagcaucugcaggucaagggccgaagccugaagcugauagccaggaacagggucacccacagacugggugugagugugaagaugguccugaugggcaggagauggacccgccaaauccagaggaggugaaaacgccugaagaaggugaaaagcaaucacaguguuaa

SEQ ID NO: 1772 - RNA, 351 nt, Artificial Sequence
  derived and/or modified sequence opt1 from GAGE-8_(GAGE-2D)__Homo_sapiens__AAC33676
augagcuggcgcggccgguccaccuaccgcccccggccgcgccgguacguggagccgcccgagaugaucgggcccaugcgccccgagcaguucagcgacgaggucgagcccgccacccccgaggagggcgagcccgccacgcagcggcaggacccggcggccgcccaggagggggaggacgagggcgccuccgccgggcagggccccaagcccgaggcggacagccaggagcagggccacccccagaccgggugcgagugcgaggacggcccggacgggcaggagauggacccgcccaaccccgaggaggugaagacccccgaggagggcgagaagcagucccagugcuga

SEQ ID NO: 1773 - RNA, 351 nt, Artificial Sequence
  derived and/or modified sequence opt2 from GAGE-8_(GAGE-2D)__Homo_sapiens__AAC33676
auguccuggcgcggccgcuccaccuaccgcccccgcccccgccgcuacgucgagccccccgagaugaucggccccaugcgccccgagcaguucuccgacgaggucgagcccgccacccccgaggagggcgagcccgccacccagcgccaggaccccgccgccgcccaggagggcgaggacgagggcgccuccgccggccagggccccaagcccgaggccgacucccaggagcagggccacccccagaccggcugcgagugcgaggacggccccgacggccaggagauggacccccccaaccccgaggaggucaagacccccgaggagggcgagaagcagucccagugcuga

SEQ ID NO: 1774 - RNA, 351 nt, Artificial Sequence
  derived and/or modified sequence opt3 from GAGE-8_(GAGE-2D)__Homo_sapiens__AAC33676
augagcuggagaggcagguccaccuaccggccccgcccucgacguuauguggagccaccggaaaugaucgggcccaugagaccugagcaguucucugacgaagucgagccagccacacccgaagagggagagccugcuacucaaaggcaggacccagcagccgcgcaggaaggugaggacgaaggcgcuucagccgggcagggacccaagccugaggcagauagucaagagcagggccacccacagacggguugcgaaugugaggacgggccggauggacaggaaauggaucccccuaacccagaggaaguuaaaacccccgaggagggcgaaaagcaaagccagugcuga

SEQ ID NO: 1775 - RNA, 351 nt, Artificial Sequence
  derived and/or modified sequence opt4 from GAGE-8_(GAGE-2D)__Homo_sapiens__AAC33676
augagcuggagaggcagaagcaccuacagacccagacccagaagauacguggagccccccgagaugaucggccccaugagacccgagcaguucagcgacgagguggagcccgccacccccgaggagggcgagcccgccacccagagacaggaccccgccgccgcccaggagggcgaggacgagggcgccagcgccggccagggccccaagcccgaggccgacagccaggagcagggccacccccagaccggcugcgagugcgaggacggccccgacggccaggagauggacccccccaaccccgaggaggugaagacccccgaggagggcgagaagcagagccagugcuga

SEQ ID NO: 1776 - RNA, 351 nt, Artificial Sequence
  derived and/or modified sequence opt5 from GAGE-8_(GAGE-2D)__Homo_sapiens__AAC33676
augagcuggagaggccgguccaccuaccgccccagaccucggcgcuauguggagccgcccgaaaugaucgggccuaugagacccgagcaguucucugacgaagucgagccugccacacccgaagagggagagccugcuacgcaacggcaggacccggccgcggcucaggaaggcgaggacgaaggggccagcgccggacagggccccaagccugaggcugauucccaagagcaggggcacccccagaccggaugcgaaugugaggacggcccugauggccaggaaauggaucccccgaacccugaggaaguuaaaacacccgaggagggggaaaagcaaucucagugcuga

SEQ ID NO: 1777 - protein, 447 aa, Artificial Sequence
  GASR__Homo_sapiens__P32239
MELLKLNRSVQGTGPGPGASLCRPGAPLLNSSSVGNLSCEPPRIRGAGTRELELAIRITLYAVIFLMSVGGNMLIIVVLGLSRRLRTVTNAFLLSLAVSDLLLAVACMPFTLLPNLMGTFIFGTVICKAVSYLMGVSVSVSTLSLVAIALERYSAICRPLQARVWQTRSHAARVIVATWLLSGLLMVPYPVYTVVQPVGPRVLQCVHRWPSARVRQTWSVLLLLLLFFIPGVVMAVAYGLISRELYLGLRFDGDSDSDSQSRVRNQGGLPGAVHQNGRCRPETGAVGEDSDGCYVQLPRSRPALELTALTAPGPGSGSRPTQAKLLAKKRVVRMLLVIVVLFFLCWLPVYSANTWRAFDGPGAHRALSGAPISFIHLLSYASACVNPLVYCFMHRRFRQACLETCARCCPRPPRARPRALPDEDPPTPSIASLSRLSYTTISTLGPG

SEQ ID NO: 1778 - RNA, 1344 nt, Artificial Sequence
  GASR__Homo_sapiens__AAA35657
auggagcugcuaaagcugaaccggagcgugcagggaaccggacccgggccgggggcuucccugugccgcccgggggcgccucuccucaacagcagcagugugggcaaccucagcugcgagcccccucgcauucgcggagccgggacacgagaauuggagcuggccauuagaaucacucuuuacgcagugaucuuccugaugagcguuggaggaaauaugcucaucaucgugguccugggacugagccgccgccugaggacugucaccaaugccuuccuccucucacuggcagucagcgaccuccugcuggcuguggcuugcaugcccuucacccuccugcccaaucucaugggcacauucaucuuuggcaccgucaucugcaaggcgguuuccuaccucaugggggugucugugaguguguccacgcuaagccucguggccaucgcacuggagcgguacagcgccaucugccgaccacugcaggcacgaguguggcagacgcgcucccacgcggcucgcgugauuguagccacguggcugcuguccggacuacucauggugcccuaccccguguacacugucgugcaaccaguggggccucgugugcugcagugcgugcaucgcuggcccagugcgcggguccgccagaccugguccguacugcugcuucugcucuuguucuucaucccgggugugguuauggccguggccuacgggcuuaucucucgcgagcucuacuuagggcuucgcuuugacggcgacagugacagcgacagccaaagcaggguccgaaaccaaggcgggcugccaggggcuguucaccagaacgggcguugccggccugagacuggcgcgguuggcgaagacagcgauggcugcuacgugcaacuuccacguucccggccugcccuggagcugacggcgcugacggcuccugggccgggauccggcucccggcccacccaggccaagcugcuggcuaagaagcgcguggugcgaauguugcuggugaucguugugcuuuuuuuucuguguugguugccaguuuauagugccaacacguggcgcgccuuugauggcccgggugcacaccgagcacucucgggugcuccuaucuccuucauucacuugcugagcuacgccucggccugugucaacccccuggucuacugcuucaugcaccgucgcuuucgccaggccugccuggaaacuugcgcucgcugcugcccccggccuccacgagcucgccccagggcucuucccgaugaggacccucccacucccuccauugcuucgcuguccaggcuuagcuacaccaccaucagcacacugggcccuggcuga

SEQ ID NO: 1779 - RNA, 1344 nt, Artificial Sequence
  derived and/or modified sequence opt1 from GASR__Homo_sapiens__AAA35657
auggagcugcucaagcugaaccgcagcgugcagggcaccgggcccggcccgggggccucccugugccggcccggcgcgccccuccugaacagcuccagcgucgggaaccuguccugcgagcccccgcgcauccggggcgccggcacccgcgagcucgagcuggccauccggaucacgcuguacgccgugaucuuccucaugagcgucgggggcaacaugcugaucaucguggugcuggggcucucccgccggcugcgcaccgugaccaacgccuuccugcucagccuggccgucuccgaccugcuccuggcgguggccugcaugcccuucacccugcuccccaaccugaugggcacguucaucuucgggaccgugaucugcaaggccgucagcuaccugaugggcguguccgugagcgucuccacccucagccugguggccaucgcgcuggagcgguacuccgccaucugccgcccccuccaggcccggguguggcagacccgcagccacgccgcccgggucaucguggcgacguggcugcuguccggccuccugauggugccguaccccgucuacaccguggugcagcccgucgggccccgcgugcugcagugcgugcaccgguggccgagcgcccgcguccggcagaccugguccgugcuccugcugcuccugcuguucuucauccccggcgucgugauggccguggccuacgggcucaucagccgcgagcuguaccugggccuccgguucgacggcgacagcgacuccgacagccagucccgcguccggaaccagggcgggcugcccggggccgugcaccagaacggccgcugccgccccgagaccggggcggugggcgaggacagcgacggcugcuacguccagcugccgcggucccgccccgcccucgagcugacggcccugaccgcccccgggcccggcagcgggucccggccgacccaggccaagcuccuggcgaagaagcgcguggugcggaugcugcuggucaucguggugcuguucuuccugugcuggcugcccgucuacagcgccaacaccuggcgcgccuucgacggccccggggcccaccgggcccucuccggcgcgcccaucagcuucauccaccuccuguccuacgccagcgccugcgugaacccgcucguguacugcuucaugcaccgccgguuccgccaggccugccuggagacgugcgcgcggugcugcccccgcccgccccgggcccgcccccgggcccugcccgacgaggacccgcccacccccuccaucgccagccucucccgccugagcuacaccaccaucuccacgcugggccccggguga

SEQ ID NO: 1780 - RNA, 1344 nt, Artificial Sequence
  derived and/or modified sequence opt2 from GASR__Homo_sapiens__AAA35657
auggagcuccucaagcucaaccgcuccguccagggcaccggccccggccccggcgccucccucugccgccccggcgccccccuccucaacuccuccuccgucggcaaccucuccugcgagcccccccgcauccgcggcgccggcacccgcgagcucgagcucgccauccgcaucacccucuacgccgucaucuuccucauguccgucggcggcaacaugcucaucaucgucguccucggccucucccgccgccuccgcaccgucaccaacgccuuccuccucucccucgccgucuccgaccuccuccucgccgucgccugcaugcccuucacccuccuccccaaccucaugggcaccuucaucuucggcaccgucaucugcaaggccgucuccuaccucaugggcgucuccgucuccgucuccacccucucccucgucgccaucgcccucgagcgcuacuccgccaucugccgcccccuccaggcccgcgucuggcagacccgcucccacgccgcccgcgucaucgucgccaccuggcuccucuccggccuccucaugguccccuaccccgucuacaccgucguccagcccgucggcccccgcguccuccagugcguccaccgcuggcccuccgcccgcguccgccagaccugguccguccuccuccuccuccuccucuucuucauccccggcgucgucauggccgucgccuacggccucaucucccgcgagcucuaccucggccuccgcuucgacggcgacuccgacuccgacucccagucccgcguccgcaaccagggcggccuccccggcgccguccaccagaacggccgcugccgccccgagaccggcgccgucggcgaggacuccgacggcugcuacguccagcucccccgcucccgccccgcccucgagcucaccgcccucaccgcccccggccccggcuccggcucccgccccacccaggccaagcuccucgccaagaagcgcgucguccgcaugcuccucgucaucgucguccucuucuuccucugcuggcuccccgucuacuccgccaacaccuggcgcgccuucgacggccccggcgcccaccgcgcccucuccggcgcccccaucuccuucauccaccuccucuccuacgccuccgccugcgucaacccccucgucuacugcuucaugcaccgccgcuuccgccaggccugccucgagaccugcgcccgcugcugcccccgccccccccgcgcccgcccccgcgcccuccccgacgaggacccccccacccccuccaucgccucccucucccgccucuccuacaccaccaucuccacccucggccccggcuga

SEQ ID NO: 1781 - RNA, 1344 nt, Artificial Sequence
  derived and/or modified sequence opt3 from GASR__Homo_sapiens__AAA35657
auggagcugcucaaacuuaacagaagcgugcagggcaccgggcccggaccuggugccucccugugcaggccaggcgcuccguuguuaaauucuucaagugucgggaaccugagcugugaacccccucggauccgcggagcaggcacacgagagcuagaacucgccauucguauaacucuguacgcgguuaucuuccuuauguccgugggugggaauaugcugauuaucguaguguugggacucucuagaaggcugcggacggucaccaacgcuuuucugcucucguuagccgugucagaccugcuuuuggcaguugccugcaugccauucacacugcuacccaaucucaugggcacuuuuauuuucggcaccgugaucuguaaggcugucagcuaucugaugggggugaguguauccguuucuacacuuagccugguggcaauagccuuggagcgcuacuccgcuaucugcagaccucuccaagccagggucuggcagacccggucacacgcggcacgcgugauuguggccacuuggcuguuaaguggacugcucauggucccauaucccguuuacacagugguacagccuguggguccacgaguccuucagugugugcauagauggccgagcgcuaggguucggcaaaccuggucugugcuguugcuacugcuccuguuuuucauccccggcgucgugauggccguagcauaugggcuuauuucccgugaacuguacuugggacuccgcuuugauggcgacucagauagcgacagucagucuagaguuaggaaccagggugggcugccuggagcugugcaccagaauggccggugccgaccagagacgggcgccgucggggaggauuccgacggauguuaugugcaauuaccccgcagcagaccugcgcuggaacuaacugcccucaccgcaccaggucccggcucggggucuaggccgacacaggcuaagcugcuugccaaaaagcgggucgugcgcauguugcugguuaucgugguacucuucuuucugugcuggcuuccugucuacuccgcuaacacuuggagagccuucgauggacccggcgcacauagggcccugucaggugcuccaauaaguuuuauucacuugcucagcuacgcguccgcaugugugaauccucugguuuauugcuucaugcaucgucgguuucgacaggccuguuuagagaccugcgcuagaugcugucccaggccaccccgcgcccggccuagagcacugccagacgaagauccgcccacaccuucuaucgccagccuaucaaggcucaguuacaccacgauuuccacucuggggccaggcuga

SEQ ID NO: 1782 - RNA, 1344 nt, Artificial Sequence
  derived and/or modified sequence opt4 from GASR__Homo_sapiens__AAA35657
auggagcugcugaagcugaacagaagcgugcagggcaccggccccggccccggcgccagccugugcagacccggcgccccccugcugaacagcagcagcgugggcaaccugagcugcgagccccccagaaucagaggcgccggcaccagagagcuggagcuggccaucagaaucacccuguacgccgugaucuuccugaugagcgugggcggcaacaugcugaucaucguggugcugggccugagcagaagacugagaaccgugaccaacgccuuccugcugagccuggccgugagcgaccugcugcuggccguggccugcaugcccuucacccugcugcccaaccugaugggcaccuucaucuucggcaccgugaucugcaaggccgugagcuaccugaugggcgugagcgugagcgugagcacccugagccugguggccaucgcccuggagagauacagcgccaucugcagaccccugcaggccagaguguggcagaccagaagccacgccgccagagugaucguggccaccuggcugcugagcggccugcugauggugcccuaccccguguacaccguggugcagcccgugggccccagagugcugcagugcgugcacagauggcccagcgccagagugagacagaccuggagcgugcugcugcugcugcugcuguucuucauccccggcguggugauggccguggccuacggccugaucagcagagagcuguaccugggccugagauucgacggcgacagcgacagcgacagccagagcagagugagaaaccagggcggccugcccggcgccgugcaccagaacggcagaugcagacccgagaccggcgccgugggcgaggacagcgacggcugcuacgugcagcugcccagaagcagacccgcccuggagcugaccgcccugaccgcccccggccccggcagcggcagcagacccacccaggccaagcugcuggccaagaagagaguggugagaaugcugcuggugaucguggugcuguucuuccugugcuggcugcccguguacagcgccaacaccuggagagccuucgacggccccggcgcccacagagcccugagcggcgcccccaucagcuucauccaccugcugagcuacgccagcgccugcgugaacccccugguguacugcuucaugcacagaagauucagacaggccugccuggagaccugcgccagaugcugccccagaccccccagagccagacccagagcccugcccgacgaggacccccccacccccagcaucgccagccugagcagacugagcuacaccaccaucagcacccugggccccggcuga

SEQ ID NO: 1783 - RNA, 1344 nt, Artificial Sequence
  derived and/or modified sequence opt5 from GASR__Homo_sapiens__AAA35657
auggagcugcucaagcugaacagaagcgugcagggcaccgggcccggaccuggcgccucccuuugccggccgggggcuccccugcucaauucuagcuccgucggaaaccugucuugugaaccuccccgcaucagaggcgccgggacacgggagcuugaacuggcgauucgcaucacgcucuacgcuguuauuuuccugaugagcgugggaggcaauaugcugaucauugugguccucggccuguccagacggcuucgcaccgugacaaacgccuuucugcucucucuggccguuagcgaccuucugcucgcuguggccugcaugccuuucacccugcugcccaaucucauggggacauuuaucuucggaaccgucaucuguaaagcuguguccuaucugaugggcguuagcgugucugucuccacacuuagccugguggccauugcgcucgagagauacucugccaucugccggccucugcaagcucgcguguggcagaccagaucccacgccgcucgggucauuguugccacguggcuucugagcgggcuccugauggugccguaucccguguacaccgucgugcagccuguuggaccccgcgugcugcaguguguccauagauggccuucugcgcgggugcgccaaacaugguccguucuccugcuucugcuccuguuuuucauccccggcguggucauggccguggcuuaugggcuuauuagcagagaacuguaccucggacugcgguuugauggcgacuccgauucugacagccaguccagaguccgcaaccagggcgggcugccgggagccgugcaccagaauggccggugcagaccugagaccggggcuguuggagaggauagcgacggcuguuaugugcaacucccccgcucucggccugcccuggaacuuacagcccugaccgcucccgggcccggauccggcagcagaccuacgcaggcgaagcuccuggccaaaaagcgcgucgugcggaugcugcuuguuaucgugguccucuucuuucugugcuggcugccgguguacucugcuaacacauggagagccuucgauggccccggggcccaucgcgcucucagcggagccccuauuuccuuuauccaucugcuuucuuacgcgagcgcuugugugaauccccugguuuauugcuucaugcaccggagauuucgccaggccugucucgagaccugcgcccggugcuguccuagacccccgcgggcucgcccuagagcccugcccgacgaagauccucccacaccuuccaucgcuagccugucucggcuuuccuacaccaccauuagcacacucggccccggguga

SEQ ID NO: 1784 - protein, 741 aa, Artificial Sequence
  GnT-V__Homo_sapiens__Q09328
MALFTPWKLSSQKLGFFLVTFGFIWGMMLLHFTIQQRTQPESSSMLREQILDLSKRYIKALAEENRNVVDGPYAGVMTAYDLKKTLAVLLDNILQRIGKLESKVDNLVVNGTGTNSTNSTTAVPSLVALEKINVADIINGAQEKCVLPPMDGYPHCEGKIKWMKDMWRSDPCYADYGVDGSTCSFFIYLSEVENWCPHLPWRAKNPYEEADHNSLAEIRTDFNILYSMMKKHEEFRWMRLRIRRMADAWIQAIKSLAEKQNLEKRKRKKVLVHLGLLTKESGFKIAETAFSGGPLGELVQWSDLITSLYLLGHDIRISASLAELKEIMKKVVGNRSGCPTVGDRIVELIYIDIVGLAQFKKTLGPSWVHYQCMLRVLDSFGTEPEFNHANYAQSKGHKTPWGKWNLNPQQFYTMFPHTPDNSFLGFVVEQHLNSSDIHHINEIKRQNQSLVYGKVDSFWKNKKIYLDIIHTYMEVHATVYGSSTKNIPSYVKNHGILSGRDLQFLLRETKLFVGLGFPYEGPAPLEAIANGCAFLNPKFNPPKSSKNTDFFIGKPTLRELTSQHPYAEVFIGRPHVWTVDLNNQEEVEDAVKAILNQKIEPYMPYEFTCEGMLQRINAFIEKQDFCHGQVMWPPLSALQVKLAEPGQSCKQVCQESQLICEPSFFQHLNKDKDMLKYKVTCQSSELAKDILVPSFDPKNKHCVFQGDLLLFSCAGAHPRHQRVCPCRDFIKGQVALCKDCL

SEQ ID NO: 1785 - RNA, 2226 nt, Artificial Sequence
  GnT-V__Homo_sapiens__AAD22449
auggcucucuucacuccguggaaguuguccucucagaagcugggcuuuuuccuggugacuuuuggcuucauuugggguaugaugcuucugcacuuuaccauccagcagcgaacucagccugaaagcagcuccaugcugcgcgagcagauccuggaccucagcaaaagguacaucaaggcacuggcagaagaaaacaggaaugugguggaugggccauacgcuggagucaugacagcuuaugaucugaagaaaacccuugcuguguuauuagauaacauuuugcagcgcauuggcaaguuggagucgaagguggacaaucuuguugucaauggcaccggaacaaacucaaccaacuccacuacagcuguucccagcuugguugcacuugagaaaauuaauguggcagauaucauuaacggagcucaagaaaaauguguauugccuccuauggacggcuacccucacugugagggaaagaucaaguggaugaaagacauguggcguucagaucccugcuacgcagacuauggaguggauggauccaccugcucuuuuuuuauuuaccucagugagguugaaaauugguguccucauuuaccuuggagagcaaaaaaucccuacgaagaagcugaucauaauucauuggcggaaauucguacagauuuuaauauucucuacaguaugaugaaaaagcaugaagaauuccgguggaugagacuacggauccggcgaauggcugacgcauggauccaagcaaucaagucccuggcagaaaagcagaaccuugaaaagagaaagcggaagaaaguccucguucaccugggacuccugaccaaggaaucuggauuuaagauugcagagacagcuuucagugguggcccucuuggugaauuaguucaauggagugauuuaauuacaucucuguacuuacugggccaugacauuaggauuucagcuucacuggcugagcucaaggaaaucaugaagaagguuguaggaaaccgaucuggcugcccaacuguaggagacagaauuguugagcucauuuacauugauauuguaggacuugcucaauucaagaaaacucuuggaccauccuggguucauuaccagugcaugcuccgagugcuggauuccuuuggaacagaaccugaguucaaucacgcaaauuaugcccaaucgaaaggccacaagaccccuuggggaaaauggaaucugaacccucagcaguuuuauaccauguucccucauaccccagacaacagcuuucugggguuugugguugagcagcaccugaacuccagugauauccaccacauuaaugaaaucaaaaggcagaaccagucccuuguguauggcaaaguggauagcuucuggaagaauaagaagaucuacuuggacauuauucacacauacauggaagugcaugcaacuguuuauggcuccagcacaaagaauauucccaguuacgugaaaaaccaugguauccucaguggacgggaccugcaguuccuucuucgagaaaccaaguuguuuguuggacuuggguucccuuacgagggcccagcuccccuggaagcuaucgcaaauggaugugcuuuucugaaucccaaguucaacccacccaaaagcagcaaaaacacagacuucuucauuggcaagccaacacugagagagcucacaucccagcauccuuacgcugaaguuuucaucgggcggccacauguguggacuguugaccucaacaaucaggaggaaguagaggaugcagugaaagccaucuuaaaccagaagauugagccauacaugccauaugaauuuacgugcgaggggaugcuacagagaaucaaugcuuucauugaaaaacaggacuucugccaugggcaagugauguggccaccccucagcgcccuacaggucaagcuugcugagcccgggcaguccugcaagcaggugugccaggagagccagcucaucugcgagccuucuuucuuccagcaccucaacaaggacaaggacaugcugaaguacaaggugaccugccaaagcucagagcuggccaaggacauccuggugcccuccuuugacccuaagaauaagcacuguguguuucaaggugaccuccugcucuucagcugugcaggcgcccaccccaggcaccagagggucugccccugccgggacuucaucaagggccagguggcucucugcaaagacugccuauag

SEQ ID NO: 1786 - RNA, 2226 nt, Artificial Sequence
  derived and/or modified sequence opt1 from GnT-V__Homo_sapiens__AAD22449
auggcccuguucacccccuggaagcucagcucccagaagcugggguucuuccuggugaccuucggguucaucuggggcaugaugcuccugcacuucacgauccagcagcgcacccagccggagagcuccagcaugcugcgggagcagauccucgaccuguccaagcgcuacaucaaggcccuggcggaggagaaccggaacgucguggacgggcccuacgccggcgugaugaccgccuacgaccucaagaagacccuggccguccugcucgacaacauccugcagcgcaucgggaagcuggagagcaagguggacaaccucguggucaacggcacgggcaccaacuccaccaacagcaccacggccgugcccucccugguggcgcuggagaagaucaacgucgccgacaucaucaacggggcccaggagaagugcgugcugcccccgauggacggcuacccccacugcgaggggaagaucaaguggaugaaggacauguggcggagcgaccccugcuacgccgacuacggcguggacggguccacgugcagcuucuucaucuaccuguccgaggucgagaacuggugcccccaccucccguggcgcgcgaagaaccccuacgaggaggccgaccacaacagccucgccgagauccggaccgacuucaacauccuguacuccaugaugaagaagcacgaggaguuccgcuggaugcggcugcgcauccggcgcauggccgacgccuggauccaggcgaucaagagccucgccgagaagcagaaccuggagaagcggaagcgcaagaaggugcuggugcaccucggccugcugaccaaggaguccggcuucaagaucgccgagaccgccuucagcgggggcccccucggggagcugguccagugguccgaccugaucaccagccucuaccugcugggccacgacauccggaucagcgccucccucgcggagcugaaggagaucaugaagaagguggugggcaaccgcagcgggugccccaccgucggcgaccggaucguggagcugaucuacaucgacaucguggggcucgcccaguucaagaagacccugggcccguccuggguccacuaccagugcaugcugcgcgugcucgacagcuucgggacggagcccgaguucaaccacgccaacuacgcccaguccaagggccacaagacccccuggggcaaguggaaccugaacccccagcaguucuacaccauguucccgcacacccccgacaacagcuuccugggguucguggucgagcagcaccucaacuccagcgacauccaccacaucaacgagaucaagcggcagaaccagucccugguguacggcaaggucgacagcuucuggaagaacaagaagaucuaccuggacaucauccacacguacauggaggugcacgccaccguguacggguccagcaccaagaacauccccuccuacgucaagaaccacggcauccucagcgggcgcgaccugcaguuccugcugcgggagaccaagcuguucgugggccugggcuuccccuacgaggggccggcgccccuggaggccaucgccaacggcugcgccuuccucaaccccaaguucaacccgcccaaguccagcaagaacacggacuucuucaucgggaagcccacccugcgcgagcugaccucccagcaccccuacgccgagguguucaucggccgcccccacgucuggaccguggaccucaacaaccaggaggagguggaggacgcggucaaggccauccugaaccagaagaucgagccguacaugcccuacgaguucacgugcgaggggaugcugcagcggaucaacgccuucaucgagaagcaggacuucugccacggccaggugauguggcccccgcucagcgcccuccaggugaagcuggcggagcccggccaguccugcaagcaggucugccaggagagccagcucaucugcgagcccagcuucuuccagcaccugaacaaggacaaggacaugcugaaguacaaggugaccugccaguccagcgagcucgccaaggacauccuggugcccuccuucgacccgaagaacaagcacugcgucuuccagggggaccugcuccuguucagcugcgccggcgcccacccccgccaccagcgggugugccccugccgcgacuucaucaagggccagguggcccugugcaaggacugccucuga

SEQ ID NO: 1787 - RNA, 2226 nt, Artificial Sequence
  derived and/or modified sequence opt2 from GnT-V__Homo_sapiens__AAD22449
auggcccucuucacccccuggaagcucuccucccagaagcucggcuucuuccucgucaccuucggcuucaucuggggcaugaugcuccuccacuucaccauccagcagcgcacccagcccgaguccuccuccaugcuccgcgagcagauccucgaccucuccaagcgcuacaucaaggcccucgccgaggagaaccgcaacgucgucgacggccccuacgccggcgucaugaccgccuacgaccucaagaagacccucgccguccuccucgacaacauccuccagcgcaucggcaagcucgaguccaaggucgacaaccucgucgucaacggcaccggcaccaacuccaccaacuccaccaccgccguccccucccucgucgcccucgagaagaucaacgucgccgacaucaucaacggcgcccaggagaagugcguccucccccccauggacggcuacccccacugcgagggcaagaucaaguggaugaaggacauguggcgcuccgaccccugcuacgccgacuacggcgucgacggcuccaccugcuccuucuucaucuaccucuccgaggucgagaacuggugcccccaccuccccuggcgcgccaagaaccccuacgaggaggccgaccacaacucccucgccgagauccgcaccgacuucaacauccucuacuccaugaugaagaagcacgaggaguuccgcuggaugcgccuccgcauccgccgcauggccgacgccuggauccaggccaucaagucccucgccgagaagcagaaccucgagaagcgcaagcgcaagaagguccucguccaccucggccuccucaccaaggaguccggcuucaagaucgccgagaccgccuucuccggcggcccccucggcgagcucguccagugguccgaccucaucaccucccucuaccuccucggccacgacauccgcaucuccgccucccucgccgagcucaaggagaucaugaagaaggucgucggcaaccgcuccggcugccccaccgucggcgaccgcaucgucgagcucaucuacaucgacaucgucggccucgcccaguucaagaagacccucggccccuccuggguccacuaccagugcaugcuccgcguccucgacuccuucggcaccgagcccgaguucaaccacgccaacuacgcccaguccaagggccacaagacccccuggggcaaguggaaccucaacccccagcaguucuacaccauguucccccacacccccgacaacuccuuccucggcuucgucgucgagcagcaccucaacuccuccgacauccaccacaucaacgagaucaagcgccagaaccagucccucgucuacggcaaggucgacuccuucuggaagaacaagaagaucuaccucgacaucauccacaccuacauggagguccacgccaccgucuacggcuccuccaccaagaacauccccuccuacgucaagaaccacggcauccucuccggccgcgaccuccaguuccuccuccgcgagaccaagcucuucgucggccucggcuuccccuacgagggccccgccccccucgaggccaucgccaacggcugcgccuuccucaaccccaaguucaacccccccaaguccuccaagaacaccgacuucuucaucggcaagcccacccuccgcgagcucaccucccagcaccccuacgccgaggucuucaucggccgcccccacgucuggaccgucgaccucaacaaccaggaggaggucgaggacgccgucaaggccauccucaaccagaagaucgagcccuacaugcccuacgaguucaccugcgagggcaugcuccagcgcaucaacgccuucaucgagaagcaggacuucugccacggccaggucauguggcccccccucuccgcccuccaggucaagcucgccgagcccggccaguccugcaagcaggucugccaggagucccagcucaucugcgagcccuccuucuuccagcaccucaacaaggacaaggacaugcucaaguacaaggucaccugccaguccuccgagcucgccaaggacauccucguccccuccuucgaccccaagaacaagcacugcgucuuccagggcgaccuccuccucuucuccugcgccggcgcccacccccgccaccagcgcgucugccccugccgcgacuucaucaagggccaggucgcccucugcaaggacugccucuga

SEQ ID NO: 1788 - RNA, 2226 nt, Artificial Sequence
  derived and/or modified sequence opt3 from GnT-V__Homo_sapiens__AAD22449
auggcccuguucacccccuggaagcucagcucccagaaacuuggcuuuuuccuggugacauuuggguucaucuggggaaugauguuguuacacuuuacuauucaacagagaacgcagccugagucuucaaguaugcugagggaacagauacuagaccucagcaagcgguacaucaaagcucuggcagaggaaaaccgcaaugucguugaugguccauaugccggcgugaugaccgcguacgaccuuaagaaaacacuggcuguauugcucgauaacauucugcaacgaaucgggaagcuggaguccaagguggacaaucucgucgugaacggaacuggcaccaauucuacaaacucgaccacugccguuccgucauuaguggcacuggaaaagauuaaugucgccgauaucauaaacggugcucaggagaagugcgugcuucccccuauggacggguauccacauugugagggaaaaaucaaguggaugaaagauauguggcguagcgaccccugcuacgcagauuauggcguagacggcaguacauguuccuucuuuauuuacuugucugaaguugagaauuggugcccucaucugccauggagagccaagaaccccuaugaagaggcugaucacaauagccuagccgagaucaggaccgacuucaacauucucuacuccaugaugaagaaacacgaagaguuucgguggaugcgccugagaaucaggcggauggcggaugcauggauacaggccauuaagucacuugcugaaaaacagaaucuggagaagcgcaaacgaaagaaaguguugguccaucucgggcuguuaacgaaggaaaguggauucaagaucgccgagacugcauuuagcgguggcccucugggggagcucgugcaauggucugaccuuauuaccucccuguacuugcuaggacacgacaucagaaucucagcuagccuggccgaacucaaagagauuaugaagaaaguggucggcaacaggagugguuguccaacaguuggggaucggauaguggaacugaucuauauugacaucguaggacuugcgcaguucaagaaaacucugggcccgucuugggugcacuaccagugcauguugcguguccucgauuccuuuggcaccgagcccgaguucaaucaugccaacuaugcacagagcaaggggcacaagacaccuuggggaaaauggaaccugaauccacaacaguucuacaccauguuuccccauacgccugacaacucguucuuagguuuugugguugaacagcaccuuaauucuuccgauauacaccauauuaacgagaucaagcgccaaaaucagagucuaguguauggcaaagucgacaguuucuggaagaacaaaaagaucuaccucgauauuauccacacuuauauggaagugcaugcuacaguauacgggagcuccaccaagaauauuccaucuuacguuaaaaaccacggaauacugagcggcagagaccuucaguuuuugcugagggagacuaaacucuucgugggucugggguuucccuaugaaggcccggccccucuugaggcuaucgccaauggaugugcauuccugaaccccaaauuuaauccaccuaagucaaguaaaaacacagauuucuuuauuggcaagcccaccuugcgggaacucacgucccagcauccauacgccgaggucuucaucgggcgaccccacguguggaccgucgaccugaauaaccaagaggaaguggaggaugcuguuaaggcgaucuuaaaucagaaaauugaaccuuauaugccauacgaguuuacaugcgagggaaugcugcagcgcauaaacgcauucaucgaaaagcaggacuucugucacggucaagugauguggccgccccuaagcgcccuccagguaaaacuggcugagccuggccagucuugcaagcaggucugucaagaaucacagcuuauuugcgagccaucauuuuuccagcauuugaacaaagacaaggauaugcugaaauauaaggugacuugccagagcuccgaacucgccaaggacauccugguucccucuuuugauccuaaaaauaagcacuguguguuccaaggggacuuacugcuguuuucgugcgcaggagcccauccaagacaccagagggucugucccugccgggauuucauuaaaggccagguggcuuuguguaaggacugccucuga

SEQ ID NO: 1789 - RNA, 2226 nt, Artificial Sequence
  derived and/or modified sequence opt4 from GnT-V__Homo_sapiens__AAD22449
auggcccuguucacccccuggaagcugagcagccagaagcugggcuucuuccuggugaccuucggcuucaucuggggcaugaugcugcugcacuucaccauccagcagagaacccagcccgagagcagcagcaugcugagagagcagauccuggaccugagcaagagauacaucaaggcccuggccgaggagaacagaaacgugguggacggccccuacgccggcgugaugaccgccuacgaccugaagaagacccuggccgugcugcuggacaacauccugcagagaaucggcaagcuggagagcaagguggacaaccugguggugaacggcaccggcaccaacagcaccaacagcaccaccgccgugcccagccugguggcccuggagaagaucaacguggccgacaucaucaacggcgcccaggagaagugcgugcugccccccauggacggcuacccccacugcgagggcaagaucaaguggaugaaggacauguggagaagcgaccccugcuacgccgacuacggcguggacggcagcaccugcagcuucuucaucuaccugagcgagguggagaacuggugcccccaccugcccuggagagccaagaaccccuacgaggaggccgaccacaacagccuggccgagaucagaaccgacuucaacauccuguacagcaugaugaagaagcacgaggaguucagauggaugagacugagaaucagaagaauggccgacgccuggauccaggccaucaagagccuggccgagaagcagaaccuggagaagagaaagagaaagaaggugcuggugcaccugggccugcugaccaaggagagcggcuucaagaucgccgagaccgccuucagcggcggcccccugggcgagcuggugcaguggagcgaccugaucaccagccuguaccugcugggccacgacaucagaaucagcgccagccuggccgagcugaaggagaucaugaagaagguggugggcaacagaagcggcugccccaccgugggcgacagaaucguggagcugaucuacaucgacaucgugggccuggcccaguucaagaagacccugggccccagcugggugcacuaccagugcaugcugagagugcuggacagcuucggcaccgagcccgaguucaaccacgccaacuacgcccagagcaagggccacaagacccccuggggcaaguggaaccugaacccccagcaguucuacaccauguucccccacacccccgacaacagcuuccugggcuucgugguggagcagcaccugaacagcagcgacauccaccacaucaacgagaucaagagacagaaccagagccugguguacggcaagguggacagcuucuggaagaacaagaagaucuaccuggacaucauccacaccuacauggaggugcacgccaccguguacggcagcagcaccaagaacauccccagcuacgugaagaaccacggcauccugagcggcagagaccugcaguuccugcugagagagaccaagcuguucgugggccugggcuuccccuacgagggccccgccccccuggaggccaucgccaacggcugcgccuuccugaaccccaaguucaacccccccaagagcagcaagaacaccgacuucuucaucggcaagcccacccugagagagcugaccagccagcaccccuacgccgagguguucaucggcagaccccacguguggaccguggaccugaacaaccaggaggagguggaggacgccgugaaggccauccugaaccagaagaucgagcccuacaugcccuacgaguucaccugcgagggcaugcugcagagaaucaacgccuucaucgagaagcaggacuucugccacggccaggugauguggcccccccugagcgcccugcaggugaagcuggccgagcccggccagagcugcaagcaggugugccaggagagccagcugaucugcgagcccagcuucuuccagcaccugaacaaggacaaggacaugcugaaguacaaggugaccugccagagcagcgagcuggccaaggacauccuggugcccagcuucgaccccaagaacaagcacugcguguuccagggcgaccugcugcuguucagcugcgccggcgcccaccccagacaccagagagugugccccugcagagacuucaucaagggccagguggcccugugcaaggacugccuguga

SEQ ID NO: 1790 - RNA, 2226 nt, Artificial Sequence
  derived and/or modified sequence opt5 from GnT-V__Homo_sapiens__AAD22449
auggcccuguucacccccuggaagcucagcucccagaaacugggcuuuuuccuugugacauuuggguucaucuggggaaugaugcugcuccacuuuacgauucaacagagaacccagccugagucuagcuccaugcugcgggaacagauccuugaccugucuaagcgcuacauuaaagcucucgccgaggaaaacagaaaugucguugauggcccguaugcgggggugaugacagcuuacgaccugaagaaaacccuggccgugcuccuggauaacauccuucaacggauuggaaagcuggagagcaaggucgacaaucucgugguuaacggcacagggaccaauuccacaaacucuaccacggccgugcccagccuggucgcucuugaaaagaucaauguggccgauaucauuaacggagcucaggagaagugcguucugccucccauggacggcuauccucauugugagggcaaaaucaaguggaugaaagauauguggcgcuccgaccccugcuacgccgauuaugggguggacggaagcaccuguucuuucuuuauuuaccucuccgaagucgagaauuggugcccucaccucccguggagagcgaagaaccccuaugaagaggccgaucauaauagccuggcugagauccggacagacuucaacauucucuacucuaugaugaagaaacacgaagaguuucgcuggaugagacugcggauccgcagaauggccgaugcuuggauucaggccaucaagucccuugcggaaaaacagaaucuggagaagcggaaacgcaagaaagugcucgugcaucugggccuucugaccaaggaaagcggguucaagaucgccgagacagcuuuuucuggaggcccucucggggagcugguccaaugguccgaccugauuaccagccucuaccugcuuggacacgacaucagaauuuccgccucucuggcugaacucaaagagaucaugaagaaaguugugggcaaccggagcggcugucccacggugggggaucgcauugucgaacugaucuauaucgacauugugggacuugcccaguucaagaaaacacugggcccuuccuggguucacuaccagugcaugcucagagugcuggauagcuuugggaccgagcccgaguucaaucaugccaacuaugcucagucuaagggacacaagacaccguggggcaaauggaaccugaauccucaacaguucuacaccauguuuccccauaccccugacaacuccuuccucggguuugucguggaacagcaccugaauagcucugauauccaccauauuaacgagaucaagcggcaaaaucagagccuuguuuauggaaaaguggacuccuucuggaagaacaaaaagauuuaccuggauaucauccacacauauauggaaguccaugcgacgguguacggcucuagcaccaagaauauucccuccuacgucaaaaaccacggcauccucagcgggagagaccugcaguuucugcuucgcgagacaaagcuguucgugggacugggcuuucccuaugaagggccugccccgcuggaggcuauugccaauggaugugccuuccucaaccccaaauuuaauccucccaagucuuccaaaaacaccgauuucuuuaucggcaagccuacacugcgggaacuuaccagccagcaucccuacgcugagguuuucauugggagaccgcacguguggacggucgaccugaauaaccaagaggaaguggaggaugccguuaaggcgauccucaaucagaaaauugaaccuuauaugcccuacgaguuuacaugcgagggcaugcugcagcgcaucaacgcuuucaucgaaaagcaggacuucugucacggacaagugauguggccuccccugucugcccuucaggucaaacucgccgagccuggccaguccugcaaacaggugugucaagaaagccagcugauuugcgagcccuccuuuuuccagcaucugaacaaagacaaggauaugcucaaauauaaggugaccugccagucuagcgaacuggcuaaggacauccuuguuccguccuuugauccuaaaaauaagcacugugucuuccaaggggaccugcuccuguuuucuugcgccggagcucauccccggcaccagagagugugucccugccgcgauuucauuaaaggccagguggcccuguguaaggacugccuuuga

SEQ ID NO: 1791 - protein, 580 aa, Artificial Sequence
  GPC3__Homo_sapiens__I6QTG3
MAGTVRTACLVVAMLLSLDFPGQAQPPPPPPDATCHQVRSFFQRLQPGLKWVPETPVPGSDLQVCLPKGPTCCSRKMEEKYQLTARLNMEQLLQSASMELKFLIIQNAAVFQEAFEIVVRHAKNYTNAMFKNNYPSLTPQAFEFVGEFFTDVSLYILGSDINVDDMVNELFDSLFPVIYTQLMNPGLPDSALDINECLRGARRDLKVFGNFPKLIMTQVSKSLQVTRIFLQALNLGIEVINTTDHLKFSKDCGRMLTRMWYCSYCQGLMMVKPCGGYCNVVMQGCMAGVVEIDKYWREYILSLEELVNGMYRIYDMENVLLGLFSTIHDSIQYVQKNAGKLTTTIGKLCAHSQQRQYRSAYYPEDLFIDKKVLKVAHVEHEETLSSRRRELIQKLKSFISFYSALPGYICSHSPVAENDTLCWNGQELVERYSQKAARNGMKNQFNLHELKMKGPEPVVSQIIDKLKHINQLLRTMSMPKGRVLDKNLDEEGFESGDCGDDEDECIGGSGDGMIKVKNQLRFLAELAYDLDVDDAPGNSQQATPKDNEISTFHNLGNVHSPLKLLTSMAISVVCFFFLVH

SEQ ID NO: 1792 - RNA, 1743 nt, Artificial Sequence
  GPC3__Homo_sapiens__EAX11770
auggccgggaccgugcgcaccgcgugcuuggugguggcgaugcugcucagcuuggacuucccgggacaggcgcagcccccgccgccgccgccggacgccaccugucaccaaguccgcuccuucuuccagagacugcagcccggacucaagugggugccagaaacucccgugccaggaucagauuugcaaguaugucucccuaagggcccaacaugcugcucaagaaagauggaagaaaaauaccaacuaacagcacgauugaacauggaacagcugcuucagucugcaaguauggagcucaaguucuuaauuauucagaaugcugcgguuuuccaagaggccuuugaaauuguuguucgccaugccaagaacuacaccaaugccauguucaagaacaacuacccaagccugacuccacaagcuuuugaguuugugggugaauuuuucacagaugugucucucuacaucuuggguucugacaucaauguagaugacauggucaaugaauuguuugacagccuguuuccagucaucuauacccagcuaaugaacccaggccugccugauucagccuuggacaucaaugagugccuccgaggagcaagacgugaccugaaaguauuugggaauuuccccaagcuuauuaugacccagguuuccaagucacugcaagucacuaggaucuuccuucaggcucugaaucuuggaauugaagugaucaacacaacugaucaccugaaguucaguaaggacuguggccgaaugcucaccagaaugugguacugcucuuacugccagggacugaugaugguuaaacccuguggcgguuacugcaauguggucaugcaaggcuguauggcaggugugguggagauugacaaguacuggagagaauacauucugucccuugaagaacuugugaauggcauguacagaaucuaugacauggagaacguacugcuuggucucuuuucaacaauccaugauucuauccaguauguccagaagaaugcaggaaagcugaccaccacuauuggcaaguuaugugcccauucucaacaacgccaauauagaucugcuuauuauccugaagaucucuuuauugacaagaaaguauuaaaaguugcucauguagaacaugaagaaaccuuauccagccgaagaagggaacuaauucagaaguugaagucuuucaucagcuucuauagugcuuugccuggcuacaucugcagccauagcccuguggcggaaaacgacacccuuugcuggaauggacaagaacucguggagagauacagccaaaaggcagcaaggaauggaaugaaaaaccaguucaaucuccaugagcugaaaaugaagggcccugagccaguggucagucaaauuauugacaaacugaagcacauuaaccagcuccugagaaccaugucuaugcccaaagguagaguucuggauaaaaaccuggaugaggaaggguuugaaaguggagacugcggugaugaugaagaugagugcauuggaggcucuggugauggaaugauaaaagugaagaaucagcuccgcuuccuugcagaacuggccuaugaucuggauguggaugaugcgccuggaaacagucagcaggcaacuccgaaggacaacgagauaagcaccuuucacaaccucgggaacguucauuccccgcugaagcuucucaccagcauggccaucucgguggugugcuucuucuuccuggugcacuga

SEQ ID NO: 1793 - RNA, 1743 nt, Artificial Sequence
  derived and/or modified sequence opt1 from GPC3__Homo_sapiens__EAX11770
auggccggcaccgugcgcaccgccugccuggucguggcgaugcuccugagccuggacuuccccgggcaggcccagccgcccccgccgccgcccgacgccacgugccaccaggugcgguccuucuuccagcgccuccagcccggccugaaguggguccccgagacccccgugcccgggagcgaccuccaggugugccugcccaagggcccgaccugcugcucccggaagauggaggagaaguaccagcugaccgcccgccugaacauggagcagcuccugcagagcgccuccauggagcugaaguuccucaucauccagaacgcggccgucuuccaggaggccuucgagaucguggugcggcacgccaagaacuacacgaacgcgauguucaagaacaacuaccccagccugacgccccaggccuucgaguucgucggggaguucuucaccgacgugucccuguacauccucggcagcgacaucaacguggacgacauggucaacgagcuguucgacucccuguuccccgugaucuacacccagcucaugaaccccggccugccggacagcgcccuggacaucaacgagugccuccgcggggcccggcgcgaccugaagguguucggcaacuuccccaagcugaucaugacccaggucuccaagagccuccaggugacccggaucuuccugcaggcccugaaccucgggaucgaggugaucaacaccaccgaccaccugaaguucuccaaggacugcggccgcaugcugacgcggaugugguacugcagcuacugccaggggcucaugauggucaagcccugcggcggcuacugcaacguggugaugcaggggugcauggcgggcgucguggagaucgacaaguacuggcgcgaguacauccugucccuggaggagcucgugaacgggauguaccggaucuacgacauggagaacguccugcugggccucuucagcaccauccacgacuccauccaguacgugcagaagaacgccggcaagcugaccaccacgaucgggaagcugugcgcccacagccagcagcgccaguaccgguccgccuacuaccccgaggaccucuucaucgacaagaagguccugaagguggcccacguggagcacgaggagacccugagcagccgccggcgcgagcucauccagaagcugaaguccuucaucagcuucuacuccgcgcugcccggcuacaucugcagccacucccccgucgccgagaacgacacccucugcuggaacgggcaggagcugguggagcgguacagccagaaggccgcccgcaacggcaugaagaaccaguucaaccugcacgagcucaagaugaaggggcccgagcccguggucucccagaucaucgacaagcugaagcacaucaaccagcugcugcggaccaugagcaugccgaagggccgcgugcucgacaagaaccuggacgaggagggcuucgaguccggggacugcggcgacgacgaggacgagugcaucgggggcagcggggacggcaugaucaaggugaagaaccagcugcgcuuccucgccgagcuggcguacgaccuggacgucgacgacgcccccggcaacucccagcaggccacgcccaaggacaacgagaucagcaccuuccacaaccucgggaacgugcacagcccccugaagcugcucaccuccauggccaucuccguggucugcuucuucuuccuggugcacuga

SEQ ID NO: 1794 - RNA, 1743 nt, Artificial Sequence
  derived and/or modified sequence opt2 from GPC3__Homo_sapiens__EAX11770
auggccggcaccguccgcaccgccugccucgucgucgccaugcuccucucccucgacuuccccggccaggcccagccccccccccccccccccgacgccaccugccaccagguccgcuccuucuuccagcgccuccagcccggccucaaguggguccccgagacccccguccccggcuccgaccuccaggucugccuccccaagggccccaccugcugcucccgcaagauggaggagaaguaccagcucaccgcccgccucaacauggagcagcuccuccaguccgccuccauggagcucaaguuccucaucauccagaacgccgccgucuuccaggaggccuucgagaucgucguccgccacgccaagaacuacaccaacgccauguucaagaacaacuaccccucccucaccccccaggccuucgaguucgucggcgaguucuucaccgacgucucccucuacauccucggcuccgacaucaacgucgacgacauggucaacgagcucuucgacucccucuuccccgucaucuacacccagcucaugaaccccggccuccccgacuccgcccucgacaucaacgagugccuccgcggcgcccgccgcgaccucaaggucuucggcaacuuccccaagcucaucaugacccaggucuccaagucccuccaggucacccgcaucuuccuccaggcccucaaccucggcaucgaggucaucaacaccaccgaccaccucaaguucuccaaggacugcggccgcaugcucacccgcaugugguacugcuccuacugccagggccucaugauggucaagcccugcggcggcuacugcaacgucgucaugcagggcugcauggccggcgucgucgagaucgacaaguacuggcgcgaguacauccucucccucgaggagcucgucaacggcauguaccgcaucuacgacauggagaacguccuccucggccucuucuccaccauccacgacuccauccaguacguccagaagaacgccggcaagcucaccaccaccaucggcaagcucugcgcccacucccagcagcgccaguaccgcuccgccuacuaccccgaggaccucuucaucgacaagaagguccucaaggucgcccacgucgagcacgaggagacccucuccucccgccgccgcgagcucauccagaagcucaaguccuucaucuccuucuacuccgcccuccccggcuacaucugcucccacucccccgucgccgagaacgacacccucugcuggaacggccaggagcucgucgagcgcuacucccagaaggccgcccgcaacggcaugaagaaccaguucaaccuccacgagcucaagaugaagggccccgagcccgucgucucccagaucaucgacaagcucaagcacaucaaccagcuccuccgcaccauguccaugcccaagggccgcguccucgacaagaaccucgacgaggagggcuucgaguccggcgacugcggcgacgacgaggacgagugcaucggcggcuccggcgacggcaugaucaaggucaagaaccagcuccgcuuccucgccgagcucgccuacgaccucgacgucgacgacgcccccggcaacucccagcaggccacccccaaggacaacgagaucuccaccuuccacaaccucggcaacguccacuccccccucaagcuccucaccuccauggccaucuccgucgucugcuucuucuuccucguccacuga

SEQ ID NO: 1795 - RNA, 1743 nt, Artificial Sequence
  derived and/or modified sequence opt3 from GPC3__Homo_sapiens__EAX11770
auggccggcaccgugagaacagcuugccuggucguugcaaugcuccuuagccuggacuuccccgggcaggcccaaccuccaccgcccccuccagaugcgacuugucaccaggugagguccuuuuuccagcgguugcagcccggauuaaaguggguaccugagacgccagugcccgguucugaccugcaagucugccuaccuaaaggcccaaccuguugcucacgcaagauggaagagaaauaccagcucacagcucgacugaacauggaacagcuucugcagagugccagcauggaguugaaguuucucaucauucaaaaugcagccguguuccaggaagcauuugagauaguugugcgucaugcuaaaaacuauacuaaugccauguucaagaacaauuacccgucccugacaccccaggcuuuugaguucgucggggaauuuuucaccgaugugucucuguauauccucggaucggacauuaacguagaugacaugguuaaugaguuauuugauucacuguucccugugaucuacacccagcuuaugaacccaggcuugcccgacagcgcccuggauauuaaugaaugucuaagaggugcgaggcgggaccucaaggucuuugggaacuucccuaaacugaucaugacucaagugaguaagucccuucaggugacacgcauauuccugcaggcauugaaucucggaaucgaggucauuaacaccacggaucaccugaaauuuucuaaggacugcggcagaauguuaacuaggaugugguauuguagcuacugccaaggccugaugaugguuaaaccaugugggggauauugcaaugugguaaugcaggguuguauggccggcguggucgagaucgauaaguacuggcgggaauacauucucucccuugaggaacuggugaacgggauguaucgcaucuacgacauggagaauguuuugcuaggacuguucucaaccauacaugacaguauucaguaugugcagaagaacgcuggcaaacucacaacuaccaucgguaagcugugcgcccacagccaacagcgacaguacagaucugcauauuaccccgaagaucuuuuuauugacaaaaagguccugaaaguggcucauguagagcacgaggaaacauuguccucaaggcggcgugagcucauccagaagcugaaaaguuucaucagcuuuuauucugccuuaccgggguacauuugcucccacagcccuguugcggaaaacgauacccuguguuggaauggacaagagcuaguggaacgcuacucgcagaaggccgcaagaaacggcaugaagaaucaguucaaccuccaugagcugaaaaugaagggccccgagccagucgugucucagauaaucgacaaacuuaagcacauuaaucaauugcugaggacgauguccaugccuaaagggcggguccucgauaagaaccuggacgaagagggauuugaaucaggugauugcggcgacgaugaggacgaauguaucgggggaaguggcgaugguaugauaaaggugaaaaaucagcuucgauuccuggcugaguuggccuaugaccucgacguugaugacgcucccgggaacagccagcaggccacuccaaaggauaaugagauuuccacauuucauaaccugggcaaugugcacucucccuuaaaacugcuaaccagcauggcaaucucaguagucugcuucuuuuuccucgugcacuga

SEQ ID NO: 1796 - RNA, 1743 nt, Artificial Sequence
  derived and/or modified sequence opt4 from GPC3__Homo_sapiens__EAX11770
auggccggcaccgugagaaccgccugccuggugguggccaugcugcugagccuggacuuccccggccaggcccagccccccccccccccccccgacgccaccugccaccaggugagaagcuucuuccagagacugcagcccggccugaagugggugcccgagacccccgugcccggcagcgaccugcaggugugccugcccaagggccccaccugcugcagcagaaagauggaggagaaguaccagcugaccgccagacugaacauggagcagcugcugcagagcgccagcauggagcugaaguuccugaucauccagaacgccgccguguuccaggaggccuucgagaucguggugagacacgccaagaacuacaccaacgccauguucaagaacaacuaccccagccugaccccccaggccuucgaguucgugggcgaguucuucaccgacgugagccuguacauccugggcagcgacaucaacguggacgacauggugaacgagcuguucgacagccuguuccccgugaucuacacccagcugaugaaccccggccugcccgacagcgcccuggacaucaacgagugccugagaggcgccagaagagaccugaagguguucggcaacuuccccaagcugaucaugacccaggugagcaagagccugcaggugaccagaaucuuccugcaggcccugaaccugggcaucgaggugaucaacaccaccgaccaccugaaguucagcaaggacugcggcagaaugcugaccagaaugugguacugcagcuacugccagggccugaugauggugaagcccugcggcggcuacugcaacguggugaugcagggcugcauggccggcgugguggagaucgacaaguacuggagagaguacauccugagccuggaggagcuggugaacggcauguacagaaucuacgacauggagaacgugcugcugggccuguucagcaccauccacgacagcauccaguacgugcagaagaacgccggcaagcugaccaccaccaucggcaagcugugcgcccacagccagcagagacaguacagaagcgccuacuaccccgaggaccuguucaucgacaagaaggugcugaagguggcccacguggagcacgaggagacccugagcagcagaagaagagagcugauccagaagcugaagagcuucaucagcuucuacagcgcccugcccggcuacaucugcagccacagccccguggccgagaacgacacccugugcuggaacggccaggagcugguggagagauacagccagaaggccgccagaaacggcaugaagaaccaguucaaccugcacgagcugaagaugaagggccccgagcccguggugagccagaucaucgacaagcugaagcacaucaaccagcugcugagaaccaugagcaugcccaagggcagagugcuggacaagaaccuggacgaggagggcuucgagagcggcgacugcggcgacgacgaggacgagugcaucggcggcagcggcgacggcaugaucaaggugaagaaccagcugagauuccuggccgagcuggccuacgaccuggacguggacgacgcccccggcaacagccagcaggccacccccaaggacaacgagaucagcaccuuccacaaccugggcaacgugcacagcccccugaagcugcugaccagcauggccaucagcguggugugcuucuucuuccuggugcacuga

SEQ ID NO: 1797 - RNA, 1743 nt, Artificial Sequence
  derived and/or modified sequence opt5 from GPC3__Homo_sapiens__EAX11770
auggccggcaccgugagaacagcuugccuggucguugccaugcuccugagccuugacuuccccgggcaggcgcaaccuccgcccccucccccugaugcuacgugucaccaggugcgguccuuuuuccagcgccugcagcccggacucaagugggugccugagaccccgguccccggcucugaccugcaagugugccuuccuaaagggcccacauguugcagcagaaagauggaagagaaauaccagcugaccgcccggcucaacauggaacagcugcugcaguccgccucuauggagcucaaguuucugaucauucaaaaugcugccguuuuccaggaggcuuuugaaaucgugguccgccaugccaaaaacuauacaaaugcgauguucaagaacaauuacccuagccuuacaccccaggccuuugaguucgugggagaauuuuucaccgauguuucccuguauauucucggcucugacaucaacguggaugacauggucaaugagcuguuugauagccuuuucccggugauuuacacccagcugaugaacccugggcuccccgacuccgcucuggauaucaaugaaugucugagaggagcccggcgcgaccucaagguguuuggcaacuucccuaaacugaucaugacgcaagucagcaagucucuucagguuaccagaauuuuccugcaggcucucaaucugggcaucgaggugauuaacacaaccgaucaccuuaaauuuuccaaggacugcgggcggaugcugacacgcaugugguauuguagcuacugccaaggacucaugauggugaaacccuguggcggguauugcaaugucgugaugcagggauguauggccggcguuguggagaucgauaaguacuggagagaauacauucugucucuggaggaacucgucaacgggauguaucggaucuacgacauggagaaugugcugcuuggacuguucuccaccauucaugacagcauccaguauguucagaagaacgcgggcaaacucacgacaaccaucggcaagcugugcgcccacucucaacagcgccaguacagauccgcuuauuaccccgaagaucuuuuuauugacaaaaaggugcugaaagucgcccauguggagcacgaggaaacacucagcucccggcgcagagagcugauccagaagcugaaaucuuucauuagcuuuuauuccgcucucccuggguacaucugcagccacucuccggucgccgaaaacgauacccuguguuggaauggacaagagcuuguggaacgguacucccagaaggccgcuagaaacggcaugaagaaucaguucaaccugcaugagcucaaaaugaaggggcccgagccuguugugagccagauuaucgacaaacugaagcacaucaaucaacugcuucgcaccaugucuaugcccaaaggacggguccucgauaagaaccuggacgaagagggcuuugaaagcggggauugcggagacgaugaggacgaauguauuggcggcuccggggauggaaugaucaaggugaaaaaucagcugagauuccucgcggagcuggccuaugaccuugacguugaugacgcuccuggcaacucucagcaggccacacccaaggauaaugagauuagcacguuucauaaccuggggaaugugcacuccccgcucaaacugcugaccagcauggccaucucugucgugugcuucuuuuuccuugugcacuga

SEQ ID NO: 1798 - protein, 580 aa, Artificial Sequence; identical to SEQ ID NO: 1791
  GPC3__Homo_sapiens__P51654

SEQ ID NO: 1799 - RNA, 1743 nt, Artificial Sequence
  GPC3__Homo_sapiens__AAA93471
auggccgggaccgugcgcaccgcgugcuuggugguggcgaugcugcucagcuuggacuucccgggacaggcgcagcccccgccgccgccgccggacgccaccugucaccaaguccgcuccuucuuccagagacugcagcccggacucaagugggugccagaaacucccgugccaggaucagauuugcaaguaugucucccuaagggcccaacaugcugcucaagaaagauggaagaaaaauaccaacuaacagcucgauugaacauggaacagcugcuucagucugcaaguauggagcucaaguucuuaauuauucagaaugcugcgguuuuccaagaggccuuugaaauuguuguucgccaugccaagaacuacaccaaugccauguucaagaacaacuacccaagccugacuccacaagcuuuugaguuugugggugaauuuuucacagaugugucucucuacaucuuggguucugacaucaauguagaugacauggucaaugaauuguuugacagccuguuuccagucaucuauacccagcuaaugaacccaggccugccugauucagccuuggacaucaaugagugccuccgaggagcaagacgugaccugaaaguauuugggaauuuccccaagcuuauuaugacccagguuuccaagucacugcaagucacuaggaucuuccuucaggcucugaaucuuggaauugaagugaucaacacaacugaucaccugaaguucaguaaggacuguggccgaaugcucaccagaaugugguacugcucuuacugccagggacugaugaugguuaaacccuguggcgguuacugcaauguggucaugcaaggcuguauggcaggugugguggagauugacaaguacuggagagaauacauucugucccuugaagaacuugugaauggcauguacagaaucuaugacauggagaacguacugcuuggucucuuuucaacaauccaugauucuauccaguauguccagaagaaugcaggaaagcugaccaccacuauuggcaaguuaugugcccauucucaacaacgccaauauagaucugcuuauuauccugaagaucucuuuauugacaagaaaguauuaaaaguugcucauguagaacaugaagaaaccuuauccagccgaagaagggaacuaauucagaaguugaagucuuucaucagcuucuauagugcuuugccuggcuacaucugcagccauagcccuguggcggaaaacgacacccuuugcuggaauggacaagaacucguggagagauacagccaaaaggcagcaaggaauggaaugaaaaaccaguucaaucuccaugagcugaaaaugaagggcccugagccaguggucagucaaauuauugacaaacugaagcacauuaaccagcuccugagaaccaugucuaugcccaaagguagaguucuggauaaaaaccuggaugaggaaggguuugaaaguggagacugcggugaugaugaagaugagugcauuggagggucuggugauggaaugauaaaagugaagaaucagcuccgcuuccuugcagaacuggccuaugaucuggauguggaugaugcgccuggaaacagucagcaggcaacuccgaaggacaacgagauaagcaccuuucacaaccucgggaacguucauuccccgcugaagcuucucaccagcauggccaucucgguggugugcuucuucuuccuggugcacuga

SEQ ID NO: 1800 - RNA, 1743 nt, Artificial Sequence; identical to SEQ ID NO: 1793
  derived and/or modified sequence opt1 from GPC3__Homo_sapiens__AAA93471

SEQ ID NO: 1801 - RNA, 1743 nt, Artificial Sequence; identical to SEQ ID NO: 1794
  derived and/or modified sequence opt2 from GPC3__Homo_sapiens__AAA93471

SEQ ID NO: 1802 - RNA, 1743 nt, Artificial Sequence; identical to SEQ ID NO: 1795
  derived and/or modified sequence opt3 from GPC3__Homo_sapiens__AAA93471

SEQ ID NO: 1803 - RNA, 1743 nt, Artificial Sequence; identical to SEQ ID NO: 1796
  derived and/or modified sequence opt4 from GPC3__Homo_sapiens__AAA93471

SEQ ID NO: 1804 - RNA, 1743 nt, Artificial Sequence; identical to SEQ ID NO: 1797
  derived and/or modified sequence opt5 from GPC3__Homo_sapiens__AAA93471

SEQ ID NO: 1805 - protein, 580 aa, Artificial Sequence [sequence omitted]

SEQ ID NO: 1806 - RNA, 1743 nt, Artificial Sequence
  GPC3__Homo_sapiens__AAH35972
auggccgggaccgugcgcaccgcgugcuuggugguggcgaugcugcucagcuuggacuucccgggacaggcgcagcccccgccgccgccgccggacgccaccugucaccaaguccgcuccuucuuccagagacugcagcccggacucaagugggugccagaaacucccgugccaggaucagauuugcaaguaugucucccuaagggcccaacaugcugcucaagaaagauggaagaaaaauaccaacuaacagcacgauugaacauggaacagcugcuucagucugcaaguauggagcucaaguucuuaauuauucagaaugcugcgguuuuccaagaggccuuugaaauuguuguucgccaugccaagaacuacaccaaugccauguucaagaacaacuacccaagccugacuccacaagcuuuugaguuugugggugaauuuuucacagaugugucucucuacaucuuggguucugacaucaauguagaugacauggucaaugaauuguuugacagccuguuuccagucaucuauacccagcuaaugaacccaggccugccugauucagccuuggacaucaaugagugccuccgaggagcaagacgugaccugaaaguauuugggaauuuccccaagcuuauuaugacccagguuuccaagucacugcaagucacuaggaucuuccuucaggcucugaaucuuggaauugaagugaucaacacaacugaucaccugaaguucaguaaggacuguggccgaaugcucaccagaaugugguacugcucuuacugccagggacugaugaugguuaaacccuguggcgguuacugcaauguggucaugcaaggcuguauggcaggugugguggagauugacaaguacuggagagaauacauucugucccuugaagaacuugugaauggcauguacagaaucuaugacauggagaacguacugcuuggucucuuuucaacaauccaugauucuauccaguauguccagaagaaugcaggaaagcugaccaccacuauuggcaaguuaugugcccauucucaacaacgccaauauagauuugcuuauuauccugaagaucucuuuauugacaagaaaguauuaaaaguugcucauguagaacaugaagaaaccuuauccagccgaagaagggaacuaauucagaaguugaagucuuucaucagcuucuauagugcuuugccuggcuacaucugcagccauagcccuguggcggaaaacgacacccuuugcuggaauggacaagaacucguggagagauacagccaaaaggcagcaaggaauggaaugaaaaaccaguucaaucuccaugagcugaaaaugaagggcccugagccaguggucagucaaauuauugacaaacugaagcacauuaaccagcuccugagaaccaugucuaugcccaaagguagaguucuggauaaaaaccuggaugaggaaggguuugaaaguggagacugcggugaugaugaagaugagugcauuggaggcucuggugauggaaugauaaaagugaagaaucagcuccgcuuccuugcagaacuggccuaugaucuggauguggaugaugcgccuggaaacagucagcaggcaacuccgaaggacaacgagauaagcaccuuucacaaccucgggaacguucauuccccgcugaagcuucucaccagcauggccaucucgguggugugcuucuucuuccuggugcacuga

SEQ ID NO: 1807 - RNA, 1743 nt, Artificial Sequence
  derived and/or modified sequence opt1 from GPC3__Homo_sapiens__AAH35972
auggccggcaccgugcgcaccgccugccuggucguggcgaugcuccugagccuggacuuccccgggcaggcccagccgcccccgccgccgcccgacgccacgugccaccaggugcgguccuucuuccagcgccuccagcccggccugaaguggguccccgagacccccgugcccgggagcgaccuccaggugugccugcccaagggcccgaccugcugcucccggaagauggaggagaaguaccagcugaccgcccgccugaacauggagcagcuccugcagagcgccuccauggagcugaaguuccucaucauccagaacgcggccgucuuccaggaggccuucgagaucguggugcggcacgccaagaacuacacgaacgcgauguucaagaacaacuaccccagccugacgccccaggccuucgaguucgucggggaguucuucaccgacgugucccuguacauccucggcagcgacaucaacguggacgacauggucaacgagcuguucgacucccuguuccccgugaucuacacccagcucaugaaccccggccugccggacagcgcccuggacaucaacgagugccuccgcggggcccggcgcgaccugaagguguucggcaacuuccccaagcugaucaugacccaggucuccaagagccuccaggugacccggaucuuccugcaggcccugaaccucgggaucgaggugaucaacaccaccgaccaccugaaguucuccaaggacugcggccgcaugcugacgcggaugugguacugcagcuacugccaggggcucaugauggucaagcccugcggcggcuacugcaacguggugaugcaggggugcauggcgggcgucguggagaucgacaaguacuggcgcgaguacauccugucccuggaggagcucgugaacgggauguaccggaucuacgacauggagaacguccugcugggccucuucagcaccauccacgacuccauccaguacgugcagaagaacgccggcaagcugaccaccacgaucgggaagcugugcgcccacagccagcagcgccaguaccgguucgccuacuaccccgaggaccucuucaucgacaagaagguccugaagguggcccacguggagcacgaggagacccuguccagccgccggcgcgagcucauccagaagcucaagagcuucaucuccuucuacagcgcgcugcccggcuacaucugcucccacagccccgucgccgagaacgacacccugugcuggaacgggcaggagcugguggagcgguacucccagaaggccgcccgcaacggcaugaagaaccaguucaaccugcacgagcucaagaugaaggggcccgagcccguggucagccagaucaucgacaagcugaagcacaucaaccagcugcugcggaccauguccaugccgaagggccgcgugcucgacaagaaccuggacgaggagggcuucgagagcggggacugcggcgacgacgaggacgagugcaucgggggcuccggggacggcaugaucaaggugaagaaccagcugcgcuuccucgccgagcuggcguacgaccuggacgucgacgacgcccccggcaacagccagcaggccacgcccaaggacaacgagaucuccaccuuccacaaccucgggaacgugcacagcccccugaagcugcucaccuccauggccaucagcguggucugcuucuucuuccuggugcacuga

SEQ ID NO: 1808 - RNA, 1743 nt, Artificial Sequence
  derived and/or modified sequence opt2 from GPC3__Homo_sapiens__AAH35972
auggccggcaccguccgcaccgccugccucgucgucgccaugcuccucucccucgacuuccccggccaggcccagccccccccccccccccccgacgccaccugccaccagguccgcuccuucuuccagcgccuccagcccggccucaaguggguccccgagacccccguccccggcuccgaccuccaggucugccuccccaagggccccaccugcugcucccgcaagauggaggagaaguaccagcucaccgcccgccucaacauggagcagcuccuccaguccgccuccauggagcucaaguuccucaucauccagaacgccgccgucuuccaggaggccuucgagaucgucguccgccacgccaagaacuacaccaacgccauguucaagaacaacuaccccucccucaccccccaggccuucgaguucgucggcgaguucuucaccgacgucucccucuacauccucggcuccgacaucaacgucgacgacauggucaacgagcucuucgacucccucuuccccgucaucuacacccagcucaugaaccccggccuccccgacuccgcccucgacaucaacgagugccuccgcggcgcccgccgcgaccucaaggucuucggcaacuuccccaagcucaucaugacccaggucuccaagucccuccaggucacccgcaucuuccuccaggcccucaaccucggcaucgaggucaucaacaccaccgaccaccucaaguucuccaaggacugcggccgcaugcucacccgcaugugguacugcuccuacugccagggccucaugauggucaagcccugcggcggcuacugcaacgucgucaugcagggcugcauggccggcgucgucgagaucgacaaguacuggcgcgaguacauccucucccucgaggagcucgucaacggcauguaccgcaucuacgacauggagaacguccuccucggccucuucuccaccauccacgacuccauccaguacguccagaagaacgccggcaagcucaccaccaccaucggcaagcucugcgcccacucccagcagcgccaguaccgcuucgccuacuaccccgaggaccucuucaucgacaagaagguccucaaggucgcccacgucgagcacgaggagacccucuccucccgccgccgcgagcucauccagaagcucaaguccuucaucuccuucuacuccgcccuccccggcuacaucugcucccacucccccgucgccgagaacgacacccucugcuggaacggccaggagcucgucgagcgcuacucccagaaggccgcccgcaacggcaugaagaaccaguucaaccuccacgagcucaagaugaagggccccgagcccgucgucucccagaucaucgacaagcucaagcacaucaaccagcuccuccgcaccauguccaugcccaagggccgcguccucgacaagaaccucgacgaggagggcuucgaguccggcgacugcggcgacgacgaggacgagugcaucggcggcuccggcgacggcaugaucaaggucaagaaccagcuccgcuuccucgccgagcucgccuacgaccucgacgucgacgacgcccccggcaacucccagcaggccacccccaaggacaacgagaucuccaccuuccacaaccucggcaacguccacuccccccucaagcuccucaccuccauggccaucuccgucgucugcuucuucuuccucguccacuga

SEQ ID NO: 1809 - RNA, 1743 nt, Artificial Sequence
  derived and/or modified sequence opt3 from GPC3__Homo_sapiens__AAH35972
auggccggcaccgugagaacagcuugccuggucguugcaaugcuccuuagccuggacuuccccgggcaggcccaaccuccaccgcccccuccagaugcgacuugucaccaggugagguccuuuuuccagcgguugcagcccggauuaaaguggguaccugagacgccagugcccgguucugaccugcaagucugccuaccuaaaggcccaaccuguugcucacgcaagauggaagagaaauaccagcucacagcucgacugaacauggaacagcuucugcagagugccagcauggaguugaaguuucucaucauucaaaaugcagccguguuccaggaagcauuugagauaguugugcgucaugcuaaaaacuauacuaaugccauguucaagaacaauuacccgucccugacaccccaggcuuuugaguucgucggggaauuuuucaccgaugugucucuguauauccucggaucggacauuaacguagaugacaugguuaaugaguuauuugauucacuguucccugugaucuacacccagcuuaugaacccaggcuugcccgacagcgcccuggauauuaaugaaugucuaagaggugcgaggcgggaccucaaggucuuugggaacuucccuaaacugaucaugacucaagugaguaagucccuucaggugacacgcauauuccugcaggcauugaaucucggaaucgaggucauuaacaccacggaucaccugaaauuuucuaaggacugcggcagaauguuaacuaggaugugguauuguagcuacugccaaggccugaugaugguuaaaccaugugggggauauugcaaugugguaaugcaggguuguauggccggcguggucgagaucgauaaguacuggcgggaauacauucucucccuugaggaacuggugaacgggauguaucgcaucuacgacauggagaauguuuugcuaggacuguucucaaccauacaugacaguauucaguaugugcagaagaacgcuggcaaacucacaacuaccaucgguaagcugugcgcccacagccaacagcgacaguacagauuugcauauuaccccgaagaucuuuucauugacaaaaagguccugaaaguggcucauguagagcacgaggaaacauugucuuccaggcggcgugagcucauccagaagcugaaaucauuuaucagcuucuauagugccuuaccgggguacauuugcucucacuccccuguugcggaaaacgauacccuguguuggaauggacaagagcuaguggaacgcuacagccagaaggccgcaagaaacggcaugaagaaucaguuuaaccuccaugagcugaaaaugaagggccccgagccagucgugucgcagauaaucgacaaacuuaagcacauuaaucaauugcugaggacgaugucuaugccuaaagggcggguccucgauaagaaccuggacgaagagggauucgaauccggugauugcggcgacgaugaggacgaauguaucgggggaucaggcgaugguaugauaaaggugaaaaaucagcuucgauuucuggcugaguuggccuaugaccucgacguugaugacgcucccgggaacagucagcaggccacuccaaaggauaaugagauuagcacauuccauaaccugggcaaugugcacucccccuuaaaacugcuaaccucuauggcaaucagcguagucugcuuuuucuuucucgugcacuga

SEQ ID NO: 1810 - RNA, 1743 nt, Artificial Sequence
  derived and/or modified sequence opt4 from GPC3__Homo_sapiens__AAH35972
auggccggcaccgugagaaccgccugccuggugguggccaugcugcugagccuggacuuccccggccaggcccagccccccccccccccccccgacgccaccugccaccaggugagaagcuucuuccagagacugcagcccggccugaagugggugcccgagacccccgugcccggcagcgaccugcaggugugccugcccaagggccccaccugcugcagcagaaagauggaggagaaguaccagcugaccgccagacugaacauggagcagcugcugcagagcgccagcauggagcugaaguuccugaucauccagaacgccgccguguuccaggaggccuucgagaucguggugagacacgccaagaacuacaccaacgccauguucaagaacaacuaccccagccugaccccccaggccuucgaguucgugggcgaguucuucaccgacgugagccuguacauccugggcagcgacaucaacguggacgacauggugaacgagcuguucgacagccuguuccccgugaucuacacccagcugaugaaccccggccugcccgacagcgcccuggacaucaacgagugccugagaggcgccagaagagaccugaagguguucggcaacuuccccaagcugaucaugacccaggugagcaagagccugcaggugaccagaaucuuccugcaggcccugaaccugggcaucgaggugaucaacaccaccgaccaccugaaguucagcaaggacugcggcagaaugcugaccagaaugugguacugcagcuacugccagggccugaugauggugaagcccugcggcggcuacugcaacguggugaugcagggcugcauggccggcgugguggagaucgacaaguacuggagagaguacauccugagccuggaggagcuggugaacggcauguacagaaucuacgacauggagaacgugcugcugggccuguucagcaccauccacgacagcauccaguacgugcagaagaacgccggcaagcugaccaccaccaucggcaagcugugcgcccacagccagcagagacaguacagauucgccuacuaccccgaggaccuguucaucgacaagaaggugcugaagguggcccacguggagcacgaggagacccugagcagcagaagaagagagcugauccagaagcugaagagcuucaucagcuucuacagcgcccugcccggcuacaucugcagccacagccccguggccgagaacgacacccugugcuggaacggccaggagcugguggagagauacagccagaaggccgccagaaacggcaugaagaaccaguucaaccugcacgagcugaagaugaagggccccgagcccguggugagccagaucaucgacaagcugaagcacaucaaccagcugcugagaaccaugagcaugcccaagggcagagugcuggacaagaaccuggacgaggagggcuucgagagcggcgacugcggcgacgacgaggacgagugcaucggcggcagcggcgacggcaugaucaaggugaagaaccagcugagauuccuggccgagcuggccuacgaccuggacguggacgacgcccccggcaacagccagcaggccacccccaaggacaacgagaucagcaccuuccacaaccugggcaacgugcacagcccccugaagcugcugaccagcauggccaucagcguggugugcuucuucuuccuggugcacuga

SEQ ID NO: 1811 - RNA, 1743 nt, Artificial Sequence
  derived and/or modified sequence opt5 from GPC3__Homo_sapiens__AAH35972
auggccggcaccgugagaacagcuugccuggucguugccaugcuccugagccuugacuuccccgggcaggcgcaaccuccgcccccucccccugaugcuacgugucaccaggugcgguccuuuuuccagcgccugcagcccggacucaagugggugccugagaccccgguccccggcucugaccugcaagugugccuuccuaaagggcccacauguugcagcagaaagauggaagagaaauaccagcugaccgcccggcucaacauggaacagcugcugcaguccgccucuauggagcucaaguuucugaucauucaaaaugcugccguuuuccaggaggcuuuugaaaucgugguccgccaugccaaaaacuauacaaaugcgauguucaagaacaauuacccuagccuuacaccccaggccuuugaguucgugggagaauuuuucaccgauguuucccuguauauucucggcucugacaucaacguggaugacauggucaaugagcuguuugauagccuuuucccggugauuuacacccagcugaugaacccugggcuccccgacuccgcucuggauaucaaugaaugucugagaggagcccggcgcgaccucaagguguuuggcaacuucccuaaacugaucaugacgcaagucagcaagucucuucagguuaccagaauuuuccugcaggcucucaaucugggcaucgaggugauuaacacaaccgaucaccuuaaauuuuccaaggacugcgggcggaugcugacacgcaugugguauuguagcuacugccaaggacucaugauggugaaacccuguggcggguauugcaaugucgugaugcagggauguauggccggcguuguggagaucgauaaguacuggagagaauacauucugucucuggaggaacucgucaacgggauguaucggaucuacgacauggagaaugugcugcuuggacuguucuccaccauucaugacagcauccaguauguucagaagaacgcgggcaaacucacgacaaccaucggcaagcugugcgcccacucucaacagcgccaguacagauuugcuuauuaccccgaagaucuuuucauugacaaaaaggugcugaaagucgcccauguggagcacgaggaaacacucuccagccggcgcagagagcugauccagaagcugaaauccuuuauuucuuucuauagcgcucucccuggguacaucugcucccacagcccggucgccgaaaacgauacccuguguuggaauggacaagagcuuguggaacgguacucucagaaggccgcuagaaacggcaugaagaaucaguuuaaccugcaugagcucaaaaugaaggggcccgagccuguugugucccagauuaucgacaaacugaagcacaucaaucaacugcuucgcaccaugagcaugcccaaaggacggguccucgauaagaaccuggacgaagagggcuucgaaucuggggauugcggagacgaugaggacgaauguauuggcggcagcggggauggaaugaucaaggugaaaaaucagcugagauuucucgcggagcuggccuaugaccuugacguugaugacgcuccuggcaacucccagcaggccacacccaaggauaaugagauuucuacguuccauaaccuggggaaugugcacagcccgcucaaacugcugaccuccauggccaucagcgucgugugcuuuuucuuucuugugcacuga

SEQ ID NO: 1812 - protein, 560 aa, Artificial Sequence
  GPNMB/m__Homo_sapiens__A0A024RA55
MECLYYFLGFLLLAARLPLDAAKRFHDVLGNERPSAYMREHNQLNGWSSDENDWNEKLYPVWKRGDMRWKNSWKGGRVQAVLTSDSPALVGSNITFAVNLIFPRCQKEDANGNIVYEKNCRNEAGLSADPYVYNWTAWSEDSDGENGTGQSHHNVFPDGKPFPHHPGWRRWNFIYVFHTLGQYFQKLGRCSVRVSVNTANVTLGPQLMEVTVYRRHGRAYVPIAQVKDVYVVTDQIPVFVTMFQKNDRNSSDETFLKDLPIMFDVLIHDPSHFLNYSTINYKWSFGDNTGLFVSTNHTVNHTYVLNGTFSLNLTVKAAAPGPCPPPPPPPRPSKPTPSLGPAGDNPLELSRIPDENCQINRYGHFQATITIVEGILEVNIIQMTDVLMPVPWPESSLIDFVVTCQGSIPTEVCTIISDPTCEITQNTVCSPVDVDEMCLLTVRRTFNGSGTYCVNLTLGDDTSLALTSTLISVPDRDPASPLRMANSALISVGCLAIFVTVISLLVYKKHKEYNPIENSPGNVVRSKGLSVFLNRAKAVFFPGNQEKDPLLKNQEFKGVS

SEQ ID NO: 1813 - RNA, 1683 nt, Artificial Sequence
  GPNMB/m__Homo_sapiens__EAW93784
auggaaugucucuacuauuuccugggauuucugcuccuggcugcaagauugccacuugaugccgccaaacgauuucaugaugugcugggcaaugaaagaccuucugcuuacaugagggagcacaaucaauuaaauggcuggucuucugaugaaaaugacuggaaugaaaaacucuacccaguguggaagcggggagacaugagguggaaaaacuccuggaagggaggccgugugcaggcgguccugaccagugacucaccagcccucgugggcucaaauauaacauuugcggugaaccugauauucccuagaugccaaaaggaagaugccaauggcaacauagucuaugagaagaacugcagaaaugaggcugguuuaucugcugauccguauguuuacaacuggacagcauggucagaggacagugacggggaaaauggcaccggccaaagccaucauaacgucuucccugaugggaaaccuuuuccucaccaccccggauggagaagauggaauuucaucuacgucuuccacacacuuggucaguauuuccagaaauugggacgauguucagugagaguuucugugaacacagccaaugugacacuugggccucaacucauggaagugacugucuacagaagacauggacgggcauauguucccaucgcacaagugaaagauguguacgugguaacagaucagauuccuguguuugugacuauguuccagaagaacgaucgaaauucauccgacgaaaccuuccucaaagaucuccccauuauguuugauguccugauucaugauccuagccacuuccucaauuauucuaccauuaacuacaaguggagcuucggggauaauacuggccuguuuguuuccaccaaucauacugugaaucacacguaugugcucaauggaaccuucagccuuaaccucacugugaaagcugcagcaccaggaccuuguccgccaccgccaccaccacccagaccuucaaaacccaccccuucuuuaggaccugcuggugacaacccccuggagcugaguaggauuccugaugaaaacugccagauuaacagauauggccacuuucaagccaccaucacaauuguagagggaaucuuagagguuaacaucauccagaugacagacguccugaugccggugccauggccugaaagcucccuaauagacuuugucgugaccugccaagggagcauucccacggaggucuguaccaucauuucugaccccaccugcgagaucacccagaacacagucugcagcccuguggauguggaugagaugugucugcugacugugagacgaaccuucaaugggucugggacguacugugugaaccucacccugggggaugacacaagccuggcucucacgagcacccugauuucuguuccugacagagacccagccucgccuuuaaggauggcaaacagugcccugaucuccguuggcugcuuggccauauuugucacugugaucucccucuugguguacaaaaaacacaaggaauacaacccaauagaaaauaguccugggaauguggucagaagcaaaggccugagugucuuucucaaccgugcaaaagccguguucuucccgggaaaccaggaaaaggauccgcuacucaaaaaccaagaauuuaaaggaguuucuuaa

SEQ ID NO: 1814 - RNA, 1683 nt, Artificial Sequence
  derived and/or modified sequence opt1 from GPNMB/m__Homo_sapiens__EAW93784
auggagugccuguacuacuuccucggcuuccugcugcucgccgcccgccugccccuggacgcggccaagcgguuccacgacgugcucgggaacgagcgcccgagcgccuacaugcgggagcacaaccagcugaacggcugguccagcgacgagaacgacuggaacgagaagcuguaccccgucuggaagcgcggggacaugcgguggaagaacuccuggaagggcgggcgcgugcaggccgugcucaccagcgacucccccgcccuggucggcagcaacaucaccuucgcggugaaccugaucuucccccggugccagaaggaggacgccaacggcaacaucguguacgagaagaacugccgcaacgaggccgggcucuccgccgacccguacgucuacaacuggacggcguggagcgaggacuccgacggcgagaacgggaccggccagagccaccacaacguguuccccgacgggaagcccuucccccaccacccgggcuggcggcgcuggaacuucaucuacguguuccacacccugggccaguacuuccagaagcuggggcggugcuccguccgcgugagcgugaacaccgccaacgucacgcucggcccccagcugauggaggugaccguguaccggcgccacgggcgggccuacguccccaucgcccaggugaaggacguguacgucgugaccgaccagauccccguguucgucaccauguuccagaagaacgaccgcaacuccagcgacgagacguuccugaaggaccucccgaucauguucgacgugcugauccacgaccccucccacuuccugaacuacagcaccaucaacuacaagugguccuucggcgacaacaccggccucuucgugagcaccaaccacacggucaaccacaccuacgugcugaacgggaccuucucccugaaccucaccgucaaggccgcggcccccggccccugcccgcccccgccgcccccgccccggcccagcaagcccacgcccagccuggggcccgccggcgacaacccccuggagcucucccgcauccccgacgagaacugccagaucaaccgguacgggcacuuccaggccaccaucaccaucguggagggcauccuggaggugaacaucauccagaugaccgacguccugaugcccgugcccuggccggagagcucccucaucgacuucguggucacgugccagggcagcauccccaccgaggugugcaccaucaucuccgacccgaccugcgagaucacgcagaacaccgugugcagccccgucgacguggacgagaugugccugcugaccgugcgccggaccuucaacggguccggcacguacugcgucaaccucacccugggggacgacaccagccuggcccucaccuccacgcugaucagcgugcccgaccgcgaccccgcgagcccccugcgcauggccaacuccgcccucaucuccgugggcugccuggccaucuucgucaccgugaucagccugcucguguacaagaagcacaaggaguacaaccccaucgagaacuccccggggaacgucgugcggagcaagggccuguccguguuccugaaccgcgccaaggcggucuucuuccccggcaaccaggagaaggacccccuccugaagaaccaggaguucaagggggugagcuga

SEQ ID NO: 1815 - RNA, 1683 nt, Artificial Sequence
  derived and/or modified sequence opt2 from GPNMB/m__Homo_sapiens__EAW93784
auggagugccucuacuacuuccucggcuuccuccuccucgccgcccgccucccccucgacgccgccaagcgcuuccacgacguccucggcaacgagcgccccuccgccuacaugcgcgagcacaaccagcucaacggcugguccuccgacgagaacgacuggaacgagaagcucuaccccgucuggaagcgcggcgacaugcgcuggaagaacuccuggaagggcggccgcguccaggccguccucaccuccgacucccccgcccucgucggcuccaacaucaccuucgccgucaaccucaucuucccccgcugccagaaggaggacgccaacggcaacaucgucuacgagaagaacugccgcaacgaggccggccucuccgccgaccccuacgucuacaacuggaccgccugguccgaggacuccgacggcgagaacggcaccggccagucccaccacaacgucuuccccgacggcaagcccuucccccaccaccccggcuggcgccgcuggaacuucaucuacgucuuccacacccucggccaguacuuccagaagcucggccgcugcuccguccgcgucuccgucaacaccgccaacgucacccucggcccccagcucauggaggucaccgucuaccgccgccacggccgcgccuacguccccaucgcccaggucaaggacgucuacgucgucaccgaccagauccccgucuucgucaccauguuccagaagaacgaccgcaacuccuccgacgagaccuuccucaaggaccuccccaucauguucgacguccucauccacgaccccucccacuuccucaacuacuccaccaucaacuacaagugguccuucggcgacaacaccggccucuucgucuccaccaaccacaccgucaaccacaccuacguccucaacggcaccuucucccucaaccucaccgucaaggccgccgcccccggccccugcccccccccccccccccccccccgccccuccaagcccacccccucccucggccccgccggcgacaacccccucgagcucucccgcauccccgacgagaacugccagaucaaccgcuacggccacuuccaggccaccaucaccaucgucgagggcauccucgaggucaacaucauccagaugaccgacguccucaugcccguccccuggcccgaguccucccucaucgacuucgucgucaccugccagggcuccauccccaccgaggucugcaccaucaucuccgaccccaccugcgagaucacccagaacaccgucugcucccccgucgacgucgacgagaugugccuccucaccguccgccgcaccuucaacggcuccggcaccuacugcgucaaccucacccucggcgacgacaccucccucgcccucaccuccacccucaucuccguccccgaccgcgaccccgccuccccccuccgcauggccaacuccgcccucaucuccgucggcugccucgccaucuucgucaccgucaucucccuccucgucuacaagaagcacaaggaguacaaccccaucgagaacucccccggcaacgucguccgcuccaagggccucuccgucuuccucaaccgcgccaaggccgucuucuuccccggcaaccaggagaaggacccccuccucaagaaccaggaguucaagggcgucuccuga

SEQ ID NO: 1816 - RNA, 1683 nt, Artificial Sequence
  derived and/or modified sequence opt3 from GPNMB/m__Homo_sapiens__EAW93784
auggagugccuauacuauuuccucggcuuucuucuguuggccgcuagauuaccccuggacgcagccaagagguuccacgaugugcuagggaacgaacggccuagcgcguacaugcgcgagcauaaucagcucaacggaugguccucugacgaaaaugauuggaacgagaaacuguauccagucuggaagcgaggugacaugcguuggaaaaauucauggaagggcgggagaguucaagcugugcuuaccagugauagcccggcccugguaggauccaacaucacauuugcagugaauuugauuuuccccaggugucagaaagaagacgccaacggcaauauagucuacgagaagaacugccggaaugaggcuggucucucugcagauccuuauguguacaacuggacugccuggucggaagacucagauggggagaauggaacgggccagagccaccauaacguuuuuccagacggcaagcccuucccucaccauccaggguggcgcagauggaauuuuaucuauguguuccacacccugggacaguacuuucaaaaacuggguagguguaguguccggguguccguaaacacagcuaacguuacucucggcccccaguuaauggaagugaccgucuaccgccgacacgggagagccuaugugccuauugcgcaagugaaggaugucuacguugugacagaccagaucccaguauucgugaccauguuucagaaaaaugauaggaacucuagcgacgagacuuuccugaaggaccuuccgauuauguuugaugucuugauccaugaccccucccacuuccugaauuauucaacaauaaacuacaaauggaguuucggagauaauaccggccuauuugugagcacgaaccauacuguuaaucacaccuaugugcucaacgguacauucucucugaaucuuacugucaaggcagccgcuccugggccaugucccccuccacccccgccuccccggccauccaagccuacccccucacugggaccagccggcgacaaccccuuggagcucagccguaucccugaugaaaauugccagauuaaccgcuacggccacuuucaggcaacaaucaccauuguggaggggauccuggaaguaaauauaauucagaugacggacguuuuaaugccagugccguggcccgagaguucucugaucgauuucgucgugacuugccaaggauccauuccuacagaagucuguaccaucaucagcgacccaacuugcgagauuacacagaacaccguguguucgcccguugauguggacgagaugugccuccuuacgguaagaaggaccuuuaaugguucuggcacauauugugucaaccugacuuugggggaugacaccucccuagcucugacaucaacucucauaagugugccugaccgggauccagccagcccccugcgaauggcgaacuccgcccuuaucucuguuggaugccuggcaauuuucgugaccgucaucagcuugcucguguacaaaaagcauaaagaauacaauccgauagagaacucaccuggcaauguagugcgcaguaagggucuguccgucuuuuuaaacagagcuaaagccguuuucuuuccagggaaucaggaaaaggacccccugcugaaaaaccaagaguucaagggcgugagcuga

SEQ ID NO: 1817 - RNA, 1683 nt, Artificial Sequence
  derived and/or modified sequence opt4 from GPNMB/m__Homo_sapiens__EAW93784
auggagugccuguacuacuuccugggcuuccugcugcuggccgccagacugccccuggacgccgccaagagauuccacgacgugcugggcaacgagagacccagcgccuacaugagagagcacaaccagcugaacggcuggagcagcgacgagaacgacuggaacgagaagcuguaccccguguggaagagaggcgacaugagauggaagaacagcuggaagggcggcagagugcaggccgugcugaccagcgacagccccgcccuggugggcagcaacaucaccuucgccgugaaccugaucuuccccagaugccagaaggaggacgccaacggcaacaucguguacgagaagaacugcagaaacgaggccggccugagcgccgaccccuacguguacaacuggaccgccuggagcgaggacagcgacggcgagaacggcaccggccagagccaccacaacguguuccccgacggcaagcccuucccccaccaccccggcuggagaagauggaacuucaucuacguguuccacacccugggccaguacuuccagaagcugggcagaugcagcgugagagugagcgugaacaccgccaacgugacccugggcccccagcugauggaggugaccguguacagaagacacggcagagccuacgugcccaucgcccaggugaaggacguguacguggugaccgaccagauccccguguucgugaccauguuccagaagaacgacagaaacagcagcgacgagaccuuccugaaggaccugcccaucauguucgacgugcugauccacgaccccagccacuuccugaacuacagcaccaucaacuacaaguggagcuucggcgacaacaccggccuguucgugagcaccaaccacaccgugaaccacaccuacgugcugaacggcaccuucagccugaaccugaccgugaaggccgccgcccccggccccugccccccccccccccccccccccagacccagcaagcccacccccagccugggccccgccggcgacaacccccuggagcugagcagaauccccgacgagaacugccagaucaacagauacggccacuuccaggccaccaucaccaucguggagggcauccuggaggugaacaucauccagaugaccgacgugcugaugcccgugcccuggcccgagagcagccugaucgacuucguggugaccugccagggcagcauccccaccgaggugugcaccaucaucagcgaccccaccugcgagaucacccagaacaccgugugcagccccguggacguggacgagaugugccugcugaccgugagaagaaccuucaacggcagcggcaccuacugcgugaaccugacccugggcgacgacaccagccuggcccugaccagcacccugaucagcgugcccgacagagaccccgccagcccccugagaauggccaacagcgcccugaucagcgugggcugccuggccaucuucgugaccgugaucagccugcugguguacaagaagcacaaggaguacaaccccaucgagaacagccccggcaacguggugagaagcaagggccugagcguguuccugaacagagccaaggccguguucuuccccggcaaccaggagaaggacccccugcugaagaaccaggaguucaagggcgugagcuga

SEQ ID NO: 1818 - RNA, 1683 nt, Artificial Sequence
  derived and/or modified sequence opt5 from GPNMB/m__Homo_sapiens__EAW93784
auggagugccuguacuauuuccucggcuuucugcuucuggccgcuagacucccccuggacgccgcgaagcgguuccacgaugugcuugggaacgaacgcccuagcgcuuacaugagagagcauaaucagcugaacggaugguccucugacgaaaaugauuggaacgagaaacucuauccggucuggaagcggggcgacaugcgcuggaaaaauagcuggaaagggggaagaguucaagccgugcugaccuccgauucucccgcccuggugggcagcaacaucacauuugcugucaaucucauuuucccucggugucagaaagaagacgccaacgggaauaucguguacgagaagaacugccgcaaugaggcuggacuguccgccgaucccuauguuuacaacuggacggcguggucugaagacagcgauggcgagaauggcaccgggcagucccaccauaacguguuuccugacggaaagcccuucccucaccauccgggcuggagacgguggaauuuuauuuaugucuuccacacacuugggcaguacuuucaaaaacugggacgcuguagcgugagaguuucugugaacaccgccaacgucacacucggcccccagcugauggaagugaccguguaccggcgccacgggagagcuuaugucccuaucgcccagguuaaggauguguacguggucacagaccagauucccguguucguuaccauguuucaaaagaaugaucggaacuccagcgacgagacguuccuuaaggaccugccuaucauguuugaugugcucauccaugaccccucucacuuccugaauuauuccaccauuaacuacaaauggagcuucggagauaauacaggccuguuugucucuaccaaccauacagugaaucacaccuauguucucaacggcacguucucccugaaucuuacagugaaggcugccgcgccggggccuugucccccucccccucccccgccccgcccuagcaagcccaccccuucccugggacccgccggcgacaacccgcucgagcugucuagaaucccugaugaaaauugccagauuaaccgguacgggcacuuucaggcuacaaucaccauugucgagggaauccuugaagugaauauuauccagaugaccgacguccugaugcccgugccuuggcccgagagcucccucaucgauuucguugugacaugccaaggcagcauuccuacggaagucuguaccaucauuucugaccccacaugcgagaucacccagaacacaguguguuccccgguugauguggacgagaugugccugcugaccgucagacgcacguuuaaugggagcggaacauauugugugaaccucacccugggcgaugacaccucucuugcccugacaagcacccucauuuccgugccugaccgggaucccgcuucuccccugagaauggccaacagcgcccuuaucuccguuggcugccuggcuaucuucgucacagugauuagccuccugguguacaaaaagcauaaagaauacaauccuaucgagaacucuccggggaaugucgugcgcuccaagggacugagcguuuuucucaaccgggcgaaagccguguucuuucccggcaaucaggaaaaggacccucugcuuaaaaaccaagaguucaagggggucucuuga

SEQ ID NO: 1819 - protein, 572 aa, Artificial Sequence
  GPNMB/m__Homo_sapiens__Q14956
MECLYYFLGFLLLAARLPLDAAKRFHDVLGNERPSAYMREHNQLNGWSSDENDWNEKLYPVWKRGDMRWKNSWKGGRVQAVLTSDSPALVGSNITFAVNLIFPRCQKEDANGNIVYEKNCRNEAGLSADPYVYNWTAWSEDSDGENGTGQSHHNVFPDGKPFPHHPGWRRWNFIYVFHTLGQYFQKLGRCSVRVSVNTANVTLGPQLMEVTVYRRHGRAYVPIAQVKDVYVVTDQIPVFVTMFQKNDRNSSDETFLKDLPIMFDVLIHDPSHFLNYSTINYKWSFGDNTGLFVSTNHTVNHTYVLNGTFSLNLTVKAAAPGPCPPPPPPPRPSKPTPSLATTLKSYDSNTPGPAGDNPLELSRIPDENCQINRYGHFQATITIVEGILEVNIIQMTDVLMPVPWPESSLIDFVVTCQGSIPTEVCTIISDPTCEITQNTVCSPVDVDEMCLLTVRRTFNGSGTYCVNLTLGDDTSLALTSTLISVPDRDPASPLRMANSALISVGCLAIFVTVISLLVYKKHKEYNPIENSPGNVVRSKGLSVFLNRAKAVFFPGNQEKDPLLKNQEFKGVS

SEQ ID NO: 1820 - RNA, 1719 nt, Artificial Sequence
  GPNMB/m__Homo_sapiens__AAH32783
auggaaugucucuacuauuuccugggauuucugcuccuggcugcaagauugccacuugaugccgccaaacgauuucaugaugugcugggcaaugaaagaccuucugcuuacaugagggagcacaaucaauuaaauggcuggucuucugaugaaaaugacuggaaugaaaaacucuacccaguguggaagcggggagacaugagguggaaaaacuccuggaagggaggccgugugcaggcgguccugaccagugacucaccagcccucgugggcucaaauauaacauuugcggugaaccugauauucccuagaugccaaaaggaagaugccaauggcaacauagucuaugagaagaacugcagaaaugaggcugguuuaucugcugauccguauguuuacaacuggacagcauggucagaggacagugacggggaaaauggcaccggccaaagccaucauaacgucuucccugaugggaaaccuuuuccucaccaccccggauggagaagauggaauuucaucuacgucuuccacacacuuggucaguauuuccagaaauugggacgauguucagugagaguuucugugaacacagccaaugugacacuugggccucaacucauggaagugacugucuacagaagacauggacgggcauauguucccaucgcacaagugaaagauguguacgugguaacagaucagauuccuguguuugugacuauguuccagaagaacgaucgaaauucauccgacgaaaccuuccucaaagaucuccccauuauguuugauguccugauucaugauccuagccacuuccucaauuauucuaccauuaacuacaaguggagcuucggggauaauacuggccuguuuguuuccaccaaucauacugugaaucacacguaugugcucaauggaaccuucagccuuaaccucacugugaaagcugcagcaccaggaccuuguccgccaccgccaccaccacccagaccuucaaaacccaccccuucuuuagcaacuacucuaaaaucuuaugauucaaacaccccaggaccugcuggugacaacccccuggagcugaguaggauuccugaugaaaacugccagauuaacagauauggccacuuucaagccaccaucacaauuguagagggaaucuuagagguuaacaucauccagaugacagacguccugaugccggugccauggccugaaagcucccuaauagacuuugucgugaccugccaagggagcauucccacggaggucuguaccaucauuucugaccccaccugcgagaucacccagaacacagucugcagcccuguggauguggaugagaugugucugcugacugugagacgaaccuucaaugggucugggacguacugugugaaccucacccugggggaugacacaagccuggcucucacgagcacccugauuucuguuccugacagagacccagccucgccuuuaaggauggcaaacagcgcccugaucuccguuggcugcuuggccauauuugucacugugaucucccucuugguguacaaaaaacacaaggaauacaacccaauagaaaauaguccugggaauguggucagaagcaaaggccugagugucuuucucaaccgugcaaaagccguguucuucccgggaaaccaggaaaaggauccgcuacucaaaaaccaagaauuuaaaggaguuucuuaa

SEQ ID NO: 1821 - RNA, 1719 nt, Artificial Sequence
  derived and/or modified sequence opt1 from GPNMB/m__Homo_sapiens__AAH32783
auggagugccuguacuacuuccucggcuuccugcugcucgccgcccgccugccccuggacgcggccaagcgguuccacgacgugcucgggaacgagcgcccgagcgccuacaugcgggagcacaaccagcugaacggcugguccagcgacgagaacgacuggaacgagaagcuguaccccgucuggaagcgcggggacaugcgguggaagaacuccuggaagggcgggcgcgugcaggccgugcucaccagcgacucccccgcccuggucggcagcaacaucaccuucgcggugaaccugaucuucccccggugccagaaggaggacgccaacggcaacaucguguacgagaagaacugccgcaacgaggccgggcucuccgccgacccguacgucuacaacuggacggcguggagcgaggacuccgacggcgagaacgggaccggccagagccaccacaacguguuccccgacgggaagcccuucccccaccacccgggcuggcggcgcuggaacuucaucuacguguuccacacccugggccaguacuuccagaagcuggggcggugcuccguccgcgugagcgugaacaccgccaacgucacgcucggcccccagcugauggaggugaccguguaccggcgccacgggcgggccuacguccccaucgcccaggugaaggacguguacgucgugaccgaccagauccccguguucgucaccauguuccagaagaacgaccgcaacuccagcgacgagacguuccugaaggaccucccgaucauguucgacgugcugauccacgaccccucccacuuccugaacuacagcaccaucaacuacaagugguccuucggcgacaacaccggccucuucgugagcaccaaccacacggucaaccacaccuacgugcugaacgggaccuucucccugaaccucaccgucaaggccgcggcccccggccccugcccgcccccgccgcccccgccccggcccagcaagcccacgcccagccuggccaccacccugaaguccuacgacagcaacacccccgggcccgccggcgacaacccccucgagcugucccgcauccccgacgagaacugccagaucaaccgguacgggcacuuccaggccacgaucaccaucguggagggcauccuggaggugaacaucauccagaugaccgacguccucaugcccgugccguggcccgagagcucccugaucgacuucguggugaccugccagggcagcauccccacggaggucugcaccaucaucuccgacccgaccugcgagaucacccagaacacggugugcagccccgucgacguggacgagaugugccugcucaccgugcgccggaccuucaacggguccggcaccuacugcgucaaccugacgcugggggacgacaccagccucgcgcugaccuccacccugaucagcgugcccgaccgcgaccccgccagcccccuccgcauggccaacuccgcccugaucuccgugggcugccuggccaucuucgucacggugaucagccuccugguguacaagaagcacaaggaguacaacccgaucgagaacucccccgggaacgucgugcggagcaagggccuguccguguuccucaaccgcgcgaaggccgucuucuuccccggcaaccaggagaaggacccccugcugaagaaccaggaguucaagggggugagcuga

SEQ ID NO: 1822 - RNA, 1719 nt, Artificial Sequence
  derived and/or modified sequence opt2 from GPNMB/m__Homo_sapiens__AAH32783
auggagugccucuacuacuuccucggcuuccuccuccucgccgcccgccucccccucgacgccgccaagcgcuuccacgacguccucggcaacgagcgccccuccgccuacaugcgcgagcacaaccagcucaacggcugguccuccgacgagaacgacuggaacgagaagcucuaccccgucuggaagcgcggcgacaugcgcuggaagaacuccuggaagggcggccgcguccaggccguccucaccuccgacucccccgcccucgucggcuccaacaucaccuucgccgucaaccucaucuucccccgcugccagaaggaggacgccaacggcaacaucgucuacgagaagaacugccgcaacgaggccggccucuccgccgaccccuacgucuacaacuggaccgccugguccgaggacuccgacggcgagaacggcaccggccagucccaccacaacgucuuccccgacggcaagcccuucccccaccaccccggcuggcgccgcuggaacuucaucuacgucuuccacacccucggccaguacuuccagaagcucggccgcugcuccguccgcgucuccgucaacaccgccaacgucacccucggcccccagcucauggaggucaccgucuaccgccgccacggccgcgccuacguccccaucgcccaggucaaggacgucuacgucgucaccgaccagauccccgucuucgucaccauguuccagaagaacgaccgcaacuccuccgacgagaccuuccucaaggaccuccccaucauguucgacguccucauccacgaccccucccacuuccucaacuacuccaccaucaacuacaagugguccuucggcgacaacaccggccucuucgucuccaccaaccacaccgucaaccacaccuacguccucaacggcaccuucucccucaaccucaccgucaaggccgccgcccccggccccugcccccccccccccccccccccccgccccuccaagcccacccccucccucgccaccacccucaaguccuacgacuccaacacccccggccccgccggcgacaacccccucgagcucucccgcauccccgacgagaacugccagaucaaccgcuacggccacuuccaggccaccaucaccaucgucgagggcauccucgaggucaacaucauccagaugaccgacguccucaugcccguccccuggcccgaguccucccucaucgacuucgucgucaccugccagggcuccauccccaccgaggucugcaccaucaucuccgaccccaccugcgagaucacccagaacaccgucugcucccccgucgacgucgacgagaugugccuccucaccguccgccgcaccuucaacggcuccggcaccuacugcgucaaccucacccucggcgacgacaccucccucgcccucaccuccacccucaucuccguccccgaccgcgaccccgccuccccccuccgcauggccaacuccgcccucaucuccgucggcugccucgccaucuucgucaccgucaucucccuccucgucuacaagaagcacaaggaguacaaccccaucgagaacucccccggcaacgucguccgcuccaagggccucuccgucuuccucaaccgcgccaaggccgucuucuuccccggcaaccaggagaaggacccccuccucaagaaccaggaguucaagggcgucuccuga

SEQ ID NO: 1823 - RNA, 1719 nt, Artificial Sequence
  derived and/or modified sequence opt3 from GPNMB/m__Homo_sapiens__AAH32783
auggagugccuguacuauuuccucggcuuucuucuguuggccgcuagauuaccccuggacgcagccaagagguuccacgaugugcuagggaacgaacggccuagcgcguacaugcgcgagcauaaucagcucaacggaugguccucugacgaaaaugauuggaacgagaaacuguauccagucuggaagcgaggugacaugcguuggaaaaauucauggaagggcgggagaguucaagcugugcuuaccagugauagcccggcccugguaggauccaacaucacauuugcagugaauuugauuuuccccaggugucagaaagaagacgccaacggcaauauagucuacgagaagaacugccggaaugaggcuggucucucugcagauccuuauguguacaacuggacugccuggucggaagacucagauggggagaauggaacgggccagagccaccauaacguuuuuccagacggcaagcccuucccucaccauccaggguggcgcagauggaauuuuaucuauguguuccacacccugggacaguacuuucaaaaacuggguagguguaguguccggguguccguaaacacagcuaacguuacucucggcccccaguuaauggaagugaccgucuaccgccgacacgggagagccuaugugccuauugcgcaagugaaggaugucuacguugugacagaccagaucccaguauucgugaccauguuucagaaaaaugauaggaacucuagcgacgagacuuuccugaaggaccuuccgauuauguuugaugucuugauccaugaccccucccacuuccugaauuauucaacaauaaacuacaaauggaguuucggagauaauaccggccuauuugugagcacgaaccauacuguuaaucacaccuaugugcucaacgguacauucucucugaaucuuacugucaaggcagccgcuccugggccaugucccccuccacccccgccuccccggccauccaagccuacccccucacuggccacaaccuugaaaagcuacgacaguaacacgccaggacccgcaggcgauaauccucucgagcugucucguaucccagacgaaaacugccagauuaaucgcuauggccacuuucaggcuacuaucacaauuguggaggggaucuuagaaguaaacauaauucagaugaccgauguucugaugccggugcccuggccugaguccagccucaucgacuucgucgugacuugccaaggaucgauuccaacagaagucuguaccaucaucucugaucccacgugcgagauuacccagaauacaguguguuccccuguugacguggaugagaugugccuucugacuguaagaaggaccuuuaacgguucaggcacauacugugucaacuugacucuaggggacgacaccagucuggcccucacaagcacccugauauccgugccagaucgggaccccgcgucuccgcuucgaauggccaauagcgcacugaucucaguuggaugcuuggcuauuuucgugacugucaucagucuccugguguacaagaaacauaaggaauauaacccuauagaaaauuccccaggcaacguagugcgcagcaaagguuuaucuguuuuucugaauagagccaaggcugucuucuuucccgggaaccaggagaaagauccucuacucaagaaucaagaguucaagggcgugucauga

SEQ ID NO: 1824 - RNA, 1719 nt, Artificial Sequence
  derived and/or modified sequence opt4 from GPNMB/m__Homo_sapiens__AAH32783
auggagugccuguacuacuuccugggcuuccugcugcuggccgccagacugccccuggacgccgccaagagauuccacgacgugcugggcaacgagagacccagcgccuacaugagagagcacaaccagcugaacggcuggagcagcgacgagaacgacuggaacgagaagcuguaccccguguggaagagaggcgacaugagauggaagaacagcuggaagggcggcagagugcaggccgugcugaccagcgacagccccgcccuggugggcagcaacaucaccuucgccgugaaccugaucuuccccagaugccagaaggaggacgccaacggcaacaucguguacgagaagaacugcagaaacgaggccggccugagcgccgaccccuacguguacaacuggaccgccuggagcgaggacagcgacggcgagaacggcaccggccagagccaccacaacguguuccccgacggcaagcccuucccccaccaccccggcuggagaagauggaacuucaucuacguguuccacacccugggccaguacuuccagaagcugggcagaugcagcgugagagugagcgugaacaccgccaacgugacccugggcccccagcugauggaggugaccguguacagaagacacggcagagccuacgugcccaucgcccaggugaaggacguguacguggugaccgaccagauccccguguucgugaccauguuccagaagaacgacagaaacagcagcgacgagaccuuccugaaggaccugcccaucauguucgacgugcugauccacgaccccagccacuuccugaacuacagcaccaucaacuacaaguggagcuucggcgacaacaccggccuguucgugagcaccaaccacaccgugaaccacaccuacgugcugaacggcaccuucagccugaaccugaccgugaaggccgccgcccccggccccugccccccccccccccccccccccagacccagcaagcccacccccagccuggccaccacccugaagagcuacgacagcaacacccccggccccgccggcgacaacccccuggagcugagcagaauccccgacgagaacugccagaucaacagauacggccacuuccaggccaccaucaccaucguggagggcauccuggaggugaacaucauccagaugaccgacgugcugaugcccgugcccuggcccgagagcagccugaucgacuucguggugaccugccagggcagcauccccaccgaggugugcaccaucaucagcgaccccaccugcgagaucacccagaacaccgugugcagccccguggacguggacgagaugugccugcugaccgugagaagaaccuucaacggcagcggcaccuacugcgugaaccugacccugggcgacgacaccagccuggcccugaccagcacccugaucagcgugcccgacagagaccccgccagcccccugagaauggccaacagcgcccugaucagcgugggcugccuggccaucuucgugaccgugaucagccugcugguguacaagaagcacaaggaguacaaccccaucgagaacagccccggcaacguggugagaagcaagggccugagcguguuccugaacagagccaaggccguguucuuccccggcaaccaggagaaggacccccugcugaagaaccaggaguucaagggcgugagcuga

SEQ ID NO: 1825 - RNA, 1719 nt, Artificial Sequence
  derived and/or modified sequence opt5 from GPNMB/m__Homo_sapiens__AAH32783
auggagugccuguacuauuuccucggcuuucugcuucuggccgcuagacucccccuggacgccgcgaagcgguuccacgaugugcuugggaacgaacgcccuagcgcuuacaugagagagcauaaucagcugaacggaugguccucugacgaaaaugauuggaacgagaaacucuauccggucuggaagcggggcgacaugcgcuggaaaaauagcuggaaagggggaagaguucaagccgugcugaccuccgauucucccgcccuggugggcagcaacaucacauuugcugucaaucucauuuucccucggugucagaaagaagacgccaacgggaauaucguguacgagaagaacugccgcaaugaggcuggacuguccgccgaucccuauguuuacaacuggacggcguggucugaagacagcgauggcgagaauggcaccgggcagucccaccauaacguguuuccugacggaaagcccuucccucaccauccgggcuggagacgguggaauuuuauuuaugucuuccacacacuugggcaguacuuucaaaaacugggacgcuguagcgugagaguuucugugaacaccgccaacgucacacucggcccccagcugauggaagugaccguguaccggcgccacgggagagcuuaugucccuaucgcccagguuaaggauguguacguggucacagaccagauucccguguucguuaccauguuucaaaagaaugaucggaacuccagcgacgagacguuccuuaaggaccugccuaucauguuugaugugcucauccaugaccccucucacuuccugaauuauuccaccauuaacuacaaauggagcuucggagauaauacaggccuguuugucucuaccaaccauacagugaaucacaccuauguucucaacggcacguucucccugaaucuuacagugaaggcugccgcgccggggccuugucccccucccccucccccgccccgcccuagcaagcccaccccuucccuggccacaacccucaaaucuuacgacagcaacacccccggaccggcuggcgauaauccucuggagcuuuccagaauccccgacgaaaacugccagauuaaucgguaugggcacuuucaggccacaaucacgauugucgagggaauccuggaagugaacauuauccagaugaccgauguccucaugccugugcccuggccugagagcucucugaucgacuucguugugacaugccaaggcuccauucccaccgaagucuguacaaucauuagcgauccgaccugcgagaucacgcagaauacaguguguucuccuguugacguggaugagaugugccugcucaccgucagacgcaccuuuaacgggagcggaacauacugugugaaccugacccuuggcgacgacacaucccuggcucucacgucuacccugauuagcgugcccgaucgggaccccgccuccccucuuagaauggccaauagcgcucugaucucuguuggcugccucgcgaucuucgucacagugauuucccugcugguguacaagaaacauaaggaauauaacccgaucgagaauagccccgggaacgucgugcgcucuaaaggacucuccguuuuucugaaucgggccaaggcuguguucuuuccuggcaaccaggaaaaagauccccuucugaagaaucaagaguucaagggggucagcuga

SEQ ID NO: 1826 - protein, 206 aa, Artificial Sequence [sequence omitted]

SEQ ID NO: 1827 - RNA, 621 nt, Artificial Sequence
  GPNMB/m__Homo_sapiens__CAD43718
auggaaugucucuacuauuuccugggauuucugcuccuggcugcaagauugccacuugaugccgccaaacgauuucaugaugugcugggcaaugaaagaccuucugcuuacaugagggagcacaaucaauuaaauggcuggucuucugaugaaaaugacuggaaugaaaaacucuacccaguguggaagcggggagacaugagguggaaaaacuccuggaagggaggccgugugcaggcgguccugaccagugacucaccagcccucgugggcucaaauauaacauuugcggugaaccugauauucccuagaugccaaaaggaagaugccaauggcaacauagucuaugagaagaacugcagaaaugaggcugguuuaucugcugauccguauguuuacaacuggacagcauggucagaggacagugacggggaaaauggcaccggccaaagccaucauaacgucuucccugaugggaaaccuuuuccucaccaccccggauggagaagauggaauuucaucuacgucuuccacacacuugauuggcuuuuacaaaccccuaagcuucuucuuuaccuuuccuuaaaauuucaaccuucucuuuucuuacucuauaauuga

SEQ ID NO: 1828 - RNA, 621 nt, Artificial Sequence
  derived and/or modified sequence opt1 from GPNMB/m__Homo_sapiens__CAD43718
auggagugccuguacuacuuccucggcuuccugcugcucgccgcccgccugccccuggacgcggccaagcgguuccacgacgugcucgggaacgagcgcccgagcgccuacaugcgggagcacaaccagcugaacggcugguccagcgacgagaacgacuggaacgagaagcuguaccccgucuggaagcgcggggacaugcgguggaagaacuccuggaagggcgggcgcgugcaggccgugcucaccagcgacucccccgcccuggucggcagcaacaucaccuucgcggugaaccugaucuucccccggugccagaaggaggacgccaacggcaacaucguguacgagaagaacugccgcaacgaggccgggcucuccgccgacccguacgucuacaacuggacggcguggagcgaggacuccgacggcgagaacgggaccggccagagccaccacaacguguuccccgacgggaagcccuucccccaccacccgggcuggcggcgcuggaacuucaucuacguguuccacacccuggacuggcugcuccagacccccaagcugcugcucuaccugucccugaaguuccagcccagccucuuccugcuguacaacuga

SEQ ID NO: 1829 - RNA, 621 nt, Artificial Sequence
  derived and/or modified sequence opt2 from GPNMB/m__Homo_sapiens__CAD43718
auggagugccucuacuacuuccucggcuuccuccuccucgccgcccgccucccccucgacgccgccaagcgcuuccacgacguccucggcaacgagcgccccuccgccuacaugcgcgagcacaaccagcucaacggcugguccuccgacgagaacgacuggaacgagaagcucuaccccgucuggaagcgcggcgacaugcgcuggaagaacuccuggaagggcggccgcguccaggccguccucaccuccgacucccccgcccucgucggcuccaacaucaccuucgccgucaaccucaucuucccccgcugccagaaggaggacgccaacggcaacaucgucuacgagaagaacugccgcaacgaggccggccucuccgccgaccccuacgucuacaacuggaccgccugguccgaggacuccgacggcgagaacggcaccggccagucccaccacaacgucuuccccgacggcaagcccuucccccaccaccccggcuggcgccgcuggaacuucaucuacgucuuccacacccucgacuggcuccuccagacccccaagcuccuccucuaccucucccucaaguuccagcccucccucuuccuccucuacaacuga

SEQ ID NO: 1830 - RNA, 621 nt, Artificial Sequence
  derived and/or modified sequence opt3 from GPNMB/m__Homo_sapiens__CAD43718
auggagugccuguacuauuuccucggcuuucuucuguuggccgcuagauuaccccuggacgcagccaagagguuccacgaugugcuagggaacgaacggccuagcgcguacaugcgcgagcauaaucagcucaacggaugguccucugacgaaaaugauuggaacgagaaacuguauccagucuggaagcgaggugacaugcguuggaaaaauucauggaagggcgggagaguucaagcugugcuuaccagugauagcccggcccugguaggauccaacaucacauuugcagugaauuugauuuuccccaggugucagaaagaagacgccaacggcaauauagucuacgagaagaacugccggaaugaggcuggucucucugcagauccuuauguguacaacuggacugccuggucggaagacucagauggggagaauggaacgggccagagccaccauaacguuuuuccagacggcaagcccuucccucaccauccaggguggcgcagauggaauuuuaucuauguguuccacacccuggauuggcugcuccagacacccaaauuacugcuuuacuugagucugaaguuucaaccuucccuauuccuccuguacaacuga

SEQ ID NO: 1831 - RNA, 621 nt, Artificial Sequence
  derived and/or modified sequence opt4 from GPNMB/m__Homo_sapiens__CAD43718
auggagugccuguacuacuuccugggcuuccugcugcuggccgccagacugccccuggacgccgccaagagauuccacgacgugcugggcaacgagagacccagcgccuacaugagagagcacaaccagcugaacggcuggagcagcgacgagaacgacuggaacgagaagcuguaccccguguggaagagaggcgacaugagauggaagaacagcuggaagggcggcagagugcaggccgugcugaccagcgacagccccgcccuggugggcagcaacaucaccuucgccgugaaccugaucuuccccagaugccagaaggaggacgccaacggcaacaucguguacgagaagaacugcagaaacgaggccggccugagcgccgaccccuacguguacaacuggaccgccuggagcgaggacagcgacggcgagaacggcaccggccagagccaccacaacguguuccccgacggcaagcccuucccccaccaccccggcuggagaagauggaacuucaucuacguguuccacacccuggacuggcugcugcagacccccaagcugcugcuguaccugagccugaaguuccagcccagccuguuccugcuguacaacuga

SEQ ID NO: 1832 - RNA, 621 nt, Artificial Sequence
  derived and/or modified sequence opt5 from GPNMB/m__Homo_sapiens__CAD43718
auggagugccuguacuauuuccucggcuuucugcuucuggccgcuagacucccccuggacgccgcgaagcgguuccacgaugugcuugggaacgaacgcccuagcgcuuacaugagagagcauaaucagcugaacggaugguccucugacgaaaaugauuggaacgagaaacucuauccggucuggaagcggggcgacaugcgcuggaaaaauagcuggaaagggggaagaguucaagccgugcugaccuccgauucucccgcccuggugggcagcaacaucacauuugcugucaaucucauuuucccucggugucagaaggaagacgccaacgggaauaucguguacgagaagaacugccgcaaugaggcuggacuguccgccgaucccuauguuuacaacuggacggcguggucugaagacagcgauggcgagaauggcaccgggcagucccaccauaacguguuuccugacggaaagcccuucccucaccauccgggcuggagacgguggaauuuuauuuaugucuuccacacacuugauuggcugcuccagacccccaaacugcuucuguaccucagccugaaguuucaaccuucucuguuccuccuguacaacuga

SEQ ID NO: 1833 - protein, 206 aa, Artificial Sequence
  GPNMB/m__Homo_sapiens__Q96F58
MECLYYFLGFLLLAARLPLDAAKRFHDVLGNERPSAYMREHNQLNGWSSDENDWNEKLYPVWKRGDMRWKNSWKGGRVQAVLTSDSPALVGSNITFAVNLIFPRCQKEDANGNIVYEKNCRNEAGLSADPYVYNWTAWSEDSDGENGTGQSHHNVFPDGKPFPHHPGWRRWNFIYVFHTLGWLLQTPKLLLYLSLKFQPSLFLLYN

SEQ ID NO: 1834 - RNA, 621 nt, Artificial Sequence
  GPNMB/m__Homo_sapiens__AAH11595
auggaaugucucuacuauuuccugggauuucugcuccuggcugcaagauugccacuugaugccgccaaacgauuucaugaugugcugggcaaugaaagaccuucugcuuacaugagggagcacaaucaauuaaauggcuggucuucugaugaaaaugacuggaaugaaaaacucuacccaguguggaagcggggagacaugagguggaaaaacuccuggaagggaggccgugugcaggcgguccugaccagugacucaccagcccucgugggcucaaauauaacauuugcggugaaccugauauucccuagaugccaaaaggaagaugccaauggcaacauagucuaugagaagaacugcagaaaugaggcugguuuaucugcugauccauauguuuacaacuggacagcauggucagaggacagugacggggaaaauggcaccggccaaagccaucauaacgucuucccugaugggaaaccuuuuccucaccaccccggauggagaagauggaauuucaucuacgucuuccacacacuugguuggcuuuuacaaaccccuaagcuucuucuuuaccuuuccuuaaaauuucaaccuucucuuuucuuacucuauaauuga

SEQ ID NO: 1835 - RNA, 621 nt, Artificial Sequence
  derived and/or modified sequence opt1 from GPNMB/m__Homo_sapiens__AAH11595
auggagugccuguacuacuuccucggcuuccugcugcucgccgcccgccugccccuggacgcggccaagcgguuccacgacgugcucgggaacgagcgcccgagcgccuacaugcgggagcacaaccagcugaacggcugguccagcgacgagaacgacuggaacgagaagcuguaccccgucuggaagcgcggggacaugcgguggaagaacuccuggaagggcgggcgcgugcaggccgugcucaccagcgacucccccgcccuggucggcagcaacaucaccuucgcggugaaccugaucuucccccggugccagaaggaggacgccaacggcaacaucguguacgagaagaacugccgcaacgaggccgggcucuccgccgacccguacgucuacaacuggacggcguggagcgaggacuccgacggcgagaacgggaccggccagagccaccacaacguguuccccgacgggaagcccuucccccaccacccgggcuggcggcgcuggaacuucaucuacguguuccacacccugggcuggcugcuccagacccccaagcugcugcucuaccugucccugaaguuccagcccagccucuuccugcuguacaacuga

SEQ ID NO: 1836 - RNA, 621 nt, Artificial Sequence
  derived and/or modified sequence opt2 from GPNMB/m__Homo_sapiens__AAH11595
auggagugccucuacuacuuccucggcuuccuccuccucgccgcccgccucccccucgacgccgccaagcgcuuccacgacguccucggcaacgagcgccccuccgccuacaugcgcgagcacaaccagcucaacggcugguccuccgacgagaacgacuggaacgagaagcucuaccccgucuggaagcgcggcgacaugcgcuggaagaacuccuggaagggcggccgcguccaggccguccucaccuccgacucccccgcccucgucggcuccaacaucaccuucgccgucaaccucaucuucccccgcugccagaaggaggacgccaacggcaacaucgucuacgagaagaacugccgcaacgaggccggccucuccgccgaccccuacgucuacaacuggaccgccugguccgaggacuccgacggcgagaacggcaccggccagucccaccacaacgucuuccccgacggcaagcccuucccccaccaccccggcuggcgccgcuggaacuucaucuacgucuuccacacccucggcuggcuccuccagacccccaagcuccuccucuaccucucccucaaguuccagcccucccucuuccuccucuacaacuga

SEQ ID NO: 1837 - RNA, 621 nt, Artificial Sequence
  derived and/or modified sequence opt3 from GPNMB/m__Homo_sapiens__AAH11595
auggagugccuguacuauuuccucggcuuucuucuguuggccgcuagauuaccccuggacgcagccaagagguuccacgaugugcuagggaacgaacggccuagcgcguacaugcgcgagcauaaucagcucaacggaugguccucugacgaaaaugauuggaacgagaaacuguauccagucuggaagcgaggugacaugcguuggaaaaauucauggaagggcgggagaguucaagcugugcuuaccagugauagcccggcccugguaggauccaacaucacauuugcagugaauuugauuuuccccaggugucagaaagaagacgccaacggcaauauagucuacgagaagaacugccggaaugaggcuggucucucugcagauccuuauguguacaacuggacugccuggucggaagacucagauggggagaauggaacgggccagagccaccauaacguuuuuccagacggcaagcccuucccucaccauccaggguggcgcagauggaauuuuaucuauguguuccacacccugggauggcugcuccagacacccaaauuacugcuuuacuugagucugaaguuucaaccuucccuauuccuccuguacaacuga

SEQ ID NO: 1838 - RNA, 621 nt, Artificial Sequence
  derived and/or modified sequence opt4 from GPNMB/m__Homo_sapiens__AAH11595
auggagugccuguacuacuuccugggcuuccugcugcuggccgccagacugccccuggacgccgccaagagauuccacgacgugcugggcaacgagagacccagcgccuacaugagagagcacaaccagcugaacggcuggagcagcgacgagaacgacuggaacgagaagcuguaccccguguggaagagaggcgacaugagauggaagaacagcuggaagggcggcagagugcaggccgugcugaccagcgacagccccgcccuggugggcagcaacaucaccuucgccgugaaccugaucuuccccagaugccagaaggaggacgccaacggcaacaucguguacgagaagaacugcagaaacgaggccggccugagcgccgaccccuacguguacaacuggaccgccuggagcgaggacagcgacggcgagaacggcaccggccagagccaccacaacguguuccccgacggcaagcccuucccccaccaccccggcuggagaagauggaacuucaucuacguguuccacacccugggcuggcugcugcagacccccaagcugcugcuguaccugagccugaaguuccagcccagccuguuccugcuguacaacuga

SEQ ID NO: 1839 - RNA, 621 nt, Artificial Sequence
  derived and/or modified sequence opt5 from GPNMB/m__Homo_sapiens__AAH11595
auggagugccuguacuauuuccucggcuuucugcuucuggccgcuagacucccccuggacgccgcgaagcgguuccacgaugugcuugggaacgaacgcccuagcgcuuacaugagagagcauaaucagcugaacggaugguccucugacgaaaaugauuggaacgagaaacucuauccggucuggaagcggggcgacaugcgcuggaaaaauagcuggaaagggggaagaguucaagccgugcugaccuccgauucucccgcccuggugggcagcaacaucacauuugcugucaaucucauuuucccucggugucagaaggaagacgccaacgggaauaucguguacgagaagaacugccgcaaugaggcuggacuguccgccgaucccuauguuuacaacuggacggcguggucugaagacagcgauggcgagaauggcaccgggcagucccaccauaacguguuuccugacggaaagcccuucccucaccauccgggcuggagacgguggaauuuuauuuaugucuuccacacacuuggguggcugcuccagacccccaaacugcuucuguaccucagccugaaguuucaaccuucucuguuccuccuguacaacuga

SEQ ID NO: 1840 - protein, 879 aa, Artificial Sequence
  GRM3__Homo_sapiens__Q14832
MKMLTRLQVLTLALFSKGFLLSLGDHNFLRREIKIEGDLVLGGLFPINEKGTGTEECGRINEDRGIQRLEAMLFAIDEINKDDYLLPGVKLGVHILDTCSRDTYALEQSLEFVRASLTKVDEAEYMCPDGSYAIQENIPLLIAGVIGGSYSSVSIQVANLLRLFQIPQISYASTSAKLSDKSRYDYFARTVPPDFYQAKAMAEILRFFNWTYVSTVASEGDYGETGIEAFEQEARLRNICIATAEKVGRSNIRKSYDSVIRELLQKPNARVVVLFMRSDDSRELIAAASRANASFTWVASDGWGAQESIIKGSEHVAYGAITLELASQPVRQFDRYFQSLNPYNNHRNPWFRDFWEQKFQCSLQNKRNHRRVCDKHLAIDSSNYEQESKIMFVVNAVYAMAHALHKMQRTLCPNTTKLCDAMKILDGKKLYKDYLLKINFTAPFNPNKDADSIVKFDTFGDGMGRYNVFNFQNVGGKYSYLKVGHWAETLSLDVNSIHWSRNSVPTSQCSDPCAPNEMKNMQPGDVCCWICIPCEPYEYLADEFTCMDCGSGQWPTADLTGCYDLPEDYIRWEDAWAIGPVTIACLGFMCTCMVVTVFIKHNNTPLVKASGRELCYILLFGVGLSYCMTFFFIAKPSPVICALRRLGLGSSFAICYSALLTKTNCIARIFDGVKNGAQRPKFISPSSQVFICLGLILVQIVMVSVWLILEAPGTRRYTLAEKRETVILKCNVKDSSMLISLTYDVILVILCTVYAFKTRKCPENFNEAKFIGFTMYTTCIIWLAFLPIFYVTSSDYRVQTTTMCISVSLSGFVVLGCLFAPKVHIILFQPQKNVVTHRLHLNRFSVSGTGTTYSQSSASTYVPTVCNGREVLDSTTSSL

SEQ ID NO: 1841 - RNA, 2640 nt, Artificial Sequence
  GRM3__Homo_sapiens__CCDS5600.1
augaagauguugacaagacugcaaguucuuaccuuagcuuuguuuucaaagggauuuuuacucucuuuaggggaccauaacuuucuaaggagagagauuaaaauagaaggugaccuuguuuuagggggccuguuuccuauuaacgaaaaaggcacuggaacugaagaaugugggcgaaucaaugaagaccgagggauucaacgccuggaagccauguuguuugcuauugaugaaaucaacaaagaugauuacuugcuaccaggagugaaguuggguguucacauuuuggauacauguucaagggauaccuaugcauuggagcaaucacuggaguuugucagggcaucuuugacaaaaguggaugaagcugaguauauguguccugauggauccuaugccauucaagaaaacaucccacuucucauugcaggggucauugguggcucuuauagcaguguuuccauacagguggcaaaccugcugcggcucuuccagaucccucagaucagcuacgcauccaccagcgccaaacucagugauaagucgcgcuaugauuacuuugccaggaccgugccccccgacuucuaccaggccaaagccauggcugagaucuugcgcuucuucaacuggaccuacguguccacaguagccuccgagggugauuacggggagacagggaucgaggccuucgagcaggaagcccgccugcgcaacaucugcaucgcuacggcggagaaggugggccgcuccaacauccgcaaguccuacgacagcgugauccgagaacuguugcagaagcccaacgcgcgcgucgugguccucuucaugcgcagcgacgacucgcgggagcucauugcagccgccagccgcgccaaugccuccuucaccuggguggccagcgacggcuggggcgcgcaggagagcaucaucaagggcagcgagcauguggccuacggcgccaucacccuggagcuggccucccagccuguccgccaguucgaccgcuacuuccagagccucaaccccuacaacaaccaccgcaaccccugguuccgggacuucugggagcaaaaguuucagugcagccuccagaacaaacgcaaccacaggcgcgucugcgacaagcaccuggccaucgacagcagcaacuacgagcaagaguccaagaucauguuuguggugaacgcgguguaugccauggcccacgcuuugcacaaaaugcagcgcacccucugucccaacacuaccaagcuuugugaugcuaugaagauccuggaugggaagaaguuguacaaggauuacuugcugaaaaucaacuucacggcuccauucaacccaaauaaagaugcagauagcauagucaaguuugacacuuuuggagauggaauggggcgauacaacguguucaauuuccaaaauguagguggaaaguauuccuacuugaaaguuggucacugggcagaaaccuuaucgcuagaugucaacucuauccacuggucccggaacucaguccccacuucccagugcagcgaccccugugcccccaaugaaaugaagaauaugcaaccaggggaugucugcugcuggauuugcauccccugugaacccuacgaauaccuggcugaugaguuuaccuguauggauugugggucuggacaguggcccacugcagaccuaacuggaugcuaugaccuuccugaggacuacaucaggugggaagacgccugggccauuggcccagucaccauugccugucuggguuuuauguguacaugcaugguuguaacuguuuuuaucaagcacaacaacacacccuuggucaaagcaucgggccgagaacucugcuacaucuuauuguuugggguuggccugucauacugcaugacauucuucuucauugccaagccaucaccagucaucugugcauugcgccgacucgggcuggggaguuccuucgcuaucuguuacucagcccugcugaccaagacaaacugcauugcccgcaucuucgauggggucaagaauggcgcucagaggccaaaauucaucagccccaguucucagguuuucaucugccugggucugauccuggugcaaauugugauggugucuguguggcucauccuggaggccccaggcaccaggagguauacccuugcagagaagcgggaaacagucauccuaaaaugcaaugucaaagauuccagcauguugaucucucuuaccuacgaugugauccuggugaucuuaugcacuguguacgccuucaaaacgcggaagugcccagaaaauuucaacgaagcuaaguucauagguuuuaccauguacaccacgugcaucaucugguuggccuuccucccuauauuuuaugugacaucaagugacuacagagugcagacgacaaccaugugcaucucugucagccugaguggcuuuguggucuugggcuguuuguuugcacccaagguucacaucauccuguuucaaccccagaagaauguugucacacacagacugcaccucaacagguucagugucaguggaacugggaccacauacucucaguccucugcaagcacguaugugccaacggugugcaaugggcgggaaguccucgacuccaccaccucaucucuguga

SEQ ID NO: 1842 - RNA, 2640 nt, Artificial Sequence
  derived and/or modified sequence opt1 from GRM3__Homo_sapiens__CCDS5600.1
augaagaugcugacccgccuccaggugcugacccuggcccucuucagcaagggcuuccugcugucccucggggaccacaacuuccugcggcgcgagaucaagaucgagggcgaccugguccucgggggccuguuccccaucaacgagaaggggacgggcaccgaggagugcggccggaucaacgaggaccgcgggauccagcggcuggaggccaugcuguucgcgaucgacgagaucaacaaggacgacuaccuccugccgggcgugaagcucggggugcacauccuggacacgugcagccgcgacaccuacgcccuggagcagucccucgaguucguccgggccagccugaccaagguggacgaggccgaguacaugugccccgacggcuccuacgccauccaggagaacaucccccugcucaucgcgggggugaucggcggcagcuacuccagcgucuccauccagguggccaaccugcugcgccucuuccagaucccccagaucagcuacgccuccaccagcgccaagcuguccgacaagagccgguacgacuacuucgcgcgcaccgugccgcccgacuucuaccaggccaaggccauggccgagauccugcgguucuucaacuggaccuacgucuccacgguggccagcgagggggacuacggcgagaccgggaucgaggcguucgagcaggaggcccgccuccggaacaucugcaucgccaccgccgagaaggugggccgcuccaacauccgcaagagcuacgacuccgucauccgggagcugcugcagaagcccaacgcccggguggugguccucuucaugcgcagcgacgacagccgggagcugaucgcggccgccucccgcgccaacgccagcuucaccuggguggcguccgacggcuggggcgcccaggagagcaucaucaagggguccgagcacguggccuacggggccaucacgcuggagcucgccagccagcccguccggcaguucgaccgcuacuuccagucccugaacccguacaacaaccaccgcaaccccugguuccgggacuucugggagcagaaguuccagugcagccugcagaacaagcgcaaccaccggcgcgugugcgacaagcaccucgcgaucgacuccagcaacuacgagcaggaguccaagaucauguucguggucaacgccguguacgccauggcccacgcgcugcacaagaugcagcggacccugugccccaacaccaccaagcucugcgacgccaugaagauccuggacggcaagaagcuguacaaggacuaccuccugaagaucaacuucacggcccccuucaacccgaacaaggacgccgacagcaucgugaaguucgacaccuucggggacggcaugggccgcuacaacgucuucaacuuccagaacgucgggggcaaguacuccuaccugaagguggggcacugggccgagacccucagccuggacgugaacuccauccacuggagccggaacuccgugcccaccagccagugcuccgaccccugcgcgcccaacgagaugaagaacaugcagccgggcgacgucugcugcuggaucugcauccccugcgagcccuacgaguaccuggccgacgaguucacgugcauggacugcgggagcggccaguggcccaccgccgaccucaccggcugcuacgaccugccggaggacuacauccgcugggaggacgccugggccaucgggcccgugaccaucgcgugccugggcuucaugugcacgugcaugguggucaccguguucaucaagcacaacaacacgccccuggugaaggccagcgggcgggagcucugcuacauccugcuguucggcgucgggcucuccuacugcaugaccuucuucuucaucgccaagcccagcccggugaucugcgcccugcgccggcugggccucggcuccagcuucgccaucugcuacuccgcgcugcugaccaagaccaacugcaucgcccgcaucuucgacggggugaagaacggcgcccagcggcccaaguucaucagccccuccagccaggucuucaucugccucgggcugauccuggugcagaucgugauggucuccguguggcucauccuggaggcccccggcacccgccgguacacccuggcggagaagcgcgagacggugauccucaagugcaacgucaaggacagcuccaugcugaucagccugaccuacgacgugauccucgugauccugugcaccgucuacgccuucaagacccggaagugcccggagaacuucaacgaggccaaguucaucggcuucacgauguacacgaccugcaucaucuggcuggccuuccuccccaucuucuacgugaccuccagcgacuaccgcgugcagaccaccaccaugugcaucuccgucagccuguccggguucguggugcugggcugccucuucgcccccaagguccacaucauccuguuccagccgcagaagaacguggugacccaccggcugcaccucaaccgcuucagcgucagcgggaccggcacgaccuacucccagagcuccgcgagcaccuacgugcccaccgugugcaacgggcgcgagguccuggacuccacgaccagcucccuguga

SEQ ID NO: 1843 - RNA, 2640 nt, Artificial Sequence
  derived and/or modified sequence opt2 from GRM3__Homo_sapiens__CCDS5600.1
augaagaugcucacccgccuccagguccucacccucgcccucuucuccaagggcuuccuccucucccucggcgaccacaacuuccuccgccgcgagaucaagaucgagggcgaccucguccucggcggccucuuccccaucaacgagaagggcaccggcaccgaggagugcggccgcaucaacgaggaccgcggcauccagcgccucgaggccaugcucuucgccaucgacgagaucaacaaggacgacuaccuccuccccggcgucaagcucggcguccacauccucgacaccugcucccgcgacaccuacgcccucgagcagucccucgaguucguccgcgccucccucaccaaggucgacgaggccgaguacaugugccccgacggcuccuacgccauccaggagaacaucccccuccucaucgccggcgucaucggcggcuccuacuccuccgucuccauccaggucgccaaccuccuccgccucuuccagaucccccagaucuccuacgccuccaccuccgccaagcucuccgacaagucccgcuacgacuacuucgcccgcaccgucccccccgacuucuaccaggccaaggccauggccgagauccuccgcuucuucaacuggaccuacgucuccaccgucgccuccgagggcgacuacggcgagaccggcaucgaggccuucgagcaggaggcccgccuccgcaacaucugcaucgccaccgccgagaaggucggccgcuccaacauccgcaaguccuacgacuccgucauccgcgagcuccuccagaagcccaacgcccgcgucgucguccucuucaugcgcuccgacgacucccgcgagcucaucgccgccgccucccgcgccaacgccuccuucaccugggucgccuccgacggcuggggcgcccaggaguccaucaucaagggcuccgagcacgucgccuacggcgccaucacccucgagcucgccucccagcccguccgccaguucgaccgcuacuuccagucccucaaccccuacaacaaccaccgcaaccccugguuccgcgacuucugggagcagaaguuccagugcucccuccagaacaagcgcaaccaccgccgcgucugcgacaagcaccucgccaucgacuccuccaacuacgagcaggaguccaagaucauguucgucgucaacgccgucuacgccauggcccacgcccuccacaagaugcagcgcacccucugccccaacaccaccaagcucugcgacgccaugaagauccucgacggcaagaagcucuacaaggacuaccuccucaagaucaacuucaccgcccccuucaaccccaacaaggacgccgacuccaucgucaaguucgacaccuucggcgacggcaugggccgcuacaacgucuucaacuuccagaacgucggcggcaaguacuccuaccucaaggucggccacugggccgagacccucucccucgacgucaacuccauccacuggucccgcaacuccguccccaccucccagugcuccgaccccugcgcccccaacgagaugaagaacaugcagcccggcgacgucugcugcuggaucugcauccccugcgagcccuacgaguaccucgccgacgaguucaccugcauggacugcggcuccggccaguggcccaccgccgaccucaccggcugcuacgaccuccccgaggacuacauccgcugggaggacgccugggccaucggccccgucaccaucgccugccucggcuucaugugcaccugcauggucgucaccgucuucaucaagcacaacaacaccccccucgucaaggccuccggccgcgagcucugcuacauccuccucuucggcgucggccucuccuacugcaugaccuucuucuucaucgccaagcccucccccgucaucugcgcccuccgccgccucggccucggcuccuccuucgccaucugcuacuccgcccuccucaccaagaccaacugcaucgcccgcaucuucgacggcgucaagaacggcgcccagcgccccaaguucaucucccccuccucccaggucuucaucugccucggccucauccucguccagaucgucauggucuccgucuggcucauccucgaggcccccggcacccgccgcuacacccucgccgagaagcgcgagaccgucauccucaagugcaacgucaaggacuccuccaugcucaucucccucaccuacgacgucauccucgucauccucugcaccgucuacgccuucaagacccgcaagugccccgagaacuucaacgaggccaaguucaucggcuucaccauguacaccaccugcaucaucuggcucgccuuccuccccaucuucuacgucaccuccuccgacuaccgcguccagaccaccaccaugugcaucuccgucucccucuccggcuucgucguccucggcugccucuucgcccccaagguccacaucauccucuuccagccccagaagaacgucgucacccaccgccuccaccucaaccgcuucuccgucuccggcaccggcaccaccuacucccaguccuccgccuccaccuacguccccaccgucugcaacggccgcgagguccucgacuccaccaccuccucccucuga

SEQ ID NO: 1844 - RNA, 2640 nt, Artificial Sequence
  derived and/or modified sequence opt3 from GRM3__Homo_sapiens__CCDS5600.1
augaagaugcugaccagacuccaggugcuuacacuggccuuguucagcaaaggcuuuuuacugucccuaggggaccacaacuuccucaggcgggagaucaagauugaaggagaucugguccuugguggccuguuucccauaaaugagaaagggacuggaacggaagagugcggccgcaucaacgaagaccgagguauucaacguuuggaggcuaugcuguucgcaaucgaugagauuaauaaggacgauuaccuccugccugggguuaaacucggagugcauaucuuagacaccuguucuagagauacauaugcccuggaacagucacuugaguuuguaagggcgaguuugacuaagguggacgaagcugaguacaugugcccagauggcagcuaugccauacaggagaacaucccgcugcuaauugcaggcgucaucgggggauccuacucuucggugucaauucagguugccaaucuccugcggcuuuuccaaaucccccagauaagcuaugcuaguaccuccgcaaagcugucugacaaaagccgcuacgauuauuuugccagaacagugccuccagacuucuaccaggcuaaggccauggcggaaauuuugagguuuuucaacuggaccuacgucuccacuguggcaucagagggugauuauggcgaaacagggaucgaggccuuugaacaggaggcucggcuccgcaauauuuguaucgccaccgcagagaaaguaggacgaaguaacaucagaaagagcuacgacucuguuauuagggaacuguuacaaaaacccaaugcucggguggucgugcuguucaugcguuccgacgauucacgcgagcucauagccgcggccagcagagcaaacgcuaguuuuacguggguggccucugacggcuggggugcucaggaauccaucauuaaggggagcgagcacgucgccuauggagcaaucacucuugaacuggccucgcagccuguuaggcaguucgaucgguacuuccaaucuuugaauccauauaacaaucaucgaaaccccugguuucgcgacuucugggagcagaaguuucagugcucccuacaaaauaaaagaaaccacaggcgggugugugauaagcaucuggcuauagacucaaguaacuacgagcaggaaagcaaaauuauguucguagugaaugcggucuaugcaauggcccacgcucuccacaagaugcagcgcacccugugcccuaacacaacuaaacuuugugaugccaugaagauccuggacggcaaaaaguuguacaaggauuaccuccugaaaaucaauuuuaccgcaccauucaacccgaauaaggacgccgauuccauugugaaauuugacacauucggcgacgggaugggaagauauaacguuuuuaauuuccagaacguggguggcaaguacucuuauuuaaaagucgggcauugggcugagacccugagccuagauguaaauucaauccacuggaguaggaacuccgugcccacgagccaaugcucugacccuugugccccaaaugaaaugaagaacaugcagcccggagauguuugcuguuggauuugcauaccuugcgagccauacgaauaucucgcagacgaguuuacuuguauggauugcggcucaggucaguggcccacagcggaccugaccggguguuacgaucuuccggaggacuauauccguugggaagaugcuugggccauuggcccugugacuaucgcaugcuugggauucauguguacaugcauggucgugaccgucuuuaucaagcauaauaacacgccccuggugaaagccaguggccgggagcucuguuacauucugcuuuucgggguuggacugagcuacugcaugaccuucuuuuucauagcuaagccauccccugugaucugugccuugcgaagacucggucuggggucuucguuugcaauuugcuauagcgcuuuacugacaaaaacuaauuguaucgccaggauuuucgacggcguaaagaacggagcgcagcgccccaaauuuaucuccccaucaagucaagucuucauaugccuaggccucauccuggugcagauuguuauggugucugucuggcuuaucuuggaagcccccgguacccggagauacacacuggcugagaagagggagacugugauucucaagugcaacguaaaagauagcuccaugcugaucucauuaaccuaugacgugauacugguuauucuuuguacagucuacgcauuuaagacccgcaaaugcccugaaaauuucaacgaggccaaguuuaucggguucacuauguauacgacauguauuaucugguuggcuuuucucccaauauucuacgugaccagcucugauuaucgagugcagacuaccacaaugugcaucuccgucagucugagcggcuuuguugugcuaggaugucuguucgccccgaaagugcacauuauccucuuccagccccaaaagaauguagucacccaccggcugcaucuuaaccguuuuucuguguccggcacugggacaacguacucacagaguagcgcaucgaccuacguuccuacugugugcaauggaagagaagucuuggacuccacaaccucuagccuguga

SEQ ID NO: 1845 - RNA, 2640 nt, Artificial Sequence
  derived and/or modified sequence opt4 from GRM3__Homo_sapiens__CCDS5600.1
augaagaugcugaccagacugcaggugcugacccuggcccuguucagcaagggcuuccugcugagccugggcgaccacaacuuccugagaagagagaucaagaucgagggcgaccuggugcugggcggccuguuccccaucaacgagaagggcaccggcaccgaggagugcggcagaaucaacgaggacagaggcauccagagacuggaggccaugcuguucgccaucgacgagaucaacaaggacgacuaccugcugcccggcgugaagcugggcgugcacauccuggacaccugcagcagagacaccuacgcccuggagcagagccuggaguucgugagagccagccugaccaagguggacgaggccgaguacaugugccccgacggcagcuacgccauccaggagaacaucccccugcugaucgccggcgugaucggcggcagcuacagcagcgugagcauccagguggccaaccugcugagacuguuccagaucccccagaucagcuacgccagcaccagcgccaagcugagcgacaagagcagauacgacuacuucgccagaaccgugccccccgacuucuaccaggccaaggccauggccgagauccugagauucuucaacuggaccuacgugagcaccguggccagcgagggcgacuacggcgagaccggcaucgaggccuucgagcaggaggccagacugagaaacaucugcaucgccaccgccgagaaggugggcagaagcaacaucagaaagagcuacgacagcgugaucagagagcugcugcagaagcccaacgccagagugguggugcuguucaugagaagcgacgacagcagagagcugaucgccgccgccagcagagccaacgccagcuucaccuggguggccagcgacggcuggggcgcccaggagagcaucaucaagggcagcgagcacguggccuacggcgccaucacccuggagcuggccagccagcccgugagacaguucgacagauacuuccagagccugaaccccuacaacaaccacagaaaccccugguucagagacuucugggagcagaaguuccagugcagccugcagaacaagagaaaccacagaagagugugcgacaagcaccuggccaucgacagcagcaacuacgagcaggagagcaagaucauguucguggugaacgccguguacgccauggcccacgcccugcacaagaugcagagaacccugugccccaacaccaccaagcugugcgacgccaugaagauccuggacggcaagaagcuguacaaggacuaccugcugaagaucaacuucaccgcccccuucaaccccaacaaggacgccgacagcaucgugaaguucgacaccuucggcgacggcaugggcagauacaacguguucaacuuccagaacgugggcggcaaguacagcuaccugaaggugggccacugggccgagacccugagccuggacgugaacagcauccacuggagcagaaacagcgugcccaccagccagugcagcgaccccugcgcccccaacgagaugaagaacaugcagcccggcgacgugugcugcuggaucugcauccccugcgagcccuacgaguaccuggccgacgaguucaccugcauggacugcggcagcggccaguggcccaccgccgaccugaccggcugcuacgaccugcccgaggacuacaucagaugggaggacgccugggccaucggccccgugaccaucgccugccugggcuucaugugcaccugcaugguggugaccguguucaucaagcacaacaacaccccccuggugaaggccagcggcagagagcugugcuacauccugcuguucggcgugggccugagcuacugcaugaccuucuucuucaucgccaagcccagccccgugaucugcgcccugagaagacugggccugggcagcagcuucgccaucugcuacagcgcccugcugaccaagaccaacugcaucgccagaaucuucgacggcgugaagaacggcgcccagagacccaaguucaucagccccagcagccagguguucaucugccugggccugauccuggugcagaucgugauggugagcguguggcugauccuggaggcccccggcaccagaagauacacccuggccgagaagagagagaccgugauccugaagugcaacgugaaggacagcagcaugcugaucagccugaccuacgacgugauccuggugauccugugcaccguguacgccuucaagaccagaaagugccccgagaacuucaacgaggccaaguucaucggcuucaccauguacaccaccugcaucaucuggcuggccuuccugcccaucuucuacgugaccagcagcgacuacagagugcagaccaccaccaugugcaucagcgugagccugagcggcuucguggugcugggcugccuguucgcccccaaggugcacaucauccuguuccagccccagaagaacguggugacccacagacugcaccugaacagauucagcgugagcggcaccggcaccaccuacagccagagcagcgccagcaccuacgugcccaccgugugcaacggcagagaggugcuggacagcaccaccagcagccuguga

SEQ ID NO: 1846 - RNA, 2640 nt, Artificial Sequence
  derived and/or modified sequence opt5 from GRM3__Homo_sapiens__CCDS5600.1
augaagaugcugaccagacuccaggugcugacacuugcccuguucagcaaaggcuuucuccugucccuuggggaccacaacuuccugcggcgcgagaucaagauugaaggagaucucguccugggcgggcuguuucccaucaaugagaaaggaacgggcaccgaagagugcgggagaauuaacgaagaccggggaauccaacgccucgaggcuaugcuguucgccauugaugagaucaauaaggacgauuaccuucugccuggcguuaaacucggcgugcauauccuggacacauguucuagagauaccuaugcgcuugaacagagccuggaguuugugcgggcuucccucacaaaggucgacgaagccgaguacaugugcccggaugggucuuaugccauucaggagaacaucccccugcugauugcuggagugaucggcgggagcuacuccucuguuagcauucagguggccaaucuccugcgccuuuuccaaaucccucagauuuccuaugcuagcaccucugccaagcuguccgacaaaagcagauacgauuauuuugcgcggacagugcccccugacuucuaccaggccaaggcuauggccgaaauccuccgcuuuuucaacuggaccuacgucucuacgguugcuuccgagggagauuauggcgaaaccgggaucgaggccuuugaacaggaggcgagacugcggaauauuuguaucgccacagcugagaaagugggacgcagcaacauuagaaagucuuacgacuccgucauccgggaacuucugcaaaaacccaaugcccgcguggugguccucuucaugagaagcgacgauucccgggagcugauugcugccgccucuagagcuaacgcgagcuuuaccuggguugccuccgacggcuggggcgcucaggaaagcaucaucaaggggucugagcacguggccuauggagccauuacacuggaacucgcuucccagccugugcgccaguucgaucgguacuuccaaagccugaauccguauaacaaucauagaaaccccugguuucgcgacuucugggagcagaaguuucagugcucucuucaaaauaaacggaaccacagacgcgucugugauaagcaucuggccaucgacagcuccaacuacgagcaggaaucuaaaauuauguucgugguuaaugcgguguaugcuauggcccacgcccuccacaagaugcagcggacccugugcccuaacacgacaaaacuuugugaugcuaugaagauccuggacggcaaaaagcucuacaaggauuaccugcugaaaauuaauuuuaccgcccccuucaacccuaauaaggacgcugauagcaucgucaaauuugacacauucggggacggaaugggcagauauaacguguuuaauuuccagaacguugggggaaaguacuccuaucucaaagugggccauugggccgagacccugagccuugaugucaauucuauccacuggucccgcaacagcgugcccaccucucaaugcuccgacccgugugcgccuaaugaaaugaagaacaugcagcccggcgaugucugcuguuggauuugcaucccuugcgagcccuacgaauaucuggccgacgaguuuacauguauggauugcgggagcggacaguggcccacggcugaccucaccggcuguuacgaucugccugaggacuauauucggugggaagaugccugggcuaucgggccggugacaauugccugccugggauucauguguaccugcaugguugugacagucuuuaucaagcauaauaacacgccccuugugaaagcguccggcagagagcucuguuacauucugcuguucgggguuggccucucuuacugcaugaccuucuuuuucaucgccaagccuagccccgugaucugugcucugcgccggcuuggacugggcuccucuuuugccauuugcuauagcgcucuccugacaaaaaccaauuguaucgccagaauuuucgacggggucaagaacggagcccagcggccuaaauuuaucucccccagcucucaaguguucauuugccugggccuuauccucgugcagaucguuauggucuccguguggcugauucuggaagcuccggggacccgcagauacacacucgcggagaagcgggagaccgugauccugaagugcaacgucaaagauagcucuaugcuuauuucccugacauaugacgugauccucguuauucuguguacgguguacgccuuuaagaccagaaaaugcccugaaaauuucaacgaggcuaaguuuaucggauucacaauguauaccacauguaucauuuggcuggccuuucuucccaucuucuacgucaccagcucugauuaucgcgugcagacgaccacaaugugcauuagcguuucccucagcggcuuugugguccuggggugucuguucgccccuaaagugcacaucauucucuuccagccccaaaagaauguugugacccaccggcugcaucuuaacagauuuucugucuccggcacaggaaccacguacagccaguccucugcuagcacauacgugccuaccgugugcaauggccgcgaaguccuggacuccacaaccucuagccucuga

SEQ ID NO: 1847 - protein, 648 aa, Artificial Sequence
  HAGE__Homo_sapiens__Q9NXZ2
MSHHGGAPKASTWVVASRRSSTVSRAPERRPAEELNRTGPEGYSVGRGGRWRGTSRPPEAVAAGHEELPLCFALKSHFVGAVIGRGGSKIKNIQSTTNTTIQIIQEQPESLVKIFGSKAMQTKAKAVIDNFVKKLEENYNSECGIDTAFQPSVGKDGSTDNNVVAGDRPLIDWDQIREEGLKWQKTKWADLPPIKKNFYKESTATSAMSKVEADSWRKENFNITWDDLKDGEKRPIPNPTCTFDDAFQCYPEVMENIKKAGFQKPTPIQSQAWPIVLQGIDLIGVAQTGTGKTLCYLMPGFIHLVLQPSLKGQRNRPGMLVLTPTRELALQVEGECCKYSYKGLRSVCVYGGGNRDEQIEELKKGVDIIIATPGRLNDLQMSNFVNLKNITYLVLDEADKMLDMGFEPQIMKILLDVRPDRQTVMTSATWPHSVHRLAQSYLKEPMIVYVGTLDLVAVSSVKQNIIVTTEEEKWSHMQTFLQSMSSTDKVIVFVSRKAVADHLSSDLILGNISVESLHGDREQRDREKALENFKTGKVRILIATDLASRGLDVHDVTHVYNFDFPRNIEEYVHRIGRTGRAGRTGVSITTLTRNDWRVASELINILERANQSIPEELVSMAERFKAHQQKREMERKMERPQGRPKKFH

SEQ ID NO: 1848 - RNA, 1947 nt, Artificial Sequence
  HAGE__Homo_sapiens__CCDS4977.1
augucccaccacggaggagcucccaaggccucuacgugggucguugcuagucggcgaagcucgacagugucccgagcgccagagaggaggccggcggaggaguugaaucgaacagguccugagggauauagugucggcagagguggucgcuggagaggcaccucuaggcccccggaggccguggccgcuggucacgaggaacugccgcuguguuuugcuuugaagagccacuuuguuggcgcgguaaucggucguggugggucaaaaauaaagaauauacaaaguacaacaaacaccacaauccaaauaauacaagaacaaccagaaucauuagucaaaauuuuuggcagcaaggcaaugcaaacgaaagcaaaagcagugauagacaauuuuguuaaaaagcuagaagaaaauuacaauucagaaugcggaauugauacugcauuccaaccuucuguuggaaaagauggaagcacagauaacaauguuguugcaggagaucggccauugauagauugggaucaaauuagagaggaagguuugaaauggcaaaaaacaaagugggcagauuuaccaccaauuaagaaaaacuuuuauaaagaguccacugccacaagugccaugucaaaaguagaagcagauaguuggaggaaagaaaauuuuaauauaacgugggaugacuugaaggauggggagaaacgaccuauccccaauccuaccugcacauuugaugacgccuuucaauguuauccugagguuauggaaaacauuaaaaaggcagguuuucaaaagccaacaccuauucagucacaggcauggcccauuguguugcaaggaauagaucuuauaggaguagcccagacuggaacaggaaagacauuguguuauuuaaugccuggauuuauucaucugguccuucaacccagccuuaaaggucaaaggaauagacccggcauguuaguucuaacucccacucgggaauuagcacuucaaguagaaggagaauguugcaaauauucauauaaagggcuucggaguguuuguguauauggugguggaaauagagaugaacaaauagaagagcuuaaaaaagguguagauaucauaauugcaacucccggaagauugaaugaucugcaaaugaguaacuucgucaaucugaagaauauaaccuacuugguuuuagaugaagcagacaagauguuggacaugggauuugaaccccagauaaugaagauuuuguuagaugugcgcccagauaggcagacaguuaugaccagugcuacauggccucauucaguucaucgccucgcacaaucuuauuugaaagaaccaaugauugucuauguugguacauuggaucuaguugcuguaaguucagugaagcaaaauauaauuguaaccaccgaggaagagaaauggagucacaugcaaacuuuucuacagaguaugucauccacagacaaagucauugucuucguuucucgaaaagcuguugcggaucacuuaucaagugaccuaauacuuggaaauauaucaguagagucucugcauggagauagagaacagagagaucgggagaaagcauuagagaacuuuaaaacaggcaaagugagaauacuaauugcaacugaucuagccucuagaggacuugauguccaugacguuacacaugucuauaauuuugacuuuccacggaauauugaagaauacguacaccgaauagggcgcacgggaagagcagggaggacugguguuuccauuacaacuuugacuagaaaugauuggaggguugccucugaauugauuaauauucuggaaagagcaaaucagaguauuccagaggagcuuguaucaauggcugagagguuuaaggcacaucaacagaaaagggaaauggaaagaaaaauggaaagaccucaaggaaggcccaagaaguuucauuaa

SEQ ID NO: 1849 - RNA, 1947 nt, Artificial Sequence
  derived and/or modified sequence opt1 from HAGE__Homo_sapiens__CCDS4977.1
augagccaccacggcggggcccccaaggccuccaccuggguggucgcgagccgccgguccagcaccgugucccgcgccccggagcggcgccccgccgaggagcugaaccggacgggccccgagggguacagcgugggccgcgggggccgguggcgcggcaccucccggcccccggaggccgucgccgcggggcacgaggagcucccccugugcuucgcccucaagagccacuucgugggcgccgugaucgggcgcggcggguccaagaucaagaacauccagagcaccaccaacacgaccauccagaucauccaggagcagcccgagucccuggucaagaucuucggcagcaaggccaugcagaccaaggcgaaggccgugaucgacaacuucgugaagaagcuggaggagaacuacaacuccgagugcggcaucgacaccgccuuccagcccagcgucgggaaggacggcuccacggacaacaacgugguggccggggaccggccgcugaucgacugggaccagauccgcgaggagggccucaaguggcagaagaccaagugggccgaccugccgcccaucaagaagaacuucuacaaggagagcaccgcgaccuccgccaugagcaaggucgaggccgacuccuggcggaaggagaacuucaacaucacgugggacgaccugaaggacggcgagaagcgccccauccccaacccgaccugcaccuucgacgacgccuuccagugcuaccccgaggugauggagaacaucaagaaggccggguuccagaagcccacccccauccagagccaggcguggcccaucgugcuccagggcaucgaccugaucggggucgcccagacgggcaccgggaagacccugugcuaccucaugcccggcuucauccaccuggugcugcagcccagccucaagggccagcggaaccgcccggggaugcuggugcugacccccacgcgggagcucgcccugcaggucgagggcgagugcugcaaguacuccuacaaggggcugcgcagcgugugcguguacggcgggggcaaccgggacgagcagaucgaggagcucaagaagggcgucgacaucaucaucgccacccccgggcgccugaacgaccugcagauguccaacuucgugaaccucaagaacaucaccuaccuggugcuggacgaggccgacaagaugcucgacaugggcuucgagccccagaucaugaagauccugcuggacguccggccggaccgccagaccgugaugacgagcgcgaccuggccccacuccguccaccgccucgcccagagcuaccugaaggagcccaugaucguguacguggggacccuggaccucgucgccguguccagcgugaagcagaacaucaucgucaccacggaggaggagaaguggucccacaugcagaccuuccugcagagcauguccagcaccgacaaggugaucguguucgucucccggaaggccguggccgaccaccugagcuccgaccucauccugggcaacaucagcguggagucccugcacggggaccgcgagcagcgggaccgcgagaaggcgcucgagaacuucaagaccggcaagguccggauccugaucgccacggaccuggccagccgcggccucgacgugcacgacgugacccacgucuacaacuucgacuucccccggaacaucgaggaguacgugcaccgcaucgggcggaccggccgcgccgggcggaccggcguguccaucacgacccugacccgcaacgacuggcgggucgcgagcgagcugaucaacauccucgagcgcgccaaccagagcaucccggaggagcugguguccauggccgagcgguucaaggcccaccagcagaagcgcgagauggagcggaagauggagcgcccccagggccggcccaagaaguuccacuga

SEQ ID NO: 1850 - RNA, 1947 nt, Artificial Sequence
  derived and/or modified sequence opt2 from HAGE__Homo_sapiens__CCDS4977.1
augucccaccacggcggcgcccccaaggccuccaccugggucgucgccucccgccgcuccuccaccgucucccgcgcccccgagcgccgccccgccgaggagcucaaccgcaccggccccgagggcuacuccgucggccgcggcggccgcuggcgcggcaccucccgcccccccgaggccgucgccgccggccacgaggagcucccccucugcuucgcccucaagucccacuucgucggcgccgucaucggccgcggcggcuccaagaucaagaacauccaguccaccaccaacaccaccauccagaucauccaggagcagcccgagucccucgucaagaucuucggcuccaaggccaugcagaccaaggccaaggccgucaucgacaacuucgucaagaagcucgaggagaacuacaacuccgagugcggcaucgacaccgccuuccagcccuccgucggcaaggacggcuccaccgacaacaacgucgucgccggcgaccgcccccucaucgacugggaccagauccgcgaggagggccucaaguggcagaagaccaagugggccgaccucccccccaucaagaagaacuucuacaaggaguccaccgccaccuccgccauguccaaggucgaggccgacuccuggcgcaaggagaacuucaacaucaccugggacgaccucaaggacggcgagaagcgccccauccccaaccccaccugcaccuucgacgacgccuuccagugcuaccccgaggucauggagaacaucaagaaggccggcuuccagaagcccacccccauccagucccaggccuggcccaucguccuccagggcaucgaccucaucggcgucgcccagaccggcaccggcaagacccucugcuaccucaugcccggcuucauccaccucguccuccagcccucccucaagggccagcgcaaccgccccggcaugcucguccucacccccacccgcgagcucgcccuccaggucgagggcgagugcugcaaguacuccuacaagggccuccgcuccgucugcgucuacggcggcggcaaccgcgacgagcagaucgaggagcucaagaagggcgucgacaucaucaucgccacccccggccgccucaacgaccuccagauguccaacuucgucaaccucaagaacaucaccuaccucguccucgacgaggccgacaagaugcucgacaugggcuucgagccccagaucaugaagauccuccucgacguccgccccgaccgccagaccgucaugaccuccgccaccuggccccacuccguccaccgccucgcccaguccuaccucaaggagcccaugaucgucuacgucggcacccucgaccucgucgccgucuccuccgucaagcagaacaucaucgucaccaccgaggaggagaaguggucccacaugcagaccuuccuccaguccauguccuccaccgacaaggucaucgucuucgucucccgcaaggccgucgccgaccaccucuccuccgaccucauccucggcaacaucuccgucgagucccuccacggcgaccgcgagcagcgcgaccgcgagaaggcccucgagaacuucaagaccggcaagguccgcauccucaucgccaccgaccucgccucccgcggccucgacguccacgacgucacccacgucuacaacuucgacuucccccgcaacaucgaggaguacguccaccgcaucggccgcaccggccgcgccggccgcaccggcgucuccaucaccacccucacccgcaacgacuggcgcgucgccuccgagcucaucaacauccucgagcgcgccaaccaguccauccccgaggagcucgucuccauggccgagcgcuucaaggcccaccagcagaagcgcgagauggagcgcaagauggagcgcccccagggccgccccaagaaguuccacuga

SEQ ID NO: 1851 - RNA, 1947 nt, Artificial Sequence
  derived and/or modified sequence opt3 from HAGE__Homo_sapiens__CCDS4977.1
augagccaccauggcggggcccccaaggcuuccaccuggguggucgcaucuagaaggucaaguacaguuagccgggccccugagcgccgaccagcggaagaacugaaccguacuggaccggaagguuacuccgugggcagagggggaagguggcggggcacgucuaggcccccugaggcuguagccgcaggucacgaggagcucccacuuugcuucgcccugaaaucgcauuuugugggggcugucaucggaagaggcggcucaaagauuaaaaauauacagagcaccacaaacacuaccauccaaauuauccaggagcagcccgaaaguuuggugaagauuuucggguccaaagcaaugcagacaaaggccaaggcuguuaucgacaauuuugugaaaaaguuagaggaaaacuauaauucugaguguggaauagauaccgccuuccaaccuagcgucgguaaagacggcuccacugauaacaaugugguagcgggggacaggccacugaucgauugggaccagauucgggaggaaggacuaaaguggcagaaaacaaagugggcagaucucccucccaucaagaaaaacuuuuacaaggagucaaccgccacgagugcuaugagcaaaguugaagccgacucuuggcgcaaggagaauuucaacauuacuugggaugaccugaaagauggcgaaaagcgaccaaucccgaauccuaccugcacauuugacgaugcauuccaguguuaucccgaggugauggagaacauuaaaaaggcugguuuucaaaagccaacucccauacagucccaggccuggccuaucguccuucaggggauugaccugaucggaguggcgcaaaccggcacaggcaaaaccuugugcuaccucaugccaggguucauccaccuggugcugcagcccucacucaagggacagagaaauaggccggguauguuaguccugacgccuacucgggaacuugccuugcaaguugagggcgaauguugcaaauauagcuacaaggggcugcguaguguguguguauauggaggcgguaaccgcgacgagcagauugaagaguugaaaaaggggguggauauaaucauugcaacacccggcagacucaaugaccugcagaugucuaacuuugucaaccuuaagaauaucaccuaccugguguuggaugaggcugacaaaaugcucgauaugggauucgaaccacagauaaugaagauucuguuagacguuaggccugaucggcaaacugugaugacauccgccaccuggccccauagcguccaccgacuggcucagucguaccucaaagagccaaugaucguguauguaggcacgcuugaccugguugccgugucuuccgucaagcagaacaucauugugaccacagaagaggaaaaauggucacacaugcagacuuuucuacaaaguaugagcuccaccgauaaggucaucguguucguuucucgcaaggcaguggccgaccaucuaagcucagaucugauucucgggaauauaaguguagagucccugcacggagacagagagcagagggaccgggaaaaagcucuugagaacuucaagacagguaaaguccgcauccugauugcgacugauuuggcaagcagaggccucgacgugcaugauguuacccacguguacaauuuugacuuccccaggaacaucgaagaguauguccaccguaucgggcggacaggacgagccggcagaaccggugugucuauuacuacgcugacaaggaaugauuggcgcguagcuucagaguuaauaaacauccuggaacgggccaaucagaguauuccugaggagcuagugagcauggcagaaagauuuaaggcccaucagcaaaaacgcgaaauggagcgcaagauggagcgaccacaggggcggccgaagaaauuccacuga

SEQ ID NO: 1852 - RNA, 1947 nt, Artificial Sequence
  derived and/or modified sequence opt4 from HAGE__Homo_sapiens__CCDS4977.1
augagccaccacggcggcgcccccaaggccagcaccugggugguggccagcagaagaagcagcaccgugagcagagcccccgagagaagacccgccgaggagcugaacagaaccggccccgagggcuacagcgugggcagaggcggcagauggagaggcaccagcagaccccccgaggccguggccgccggccacgaggagcugccccugugcuucgcccugaagagccacuucgugggcgccgugaucggcagaggcggcagcaagaucaagaacauccagagcaccaccaacaccaccauccagaucauccaggagcagcccgagagccuggugaagaucuucggcagcaaggccaugcagaccaaggccaaggccgugaucgacaacuucgugaagaagcuggaggagaacuacaacagcgagugcggcaucgacaccgccuuccagcccagcgugggcaaggacggcagcaccgacaacaacgugguggccggcgacagaccccugaucgacugggaccagaucagagaggagggccugaaguggcagaagaccaagugggccgaccugccccccaucaagaagaacuucuacaaggagagcaccgccaccagcgccaugagcaagguggaggccgacagcuggagaaaggagaacuucaacaucaccugggacgaccugaaggacggcgagaagagacccauccccaaccccaccugcaccuucgacgacgccuuccagugcuaccccgaggugauggagaacaucaagaaggccggcuuccagaagcccacccccauccagagccaggccuggcccaucgugcugcagggcaucgaccugaucggcguggcccagaccggcaccggcaagacccugugcuaccugaugcccggcuucauccaccuggugcugcagcccagccugaagggccagagaaacagacccggcaugcuggugcugacccccaccagagagcuggcccugcagguggagggcgagugcugcaaguacagcuacaagggccugagaagcgugugcguguacggcggcggcaacagagacgagcagaucgaggagcugaagaagggcguggacaucaucaucgccacccccggcagacugaacgaccugcagaugagcaacuucgugaaccugaagaacaucaccuaccuggugcuggacgaggccgacaagaugcuggacaugggcuucgagccccagaucaugaagauccugcuggacgugagacccgacagacagaccgugaugaccagcgccaccuggccccacagcgugcacagacuggcccagagcuaccugaaggagcccaugaucguguacgugggcacccuggaccugguggccgugagcagcgugaagcagaacaucaucgugaccaccgaggaggagaaguggagccacaugcagaccuuccugcagagcaugagcagcaccgacaaggugaucguguucgugagcagaaaggccguggccgaccaccugagcagcgaccugauccugggcaacaucagcguggagagccugcacggcgacagagagcagagagacagagagaaggcccuggagaacuucaagaccggcaaggugagaauccugaucgccaccgaccuggccagcagaggccuggacgugcacgacgugacccacguguacaacuucgacuuccccagaaacaucgaggaguacgugcacagaaucggcagaaccggcagagccggcagaaccggcgugagcaucaccacccugaccagaaacgacuggagaguggccagcgagcugaucaacauccuggagagagccaaccagagcauccccgaggagcuggugagcauggccgagagauucaaggcccaccagcagaagagagagauggagagaaagauggagagaccccagggcagacccaagaaguuccacuga

SEQ ID NO: 1853 - RNA, 1947 nt, Artificial Sequence
  derived and/or modified sequence opt5 from HAGE__Homo_sapiens__CCDS4977.1
augagccaccauggcggggcccccaaggcuuccaccuggguggucgccucuagacggagcuccacaguuucucgcgcgccugagagacggccggcugaagaacugaaccgcacgggacccgaaggcuacagcguggggagaggaggccgguggcgcgggaccuccagaccucccgaggccguggccgcuggacacgaggagcucccucugugcuucgcccuuaaaucucauuuugucggcgcugugaucggccgcgggggaagcaagauuaaaaauauccaguccacaaccaacacaaccauucaaaucauucaggagcagcccgaaagccugguuaagaucuucggcucuaaagccaugcagacaaaggcgaaggccgugaucgacaauuuugucaaaaagcucgaggaaaacuauaauuccgagugugggauugauaccgcuuuccaaccuagcgugggaaaagacggcucuacggauaacaauguuguggccggggaccggccgcugaucgauugggaccagauuagagaggaaggacuuaaguggcagaaaaccaagugggcugaucugcccccuaucaagaaaaacuuuuacaaggaguccacagccaccagcgcgaugucuaaagucgaagccgacuccuggcggaaggagaauuucaacauuacaugggaugaccucaaagauggcgaaaagcgccccaucccuaauccgaccugcacguuugacgaugcuuuccaguguuaucccgaggugauggagaacauuaaaaaggccggcuuucaaaagccuacacccauccagagccaggcuuggccuaucgugcugcaggggauugaccugaucggagucgcccaaaccggcacagggaaaacccucugcuaccugaugcccggauucauucaccuuguucugcagcccucccucaagggccagagaaaucggccugggaugcuggugcuuaccccgacacgcgaacuggcccuccaaguggagggagaauguugcaaauauucuuacaagggccugagaagcgucuguguguauggcgggggaaaccgggacgagcagaucgaggaacugaaaaagggcguugauauuaucaucgcuacgcccgggagacucaaugaccugcagauguccaacuuugugaaccuuaagaauauuaccuaccugguccucgaugaggcggacaaaaugcuggauaugggauucgaaccucagaucaugaagauucuucuggacgugcgccccgaucggcaaacaguuaugaccagcgccacauggccucauucugugcacagacucgcucaguccuaccugaaagagcccaugaucgucuaugugggcacccuggaccucgucgccgugagcucuguuaagcagaacauuaucgugacgacagaagaggaaaaauggagccacaugcagaccuuucugcaauccaugucuagcaccgauaaggucaucguguucguuucccgcaaggccguggcugaccaucuuagcucugaucugauucucgggaauaucuccgucgagagccugcacggcgaccgggagcagagagaccgcgaaaaagcccuugagaacuucaagacaggaaaagugcggauucugaucgcgaccgaucucgcuucuagaggccuggacgugcaugauguuacacacgucuacaauuuugacuucccgcgcaacauugaagaguaugugcaccggaucgggagaacgggacgcgccggccggaccgggguguccauuacaacccugacaagaaaugauuggcgggucgccagcgagcucaucaacauccuggaacgcgcuaaucaguccauuccugaggaacuugugucuauggccgagagauuuaaggcucaucagcaaaaacgggaaauggagagaaagauggagcgcccccagggacggccuaagaaauuccacuga

SEQ ID NO: 1854 - protein, 402 aa, Artificial Sequence
  hepsin__Homo_sapiens__B2ZDQ2
MAQKEGGRTVPCCSRPKVAALTAGTLLLLTAIGAASWAIVAVLLRSDQEPLYPVQVSSADARLMVFDKTEGTWRLLCSSRSNARVAGLSCEEMGFLRALTHSELDVRTAGANGTSGFFCVDEGRLPHTQRLLEVISVCDCPRGRFLAAICQDCGRRKLPVDRIVGGRDTSLGRWPWQVSLRYDGAHLCGGSLLSGDWVLTAAHCFPERNRVLSRWRVFAGAVAQASPHGLQLGVQAVVYHGGYLPFRDPNSEENSNDIALVHLSSPLPLTEYIQPVCLPAAGQALVDGKICTVTGWGNTQYYGQQAGVLQEARVPIISNDVCNGADFYGNQIKPKMFCAGYPEGGIDACQGDSGGPFVCEDSISRTPRWRLCGIVSWGTGCALAQKPGVYTKVSDFREWIFQ

SEQ ID NO: 1855 - RNA, 1209 nt, Artificial Sequence
  hepsin__Homo_sapiens__ACD02430
auggcgcagaaggaggguggccggacugugccaugcugcuccagacccaagguggcagcucucacugcggggacccugcuacuucugacagccaucggggcggcauccugggccauuguggcuguucuccucaggagugaccaggagccgcuguacccagugcaggucagcucugcggacgcucggcucauggucuuugacaagacggaagggacguggcggcugcugugcuccucgcgcuccaacgccaggguagccggacucagcugcgaggagaugggcuuccucagggcacugacccacuccgagcuggacgugcgaacggcgggcgccaauggcacgucgggcuucuucuguguggacgaggggaggcugccccacacccagaggcugcuggaggucaucuccgugugugauugccccagaggccguuucuuggccgccaucugccaagacuguggccgcaggaagcugcccguggaccgcaucgugggaggccgggacaccagcuugggccgguggccguggcaagucagccuucgcuaugauggagcacaccucugugggggaucccugcucuccggggacugggugcugacagccgcccacugcuucccggagcggaaccggguccugucccgauggcgaguguuugccggugccguggcccaggccucuccccacggucugcagcugggggugcaggcuguggucuaccacgggggcuaucuucccuuucgggaccccaacagcgaggagaacagcaacgauauugcccugguccaccucuccaguccccugccccucacagaauacauccagccugugugccucccagcugccggccaggcccugguggauggcaagaucuguaccgugacgggcuggggcaacacgcaguacuauggccaacaggccgggguacuccaggaggcucgaguccccauaaucagcaaugaugucugcaauggcgcugacuucuauggaaaccagaucaagcccaagauguucugugcuggcuaccccgaggguggcauugaugccugccagggcgacagcgguggucccuuugugugugaggacagcaucucucggacgccacguuggcggcuguguggcauugugaguuggggcacuggcugugcccuggcccagaagccaggcgucuacaccaaagucagugacuuccgggaguggaucuuccaguga

SEQ ID NO: 1856 - RNA, 1209 nt, Artificial Sequence
  derived and/or modified sequence opt1 from hepsin__Homo_sapiens__ACD02430
auggcccagaaggagggcgggcgcaccgugcccugcugcagccggccgaaggucgccgcgcugaccgccggcacgcuccugcugcucaccgccaucggggccgccuccugggcgaucguggccgugcugcugcgcagcgaccaggagccccucuaccccguccagguguccagcgccgacgcccggcugaugguguucgacaagaccgagggcaccuggcgccugcucugcuccagccgguccaacgcgcgcgucgccgggcugagcugcgaggagaugggcuuccugcgggcccucacgcacuccgagcuggacgugcgcaccgccggcgccaacgggaccagcggcuucuucugcguggacgaggggcggcugccccacacccagcgccuccuggaggucaucuccgugugcgacugcccgcggggccgcuuccuggcggccaucugccaggacugcgggcggcgcaagcuccccguggaccggaucgucggcggccgcgacacgagccuggggcgguggcccuggcaggucucccugcgcuacgacggcgcccaccucugcgggggcagccugcuguccggcgacugggugcucaccgccgcccacugcuuccccgagcggaaccgcgugcugagccgguggcgcguguucgcgggggccguggcccaggccuccccgcacggccugcagcucgggguccaggccgugguguaccacggcggguaccugcccuuccgcgaccccaacagcgaggagaacuccaacgacaucgcgcugguccaccucagcagcccccugccgcugaccgaguacauccagcccgugugccuccccgccgccggccaggcccugguggacggcaagaucugcaccgucacgggguggggcaacacccaguacuacgggcagcaggccggcgugcugcaggaggcgcggguccccaucaucuccaacgacgugugcaacggggccgacuucuacggcaaccagaucaagccgaagauguucugcgccggcuaccccgagggcgggaucgacgccugccagggggacagcggcgggcccuucgugugcgaggacuccaucagccgcacgccccgguggcgccucugcggcaucgucuccuggggcaccgggugcgcgcuggcccagaagccgggcguguacaccaaggugagcgacuuccgggaguggaucuuccaguga

SEQ ID NO: 1857 - RNA, 1209 nt, Artificial Sequence
  derived and/or modified sequence opt2 from hepsin__Homo_sapiens__ACD02430
auggcccagaaggagggcggccgcaccguccccugcugcucccgccccaaggucgccgcccucaccgccggcacccuccuccuccucaccgccaucggcgccgccuccugggccaucgucgccguccuccuccgcuccgaccaggagccccucuaccccguccaggucuccuccgccgacgcccgccucauggucuucgacaagaccgagggcaccuggcgccuccucugcuccucccgcuccaacgcccgcgucgccggccucuccugcgaggagaugggcuuccuccgcgcccucacccacuccgagcucgacguccgcaccgccggcgccaacggcaccuccggcuucuucugcgucgacgagggccgccucccccacacccagcgccuccucgaggucaucuccgucugcgacugcccccgcggccgcuuccucgccgccaucugccaggacugcggccgccgcaagcuccccgucgaccgcaucgucggcggccgcgacaccucccucggccgcuggcccuggcaggucucccuccgcuacgacggcgcccaccucugcggcggcucccuccucuccggcgacuggguccucaccgccgcccacugcuuccccgagcgcaaccgcguccucucccgcuggcgcgucuucgccggcgccgucgcccaggccuccccccacggccuccagcucggcguccaggccgucgucuaccacggcggcuaccuccccuuccgcgaccccaacuccgaggagaacuccaacgacaucgcccucguccaccucuccuccccccucccccucaccgaguacauccagcccgucugccuccccgccgccggccaggcccucgucgacggcaagaucugcaccgucaccggcuggggcaacacccaguacuacggccagcaggccggcguccuccaggaggcccgcguccccaucaucuccaacgacgucugcaacggcgccgacuucuacggcaaccagaucaagcccaagauguucugcgccggcuaccccgagggcggcaucgacgccugccagggcgacuccggcggccccuucgucugcgaggacuccaucucccgcaccccccgcuggcgccucugcggcaucgucuccuggggcaccggcugcgcccucgcccagaagcccggcgucuacaccaaggucuccgacuuccgcgaguggaucuuccaguga

SEQ ID NO: 1858 - RNA, 1209 nt, Artificial Sequence
  derived and/or modified sequence opt3 from hepsin__Homo_sapiens__ACD02430
auggcccagaaggagggcgggagaaccgugcccugcuguagcaggccuaaagucgcugcacugacagccggaacucuccuucuguugacggcgaucggugcugccuccugggcaauuguugccguguuacugcggucugaccaagaaccacuauacccgguacaggugucaagugcugaugcacgccucauggucuucgacaagaccgagggcacauggcgacugcuuugcagcucccguucuaacgccagaguggcugggcugucgugugaagagaugggauuuuugagggcccucacucacucagaacuggauguucggaccgcgggcgcaaaugguacaagcggguucuuuugcguggacgagggacgccugccccauacccagagacucuuagaggucauaagugugugugauugcccuaggggccgguuccuggccgcuaucugucaggacugcggccgccgaaaacuuccaguagauagaauuguugggggaagggacacuuccuugggucgguggcccuggcaagugucucugcguuaugauggcgcccaccuaugugggggaagccuccuguccggcgacuggguccuuacagcagcucauugcuuuccugaacgcaacagagugcugucaagguggcggguguucgccggugcggucgcccaggcaaguccacacggguugcagcucggaguucaggcugugguauaccauggcggcuaucugcccuuucgagauccuaauagcgaggaaaacucuaaugacaucgccuuagugcaccuguccucaccacucccgcuuaccgaguacauucaacccgucugucugccugcugccgggcaggcauugguggauggaaagaucugcacgguuacugguuggggcaacacccaguauuacgggcagcaagccggagugcuacaggaggcucgcgucccaauaaucagcaaugacgugugcaacggcgcggacuucuaugguaaucagauuaaacccaagauguuuugugcaggguacccugaaggcggaaucgaugccugccaaggcgacagugggggaccauucguaugugaggauucuauuuccagaacacccagguggcggcugugcgguaucguuagcuggggcacugggugugcucucgcccagaagccgggaguguacaccaaagucucggacuuucgcgaauggauauuccaguga

SEQ ID NO: 1859 - RNA, 1209 nt, Artificial Sequence
  derived and/or modified sequence opt4 from hepsin__Homo_sapiens__ACD02430
auggcccagaaggagggcggcagaaccgugcccugcugcagcagacccaagguggccgcccugaccgccggcacccugcugcugcugaccgccaucggcgccgccagcugggccaucguggccgugcugcugagaagcgaccaggagccccuguaccccgugcaggugagcagcgccgacgccagacugaugguguucgacaagaccgagggcaccuggagacugcugugcagcagcagaagcaacgccagaguggccggccugagcugcgaggagaugggcuuccugagagcccugacccacagcgagcuggacgugagaaccgccggcgccaacggcaccagcggcuucuucugcguggacgagggcagacugccccacacccagagacugcuggaggugaucagcgugugcgacugccccagaggcagauuccuggccgccaucugccaggacugcggcagaagaaagcugcccguggacagaaucgugggcggcagagacaccagccugggcagauggcccuggcaggugagccugagauacgacggcgcccaccugugcggcggcagccugcugagcggcgacugggugcugaccgccgcccacugcuuccccgagagaaacagagugcugagcagauggagaguguucgccggcgccguggcccaggccagcccccacggccugcagcugggcgugcaggccgugguguaccacggcggcuaccugcccuucagagaccccaacagcgaggagaacagcaacgacaucgcccuggugcaccugagcagcccccugccccugaccgaguacauccagcccgugugccugcccgccgccggccaggcccugguggacggcaagaucugcaccgugaccggcuggggcaacacccaguacuacggccagcaggccggcgugcugcaggaggccagagugcccaucaucagcaacgacgugugcaacggcgccgacuucuacggcaaccagaucaagcccaagauguucugcgccggcuaccccgagggcggcaucgacgccugccagggcgacagcggcggccccuucgugugcgaggacagcaucagcagaacccccagauggagacugugcggcaucgugagcuggggcaccggcugcgcccuggcccagaagcccggcguguacaccaaggugagcgacuucagagaguggaucuuccaguga

SEQ ID NO: 1860 - RNA, 1209 nt, Artificial Sequence
  derived and/or modified sequence opt5 from hepsin__Homo_sapiens__ACD02430
auggcccagaaggagggcgggagaaccgugcccugcuguagccggccuaaagucgcugcccugacagcgggaacgcuccugcuucugaccgcuaucggcgccgccuccugggcuauuguugccgugcuccugcgcucugaccaagaaccgcuuuaccccgugcaggucagcuccgcugaugccagacugaugguguucgacaagacagaggggaccuggcggcuccugugcucuagccgcuccaacgcgagaguugccggacugucuugugaagagaugggcuuucuccgggcucugacacacagcgaacuugaugugcgcaccgccggggcuaauggaacauccggcuucuuuugcgucgacgagggcagacugccucauacccagcggcuccuggaggugaucagcguuugugauugcccccgcgggagauuccuugccgcgauuugucaggacugcggacggcgcaaacugccuguggauagaaucgucggcgggcgggacacgucucucggacgcuggcccuggcaagugucccugagauaugauggcgcccaccugugugggggaagccuccugucuggcgacugggugcuuaccgcugcccauugcuuuccugaacggaacagaguccugucccgcuggcggguuuucgcuggcgccguggcccaggcuagcccgcacgggcuccagcugggagugcaggcggucguguaccauggcggguaucuucccuuuagagauccuaauucugaggaaaacuccaaugacauugcccugguucaccucagcucuccccugccucugacagaguacauccaacccgugugucucccggcugccggacaggcccuggucgauggcaagaucugcaccgugacaggguggggaaacacccaguauuacggccagcaagcuggcguucuucaggaggcccgcgugccuauuaucuccaaugacgucugcaacggggcggacuucuauggaaaucagauuaaacccaagauguuuugugcuggcuacccugaagggggaaucgaugccugccaaggcgacagcgggggccccuucgugugugaggauuccauuagccggacgcccagauggcgccugugcggaaucgucucuuggggcacagggugugcccucgcucagaagccuggaguguacaccaaaguuuccgacuuucgggaauggauuuuccaguga

SEQ ID NO: 1861 - protein, 417 aa, Artificial Sequence
  hepsin__Homo_sapiens__P05981
MAQKEGGRTVPCCSRPKVAALTAGTLLLLTAIGAASWAIVAVLLRSDQEPLYPVQVSSADARLMVFDKTEGTWRLLCSSRSNARVAGLSCEEMGFLRALTHSELDVRTAGANGTSGFFCVDEGRLPHTQRLLEVISVCDCPRGRFLAAICQDCGRRKLPVDRIVGGRDTSLGRWPWQVSLRYDGAHLCGGSLLSGDWVLTAAHCFPERNRVLSRWRVFAGAVAQASPHGLQLGVQAVVYHGGYLPFRDPNSEENSNDIALVHLSSPLPLTEYIQPVCLPAAGQALVDGKICTVTGWGNTQYYGQQAGVLQEARVPIISNDVCNGADFYGNQIKPKMFCAGYPEGGIDACQGDSGGPFVCEDSISRTPRWRLCGIVSWGTGCALAQKPGVYTKVSDFREWIFQAIKTHSEASGMVTQL

SEQ ID NO: 1862 - RNA, 1254 nt, Artificial Sequence
  hepsin__Homo_sapiens__AAA36013
auggcgcagaaggaggguggccggacugugccaugcugcuccagacccaagguggcagcucucacugcggggacccugcuacuucugacagccaucggggcggcauccugggccauuguggcuguucuccucaggagugaccaggagccgcuguacccagugcaggucagcucugcggacgcucggcucauggucuuugacaagacggaagggacguggcggcugcugugcuccucgcgcuccaacgccaggguagccggacucagcugcgaggagaugggcuuccucagggcacugacccacuccgagcuggacgugcgaacggcgggcgccaauggcacgucgggcuucuucuguguggacgaggggaggcugccccacacccagaggcugcuggaggucaucuccgugugugauugccccagaggccguuucuuggccgccaucugccaagacuguggccgcaggaagcugcccguggaccgcaucgugggaggccgggacaccagcuugggccgguggccguggcaagucagccuucgcuaugauggagcacaccucugugggggaucccugcucuccggggacugggugcugacagccgcccacugcuucccggagcggaaccggguccugucccgauggcgaguguuugccggugccguggcccaggccucuccccacggucugcagcugggggugcaggcuguggucuaccacgggggcuaucuucccuuucgggaccccaacagcgaggagaacagcaacgauauugcccugguccaccucuccaguccccugccccucacagaauacauccagccugugugccucccagcugccggccaggcccugguggauggcaagaucuguaccgugacgggcuggggcaacacgcaguacuauggccaacaggccgggguacuccaggaggcucgaguccccauaaucagcaaugaugucugcaauggcgcugacuucuauggaaaccagaucaagcccaagauguucugugcuggcuaccccgaggguggcauugaugccugccagggcgacagcgguggucccuuugugugugaggacagcaucucucggacgccacguuggcggcuguguggcauugugaguuggggcacuggcugugcccuggcccagaagccaggcgucuacaccaaagucagugacuuccgggaguggaucuuccaggccauaaagacucacuccgaagccagcggcauggugacccagcucuga

SEQ ID NO: 1863 - RNA, 1254 nt, Artificial Sequence
  derived and/or modified sequence opt1 from hepsin__Homo_sapiens__AAA36013
auggcccagaaggagggcgggcgcaccgugcccugcugcagccggccgaaggucgccgcgcugaccgccggcacgcuccugcugcucaccgccaucggggccgccuccugggcgaucguggccgugcugcugcgcagcgaccaggagccccucuaccccguccagguguccagcgccgacgcccggcugaugguguucgacaagaccgagggcaccuggcgccugcucugcuccagccgguccaacgcgcgcgucgccgggcugagcugcgaggagaugggcuuccugcgggcccucacgcacuccgagcuggacgugcgcaccgccggcgccaacgggaccagcggcuucuucugcguggacgaggggcggcugccccacacccagcgccuccuggaggucaucuccgugugcgacugcccgcggggccgcuuccuggcggccaucugccaggacugcgggcggcgcaagcuccccguggaccggaucgucggcggccgcgacacgagccuggggcgguggcccuggcaggucucccugcgcuacgacggcgcccaccucugcgggggcagccugcuguccggcgacugggugcucaccgccgcccacugcuuccccgagcggaaccgcgugcugagccgguggcgcguguucgcgggggccguggcccaggccuccccgcacggccugcagcucgggguccaggccgugguguaccacggcggguaccugcccuuccgcgaccccaacagcgaggagaacuccaacgacaucgcgcugguccaccucagcagcccccugccgcugaccgaguacauccagcccgugugccuccccgccgccggccaggcccugguggacggcaagaucugcaccgucacgggguggggcaacacccaguacuacgggcagcaggccggcgugcugcaggaggcgcggguccccaucaucuccaacgacgugugcaacggggccgacuucuacggcaaccagaucaagccgaagauguucugcgccggcuaccccgagggcgggaucgacgccugccagggggacagcggcgggcccuucgugugcgaggacuccaucagccgcacgccccgguggcgccucugcggcaucgucuccuggggcaccgggugcgcgcuggcccagaagccgggcguguacaccaaggugagcgacuuccgggaguggaucuuccaggccaucaagacccacuccgaggccagcgggauggucacccagcuguga

SEQ ID NO: 1864 - RNA, 1254 nt, Artificial Sequence
  derived and/or modified sequence opt2 from hepsin__Homo_sapiens__AAA36013
auggcccagaaggagggcggccgcaccguccccugcugcucccgccccaaggucgccgcccucaccgccggcacccuccuccuccucaccgccaucggcgccgccuccugggccaucgucgccguccuccuccgcuccgaccaggagccccucuaccccguccaggucuccuccgccgacgcccgccucauggucuucgacaagaccgagggcaccuggcgccuccucugcuccucccgcuccaacgcccgcgucgccggccucuccugcgaggagaugggcuuccuccgcgcccucacccacuccgagcucgacguccgcaccgccggcgccaacggcaccuccggcuucuucugcgucgacgagggccgccucccccacacccagcgccuccucgaggucaucuccgucugcgacugcccccgcggccgcuuccucgccgccaucugccaggacugcggccgccgcaagcuccccgucgaccgcaucgucggcggccgcgacaccucccucggccgcuggcccuggcaggucucccuccgcuacgacggcgcccaccucugcggcggcucccuccucuccggcgacuggguccucaccgccgcccacugcuuccccgagcgcaaccgcguccucucccgcuggcgcgucuucgccggcgccgucgcccaggccuccccccacggccuccagcucggcguccaggccgucgucuaccacggcggcuaccuccccuuccgcgaccccaacuccgaggagaacuccaacgacaucgcccucguccaccucuccuccccccucccccucaccgaguacauccagcccgucugccuccccgccgccggccaggcccucgucgacggcaagaucugcaccgucaccggcuggggcaacacccaguacuacggccagcaggccggcguccuccaggaggcccgcguccccaucaucuccaacgacgucugcaacggcgccgacuucuacggcaaccagaucaagcccaagauguucugcgccggcuaccccgagggcggcaucgacgccugccagggcgacuccggcggccccuucgucugcgaggacuccaucucccgcaccccccgcuggcgccucugcggcaucgucuccuggggcaccggcugcgcccucgcccagaagcccggcgucuacaccaaggucuccgacuuccgcgaguggaucuuccaggccaucaagacccacuccgaggccuccggcauggucacccagcucuga

SEQ ID NO: 1865 - RNA, 1254 nt, Artificial Sequence
  derived and/or modified sequence opt3 from hepsin__Homo_sapiens__AAA36013
auggcccagaaggagggcgggagaaccgugcccugcuguagcaggccuaaagucgcugcacugacagccggaacucuccuucuguugacggcgaucggugcugccuccugggcaauuguugccguguuacugcggucugaccaagaaccacuauacccgguacaggugucaagugcugaugcacgccucauggucuucgacaagaccgagggcacauggcgacugcuuugcagcucccguucuaacgccagaguggcugggcugucgugugaagagaugggauuuuugagggcccucacucacucagaacuggauguucggaccgcgggcgcaaaugguacaagcggguucuuuugcguggacgagggacgccugccccauacccagagacucuuagaggucauaagugugugugauugcccuaggggccgguuccuggccgcuaucugucaggacugcggccgccgaaaacuuccaguagauagaauuguugggggaagggacacuuccuugggucgguggcccuggcaagugucucugcguuaugauggcgcccaccuaugugggggaagccuccuguccggcgacuggguccuuacagcagcucauugcuuuccugaacgcaacagagugcugucaagguggcggguguucgccggugcggucgcccaggcaaguccacacggguugcagcucggaguucaggcugugguauaccauggcggcuaucugcccuuucgagauccuaauagcgaggaaaacucuaaugacaucgccuuagugcaccuguccucaccacucccgcuuaccgaguacauucaacccgucugucugccugcugccgggcaggcauugguggauggaaagaucugcacgguuacugguuggggcaacacccaguauuacgggcagcaagccggagugcuacaggaggcucgcgucccaauaaucagcaaugacgugugcaacggcgcggacuucuaugguaaucagauuaaacccaagauguuuugugcaggguacccugaaggcggaaucgaugccugccaaggcgacagugggggaccauucguaugugaggauucuauuuccagaacacccagguggcggcugugcgguaucguuagcuggggcacugggugugcucucgcccagaagccgggaguguacaccaaagucucggacuuucgcgaauggauauuccaggcaauuaagacacacucugaggccuccggcauggugacccagcuguga

SEQ ID NO: 1866 - RNA, 1254 nt, Artificial Sequence
  derived and/or modified sequence opt4 from hepsin__Homo_sapiens__AAA36013
auggcccagaaggagggcggcagaaccgugcccugcugcagcagacccaagguggccgcccugaccgccggcacccugcugcugcugaccgccaucggcgccgccagcugggccaucguggccgugcugcugagaagcgaccaggagccccuguaccccgugcaggugagcagcgccgacgccagacugaugguguucgacaagaccgagggcaccuggagacugcugugcagcagcagaagcaacgccagaguggccggccugagcugcgaggagaugggcuuccugagagcccugacccacagcgagcuggacgugagaaccgccggcgccaacggcaccagcggcuucuucugcguggacgagggcagacugccccacacccagagacugcuggaggugaucagcgugugcgacugccccagaggcagauuccuggccgccaucugccaggacugcggcagaagaaagcugcccguggacagaaucgugggcggcagagacaccagccugggcagauggcccuggcaggugagccugagauacgacggcgcccaccugugcggcggcagccugcugagcggcgacugggugcugaccgccgcccacugcuuccccgagagaaacagagugcugagcagauggagaguguucgccggcgccguggcccaggccagcccccacggccugcagcugggcgugcaggccgugguguaccacggcggcuaccugcccuucagagaccccaacagcgaggagaacagcaacgacaucgcccuggugcaccugagcagcccccugccccugaccgaguacauccagcccgugugccugcccgccgccggccaggcccugguggacggcaagaucugcaccgugaccggcuggggcaacacccaguacuacggccagcaggccggcgugcugcaggaggccagagugcccaucaucagcaacgacgugugcaacggcgccgacuucuacggcaaccagaucaagcccaagauguucugcgccggcuaccccgagggcggcaucgacgccugccagggcgacagcggcggccccuucgugugcgaggacagcaucagcagaacccccagauggagacugugcggcaucgugagcuggggcaccggcugcgcccuggcccagaagcccggcguguacaccaaggugagcgacuucagagaguggaucuuccaggccaucaagacccacagcgaggccagcggcauggugacccagcuguga

SEQ ID NO: 1867 - RNA, 1254 nt, Artificial Sequence
  derived and/or modified sequence opt5 from hepsin__Homo_sapiens__AAA36013
auggcccagaaggagggcgggagaaccgugcccugcuguagccggccuaaagucgcugcccugacagcgggaacgcuccugcuucugaccgcuaucggcgccgccuccugggcuauuguugccgugcuccugcgcucugaccaagaaccgcuuuaccccgugcaggucagcuccgcugaugccagacugaugguguucgacaagacagaggggaccuggcggcuccugugcucuagccgcuccaacgcgagaguugccggacugucuugugaagagaugggcuuucuccgggcucugacacacagcgaacuugaugugcgcaccgccggggcuaauggaacauccggcuucuuuugcgucgacgagggcagacugccucauacccagcggcuccuggaggugaucagcguuugugauugcccccgcgggagauuccuugccgcgauuugucaggacugcggacggcgcaaacugccuguggauagaaucgucggcgggcgggacacgucucucggacgcuggcccuggcaagugucccugagauaugauggcgcccaccugugugggggaagccuccugucuggcgacugggugcuuaccgcugcccauugcuuuccugaacggaacagaguccugucccgcuggcggguuuucgcuggcgccguggcccaggcuagcccgcacgggcuccagcugggagugcaggcggucguguaccauggcggguaucuucccuuuagagauccuaauucugaggaaaacuccaaugacauugcccugguucaccucagcucuccccugccucugacagaguacauccaacccgugugucucccggcugccggacaggcccuggucgauggcaagaucugcaccgugacaggguggggaaacacccaguauuacggccagcaagcuggcguucuucaggaggcccgcgugccuauuaucuccaaugacgucugcaacggggcggacuucuauggaaaucagauuaaacccaagauguuuugugcuggcuacccugaagggggaaucgaugccugccaaggcgacagcgggggccccuucgugugugaggauuccauuagccggacgcccagauggcgccugugcggaaucgucucuuggggcacagggugugcccucgcucagaagccuggaguguacaccaaaguuuccgacuuucgggaauggauuuuccaggccaucaagacacacagcgaggcuucuggcauggugacccagcuguga

SEQ ID NO: 1868 - protein, 979 aa, Artificial Sequence
  Her2/neu__Homo_sapiens__B4DTR1
MELAALCRWGLLLALLPPGAASTQDNYLSTDVGSCTLVCPLHNQEVTAEDGTQRCEKCSKPCARVCYGLGMEHLREVRAVTSANIQEFAGCKKIFGSLAFLPESFDGDPASNTAPLQPEQLQVFETLEEITGYLYISAWPDSLPDLSVFQNLQVIRGRILHNGAYSLTLQGLGISWLGLRSLRELGSGLALIHHNTHLCFVHTVPWDQLFRNPHQALLHTANRPEDECVGEGLACHQLCARGHCWGPGPTQCVNCSQFLRGQECVEECRVLQGLPREYVNARHCLPCHPECQPQNGSVTCFGPEADQCVACAHYKDPPFCVARCPSGVKPDLSYMPIWKFPDEEGACQPCPINCTHSCVDLDDKGCPAEQRASPLTSIISAVVGILLVVVLGVVFGILIKRRQQKIRKYTMRRLLQETELVEPLTPSGAMPNQAQMRILKETELRKVKVLGSGAFGTVYKGIWIPDGENVKIPVAIKVLRENTSPKANKEILDEAYVMAGVGSPYVSRLLGICLTSTVQLVTQLMPYGCLLDHVRENRGRLGSQDLLNWCMQIAKGMSYLEDVRLVHRDLAARNVLVKSPNHVKITDFGLARLLDIDETEYHADGGKVPIKWMALESILRRRFTHQSDVWSYGVTVWELMTFGAKPYDGIPAREIPDLLEKGERLPQPPICTIDVYMIMVKCWMIDSECRPRFRELVSEFSRMARDPQRFVVIQNEDLGPASPLDSTFYRSLLEDDDMGDLVDAEEYLVPQQGFFCPDPAPGAGGMVHHRHRSSSTRSGGGDLTLGLEPSEEEAPRSPLAPSEGAGSDVFDGDLGMGAAKGLQSLPTHDPSPLQRYSEDPTVPLPSETDGYVAPLTCSPQPEYVNQPDVRPQPPSPREGPLPAARPAGATLERPKTLSPGKNGVVKDVFAFGGAVENPEYLTPQGGAAPQPHPPPAFSPAFDNLYYWDQDPPERGAPPSTFKGTPTAENPEYLGLDVPV

SEQ ID NO: 1869 - RNA, 2940 nt, Artificial Sequence
  Her2/neu__Homo_sapiens__BAG62073
auggagcuggcggccuugugccgcugggggcuccuccucgcccucuugccccccggagccgcgagcacccaagacaacuaccuuucuacggacgugggauccugcacccucgucugcccccugcacaaccaagaggugacagcagaggauggaacacagcggugugagaagugcagcaagcccugugcccgagugugcuauggucugggcauggagcacuugcgagaggugagggcaguuaccagugccaauauccaggaguuugcuggcugcaagaagaucuuugggagccuggcauuucugccggagagcuuugauggggacccagccuccaacacugccccgcuccagccagagcagcuccaaguguuugagacucuggaagagaucacagguuaccuauacaucucagcauggccggacagccugccugaccucagcgucuuccagaaccugcaaguaauccggggacgaauucugcacaauggcgccuacucgcugacccugcaagggcugggcaucagcuggcuggggcugcgcucacugagggaacugggcaguggacuggcccucauccaccauaacacccaccucugcuucgugcacacggugcccugggaccagcucuuucggaacccgcaccaagcucugcuccacacugccaaccggccagaggacgagugugugggcgagggccuggccugccaccagcugugcgcccgagggcacugcugggguccagggcccacccagugugucaacugcagccaguuccuucggggccaggagugcguggaggaaugccgaguacugcaggggcuccccagggaguaugugaaugccaggcacuguuugccgugccacccugagugucagccccagaauggcucagugaccuguuuuggaccggaggcugaccaguguguggccugugcccacuauaaggacccucccuucugcguggcccgcugccccagcggugugaaaccugaccucuccuacaugcccaucuggaaguuuccagaugaggagggcgcaugccagccuugccccaucaacugcacccacuccuguguggaccuggaugacaagggcugccccgccgagcagagagccagcccucugacguccaucaucucugcggugguuggcauucugcuggucguggucuuggggguggucuuugggauccucaucaagcgacggcagcagaagauccggaaguacacgaugcggagacugcugcaggaaacggagcugguggagccgcugacaccuagcggagcgaugcccaaccaggcgcagaugcggauccugaaagagacggagcugaggaaggugaaggugcuuggaucuggcgcuuuuggcacagucuacaagggcaucuggaucccugauggggagaaugugaaaauuccaguggccaucaaaguguugagggaaaacacaucccccaaagccaacaaagaaaucuuagacgaagcauacgugauggcuggugugggcuccccauaugucucccgccuucugggcaucugccugacauccacggugcagcuggugacacagcuuaugcccuauggcugccucuuagaccauguccgggaaaaccgcggacgccugggcucccaggaccugcugaacugguguaugcagauugccaaggggaugagcuaccuggaggaugugcggcucguacacagggacuuggccgcucggaacgugcuggucaagagucccaaccaugucaaaauuacagacuucgggcuggcucggcugcuggacauugacgagacagaguaccaugcagaugggggcaaggugcccaucaaguggauggcgcuggaguccauucuccgccggcgguucacccaccagagugauguguggaguuauggugugacugugugggagcugaugacuuuuggggccaaaccuuacgaugggaucccagcccgggagaucccugaccugcuggaaaagggggagcggcugccccagccccccaucugcaccauugaugucuacaugaucauggucaaauguuggaugauugacucugaaugucggccaagauuccgggaguuggugucugaauucucccgcauggccagggacccccagcgcuuuguggucauccagaaugaggacuugggcccagccagucccuuggacagcaccuucuaccgcucacugcuggaggacgaugacaugggggaccugguggaugcugaggaguaucugguaccccagcagggcuucuucuguccagacccugccccgggcgcugggggcaugguccaccacaggcaccgcagcucaucuaccaggaguggcgguggggaccugacacuagggcuggagcccucugaagaggaggcccccaggucuccacuggcacccuccgaaggggcuggcuccgauguauuugauggugaccugggaaugggggcagccaaggggcugcaaagccuccccacacaugaccccagcccucuacagcgguacagugaggaccccacaguaccccugcccucugagacugauggcuacguugccccccugaccugcagcccccagccugaauaugugaaccagccagauguucggccccagcccccuucgccccgagagggcccucugccugcugcccgaccugcuggugccacucuggaaaggcccaagacucucuccccagggaagaauggggucgucaaagacguuuuugccuuugggggugccguggagaaccccgaguacuugacaccccagggaggagcugccccucagccccacccuccuccugccuucagcccagccuucgacaaccucuauuacugggaccaggacccaccagagcggggggcuccacccagcaccuucaaagggacaccuacggcagagaacccagaguaccugggucuggacgugccaguguga

SEQ ID NO: 1870 - RNA, 2940 nt, Artificial Sequence
  derived and/or modified sequence opt1 from Her2/neu__Homo_sapiens__BAG62073
auggagcuggccgcccucugccgcuggggccugcugcucgcgcugcugcccccgggggccgccagcacccaggacaacuaccucuccaccgacgugggcagcugcacgcuggucugcccccugcacaaccaggaggugaccgccgaggacgggacccagcggugcgagaagugcuccaagcccugcgcccgcgugugcuacggccucgggauggagcaccuccgggagguccgcgcggugaccagcgccaacauccaggaguucgccggcugcaagaagaucuucggcucccuggccuuccugcccgagagcuucgacggggacccggcguccaacacggcgccccugcagcccgagcagcuccagguguucgagacccuggaggagaucaccggcuaccuguacaucagcgccuggcccgacucccugccggaccucagcgucuuccagaaccuccaggugauccgggggcgcauccugcacaacggcgccuacucccugacccugcaggggcugggcaucagcuggcucggccugcggucccugcgcgagcucgggagcggccuggcccugauccaccacaacacgcaccucugcuucgugcacaccguccccugggaccagcuguuccggaacccccaccaggcccugcuccacaccgccaaccgccccgaggacgagugcgugggggagggccuggccugccaccagcugugcgcccggggccacugcugggggccgggccccacccagugcgugaacugcucccaguuccuccgcgggcaggagugcgucgaggagugccgggugcugcagggccugccccgcgaguacgugaacgcccggcacugccuccccugccacccggagugccagccccagaacgggagcgucacgugcuucggccccgaggcggaccagugcguggccugcgcccacuacaaggacccgcccuucugcguggcccgcugccccuccggcgucaagcccgaccugagcuacaugcccaucuggaaguuccccgacgaggagggggccugccagcccugccccaucaacugcacccacuccugcguggaccuggacgacaagggcugccccgcggagcagcgggccagcccgcucaccagcaucaucuccgccguggucgggauccugcugguggugguccucggcguggucuucgggauccugaucaagcgccggcagcagaagauccgcaaguacaccaugcggcgccugcuccaggagacggagcugguggagccccugacccccagcggcgccaugccgaaccaggcccagaugcgcauccugaaggagaccgagcuccggaaggugaagguccugggcuccggggcguucggcaccguguacaaggggaucuggauccccgacggcgagaacgugaagauccccgucgccaucaaggugcugcgcgagaacacgagccccaaggccaacaaggagauccucgacgaggccuacgugauggcgggggucggcuccccguacgugagccggcugcugggcaucugccucaccuccaccgugcagcuggucacccagcugaugcccuacgggugccuccuggaccacgugcgcgagaaccggggccgccuggggagccaggaccuccugaacuggugcaugcagaucgccaagggcauguccuaccuggaggacgugcggcucguccaccgcgaccuggccgcccggaacgugcuggucaagagccccaaccacgugaagaucacggacuucggccucgcccgccugcuggacaucgacgagaccgaguaccacgcggacgggggcaaggugcccaucaaguggauggcccucgaguccauccugcggcgccgguucacccaccagagcgacgugugguccuacggggucaccgugugggagcugaugacguucggcgccaagccguacgacgggauccccgcccgcgagauccccgaccuccuggagaagggcgagcggcugccccagccgcccaucugcaccaucgacguguacaugaucauggucaagugcuggaugaucgacagcgagugccgcccccgguuccgcgagcucguguccgaguucagccggauggcccgcgacccccagcgcuucguggucauccagaacgaggaccugggcccggcgagcccccuggacuccaccuucuaccggucccuccuggaggacgacgacaugggggaccugguggacgccgaggaguaccucgugccccagcagggcuucuucugccccgacccggcccccggggccggcgggaugguccaccaccgccaccggagcagcuccacccgcagcggcggcggggaccugacgcugggccucgagcccuccgaggaggaggcgccccggagcccgcuggcccccuccgagggggccggcagcgacguguucgacggggaccugggcaugggcgccgccaaggggcuccagucccugcccacccacgacccgagcccccugcagcgcuacuccgaggaccccaccgugccccucccgagcgagaccgacggcuacgucgcgccccugacgugcuccccgcagcccgaguacgugaaccagcccgacgugcggccccagccgcccagcccccgcgaggggccccugcccgccgcccggcccgccggcgccacccucgagcgcccgaagacccugucccccgggaagaacggcgucgugaaggacguguucgcguucggcggggccgucgagaaccccgaguaccugacgccccagggcggggccgccccgcagccccacccgccgcccgccuucagccccgcguucgacaaccucuacuacugggaccaggacccgcccgagcggggcgccccgcccuccaccuucaagggcacccccaccgccgagaaccccgaguaccuggggcuggacgugcccguguga

SEQ ID NO: 1871 - RNA, 2940 nt, Artificial Sequence
  derived and/or modified sequence opt2 from Her2/neu__Homo_sapiens__BAG62073
auggagcucgccgcccucugccgcuggggccuccuccucgcccuccucccccccggcgccgccuccacccaggacaacuaccucuccaccgacgucggcuccugcacccucgucugcccccuccacaaccaggaggucaccgccgaggacggcacccagcgcugcgagaagugcuccaagcccugcgcccgcgucugcuacggccucggcauggagcaccuccgcgagguccgcgccgucaccuccgccaacauccaggaguucgccggcugcaagaagaucuucggcucccucgccuuccuccccgaguccuucgacggcgaccccgccuccaacaccgccccccuccagcccgagcagcuccaggucuucgagacccucgaggagaucaccggcuaccucuacaucuccgccuggcccgacucccuccccgaccucuccgucuuccagaaccuccaggucauccgcggccgcauccuccacaacggcgccuacucccucacccuccagggccucggcaucuccuggcucggccuccgcucccuccgcgagcucggcuccggccucgcccucauccaccacaacacccaccucugcuucguccacaccguccccugggaccagcucuuccgcaacccccaccaggcccuccuccacaccgccaaccgccccgaggacgagugcgucggcgagggccucgccugccaccagcucugcgcccgcggccacugcuggggccccggccccacccagugcgucaacugcucccaguuccuccgcggccaggagugcgucgaggagugccgcguccuccagggccucccccgcgaguacgucaacgcccgccacugccuccccugccaccccgagugccagccccagaacggcuccgucaccugcuucggccccgaggccgaccagugcgucgccugcgcccacuacaaggacccccccuucugcgucgcccgcugccccuccggcgucaagcccgaccucuccuacaugcccaucuggaaguuccccgacgaggagggcgccugccagcccugccccaucaacugcacccacuccugcgucgaccucgacgacaagggcugccccgccgagcagcgcgccuccccccucaccuccaucaucuccgccgucgucggcauccuccucgucgucguccucggcgucgucuucggcauccucaucaagcgccgccagcagaagauccgcaaguacaccaugcgccgccuccuccaggagaccgagcucgucgagccccucacccccuccggcgccaugcccaaccaggcccagaugcgcauccucaaggagaccgagcuccgcaaggucaagguccucggcuccggcgccuucggcaccgucuacaagggcaucuggauccccgacggcgagaacgucaagauccccgucgccaucaagguccuccgcgagaacaccucccccaaggccaacaaggagauccucgacgaggccuacgucauggccggcgucggcucccccuacgucucccgccuccucggcaucugccucaccuccaccguccagcucgucacccagcucaugcccuacggcugccuccucgaccacguccgcgagaaccgcggccgccucggcucccaggaccuccucaacuggugcaugcagaucgccaagggcauguccuaccucgaggacguccgccucguccaccgcgaccucgccgcccgcaacguccucgucaagucccccaaccacgucaagaucaccgacuucggccucgcccgccuccucgacaucgacgagaccgaguaccacgccgacggcggcaagguccccaucaaguggauggcccucgaguccauccuccgccgccgcuucacccaccaguccgacgucugguccuacggcgucaccgucugggagcucaugaccuucggcgccaagcccuacgacggcauccccgcccgcgagauccccgaccuccucgagaagggcgagcgccucccccagccccccaucugcaccaucgacgucuacaugaucauggucaagugcuggaugaucgacuccgagugccgcccccgcuuccgcgagcucgucuccgaguucucccgcauggcccgcgacccccagcgcuucgucgucauccagaacgaggaccucggccccgccuccccccucgacuccaccuucuaccgcucccuccucgaggacgacgacaugggcgaccucgucgacgccgaggaguaccucgucccccagcagggcuucuucugccccgaccccgcccccggcgccggcggcaugguccaccaccgccaccgcuccuccuccacccgcuccggcggcggcgaccucacccucggccucgagcccuccgaggaggaggccccccgcuccccccucgcccccuccgagggcgccggcuccgacgucuucgacggcgaccucggcaugggcgccgccaagggccuccagucccuccccacccacgaccccuccccccuccagcgcuacuccgaggaccccaccgucccccuccccuccgagaccgacggcuacgucgccccccucaccugcuccccccagcccgaguacgucaaccagcccgacguccgcccccagccccccuccccccgcgagggcccccuccccgccgcccgccccgccggcgccacccucgagcgccccaagacccucucccccggcaagaacggcgucgucaaggacgucuucgccuucggcggcgccgucgagaaccccgaguaccucaccccccagggcggcgccgccccccagccccaccccccccccgccuucucccccgccuucgacaaccucuacuacugggaccaggacccccccgagcgcggcgccccccccuccaccuucaagggcacccccaccgccgagaaccccgaguaccucggccucgacguccccgucuga

SEQ ID NO: 1872 - RNA, 2940 nt, Artificial Sequence
  derived and/or modified sequence opt3 from Her2/neu__Homo_sapiens__BAG62073
auggagcuggccgcucucugcagauggggccuucuguuggcauuacugcccccuggggccgcgagcacccaggacaacuaccuauccacagaugugggaucuuguacucucgucugcccacugcacaaucaagaaguuacggcugaggacgguacccagaggugugaaaagugcucaaaaccgugugcccgggugugcuauggccuugggauggagcaucugcgcgaaguacgagcagugacaagugccaacauccaggaguucgcuggauguaagaaaauuuuuggcagcuuggcauuccuccccgaguccuuugauggugacccugccucuaauacugcuccacugcagcccgaacaacugcaggucuucgagacccucgaagagauaacaggguacuuauauaucucggccuggccugauucacugccagaccuuagcguguuucagaacuugcagguuauucguggaagaauccugcacaauggcgcguacagucuaacccuccaaggccuggggauuuccuggcuuggacugaggucuuugcgggagcucgguagcggccuggcauuaauccaucacaacacucaucugugcuucgugcacacaguccccugggaucagcucuuucgcaauccucaccaggcccuucugcauaccgcuaacagaccagaagacgagugugugggggaaggauuggccugccaccagcuaugugcaaggggccauugcugggguccggggcccacgcaaugcguaaauuguucccaguuccugcggggacaggagugcguugaagagugucgcgugcuccaaggccugccucgagaguaugucaacgcuagacacugccuuccaugucaccccgaaugccagccucagaauggcucagugacuuguuuugggccagaggccgaucagugcguggcgugugcccauuacaaggaucccccguucugcgucgcaagguguccuaguggaguuaaacccgaccugagcuauaugccaauauggaaguuuccugacgaagagggugcuugccaacccugcccaaucaacuguacccacucuugcguggauuuggacgacaagggcugucccgccgaacagcgggcuuccccucucacaucaauuaucagcgccguaguggggauucuguuagucgugguucugggaguggucuucggcauccuaauaaaacgucgccagcagaagauuagaaaauacacuaugaggcggcuccugcaagagaccgagcuuguggaaccauugacaccgaguggugcaaugcccaaucaggcccagaugcgaauccugaaggagaccgaacuccgcaaaguaaagguucuggggucuggcgcuuuuggaacgguguacaagggcauuuggaucccugauggggagaacgucaaaaucccaguggcgauuaagguccuuagagaaaauacuucccccaaagcaaacaaggagauacuggacgaggccuaugugauggcuggaguugguagcccuuacgugucgagguugcucggcaucugccugacaucuaccguacaguuagucacucaacugaugccauaugggugucuacucgaucaugugcgggaaaaccgcggaagacugggcucccaggaccuuuugaauuggugcaugcagauugccaaagguaugucauaccuggaggauguuaggcucgugcaccgugaccuggcagcccggaacgucuuagugaagagucccaaucauguaaaaaucacagauuucgggcuggcucgacuuuuggacauagaugaaaccgaguaucacgccgacggcggaaaggugccgauuaaguggauggcacucgagagcauccugagaaggcgcuucacgcaccaguccgauguuuggucuuacggcgucaccgugugggaacuaaugacauuuggggcgaaaccuuaugacggaaucccagcucgggagauucccgaccugcucgaaaagggugagagacugccucaacccccaaucuguacuauugauguguacaugauaauggucaaaugcuggaugaucgacagcgaauguaggccucgcuuccgagagcuuguuucagaguuuagucggauggcccgugauccccagagauucguggugauucagaacgaagacuugggcccagcauccccgcuggauagcaccuuuuacaggucuuuacucgaggacgaugacaugggggaucugguagacgccgaagaguaucuugucccucaacagggauucuuuugccccgauccagcucccggcgccggugggauggugcaucaccgccaucggucaaguagcacaagauccggcggaggcgaccugacuuuggggcucgaaccuucugaggaggaagcaccaaggucgccccuggcuccuagcgagggagccggcuccgauguuuucgacggugaccuagggaugggagcggccaagggccugcagucacucccgacccacgauccaaguccccugcagcgauacucugaagacccuacagugccacuucccagcgagaccgaugguuaugucgcuccuuugacuuguuccccgcaacccgaauacgugaaucagccagacguucgcccucagcccccaucaccucgggagggcccccugccagcagccagaccggcuggggccacguuagagaggccuaaaacacucagccccggaaagaacggcgugguaaaggaugucuuugcauucgggggagcgguggaaaauccagaguaucugacuccccagggcggugccgcuccucaaccacacccucccccggccuuuucuccagcauucgacaaccuuuacuauugggaucaggaucccccugaacguggggcucccccauccaccuuuaaaggaaccccuacagccgagaaucccgaguaccugggccuagacgugccagucuga

SEQ ID NO: 1873 - RNA, 2940 nt, Artificial Sequence
  derived and/or modified sequence opt4 from Her2/neu__Homo_sapiens__BAG62073
auggagcuggccgcccugugcagauggggccugcugcuggcccugcugccccccggcgccgccagcacccaggacaacuaccugagcaccgacgugggcagcugcacccuggugugcccccugcacaaccaggaggugaccgccgaggacggcacccagagaugcgagaagugcagcaagcccugcgccagagugugcuacggccugggcauggagcaccugagagaggugagagccgugaccagcgccaacauccaggaguucgccggcugcaagaagaucuucggcagccuggccuuccugcccgagagcuucgacggcgaccccgccagcaacaccgccccccugcagcccgagcagcugcagguguucgagacccuggaggagaucaccggcuaccuguacaucagcgccuggcccgacagccugcccgaccugagcguguuccagaaccugcaggugaucagaggcagaauccugcacaacggcgccuacagccugacccugcagggccugggcaucagcuggcugggccugagaagccugagagagcugggcagcggccuggcccugauccaccacaacacccaccugugcuucgugcacaccgugcccugggaccagcuguucagaaacccccaccaggcccugcugcacaccgccaacagacccgaggacgagugcgugggcgagggccuggccugccaccagcugugcgccagaggccacugcuggggccccggccccacccagugcgugaacugcagccaguuccugagaggccaggagugcguggaggagugcagagugcugcagggccugcccagagaguacgugaacgccagacacugccugcccugccaccccgagugccagccccagaacggcagcgugaccugcuucggccccgaggccgaccagugcguggccugcgcccacuacaaggacccccccuucugcguggccagaugccccagcggcgugaagcccgaccugagcuacaugcccaucuggaaguuccccgacgaggagggcgccugccagcccugccccaucaacugcacccacagcugcguggaccuggacgacaagggcugccccgccgagcagagagccagcccccugaccagcaucaucagcgccguggugggcauccugcuggugguggugcugggcgugguguucggcauccugaucaagagaagacagcagaagaucagaaaguacaccaugagaagacugcugcaggagaccgagcugguggagccccugacccccagcggcgccaugcccaaccaggcccagaugagaauccugaaggagaccgagcugagaaaggugaaggugcugggcagcggcgccuucggcaccguguacaagggcaucuggauccccgacggcgagaacgugaagauccccguggccaucaaggugcugagagagaacaccagccccaaggccaacaaggagauccuggacgaggccuacgugauggccggcgugggcagccccuacgugagcagacugcugggcaucugccugaccagcaccgugcagcuggugacccagcugaugcccuacggcugccugcuggaccacgugagagagaacagaggcagacugggcagccaggaccugcugaacuggugcaugcagaucgccaagggcaugagcuaccuggaggacgugagacuggugcacagagaccuggccgccagaaacgugcuggugaagagccccaaccacgugaagaucaccgacuucggccuggccagacugcuggacaucgacgagaccgaguaccacgccgacggcggcaaggugcccaucaaguggauggcccuggagagcauccugagaagaagauucacccaccagagcgacguguggagcuacggcgugaccgugugggagcugaugaccuucggcgccaagcccuacgacggcauccccgccagagagauccccgaccugcuggagaagggcgagagacugccccagccccccaucugcaccaucgacguguacaugaucauggugaagugcuggaugaucgacagcgagugcagacccagauucagagagcuggugagcgaguucagcagaauggccagagacccccagagauucguggugauccagaacgaggaccugggccccgccagcccccuggacagcaccuucuacagaagccugcuggaggacgacgacaugggcgaccugguggacgccgaggaguaccuggugccccagcagggcuucuucugccccgaccccgcccccggcgccggcggcauggugcaccacagacacagaagcagcagcaccagaagcggcggcggcgaccugacccugggccuggagcccagcgaggaggaggcccccagaagcccccuggcccccagcgagggcgccggcagcgacguguucgacggcgaccugggcaugggcgccgccaagggccugcagagccugcccacccacgaccccagcccccugcagagauacagcgaggaccccaccgugccccugcccagcgagaccgacggcuacguggccccccugaccugcagcccccagcccgaguacgugaaccagcccgacgugagaccccagccccccagccccagagagggcccccugcccgccgccagacccgccggcgccacccuggagagacccaagacccugagccccggcaagaacggcguggugaaggacguguucgccuucggcggcgccguggagaaccccgaguaccugaccccccagggcggcgccgccccccagccccaccccccccccgccuucagccccgccuucgacaaccuguacuacugggaccaggacccccccgagagaggcgccccccccagcaccuucaagggcacccccaccgccgagaaccccgaguaccugggccuggacgugcccguguga

SEQ ID NO: 1874 - RNA, 2940 nt, Artificial Sequence
  derived and/or modified sequence opt5 from Her2/neu__Homo_sapiens__BAG62073
auggagcuggccgcucucugcagauggggccugcuucuggcccuccugcccccuggggcggcuagcacccaggacaacuaccuuuccacagaugugggaucuuguacgcuggucugcccgcuccacaaucaagaaguuaccgccgaggacggcacacagcggugugaaaagugcagcaaacccugugcccgcgugugcuaugggcugggaauggagcaccugagagaagugcgggcugucaccuccgccaacauccaggaguucgcuggcuguaagaaaauuuuugggucucucgccuuccugccugagagcuuugauggagaccccgcguccaauacagccccucuucagcccgaacaacuccagguguucgagacccuggaagagaucacaggcuaccuguauauuucugcuuggccugauagccuuccggaccuguccguuuuucagaaccuccaggugauccgcggccggauucugcacaauggggccuacagccugacccuccaaggacugggcaucucuuggcuugggcugcggucccuccgcgagcugggaagcggccuugcucugauccaucacaacacgcaucucugcuucguccacaccgugcccugggaucagcuguuuagaaauccucaccaggcccugcuccauacagcgaaccggcccgaagacgaguguguuggggaaggacuggccugccaccagcuuugugcucgcggccauugcuggggcccugggcccacccaaugcgugaauuguucucaguuccugagaggacaggagugcgucgaagagugucgggugcuccaaggccugccgcgcgaguaugugaacgccagacacugccuuccuugucaccccgaaugccagccucagaauggguccgucacauguuuuggacccgaggcugaucagugcguugccugugcccauuacaaggaucccccuuucugcguggcucgguguccgagcggcgugaaacccgaccugucuuauaugccuauuuggaaguuucccgacgaagagggggcgugccaaccuugccccaucaacuguacccacuccugcgucgaucucgacgacaagggauguccggccgaacagcgcgcuagcccucugacguccauuaucucugccgugguuggcauucugcucguggucgugcugggcguuguguucgggauccuuauuaaaagacggcagcagaagaucagaaaauacacaaugcgccggcugcuccaagagaccgagcuggucgaaccccugacaccuagcggagccaugcccaaucaggcucagaugagaauccuuaaggagaccgaacuccgcaaagugaagguccugggcuccggggccuuuggaaccguguacaagggcauuuggaucccugauggggagaacguuaaaauucccguggcgaucaagguccugcgggaaaauacaagcccgaaagcuaacaaggagauucucgacgaggccuaugugauggccggcguuggaucuccuuacguguccagacugcuuggcaucugccugacgagcaccguccagcucgugacacaacugaugcccuaugggugucugcuugaucaugugcgcgaaaaccggggaagacucggcucucaggaccugcugaauuggugcaugcagaucgcuaaagggaugagcuaccucgaggauguucgccugguccaccgggaccuugccgcuagaaacgugcuggugaagucccccaaucaugucaaaauuaccgauuucggacucgcccgccugcuggacaucgaugaaacagaguaucacgcggacggcgggaaggugccuauuaaguggauggcccuugagucuauccuccggagacgguucacccaccagagcgauguuugguccuacggcgugacggucugggaacugaugacauuuggagcuaaaccguaugacggcauucccgcccgcgagaucccugaccugcucgaaaagggggagagacugccccaaccucccaucuguaccauugauguguacaugaucaugguuaaaugcuggaugauugacagcgaaugucggccuagauuccgcgagcuugugucugaguuuucccggauggcuagagauccccagcgcuucgucgugauccagaacgaagaccugggaccggccagcccucucgauucuaccuuuuacagaucccugcuggaggacgaugacaugggcgaucuuguugacgcggaagaguaucucgugccccaacagggguucuuuugcccugaucccgccccgggagcuggcgggaugguccaucaccggcaucgcagcuccucuacaagaagcggcggaggcgaccugacccuggggcucgaaccuuccgaggaggaagcccccagaucuccucuggcucccagcgagggagccggcuccgauguguucgacggggaccuuggaaugggcgccgcuaaggggcugcagagccuccccacacacgauccuucuccgcugcagcgcuacuccgaagaccccacggugccucugcccagcgagaccgauggcuaugucgcgccucuuacauguucuccccaaccugaauacguuaaucagccggacgugagaccccagccucccuccccucgggagggaccccugccggccgcucgcccugccggcgccacccucgagagacccaaaacacugagccccgggaagaacggaguggucaaggauguguuugcuuucggcggggccguugaaaauccugaguaucucacgccccagggaggcgcggcuccucaaccgcaucccccucccgccuuuucuccugccuucgacaaccuguacuauugggaucaggaucccccggaacggggcgcuccucccagcaccuuuaaagggaccccuacagccgagaaucccgaguaccuuggacuggacgugccugucuga

SEQ ID NO: 1875 - protein, 87 aa, Artificial Sequence
  Her2/neu__Homo_sapiens__L8E8G2
MMRMKTFVMIHFHLMNGGKAKLYSRPHAKLLPEQRVTDKTGAPVEWPGQTQCSTETQTLAAMPAQAVMRVTCTVVDMHKSECAPAQT

SEQ ID NO: 1876 - RNA, 264 nt, Artificial Sequence
  Her2/neu__Homo_sapiens__CCQ43016
augaugaggaugaaaaccuuugugaugauccacuuccacuuaaugaaugguggcaaagcaaagcuauauucaagaccacaugcaaagcuacucccugagcaaagagucacagauaaaacgggggcaccaguagaauggccaggacaaacgcagugcagcacagagacucagacccuggcagccaugccugcgcaggcagugaugagagugacauguacuguuguggacaugcacaaaagugagugugcaccggcacagacauga

SEQ ID NO: 1877 - RNA, 264 nt, Artificial Sequence
  derived and/or modified sequence opt1 from Her2/neu__Homo_sapiens__CCQ43016
augaugcgcaugaagaccuucgugaugauccacuuccaccugaugaacggcgggaaggccaagcucuacagccggccccacgccaagcugcugccggagcagcgcgucaccgacaagacgggcgcgcccguggaguggcccgggcagacccagugcuccaccgagacccagacgcucgccgccaugcccgcccaggccgugaugcgggugaccugcaccgucguggacaugcacaagagcgagugcgcgccggcccagaccuga

SEQ ID NO: 1878 - RNA, 264 nt, Artificial Sequence
  derived and/or modified sequence opt2 from Her2/neu__Homo_sapiens__CCQ43016
augaugcgcaugaagaccuucgucaugauccacuuccaccucaugaacggcggcaaggccaagcucuacucccgcccccacgccaagcuccuccccgagcagcgcgucaccgacaagaccggcgcccccgucgaguggcccggccagacccagugcuccaccgagacccagacccucgccgccaugcccgcccaggccgucaugcgcgucaccugcaccgucgucgacaugcacaaguccgagugcgcccccgcccagaccuga

SEQ ID NO: 1879 - RNA, 264 nt, Artificial Sequence
  derived and/or modified sequence opt3 from Her2/neu__Homo_sapiens__CCQ43016
augaugagaaugaagaccuucgugaugauccacuuucaucugaugaacggcgggaaagccaagcucuacagcaggccccacgcuaaacuucugccugagcagcgggucacagacaagacuggagcaccaguugaauggccgggucaaacgcagugcuccaccgagacacagacuuuggccgcgaugcccgcucaggccgugaugcgcguaaccuguacaguggucgauaugcauaaaucugaaugcgccccugcacaaaccuga

SEQ ID NO: 1880 - RNA, 264 nt, Artificial Sequence
  derived and/or modified sequence opt4 from Her2/neu__Homo_sapiens__CCQ43016
augaugagaaugaagaccuucgugaugauccacuuccaccugaugaacggcggcaaggccaagcuguacagcagaccccacgccaagcugcugcccgagcagagagugaccgacaagaccggcgcccccguggaguggcccggccagacccagugcagcaccgagacccagacccuggccgccaugcccgcccaggccgugaugagagugaccugcaccgugguggacaugcacaagagcgagugcgcccccgcccagaccuga

SEQ ID NO: 1881 - RNA, 264 nt, Artificial Sequence
  derived and/or modified sequence opt5 from Her2/neu__Homo_sapiens__CCQ43016
augaugagaaugaagaccuucgugaugauccacuuucaucugaugaacggcgggaaagccaagcucuacagccggccccacgcuaaacugcuuccugagcagcgcgucacagacaagacgggagccccgguugaauggcccggccaaacccagugcuccacagagacccagacacuggcggcuaugccugcccaggccgugaugagagugaccuguacagucguggauaugcauaaaucugaaugcgcucccgcccaaaccuga

SEQ ID NO: 1882 - protein, 1255 aa, Artificial Sequence [sequence omitted]

SEQ ID NO: 1883 - RNA, 3768 nt, Artificial Sequence
  Her2/neu__Homo_sapiens__AAI67147
auggagcuggcggccuugugccgcugggggcuccuccucgcccucuugccccccggagccgcgagcacccaagugugcaccggcacagacaugaagcugcggcucccugccagucccgagacccaccuggacaugcuccgccaccucuaccagggcugccagguggugcagggaaaccuggaacucaccuaccugcccaccaaugccagccuguccuuccugcaggauauccaggaggugcagggcuacgugcucaucgcucacaaccaagugaggcaggucccacugcagaggcugcggauugugcgaggcacccagcucuuugaggacaacuaugcccuggccgugcuagacaauggagacccgcugaacaauaccaccccugucacaggggccuccccaggaggccugcgggagcugcagcuucgaagccucacagagaucuugaaaggaggggucuugauccagcggaacccccagcucugcuaccaggacacgauuuuguggaaggacaucuuccacaagaacaaccagcuggcucucacacugauagacaccaaccgcucucgggccugccaccccuguucuccgauguguaagggcucccgcugcuggggagagaguucugaggauugucagagccugacgcgcacugucugugccgguggcugugcccgcugcaaggggccacugcccacugacugcugccaugagcagugugcugccggcugcacgggccccaagcacucugacugccuggccugccuccacuucaaccacaguggcaucugugagcugcacugcccagcccuggucaccuacaacacagacacguuugaguccaugcccaaucccgagggccgguauacauucggcgccagcugugugacugccugucccuacaacuaccuuucuacggacgugggauccugcacccucgucugcccccugcacaaccaagaggugacagcagaggauggaacacagcggugugagaagugcagcaagcccugugcccgagugugcuauggucugggcauggagcacuugcgagaggugagggcaguuaccagugccaauauccaggaguuugcuggcugcaagaagaucuuugggagccuggcauuucugccggagagcuuugauggggacccagccuccaacacugccccgcuccagccagagcagcuccaaguguuugagacucuggaagagaucacagguuaccuauacaucucagcauggccggacagccugccugaccucagcgucuuccagaaccugcaaguaauccggggacgaauucugcacaauggcgccuacucgcugacccugcaagggcugggcaucagcuggcuggggcugcgcucacugagggaacugggcaguggacuggcccucauccaccauaacacccaccucugcuucgugcacacggugcccugggaccagcucuuucggaacccgcaccaagcucugcuccacacugccaaccggccagaggacgagugugugggcgagggccuggccugccaccagcugugcgcccgagggcacugcugggguccagggcccacccagugugucaacugcagccaguuccuucggggccaggagugcguggaggaaugccgaguacugcaggggcuccccagggaguaugugaaugccaggcacuguuugccgugccacccugagugucagccccagaauggcucagugaccuguuuuggaccggaggcugaccaguguguggccugugcccacuauaaggacccucccuucugcguggcccgcugccccagcggugugaaaccugaccucuccuacaugcccaucuggaaguuuccagaugaggagggcgcaugccagccuugccccaucaacugcacccacuccuguguggaccuggaugacaagggcugccccgccgagcagagagccagcccucugacguccaucaucucugcggugguuggcauucugcuggucguggucuuggggguggucuuugggauccucaucaagcgacggcagcagaagauccggaaguacacgaugcggagacugcugcaggaaacggagcugguggagccgcugacaccuagcggagcgaugcccaaccaggcgcagaugcggauccugaaagagacggagcugaggaaggugaaggugcuuggaucuggcgcuuuuggcacagucuacaagggcaucuggaucccugauggggagaaugugaaaauuccaguggccaucaaaguguugagggaaaacacaucccccaaagccaacaaagaaaucuuagacgaagcauacgugauggcuggugugggcuccccauaugucucccgccuucugggcaucugccugacauccacggugcagcuggugacacagcuuaugcccuauggcugccucuuagaccauguccgggaaaaccgcggacgccugggcucccaggaccugcugaacugguguaugcagauugccaaggggaugagcuaccuggaggaugugcggcucguacacagggacuuggccgcucggaacgugcuggucaagagucccaaccaugucaaaauuacagacuucgggcuggcucggcugcuggacauugacgagacagaguaccaugcagaugggggcaaggugcccaucaaguggauggcgcuggaguccauucuccgccggcgguucacccaccagagugauguguggaguuauggugugacugugugggagcugaugacuuuuggggccaaaccuuacgaugggaucccagcccgggagaucccugaccugcuggaaaagggggagcggcugccccagccccccaucugcaccauugaugucuacaugaucauggucaaauguuggaugauugacucugaaugucggccaagauuccgggaguuggugucugaauucucccgcauggccagggacccccagcgcuuuguggucauccagaaugaggacuugggcccagccagucccuuggacagcaccuucuaccgcucacugcuggaggacgaugacaugggggaccugguggaugcugaggaguaucugguaccccagcagggcuucuucuguccagacccugccccgggcgcugggggcaugguccaccacaggcaccgcagcucaucuaccaggaguggcgguggggaccugacacuagggcuggagcccucugaagaggaggcccccaggucuccacuggcacccuccgaaggggcuggcuccgauguauuugauggugaccugggaaugggggcagccaaggggcugcaaagccuccccacacaugaccccagcccucuacagcgguacagugaggaccccacaguaccccugcccucugagacugauggcuacguugccccccugaccugcagcccccagccugaauaugugaaccagccagauguucggccccagcccccuucgccccgagagggcccucugccugcugcccgaccugcuggugccacucuggaaaggcccaagacucucuccccagggaagaauggggucgucaaagacguuuuugccuuugggggugccguggagaaccccgaguacuugacaccccagggaggagcugccccucagccccacccuccuccugccuucagcccagccuucgacaaccucuauuacugggaccaggacccaccagagcggggggcuccacccagcaccuucaaagggacaccuacggcagagaacccagaguaccugggucuggacgugccaguguga

SEQ ID NO: 1884 - RNA, 3768 nt, Artificial Sequence
  derived and/or modified sequence opt1 from Her2/neu__Homo_sapiens__AAI67147
auggagcuggccgcccucugccgcuggggccugcugcucgcgcugcugcccccgggggccgccagcacccaggugugcaccggcacggacaugaagcuccggcugcccgccucccccgagacccaccuggacaugcuccgccaccuguaccaggggugccaggucgugcagggcaaccuggagcucaccuaccugcccaccaacgccagccuguccuuccuccaggacauccaggaggugcagggguacguccugaucgcgcacaaccaggugcgccaggugccgcugcagcggcuccggaucguccgcggcacgcagcuguucgaggacaacuacgcccuggccgugcucgacaacggcgacccccugaacaacaccacccccgugaccggggccagccccggcgggcugcgggagcuccagcugcgcucccugacggagauccucaagggcgggguccugauccagcggaacccgcagcugugcuaccaggacaccauccucuggaaggacaucuuccacaagaacaaccagcuggcgcugacccucaucgacaccaaccgcagccgggccugccaccccugcucccccaugugcaagggcagccgcugcuggggcgaguccagcgaggacugccagucccugacgcggaccgugugcgccgggggcugcgcccgcugcaaggggccccugccgaccgacugcugccacgagcagugcgccgcgggcugcaccggccccaagcacagcgacugccucgccugccugcacuucaaccacuccgggaucugcgagcugcacugccccgcccucgugacguacaacaccgacaccuucgagagcaugcccaacccggagggccgguacaccuucggggccuccugcgucacggccugccccuacaacuaccugagcaccgacgugggcuccugcacccuggugugcccccuccacaaccaggaggucaccgcggaggacgggacgcagcgcugcgagaagugcagcaagcccugcgcccgggugugcuacggccugggcauggagcaccuccgcgaggugcgggccgucaccuccgccaacauccaggaguucgccgggugcaagaagaucuucggcagccuggcguuccugccggagagcuucgacggggaccccgccuccaacaccgcgccccugcagcccgagcagcuccagguguucgagacccuggaggagaucacgggcuaccuguacaucagcgccuggccggacucccugcccgaccucagcguguuccagaaccugcaggucauccgcgggcggauccugcacaacggcgccuacucccucacccugcagggccuggggaucagcuggcucggccugcgcucccugcgcgagcucgggagcggccuggcccugauccaccacaacacccaccucugcuucgugcacaccgugcccugggaccagcuguuccggaacccccaccaggcccugcuccacacggccaaccgccccgaggacgagugcgucggggagggccuggccugccaccagcugugcgcgcggggccacugcugggggcccggccccacccagugcgugaacugcucccaguuccuccgcgggcaggagugcgucgaggagugccgggugcugcagggccugccgcgcgaguacgugaacgcccggcacugccuccccugccaccccgagugccagccccagaacggcagcgugaccugcuucgggccggaggccgaccagugcguggccugcgcccacuacaaggacccgcccuucugcguggcgcgcugccccuccggcgucaagcccgaccugagcuacaugcccaucuggaaguuccccgacgaggagggggccugccagcccugcccgaucaacugcacccacuccugcguggaccuggacgacaagggcugccccgccgagcagcgggccagcccccucacguccaucaucagcgccguggucgggauccugcugguggugguccucggcgugguguucggcauccugaucaagcgccggcagcagaagauccgcaaguacaccaugcggcgccugcuccaggagaccgagcuggucgagccccugaccccguccggggcgaugcccaaccaggcccagaugcggauccucaaggagaccgagcugcgcaaggugaaggugcugggcagcggggccuucggcacggucuacaaggggaucuggauccccgacggcgagaacgugaagauccccguggccaucaagguccuccgggagaacaccuccccgaaggccaacaaggagauccuggacgaggcguacgugauggccggcguggggagccccuacgucagccgccugcucggcaucugccugaccuccaccgugcagcuggugacgcagcucaugcccuacgggugccugcuggaccacguccgggagaaccgcggccgccucgggagccaggaccugcugaacuggugcaugcagaucgccaagggcauguccuaccucgaggacgugcggcuggugcaccgcgaccuggccgcgcggaacguccucgucaagagccccaaccacgugaagaucaccgacuucggccuggcccgccugcucgacaucgacgagaccgaguaccacgccgacgggggcaaggucccgaucaaguggauggcccuggaguccauccugcggcgccgguucacccaccagagcgacgugugguccuacggggugacggucugggagcucaugaccuucggcgccaagcccuacgacgggauccccgcgcgcgagaucccggaccugcuggagaagggcgagcggcucccccagccgcccaucugcaccaucgacguguacaugaucauggugaagugcuggaugaucgacagcgagugccgcccccgguuccgcgagcuggucuccgaguucagccggauggcccgcgacccccagcgguucguggugauccagaacgaggaccugggccccgccagcccccucgacuccaccuucuaccgcucccugcuggaggacgacgacaugggggaccucgucgacgccgaggaguaccuggugccgcagcagggcuucuucugccccgaccccgcccccggggcgggcggcauggugcaccaccggcaccgcagcuccagcacgcgguccgggggcggggaccugacccucggccuggagccgagcgaggaggaggcgccccgcagcccccuggcccccuccgagggggccggcagcgacgucuucgacggcgaccucgggaugggcgccgccaaggggcugcagucccugccgacccacgaccccagcccccuccagcgguacuccgaggaccccaccgugccgcugcccagcgagacggacggcuacguggcgccccugaccugcuccccgcagcccgaguacgucaaccagcccgacgugcgcccccagcccccgagcccccgcgaggggccccucccggccgcccggcccgccggcgccacccuggagcgccccaagacccugucccccggcaagaacgggguggucaaggacguguucgccuucggcggggccgucgagaacccggaguaccucacgccccagggcggggccgcgccccagccccacccgccgcccgccuucagccccgccuucgacaaccuguacuacugggaccaggacccgcccgagcggggcgccccgcccuccaccuucaagggcacccccaccgccgagaaccccgaguaccuggggcucgacgugcccguguga

SEQ ID NO: 1885 - RNA, 3768 nt, Artificial Sequence
  derived and/or modified sequence opt2 from Her2/neu__Homo_sapiens__AAI67147
auggagcucgccgcccucugccgcuggggccuccuccucgcccuccucccccccggcgccgccuccacccaggucugcaccggcaccgacaugaagcuccgccuccccgccucccccgagacccaccucgacaugcuccgccaccucuaccagggcugccaggucguccagggcaaccucgagcucaccuaccuccccaccaacgccucccucuccuuccuccaggacauccaggagguccagggcuacguccucaucgcccacaaccagguccgccaggucccccuccagcgccuccgcaucguccgcggcacccagcucuucgaggacaacuacgcccucgccguccucgacaacggcgacccccucaacaacaccacccccgucaccggcgccucccccggcggccuccgcgagcuccagcuccgcucccucaccgagauccucaagggcggcguccucauccagcgcaacccccagcucugcuaccaggacaccauccucuggaaggacaucuuccacaagaacaaccagcucgcccucacccucaucgacaccaaccgcucccgcgccugccaccccugcucccccaugugcaagggcucccgcugcuggggcgaguccuccgaggacugccagucccucacccgcaccgucugcgccggcggcugcgcccgcugcaagggcccccuccccaccgacugcugccacgagcagugcgccgccggcugcaccggccccaagcacuccgacugccucgccugccuccacuucaaccacuccggcaucugcgagcuccacugccccgcccucgucaccuacaacaccgacaccuucgaguccaugcccaaccccgagggccgcuacaccuucggcgccuccugcgucaccgccugccccuacaacuaccucuccaccgacgucggcuccugcacccucgucugcccccuccacaaccaggaggucaccgccgaggacggcacccagcgcugcgagaagugcuccaagcccugcgcccgcgucugcuacggccucggcauggagcaccuccgcgagguccgcgccgucaccuccgccaacauccaggaguucgccggcugcaagaagaucuucggcucccucgccuuccuccccgaguccuucgacggcgaccccgccuccaacaccgccccccuccagcccgagcagcuccaggucuucgagacccucgaggagaucaccggcuaccucuacaucuccgccuggcccgacucccuccccgaccucuccgucuuccagaaccuccaggucauccgcggccgcauccuccacaacggcgccuacucccucacccuccagggccucggcaucuccuggcucggccuccgcucccuccgcgagcucggcuccggccucgcccucauccaccacaacacccaccucugcuucguccacaccguccccugggaccagcucuuccgcaacccccaccaggcccuccuccacaccgccaaccgccccgaggacgagugcgucggcgagggccucgccugccaccagcucugcgcccgcggccacugcuggggccccggccccacccagugcgucaacugcucccaguuccuccgcggccaggagugcgucgaggagugccgcguccuccagggccucccccgcgaguacgucaacgcccgccacugccuccccugccaccccgagugccagccccagaacggcuccgucaccugcuucggccccgaggccgaccagugcgucgccugcgcccacuacaaggacccccccuucugcgucgcccgcugccccuccggcgucaagcccgaccucuccuacaugcccaucuggaaguuccccgacgaggagggcgccugccagcccugccccaucaacugcacccacuccugcgucgaccucgacgacaagggcugccccgccgagcagcgcgccuccccccucaccuccaucaucuccgccgucgucggcauccuccucgucgucguccucggcgucgucuucggcauccucaucaagcgccgccagcagaagauccgcaaguacaccaugcgccgccuccuccaggagaccgagcucgucgagccccucacccccuccggcgccaugcccaaccaggcccagaugcgcauccucaaggagaccgagcuccgcaaggucaagguccucggcuccggcgccuucggcaccgucuacaagggcaucuggauccccgacggcgagaacgucaagauccccgucgccaucaagguccuccgcgagaacaccucccccaaggccaacaaggagauccucgacgaggccuacgucauggccggcgucggcucccccuacgucucccgccuccucggcaucugccucaccuccaccguccagcucgucacccagcucaugcccuacggcugccuccucgaccacguccgcgagaaccgcggccgccucggcucccaggaccuccucaacuggugcaugcagaucgccaagggcauguccuaccucgaggacguccgccucguccaccgcgaccucgccgcccgcaacguccucgucaagucccccaaccacgucaagaucaccgacuucggccucgcccgccuccucgacaucgacgagaccgaguaccacgccgacggcggcaagguccccaucaaguggauggcccucgaguccauccuccgccgccgcuucacccaccaguccgacgucugguccuacggcgucaccgucugggagcucaugaccuucggcgccaagcccuacgacggcauccccgcccgcgagauccccgaccuccucgagaagggcgagcgccucccccagccccccaucugcaccaucgacgucuacaugaucauggucaagugcuggaugaucgacuccgagugccgcccccgcuuccgcgagcucgucuccgaguucucccgcauggcccgcgacccccagcgcuucgucgucauccagaacgaggaccucggccccgccuccccccucgacuccaccuucuaccgcucccuccucgaggacgacgacaugggcgaccucgucgacgccgaggaguaccucgucccccagcagggcuucuucugccccgaccccgcccccggcgccggcggcaugguccaccaccgccaccgcuccuccuccacccgcuccggcggcggcgaccucacccucggccucgagcccuccgaggaggaggccccccgcuccccccucgcccccuccgagggcgccggcuccgacgucuucgacggcgaccucggcaugggcgccgccaagggccuccagucccuccccacccacgaccccuccccccuccagcgcuacuccgaggaccccaccgucccccuccccuccgagaccgacggcuacgucgccccccucaccugcuccccccagcccgaguacgucaaccagcccgacguccgcccccagccccccuccccccgcgagggcccccuccccgccgcccgccccgccggcgccacccucgagcgccccaagacccucucccccggcaagaacggcgucgucaaggacgucuucgccuucggcggcgccgucgagaaccccgaguaccucaccccccagggcggcgccgccccccagccccaccccccccccgccuucucccccgccuucgacaaccucuacuacugggaccaggacccccccgagcgcggcgccccccccuccaccuucaagggcacccccaccgccgagaaccccgaguaccucggccucgacguccccgucuga

SEQ ID NO: 1886 - RNA, 3768 nt, Artificial Sequence
  derived and/or modified sequence opt3 from Her2/neu__Homo_sapiens__AAI67147
auggagcuggccgcucucugcagauggggccuucuguuggcauuacugcccccuggggccgcgagcacccagguguguacaggaacugacaugaagcuaaggcucccagcuuccccggaaacgcaccuggauaugcuucggcaucuguaccaagguugccaggucguucagggcaacuuggagcucaccuaucugcccacaaaugccucucugucauuccuccaggacauccaagaagugcagggguacguauuaauugcacacaaccaggugcgccaggucccucugcaacgacuucguauagugagaggaacucaguuguuugaggauaauuaugcccuggcuguucuagacaacggcgauccacucaauaacaccacacccgugaccggugcaaguccugggggacugagggaacuucagcugcggagcuugacugagauccucaaaggcggcguccugauucagcgcaauccacaauuauguuaccaggacacaauccuguggaaggauauuuuccauaaaaacaaucagcucgcccuuacccugaucgacacgaacagauccagggcuugccaccccuguucuccuaugugcaaggggucgcgguguuggggagagucaagcgaagauugccaaaguuugacucgcaccgugugugccgguggcugcgcgcgauguaaagggccacuaccgacagacugcugccaugagcagugugcagccggaugcacuggccccaagcacuccgauugucuggcuugccuccacuuuaaucauucugguauaugugaacugcacugcccugcccuuguaaccuauaacacagacaccuucgagagcaugccaaaucccgaggggagauacacguuuggagcauccuguguuacugcuugcccuuauaacuaccugucaacagaugugggcaguuguaccuuggucugcccacuccauaaucaggaagugacugccgaggacggcacacagaggugugaaaagugcagcaaacccugcgcgcggguguguuacgggcugggaauggagcacuuacgugaaguccgcgccguuaccucugcaaacauccaagaguucgcugguugcaagaaaauuuuuggcucccuggccuuccuaccggagucauuugacggggauccugcuagcaacacggcaccccuccagccagaacagcuucagguguucgagacccuggaagagaucacaggauauuuguacauuagugccuggccugacucucugcccgaucucuccguauuucaaaaucuucaggugaucagaggcaggauacugcacaacggugccuauagccugacuuugcaggggcucggcauuucguggcugggauuacggucucugcgagaacuaggcuccgggcucgcucugauccaucacaauacccaucuuuguuucguccacacagugccaugggaccaguuguuucgcaacccccaucaagcgcugcuccacacugcaaauagaccugaggaugagugcguuggagaaggucuggccugucaccaguuaugcgcuaggggccauuguugggggccaggaccgacccagugcgugaacuguucacaguuccugcggggccaagagugcgucgaagagugucgcgugcuucaggguuugcccagagaauacguaaaugccaggcacugccucccuugccauccagagugucagccccaaaacgggaguguuacaugcuucggcccugaggcagaccaguguguggccugcgcucacuauaaggauccacccuuuugugucgcccguugcccgagcggagugaaaccugaccuguccuacaugccaauuuggaaguuccccgaugaagagggcgcaugucagccuugccccaucaauuguacccacucuugcgucgaccuagaugacaagggguguccagcggaacagcgggcuagcccucugacuucaaucauuagugccgugguuggaauacuccuggugguaguccuuggugugguuuuuggcaucuugauuaaacgaagacaacagaagaucaggaaauauacgaugcgccggcuguuacaggagacagagcucguggaaccccugaccccauccggggcaaugccgaaccaggcccaaaugagaauacuuaaggagacugaacugaggaaagucaagguguugggaagcggcgcuuucgguaccguauacaaagggauuuggaucccugacggcgagaaugugaagauccccguugccauuaagguccuccgcgaaaacacaucuccaaaagcaaauaaggagauccuggaugaggcuuacgugauggccggagugggcucacccuaugucagucgacuacuggggauuugccucaccagcacuguucagcuggugacacagcuuaugccuuacggaugcuugcuggaccaugugcgggaaaaccguggcagauuagguucccaggaucuccugaauugguguaugcaaauagcgaaagggaugucuuaucuugaggacguaaggcugguccaccgcgaucuagccgcucggaacgugcucguuaagucgccaaaccaugugaaaaucacggacuuuggacuggcaagauugcuggauauugacgaaaccgaguaccacgccgauggcgguaagguccccaucaaguggauggcuuuagaaagcauccucaggcgacgcuucacucaucaguccgacguguggucauauggcguuacagugugggagcugaugaccuuuggggccaaaccuuacgauggcauuccggcacgggagauaccagaccuucuggaaaagggagagagauugccccagccuccaaucugcacaauugauguauauaugaucauggucaaauguuggaugauugacagugaaugcaggccccguuuccgcgagcucgugucugaauuuagccggauggcgagagacccucaaagguucguggucauccagaaugaggaucuggggccggccucuccccuagacucaacuuuuuaccgaagccugcuugaggaugacgauaugggagaccucguugaugcugaagaguaccuggugccacagcagggcuucuuuuguccugaccccgccccaggugcagggggaaugguacaccaccggcaucgcuccuccaguaccagaagcggcgguggcgauuugacgcugggguuagaaccuucugaggaggaagcucccagguccccacucgccccgucagagggagcaggcagugacguguucgauggggaccugggaaugggcgccgcuaagggucuucaaagccugccuacccacgaucccucgccauugcagcgguauuccgaagaccccacagucccucucccaucugagacugacggguacguggcgccccugaccugcagcccucagccggaauauguuaaccagccagaugugcgaccccaaccucccucaccaagagagggaccucuacccgccgcacgcccagcuggcgccacacuggagaggccuaaaacucuuaguccggguaagaauggcgucgugaaggacguuuucgccuuugggggagcuguggaaaaccccgaguaccucaccccacagggcggggcagccccucagccccauccaccucccgcguucuccccggcuuuugauaaucuguauuacugggaccaggauccaccugaacguggagcacccccaucuacguucaaaggcacacccaccgccgagaacccugaauauuuggguuuagacgucccgguauga

SEQ ID NO: 1887 - RNA, 3768 nt, Artificial Sequence
  derived and/or modified sequence opt4 from Her2/neu__Homo_sapiens__AAI67147
auggagcuggccgcccugugcagauggggccugcugcuggcccugcugccccccggcgccgccagcacccaggugugcaccggcaccgacaugaagcugagacugcccgccagccccgagacccaccuggacaugcugagacaccuguaccagggcugccagguggugcagggcaaccuggagcugaccuaccugcccaccaacgccagccugagcuuccugcaggacauccaggaggugcagggcuacgugcugaucgcccacaaccaggugagacaggugccccugcagagacugagaaucgugagaggcacccagcuguucgaggacaacuacgcccuggccgugcuggacaacggcgacccccugaacaacaccacccccgugaccggcgccagccccggcggccugagagagcugcagcugagaagccugaccgagauccugaagggcggcgugcugauccagagaaacccccagcugugcuaccaggacaccauccuguggaaggacaucuuccacaagaacaaccagcuggcccugacccugaucgacaccaacagaagcagagccugccaccccugcagccccaugugcaagggcagcagaugcuggggcgagagcagcgaggacugccagagccugaccagaaccgugugcgccggcggcugcgccagaugcaagggcccccugcccaccgacugcugccacgagcagugcgccgccggcugcaccggccccaagcacagcgacugccuggccugccugcacuucaaccacagcggcaucugcgagcugcacugccccgcccuggugaccuacaacaccgacaccuucgagagcaugcccaaccccgagggcagauacaccuucggcgccagcugcgugaccgccugccccuacaacuaccugagcaccgacgugggcagcugcacccuggugugcccccugcacaaccaggaggugaccgccgaggacggcacccagagaugcgagaagugcagcaagcccugcgccagagugugcuacggccugggcauggagcaccugagagaggugagagccgugaccagcgccaacauccaggaguucgccggcugcaagaagaucuucggcagccuggccuuccugcccgagagcuucgacggcgaccccgccagcaacaccgccccccugcagcccgagcagcugcagguguucgagacccuggaggagaucaccggcuaccuguacaucagcgccuggcccgacagccugcccgaccugagcguguuccagaaccugcaggugaucagaggcagaauccugcacaacggcgccuacagccugacccugcagggccugggcaucagcuggcugggccugagaagccugagagagcugggcagcggccuggcccugauccaccacaacacccaccugugcuucgugcacaccgugcccugggaccagcuguucagaaacccccaccaggcccugcugcacaccgccaacagacccgaggacgagugcgugggcgagggccuggccugccaccagcugugcgccagaggccacugcuggggccccggccccacccagugcgugaacugcagccaguuccugagaggccaggagugcguggaggagugcagagugcugcagggccugcccagagaguacgugaacgccagacacugccugcccugccaccccgagugccagccccagaacggcagcgugaccugcuucggccccgaggccgaccagugcguggccugcgcccacuacaaggacccccccuucugcguggccagaugccccagcggcgugaagcccgaccugagcuacaugcccaucuggaaguuccccgacgaggagggcgccugccagcccugccccaucaacugcacccacagcugcguggaccuggacgacaagggcugccccgccgagcagagagccagcccccugaccagcaucaucagcgccguggugggcauccugcuggugguggugcugggcgugguguucggcauccugaucaagagaagacagcagaagaucagaaaguacaccaugagaagacugcugcaggagaccgagcugguggagccccugacccccagcggcgccaugcccaaccaggcccagaugagaauccugaaggagaccgagcugagaaaggugaaggugcugggcagcggcgccuucggcaccguguacaagggcaucuggauccccgacggcgagaacgugaagauccccguggccaucaaggugcugagagagaacaccagccccaaggccaacaaggagauccuggacgaggccuacgugauggccggcgugggcagccccuacgugagcagacugcugggcaucugccugaccagcaccgugcagcuggugacccagcugaugcccuacggcugccugcuggaccacgugagagagaacagaggcagacugggcagccaggaccugcugaacuggugcaugcagaucgccaagggcaugagcuaccuggaggacgugagacuggugcacagagaccuggccgccagaaacgugcuggugaagagccccaaccacgugaagaucaccgacuucggccuggccagacugcuggacaucgacgagaccgaguaccacgccgacggcggcaaggugcccaucaaguggauggcccuggagagcauccugagaagaagauucacccaccagagcgacguguggagcuacggcgugaccgugugggagcugaugaccuucggcgccaagcccuacgacggcauccccgccagagagauccccgaccugcuggagaagggcgagagacugccccagccccccaucugcaccaucgacguguacaugaucauggugaagugcuggaugaucgacagcgagugcagacccagauucagagagcuggugagcgaguucagcagaauggccagagacccccagagauucguggugauccagaacgaggaccugggccccgccagcccccuggacagcaccuucuacagaagccugcuggaggacgacgacaugggcgaccugguggacgccgaggaguaccuggugccccagcagggcuucuucugccccgaccccgcccccggcgccggcggcauggugcaccacagacacagaagcagcagcaccagaagcggcggcggcgaccugacccugggccuggagcccagcgaggaggaggcccccagaagcccccuggcccccagcgagggcgccggcagcgacguguucgacggcgaccugggcaugggcgccgccaagggccugcagagccugcccacccacgaccccagcccccugcagagauacagcgaggaccccaccgugccccugcccagcgagaccgacggcuacguggccccccugaccugcagcccccagcccgaguacgugaaccagcccgacgugagaccccagccccccagccccagagagggcccccugcccgccgccagacccgccggcgccacccuggagagacccaagacccugagccccggcaagaacggcguggugaaggacguguucgccuucggcggcgccguggagaaccccgaguaccugaccccccagggcggcgccgccccccagccccaccccccccccgccuucagccccgccuucgacaaccuguacuacugggaccaggacccccccgagagaggcgccccccccagcaccuucaagggcacccccaccgccgagaaccccgaguaccugggccuggacgugcccguguga

SEQ ID NO: 1888 - RNA, 3768 nt, Artificial Sequence
  derived and/or modified sequence opt5 from Her2/neu__Homo_sapiens__AAI67147
auggagcuggccgcucucugccgguggggccugcuucuggcccuccugcccccuggggcggcuagcacccagguguguacaggaacggacaugaagcugcggcuuccggccucccccgaaacccaccucgauaugcugcgccaucuguaccaaggcugccaggucguucaggggaaccucgagcugacauaucuuccuaccaaugccucucugagcuuccuccaggacauccaagaagugcagggauacgugcugauugcucacaaccaggucagacaggugccccuucaacggcugcgcaucguuagaggcacacagcucuuugaggauaauuaugcccuggcugugcuggacaacggggauccucucaauaacaccacacccgucaccggagccuccccuggcggccugcgggaacuucagcugcgcucucucacggagauucugaaagggggagugcuuauccagagaaauccgcaacuguguuaccaggacaccauucucuggaaggauaucuuccauaaaaacaaucagcuggcgcugacacucaucgacaccaaccggagccgcgccugccaccccuguuccccuaugugcaagggcucuagauguuggggagagagcuccgaagauugccaaagccugacacggaccguuugugcugggggcugcgcccgcuguaaagggccccuuccuacggacugcugccaugagcagugugcugccggaugcacaggccccaagcacucugauugucuggcgugccuccacuuuaaucauuccggcauuugugaacugcacugcccggcccuugugaccuauaacacagacaccuucgagagcaugccuaaucccgaggggagauacaccuuuggagcuucuugugucacagccugcccuuauaacuaccuguccacggaugugggcagcuguacccucgugugcccccugcauaaucaggaagucacagcugaggacgggacccagcggugugaaaagugcucuaaacccugcgcccgcguuuguuacggacugggcauggagcaccucagagaagugcgggccgugacauccgcuaacauccaagaguucgcggggugcaagaaaauuuuuggaagccuggccuuccuuccugaguccuuugacggcgauccggcuucuaacaccgcuccccugcagccugaacagcuccaggucuucgagacgcuggaagagaucacaggcuaucuguacauuagcgccuggcccgacucccuuccugaucucagcguguuucaaaaucugcagguuaucagagggcgcauucugcacaacggagccuauucucucacccugcagggccuugggaucuccuggcugggacuccggagccugagagaacugggcucugggcuugcccucauccaucacaauacccaucuguguuucgugcacacaguccccugggaccagcuguuucgcaacccgcaucaagcgcuccugcacaccgcuaaucggccugaggaugagugcgugggcgaaggacuugccugucaccagcugugcgccagaggccauuguugggggcccggaccuacacagugcguuaacuguagccaguuccuccgcggccaagagugcguggaagagugucggguccugcaggggcugcccagagaauacgugaaugcucgccacugccuuccuugccaucccgagugucagccgcaaaacggauccgucacgugcuucggcccugaggccgaccaguguguggcuugcgcccacuauaaggauccucccuuuuguguugcgcggugccccucuggggugaaaccggaccucagcuacaugcccauuuggaaguucccugaugaagagggcgccugucagcccugcccuaucaauuguacccacuccugcgucgaccuggaugacaagggaugucccgcugaacagagagccagcccucugacaucuauuaucuccgcugugguuggcauucuccugguggucgugcuuggggugguuuuuggaauccugaucaaacgccggcaacagaagauuagaaaauauaccaugcggcgccuccugcaggagacagagcuggucgaaccccuuaccccgagcggcgccaugccuaaccaggcgcaaaugagaauccucaaggagacggaacugcggaaagugaaggugcuggggucuggagccuucggcaccgucuacaaagggauuuggauccccgacggcgagaaugugaagauuccuguugcuaucaaggugcucagagaaaacacaucccccaaagccaauaaggagauccuggaugaggcuuacgucauggccggagugggcagcccguauguuucccgccuucuggggauuugccucaccucuacagugcagcuggucacccagcugaugccuuacggaugccuucuggaccaugugcgggaaaacagaggccgccucgggagccaggaucugcucaauugguguaugcaaaucgccaaaggaauguccuaucuggaggacguuagacuugugcaccgggaucuggcugcgcgcaacguccucgugaagucucccaaccaugugaaaauuacggacuuuggccuggccagacugcuugauaucgacgaaacagaguaccacgcugaugggggcaaggucccuauuaaguggauggcccuggaaagcauccuccggcgcagauucacccaucaguccgacguuuggagcuauggagugacagugugggagcugaugaccuuuggcgccaaacccuacgaugggauucccgcucgggagaucccugaccuccuggaaaagggagagcgccuuccgcagcccccuaucugcaccauugaugucuauaugaucauggugaaauguuggaugauugacucugaaugcagaccccgguuccgcgagcugguuuccgaauuuagcagaauggcccgggacccucaaagauucguggucauccagaaugaggaucucggccccgcgucuccucuggacuccacauuuuaccgcagccugcuugaggaugacgauaugggggaccugguggaugcugaagaguaccucguuccgcagcagggauucuuuugucccgacccugcccccggcgccggcgggauggugcaccaccggcauagaucuagcuccacgcgcagcggaggcggggaucugacccucggacuggaaccuucugaggaggaagcuccccgguccccgcuugccccuagcgagggcgcgggguccgacgucuucgauggagaccugggcaugggcgcugccaaggggcugcaaucucuccccacacacgaucccagcccucugcagagauauuccgaagaccccaccgugccucuuccgucugagacagacggauacguugcuccccugaccugcagcccucagcccgaauaugugaaccagccugauguccgcccccaaccgccuucuccccgggagggcccucuccccgccgccagaccugcuggggccacgcuggagcgccccaaaacacucuccccgggaaagaauggcguggugaaggacgucuucgcguuugggggagccguugaaaacccugaguaccugacaccccagggcggcgcugcuccccagccucauccgcccccugccuucagccccgccuuugauaaucuuuauuacugggaccaggauccucccgaaagaggggccccuccguccaccuucaaaggaacccccaccgcugagaacccugaauaucugggccuggacgugcccguguga

SEQ ID NO: 1889 - protein, 419 aa, Artificial Sequence
  Her2/neu__Homo_sapiens__Q9UK79
MELAALCRWGLLLALLPPGAASTQVCTGTDMKLRLPASPETHLDMLRHLYQGCQVVQGNLELTYLPTNASLSFLQDIQEVQGYVLIAHNQVRQVPLQRLRIVRGTQLFEDNYALAVLDNGDPLNNTTPVTGASPGGLRELQLRSLTEILKGGVLIQRNPQLCYQDTILWKDIFHKNNQLALTLIDTNRSRACHPCSPMCKGSRCWGESSEDCQSLTRTVCAGGCARCKGPLPTDCCHEQCAAGCTGPKHSDCLACLHFNHSGICELHCPALVTYNTDTFESMPNPEGRYTFGASCVTACPYNYLSTDVGSCTLVCPLHNQEVTAEDGTQRCEKCSKPCARGTHSLPPRPAAVPVPLRMQPGPAHPVLSFLRPSWDLVSAFYSLPLAPLSPTSVPISPVSVGRGPDPDAHVAVDLSRYEG

SEQ ID NO: 1890 - RNA, 1260 nt, Artificial Sequence
  Her2/neu__Homo_sapiens__AAD56009
auggagcuggcggccuugugccgcugggggcuccuccucgcccucuugccccccggagccgcgagcacccaagugugcaccggcacagacaugaagcugcggcucccugccagucccgagacccaccuggacaugcuccgccaccucuaccagggaugccagguggugcagggaaaccuggaacucaccuaccugcccaccaaugccagccuguccuuccugcaggauauccaggaggugcagggcuacgugcucaucgcucacaaccaagugaggcaggucccacugcagaggcugcggauugugcgaggcacccagcucuuugaggacaacuaugcccuggccgugcuagacaauggagacccgcugaacaauaccaccccugucacaggggccuccccaggaggccugcgggagcugcagcuucgaagccucacagagaucuugaaaggaggggucuugauccagcggaacccccagcucugcuaccaggacacgauuuuguggaaggacaucuuccacaagaacaaccagcuggcucucacacugauagacaccaaccgcucucgggccugccaccccugcucuccgauguguaagggcucccgcugcuggggagagaguucugaggauugucagagccugacgcgcacugucugugccgguggcugugcccgcugcaaggggccacugcccacugacugcugccaugagcagugugcugccggcugcacgggccccaagcacucugacugccuggccugccuccacuucaaccacaguggcaucugugagcugcacugcccagcccuggucaccuacaacacagacacguuugaguccaugcccaaucccgagggccgguauacauucggcgccagcugugucacugccugucccuacaacuaccuuucuacggacgugggauccugcacccucgucugcccccugcacaaccaagaggugacagcagaggauggaacacagcggugugagaagugcagcaagcccugugcccgagguacccacucacugcccccgaggccagcugcaguuccugucccucugcgcaugcagccuggcccagcccacccuguccuauccuuccucagacccucuugggaccuagucucugccuucuacucucuaccccuggccccccucagcccuacaagugucccuauauccccugucaguguggggaggggcccggacccugaugcucauguggcuguugaccugucccgguaugaaggcuga

SEQ ID NO: 1891 - RNA, 1260 nt, Artificial Sequence
  derived and/or modified sequence opt1 from Her2/neu__Homo_sapiens__AAD56009
auggagcuggccgcccucugccgcuggggccugcugcucgcccugcugcccccgggggccgccagcacccaggugugcaccggcacggacaugaagcuccggcugcccgccucccccgagacccaccuggacaugcuccgccaccuguaccaggggugccaggucgugcagggcaaccuggagcucaccuaccugcccaccaacgccagccuguccuuccuccaggacauccaggaggugcagggguacguccugaucgcgcacaaccaggugcgccaggugccgcugcagcggcuccggaucguccgcggcacgcagcuguucgaggacaacuacgcccuggccgugcucgacaacggcgacccccugaacaacaccacccccgugaccggggccagccccggcgggcugcgggagcuccagcugcgcucccugacggagauccucaagggcgggguccugauccagcggaacccgcagcugugcuaccaggacaccauccucuggaaggacaucuuccacaagaacaaccagcuggcgcugacccucaucgacaccaaccgcagccgggccugccaccccugcucccccaugugcaagggcagccgcugcuggggcgaguccagcgaggacugccagucccugacgcggaccgugugcgccgggggcugcgcccgcugcaaggggccccugccgaccgacugcugccacgagcagugcgccgcgggcugcaccggccccaagcacagcgacugccucgccugccugcacuucaaccacuccgggaucugcgagcugcacugccccgcccucgugacguacaacaccgacaccuucgagagcaugcccaacccggagggccgguacaccuucggggccuccugcgucacggccugccccuacaacuaccugagcaccgacgugggcuccugcacccuggugugcccccuccacaaccaggaggucaccgcggaggacgggacgcagcgcugcgagaagugcagcaagcccugcgcccggggcacccacucccugccgccccgccccgccgccgugcccgugccgcugcggaugcagcccggccccgcccaccccguccucagcuuccugcgcccgagcugggaccugguguccgcguucuacagccucccccuggcgccccuguccccgaccagcgugcccaucucccccgucagcguggggcggggccccgacccggacgcccacguggccgucgaccugucccgcuacgagggguga

SEQ ID NO: 1892 - RNA, 1260 nt, Artificial Sequence
  derived and/or modified sequence opt2 from Her2/neu__Homo_sapiens__AAD56009
auggagcucgccgcccucugccgcuggggccuccuccucgcccuccucccccccggcgccgccuccacccaggucugcaccggcaccgacaugaagcuccgccuccccgccucccccgagacccaccucgacaugcuccgccaccucuaccagggcugccaggucguccagggcaaccucgagcucaccuaccuccccaccaacgccucccucuccuuccuccaggacauccaggagguccagggcuacguccucaucgcccacaaccagguccgccaggucccccuccagcgccuccgcaucguccgcggcacccagcucuucgaggacaacuacgcccucgccguccucgacaacggcgacccccucaacaacaccacccccgucaccggcgccucccccggcggccuccgcgagcuccagcuccgcucccucaccgagauccucaagggcggcguccucauccagcgcaacccccagcucugcuaccaggacaccauccucuggaaggacaucuuccacaagaacaaccagcucgcccucacccucaucgacaccaaccgcucccgcgccugccaccccugcucccccaugugcaagggcucccgcugcuggggcgaguccuccgaggacugccagucccucacccgcaccgucugcgccggcggcugcgcccgcugcaagggcccccuccccaccgacugcugccacgagcagugcgccgccggcugcaccggccccaagcacuccgacugccucgccugccuccacuucaaccacuccggcaucugcgagcuccacugccccgcccucgucaccuacaacaccgacaccuucgaguccaugcccaaccccgagggccgcuacaccuucggcgccuccugcgucaccgccugccccuacaacuaccucuccaccgacgucggcuccugcacccucgucugcccccuccacaaccaggaggucaccgccgaggacggcacccagcgcugcgagaagugcuccaagcccugcgcccgcggcacccacucccuccccccccgccccgccgccguccccgucccccuccgcaugcagcccggccccgcccaccccguccucuccuuccuccgccccuccugggaccucgucuccgccuucuacucccucccccucgccccccucucccccaccuccguccccaucucccccgucuccgucggccgcggccccgaccccgacgcccacgucgccgucgaccucucccgcuacgagggcuga

SEQ ID NO: 1893 - RNA, 1260 nt, Artificial Sequence
  derived and/or modified sequence opt3 from Her2/neu__Homo_sapiens__AAD56009
auggagcuggccgcucucugcagauggggccuucuguuggcauuacugcccccuggggccgcgagcacccagguguguacaggaacugacaugaagcuaaggcucccagcuuccccggaaacgcaccuggauaugcuucggcaucuguaccaagguugccaggucguucagggcaacuuggagcucaccuaucugcccacaaaugccucucugucauuccuccaggacauccaagaagugcagggguacguauuaauugcacacaaccaggugcgccaggucccucugcaacgacuucguauagugagaggaacucaguuguuugaggauaauuaugcccuggcuguucuagacaacggcgauccacucaauaacaccacacccgugaccggugcaaguccugggggacugagggaacuucagcugcggagcuugacugagauccucaaaggcggcguccugauucagcgcaauccacaauuauguuaccaggacacaauccuguggaaggauauuuuccauaaaaacaaucagcucgcccuuacccugaucgacacgaacagauccagggcuugccaccccuguucuccuaugugcaaggggucgcgguguuggggagagucaagcgaagauugccaaaguuugacucgcaccgugugugccgguggcugcgcgcgauguaaagggccacuaccgacagacugcugccaugagcagugugcagccggaugcacuggccccaagcacuccgauugucuggcuugccuccacuuuaaucauucugguauaugugaacugcacugcccugcccuuguaaccuauaacacagacaccuucgagagcaugccaaaucccgaggggagauacacguuuggagcauccuguguuacugcuugcccuuauaacuaccugucaacagaugugggcaguuguaccuuggucugcccacuccauaaucaggaagugacugccgaggacggcacacagaggugugaaaagugcagcaaacccugcgcgcgggggacccacucucugccgccucgucccgccgcagugccagucccuuuacgcaugcaacccggaccagcucaccccguucuguccuuccuaagaccuucaugggaccucgugagcgccuuuuacagucugccacuugcuccguugucucccacguccguaccuaucagcccagugucggucgguaggggccccgauccugacgcccauguggcaguugaucugucucgguaugagggguga

SEQ ID NO: 1894 - RNA, 1260 nt, Artificial Sequence
  derived and/or modified sequence opt4 from Her2/neu__Homo_sapiens__AAD56009
auggagcuggccgcccugugcagauggggccugcugcuggcccugcugccccccggcgccgccagcacccaggugugcaccggcaccgacaugaagcugagacugcccgccagccccgagacccaccuggacaugcugagacaccuguaccagggcugccagguggugcagggcaaccuggagcugaccuaccugcccaccaacgccagccugagcuuccugcaggacauccaggaggugcagggcuacgugcugaucgcccacaaccaggugagacaggugccccugcagagacugagaaucgugagaggcacccagcuguucgaggacaacuacgcccuggccgugcuggacaacggcgacccccugaacaacaccacccccgugaccggcgccagccccggcggccugagagagcugcagcugagaagccugaccgagauccugaagggcggcgugcugauccagagaaacccccagcugugcuaccaggacaccauccuguggaaggacaucuuccacaagaacaaccagcuggcccugacccugaucgacaccaacagaagcagagccugccaccccugcagccccaugugcaagggcagcagaugcuggggcgagagcagcgaggacugccagagccugaccagaaccgugugcgccggcggcugcgccagaugcaagggcccccugcccaccgacugcugccacgagcagugcgccgccggcugcaccggccccaagcacagcgacugccuggccugccugcacuucaaccacagcggcaucugcgagcugcacugccccgcccuggugaccuacaacaccgacaccuucgagagcaugcccaaccccgagggcagauacaccuucggcgccagcugcgugaccgccugccccuacaacuaccugagcaccgacgugggcagcugcacccuggugugcccccugcacaaccaggaggugaccgccgaggacggcacccagagaugcgagaagugcagcaagcccugcgccagaggcacccacagccugccccccagacccgccgccgugcccgugccccugagaaugcagcccggccccgcccaccccgugcugagcuuccugagacccagcugggaccuggugagcgccuucuacagccugccccuggccccccugagccccaccagcgugcccaucagccccgugagcgugggcagaggccccgaccccgacgcccacguggccguggaccugagcagauacgagggcuga

SEQ ID NO: 1895 - RNA, 1260 nt, Artificial Sequence
  derived and/or modified sequence opt5 from Her2/neu__Homo_sapiens__AAD56009
auggagcuggccgcucucugcagauggggccugcuucuggcccuccugcccccuggggcggcuagcacccagguguguacaggaacggacaugaagcugcggcuuccggccucccccgaaacccaccucgauaugcugcgccaucuguaccaaggcugccaggucguucaggggaaccucgagcugacauaucuuccuaccaaugccucucugagcuuccuccaggacauccaagaagugcagggauacgugcugauugcucacaaccaggucagacaggugccccuucaacggcugcgcaucguuagaggcacacagcucuuugaggauaauuaugcccuggcugugcuggacaacggggauccucucaauaacaccacacccgucaccggagccuccccuggcggccugcgggaacuucagcugcgcucucucacggagauucugaaagggggagugcuuauccagagaaauccgcaacuguguuaccaggacaccauucucuggaaggauaucuuccauaaaaacaaucagcuggcgcugacacucaucgacaccaaccggagccgcgccugccaccccuguuccccuaugugcaagggcucuagauguuggggagagagcuccgaagauugccaaagccugacacggaccguuugugcugggggcugcgcccgcuguaaagggccccuuccuacggacugcugccaugagcagugugcugccggaugcacaggccccaagcacucugauugucuggcgugccuccacuuuaaucauuccggcauuugugaacugcacugcccggcccuugugaccuauaacacagacaccuucgagagcaugccuaaucccgaggggagauacaccuuuggagcuucuugugucacagccugcccuuauaacuaccuguccacggaugugggcagcuguacccucgugugcccccugcauaaucaggaagucacagcugaggacgggacccagcggugugaaaagugcucuaaacccugcgcccgcggaacacacucccugccuccgagacccgccgcuguuccugugccccuccggaugcaaccuggccccgcgcacccggugcugagcuuccuuagaccuuccugggaccuggucucugccuuuuacagccucccccuggcuccucugucccccaccagcgugccuaucucucccguuuccguggggcgcggaccggauccugacgcccaugucgccguggaucuuagccgguaugagggcuga

SEQ ID NO: 1896 - protein, 182 aa, Artificial Sequence
  HLA-A2/m__Homo_sapiens__Q95387
GSHSMRYFFTSVSRPGRGEPRFIAVGYVDDTQFVRFDSDAASQRMEPRAPWIEQEGPEYWDGETRKVKAHSQTHRVDLGTLRGYYNQSEAGSHTVQRMYGCDVGSDWRFLRGYHQYAYDGKDYIALKEDLRSWTAADMAAQTTKHKWETAHVAEQLRAYLEGTCVEWLRRYLENGKETLQRT

SEQ ID NO: 1897 - RNA, 546 nt, Artificial Sequence
  HLA-A2/m__Homo_sapiens__U70863.1
ggcucucacuccaugagguauuucuucacauccgugucccggcccggccgcggggagccccgcuucaucgcagugggcuacguggacgacacgcaguucgugcgguucgacagcgacgccgcgagccagaggauggagccgcgggcgccguggauagagcaggaggguccggaguauugggacggggagacacggaaagugaaggcccacucacagacucaccgaguggaccuggggacccugcgcggcuacuacaaccagagcgaggccgguucucacaccguccagaggauguauggcugcgacguggggucggacuggcgcuuccuccgcggguaccaccaguacgccuacgacggcaaggauuacaucgcccugaaagaggaccugcgcucuuggaccgcggcggacauggcagcucagaccaccaagcacaagugggagacggcccauguggcggagcaguugagagccuaccuggagggcacgugcguggaguggcuccgcagauaccuggagaacgggaaggagacgcugcagcgcacg

SEQ ID NO: 1898 - RNA, 546 nt, Artificial Sequence
  derived and/or modified sequence opt1 from HLA-A2/m__Homo_sapiens__U70863.1
ggcagccacuccaugcgcuacuucuucaccagcgugucccggcccgggcgcggcgagccgcgguucaucgccgucggguacguggacgacacccaguucgugcgcuucgacagcgacgccgcgucccagcggauggagccccgcgcccccuggaucgagcaggagggccccgaguacugggacggggagacgcggaaggucaaggcccacagccagacccaccgcguggaccugggcacccuccggggcuacuacaaccaguccgaggccgggagccacaccgugcagcgcauguacggcugcgacgucggguccgacuggcgguuccugcgcggcuaccaccaguacgccuacgacgggaaggacuacaucgcgcugaaggaggaccuccggagcuggacggccgccgacauggccgcgcagaccaccaagcacaagugggagaccgcccacguggccgagcagcugcgcgccuaccuggagggcacgugcguggaguggcuccggcgcuaccuggagaacggcaaggagacccugcagcggacc

SEQ ID NO: 1899 - RNA, 546 nt, Artificial Sequence
  derived and/or modified sequence opt2 from HLA-A2/m__Homo_sapiens__U70863.1
ggcucccacuccaugcgcuacuucuucaccuccgucucccgccccggccgcggcgagccccgcuucaucgccgucggcuacgucgacgacacccaguucguccgcuucgacuccgacgccgccucccagcgcauggagccccgcgcccccuggaucgagcaggagggccccgaguacugggacggcgagacccgcaaggucaaggcccacucccagacccaccgcgucgaccucggcacccuccgcggcuacuacaaccaguccgaggccggcucccacaccguccagcgcauguacggcugcgacgucggcuccgacuggcgcuuccuccgcggcuaccaccaguacgccuacgacggcaaggacuacaucgcccucaaggaggaccuccgcuccuggaccgccgccgacauggccgcccagaccaccaagcacaagugggagaccgcccacgucgccgagcagcuccgcgccuaccucgagggcaccugcgucgaguggcuccgccgcuaccucgagaacggcaaggagacccuccagcgcacc

SEQ ID NO: 1900 - RNA, 546 nt, Artificial Sequence
  derived and/or modified sequence opt3 from HLA-A2/m__Homo_sapiens__U70863.1
ggcagccacuccaugagauacuucuuuaccucugugucaaggcccgggcggggagagccucgcuucaucgccgucgguuauguugacgauacacaguuugugcgauucgacagugaugcugcaagccaacguauggaaccaagagccccguggauugagcaggaaggccccgaguacugggacggggaaacuaggaagguaaaagcgcauucccagacgcaccggguggaucugggaacccuccgcggcuauuacaaccagucugaggcugguucgcauacaguccaaagaauguaugggugcgacgugggaucagauuggagguuucuucggggcuaccaccaguaugccuacgacggcaaggauuacauagcacugaaagaggacuugcgcagcuggacugccgcugauauggcagcccagaccacaaagcauaaaugggaaaccgcucacguugccgagcaguuacgagcguaucuggaagggacuuguguggaguggcuaagaagguaccucgagaauggaaaggaaacacugcaacggacc

SEQ ID NO: 1901 - RNA, 546 nt, Artificial Sequence
  derived and/or modified sequence opt4 from HLA-A2/m__Homo_sapiens__U70863.1
ggcagccacagcaugagauacuucuucaccagcgugagcagacccggcagaggcgagcccagauucaucgccgugggcuacguggacgacacccaguucgugagauucgacagcgacgccgccagccagagaauggagcccagagcccccuggaucgagcaggagggccccgaguacugggacggcgagaccagaaaggugaaggcccacagccagacccacagaguggaccugggcacccugagaggcuacuacaaccagagcgaggccggcagccacaccgugcagagaauguacggcugcgacgugggcagcgacuggagauuccugagaggcuaccaccaguacgccuacgacggcaaggacuacaucgcccugaaggaggaccugagaagcuggaccgccgccgacauggccgcccagaccaccaagcacaagugggagaccgcccacguggccgagcagcugagagccuaccuggagggcaccugcguggaguggcugagaagauaccuggagaacggcaaggagacccugcagagaacc

SEQ ID NO: 1902 - RNA, 546 nt, Artificial Sequence
  derived and/or modified sequence opt5 from HLA-A2/m__Homo_sapiens__U70863.1
ggcagccacuccaugagauacuucuuuaccucugugagccggcccgggcgcggagagccuagauucaucgccgucggcuauguugacgauacacaguuugugcgguucgacuccgaugcugccucucaacgcauggaaccgagagcgcccuggauugagcaggaagggccugaguacugggacggagaaacgcggaaggugaaagcucauagccagacccaccgcgucgaucugggcacacucagaggguauuacaaccaguccgaggccggaucucauaccgugcaacggauguauggcugcgacguuggcagcgauuggcgcuuucugagaggguaccaccaguaugccuacgacggaaaggauuacaucgcucuuaaagaggaccugcgguccuggacagccgcugauauggccgcgcagaccacaaagcauaaaugggaaaccgcccacguggcugagcagcuccgcgccuaucuggaaggcacgugugucgaguggcuuagacgguaccuggagaaugggaaggaaacccuccaacgcaca

SEQ ID NO: 1903 - protein, 181 aa, Artificial Sequence
  HLA-A2/m__Homo_sapiens__Q9MYF8
SHSMRYFFTSVSRPGRGEPRFIAVGYVDDTQFVRFDSDAASQRMEPRAPWIEQEGPEYWDGETRKVKAHSQTHRVDLGTLRGYYNQSEAGSHTVQRMYGCDVGSDWRFLRGYHQYAYDGKDYIALKEDLRSWTAADMAAQTTKHKWEAAHVAEQLRAYLEGTCVEWLRRYLENGKETLQRT

SEQ ID NO: 1904 - RNA, 543 nt, Artificial Sequence
  HLA-A2/m__Homo_sapiens__AH009136.2
ucucacuccaugagguauuucuucacauccgugucccggcccggccgcggggagccccgcuucaucgcagugggcuacguggacgacacgcaguucgugcgguucgacagcgacgccgcgagccagaggauggagccgcgggcgccguggauagagcaggaggguccggaguauugggacggggagacacggaaagugaaggcccacucacagacucaccgaguggaccuggggacccugcgcggcuacuacaaccagagcgaggccgguucucacaccguccagaggauguauggcugcgacguggggucggacuggcgcuuccuccgcggguaccaccaguacgccuacgacggcaaggauuacaucgcccugaaagaagaccugcgcucuuggaccgcggcggacauggcagcucagaccaccaagcacaagugggaggcggcccauguggcggagcaguugagagccuaccuggagggcacgugcguggaguggcuccgcagauaccuggagaacgggaaggagacgcugcagcgcacg

SEQ ID NO: 1905 - RNA, 543 nt, Artificial Sequence
  derived and/or modified sequence opt1 from HLA-A2/m__Homo_sapiens__AH009136.2
agccacuccaugcgcuacuucuucaccagcgugucccggcccggccgcggggagccgcgguucaucgccgucggcuacguggacgacacccaguucgugcgcuucgacagcgacgccgcgucccagcggauggagccccgcgcccccuggaucgagcaggaggggcccgaguacugggacggcgagacgcggaaggucaaggcccacagccagacccaccgcguggaccuggggacccuccggggcuacuacaaccaguccgaggccggcagccacaccgugcagcgcauguacgggugcgacgucggcuccgacuggcgguuccugcgcggguaccaccaguacgccuacgacggcaaggacuacaucgcgcugaaggaggaccuccggagcuggacggccgccgacauggccgcgcagaccaccaagcacaagugggaggccgcccacguggccgagcagcugcgcgccuaccuggaggggaccugcguggaguggcuccggcgcuaccuggagaacggcaaggagacgcugcagcggacc

SEQ ID NO: 1906 - RNA, 543 nt, Artificial Sequence
  derived and/or modified sequence opt2 from HLA-A2/m__Homo_sapiens__AH009136.2
ucccacuccaugcgcuacuucuucaccuccgucucccgccccggccgcggcgagccccgcuucaucgccgucggcuacgucgacgacacccaguucguccgcuucgacuccgacgccgccucccagcgcauggagccccgcgcccccuggaucgagcaggagggccccgaguacugggacggcgagacccgcaaggucaaggcccacucccagacccaccgcgucgaccucggcacccuccgcggcuacuacaaccaguccgaggccggcucccacaccguccagcgcauguacggcugcgacgucggcuccgacuggcgcuuccuccgcggcuaccaccaguacgccuacgacggcaaggacuacaucgcccucaaggaggaccuccgcuccuggaccgccgccgacauggccgcccagaccaccaagcacaagugggaggccgcccacgucgccgagcagcuccgcgccuaccucgagggcaccugcgucgaguggcuccgccgcuaccucgagaacggcaaggagacccuccagcgcacc

SEQ ID NO: 1907 - RNA, 543 nt, Artificial Sequence
  derived and/or modified sequence opt3 from HLA-A2/m__Homo_sapiens__AH009136.2
agccacuccaugagauacuucuuuaccucugugucaaggcccggccgcggggagccucgguucaucgccgucggauauguugacgauacacaguuugugcgauucgacagugaugcugcaagccaacguauggaaccaagagccccguggauugagcaggaaggucccgaguacugggacggcgaaacuaggaagguaaaagcgcauucccagacgcaccggguggaucuggggacccuccgcggauauuacaaccagucugaggcuggcucgcauacaguccaaagaauguaugguugcgacguggggucagauuggagguuucuucggggauaccaccaguaugccuacgacggcaaggauuacauagcacugaaagaggacuugcgcagcuggacugccgcugauauggcagcccagaccacaaagcauaaaugggaagcugcccacguugcggagcaguuacgagcauaucuggaaggcaccuguguggaguggcuaagaagguaccucgagaaugggaaggaaacucugcaacggaca

SEQ ID NO: 1908 - RNA, 543 nt, Artificial Sequence
  derived and/or modified sequence opt4 from HLA-A2/m__Homo_sapiens__AH009136.2
agccacagcaugagauacuucuucaccagcgugagcagacccggcagaggcgagcccagauucaucgccgugggcuacguggacgacacccaguucgugagauucgacagcgacgccgccagccagagaauggagcccagagcccccuggaucgagcaggagggccccgaguacugggacggcgagaccagaaaggugaaggcccacagccagacccacagaguggaccugggcacccugagaggcuacuacaaccagagcgaggccggcagccacaccgugcagagaauguacggcugcgacgugggcagcgacuggagauuccugagaggcuaccaccaguacgccuacgacggcaaggacuacaucgcccugaaggaggaccugagaagcuggaccgccgccgacauggccgcccagaccaccaagcacaagugggaggccgcccacguggccgagcagcugagagccuaccuggagggcaccugcguggaguggcugagaagauaccuggagaacggcaaggagacccugcagagaacc

SEQ ID NO: 1909 - RNA, 543 nt, Artificial Sequence
  derived and/or modified sequence opt5 from HLA-A2/m__Homo_sapiens__AH009136.2
agccacuccaugagauacuucuuuaccucugugagccggcccggccgcggggagccuagauucaucgccgucggauauguugacgauacacaguuugugcgguucgacuccgaugcugccucucaacgcauggaaccgagagcgcccuggauugagcaggaaggcccugaguacugggacggggaaacgcggaaggugaaagcucauagccagacccaccgcgucgaucugggaacacucagaggcuauuacaaccaguccgaggccgggucucauaccgugcaacggauguauggaugcgacguuggcagcgauuggcgcuuucugagaggcuaccaccaguaugccuacgacgggaaggauuacaucgcucuuaaagaggaccugcgguccuggacagccgcugauauggccgcgcagaccacaaagcauaaaugggaagccgcucacguggccgagcagcuccgcgcuuaucuggaaggaaccugugucgaguggcuuagacgguaccuggagaauggcaaggaaacgcuccaacgcacc

SEQ ID NO: 1910 - protein, 234 aa, Artificial Sequence
  homeobox_NKX3.1__Homo_sapiens__Q99801
MLRVPEPRPGEAKAEGAAPPTPSKPLTSFLIQDILRDGAQRQGGRTSSQRQRDPEPEPEPEPEGGRSRAGAQNDQLSTGPRAAPEEAETLAETEPERHLGSYLLDSENTSGALPRLPQTPKQPQKRSRAAFSHTQVIELERKFSHQKYLSAPERAHLAKNLKLTETQVKIWFQNRRYKTKRKQLSSELGDLEKHSSLPALKEEAFSRASLVSVYNSYPYYPYLYCVGSWSPAFW

SEQ ID NO: 1911 - RNA, 705 nt, Artificial Sequence
  homeobox_NKX3.1__Homo_sapiens__AAG09781
augcucaggguuccggagccgcggcccggggaggcgaaagcggagggggccgcgccgccgaccccguccaagccgcucacguccuuccucauccaggacauccugcgggacggcgcgcagcggcaaggcggccgcacgagcagccagagacagcgcgacccggagccggagccagagccagagccagagggaggacgcagccgcgccggggcgcagaacgaccagcugagcaccgggccccgcgccgcgccggaggaggccgagacgcuggcagagaccgagccagaaaggcacuuggggucuuaucuguuggacucugaaaacacuucaggcgcccuuccaaggcuuccccaaaccccuaagcagccgcagaagcgcucccgagcugccuucucccacacucaggugaucgaguuggagaggaaguucagccaucagaaguaccugucagccccugaacgggcccaccuggccaagaaccucaagcucacggagacccaagugaagauaugguuccagaacagacgcuauaagacuaagcgaaagcagcucuccucggagcugggagacuuggagaagcacuccucuuugccggcccugaaagaggaggccuucucccgggccucccuggucuccguguauaacagcuauccuuacuacccauaccuguacugcgugggcagcuggagcccagcuuuuugguaa

SEQ ID NO: 1912 - RNA, 705 nt, Artificial Sequence
  derived and/or modified sequence opt1 from homeobox_NKX3.1__Homo_sapiens__AAG09781
augcugcgcgugcccgagccgcggcccggcgaggccaaggccgagggggcggccccgcccacccccagcaagccccucaccuccuuccugauccaggacauccugcgcgacggcgcccagcggcagggcgggcgcacgagcucccagcggcagcgcgaccccgagcccgagccggagcccgagcccgagggcgggcggagccgcgccggcgcccagaacgaccagcucuccaccgggccccgggcggccccggaggaggccgagacccuggccgagaccgagcccgagcgccaccugggcagcuaccuccuggacuccgagaacacgagcggggcgcugccccggcucccccagaccccgaagcagccccagaagcgcucccgggccgccuucagccacacccaggucaucgagcuggagcgcaaguucucccaccagaaguaccugagcgcccccgagcgggcccaccucgcgaagaaccugaagcugaccgagacccaggugaagaucugguuccagaaccgccgguacaagacgaagcgcaagcagcucuccagcgagcugggcgaccuggagaagcacuccagccuccccgcccugaaggaggaggccuucucccgggccagccugguguccgucuacaacagcuacccguacuaccccuaccucuacugcguggggagcuggucccccgccuucugguga

SEQ ID NO: 1913 - RNA, 705 nt, Artificial Sequence
  derived and/or modified sequence opt2 from homeobox_NKX3.1__Homo_sapiens__AAG09781
augcuccgcguccccgagccccgccccggcgaggccaaggccgagggcgccgccccccccacccccuccaagccccucaccuccuuccucauccaggacauccuccgcgacggcgcccagcgccagggcggccgcaccuccucccagcgccagcgcgaccccgagcccgagcccgagcccgagcccgagggcggccgcucccgcgccggcgcccagaacgaccagcucuccaccggcccccgcgccgcccccgaggaggccgagacccucgccgagaccgagcccgagcgccaccucggcuccuaccuccucgacuccgagaacaccuccggcgcccucccccgccucccccagacccccaagcagccccagaagcgcucccgcgccgccuucucccacacccaggucaucgagcucgagcgcaaguucucccaccagaaguaccucuccgcccccgagcgcgcccaccucgccaagaaccucaagcucaccgagacccaggucaagaucugguuccagaaccgccgcuacaagaccaagcgcaagcagcucuccuccgagcucggcgaccucgagaagcacuccucccuccccgcccucaaggaggaggccuucucccgcgccucccucgucuccgucuacaacuccuaccccuacuaccccuaccucuacugcgucggcuccuggucccccgccuucugguga

SEQ ID NO: 1914 - RNA, 705 nt, Artificial Sequence
  derived and/or modified sequence opt3 from homeobox_NKX3.1__Homo_sapiens__AAG09781
augcugagagugcccgagccuaggccaggcgaagccaaggcugagggggcagccccgcccaccccuagcaaaccacucacauccuuccuuauccaggacauucugcgggauggagcgcaacgccaggguggccgaacuucuucacagcgucagagagaccccgaaccugagccagaacccgagccugaagggggaaggagucgggcuggcgcccaaaacgaucaguugagcacggguccacgcgcagccccggaggaggcugaaaccuuagcagagacagagcccgaaagacaccugggguccuaccuacucgacucugagaauacuucgggagcccugccuaggcuuccacagacccccaagcagccucaaaaacggucacgcgcugccuuuagccauacacaggucauagaacuggagcgaaaguucagucaccagaaauauuuguccgcgccagaaagagcacaucucgccaagaaccugaagcugaccgagacucagguuaaaaucugguuucaaaauaggcgguacaagacaaaacguaagcagcucucuagcgaguuaggcgaucuggaaaaacacuccucacuucccgcuuugaaggaggaagccuucagucgcgcaagccuggugucuguauauaacuccuacccguauuacccuuaucuauacugcgugggcucauggagccccgcuuuuugguga

SEQ ID NO: 1915 - RNA, 705 nt, Artificial Sequence
  derived and/or modified sequence opt4 from homeobox_NKX3.1__Homo_sapiens__AAG09781
augcugagagugcccgagcccagacccggcgaggccaaggccgagggcgccgccccccccacccccagcaagccccugaccagcuuccugauccaggacauccugagagacggcgcccagagacagggcggcagaaccagcagccagagacagagagaccccgagcccgagcccgagcccgagcccgagggcggcagaagcagagccggcgcccagaacgaccagcugagcaccggccccagagccgcccccgaggaggccgagacccuggccgagaccgagcccgagagacaccugggcagcuaccugcuggacagcgagaacaccagcggcgcccugcccagacugccccagacccccaagcagccccagaagagaagcagagccgccuucagccacacccaggugaucgagcuggagagaaaguucagccaccagaaguaccugagcgcccccgagagagcccaccuggccaagaaccugaagcugaccgagacccaggugaagaucugguuccagaacagaagauacaagaccaagagaaagcagcugagcagcgagcugggcgaccuggagaagcacagcagccugcccgcccugaaggaggaggccuucagcagagccagccuggugagcguguacaacagcuaccccuacuaccccuaccuguacugcgugggcagcuggagccccgccuucugguga

SEQ ID NO: 1916 - RNA, 705 nt, Artificial Sequence
  derived and/or modified sequence opt5 from homeobox_NKX3.1__Homo_sapiens__AAG09781
augcugagagugcccgagccucggccgggcgaagccaaggcugagggggccgcgcccccuacccccagcaaaccucucacauccuuccugauccaggacauucuucgcgauggagcucaaagacagggcgggcggacgucuagccagcgccagagagaccccgaaccugagccggaacccgagccugagggaggccggucccgcgccggggcccaaaacgaucagcugucuaccggacccagagcugccccugaagaggcugaaacacucgccgagaccgagcccgaacggcaccugggcagcuaccuucuggacuccgagaauacaucuggcgcgcucccgcgccugccucagacccccaagcagccucagaaaagaagccgggccgcuuuuucccauacacaagucaucgaacuggagcgcaaguucagccaccagaaauaucucucugcccccgaaagagcucaucuggccaagaaccuuaagcugaccgagacgcagguuaaaauuugguuucaaaaucggcgcuacaagaccaaaagaaagcagcucuccagcgagcugggggaucuugaaaaacacucuucccugcccgcgcucaaggaggaagccuucagccgggcuucucugguguccguguauaacagcuacccuuauuacccguaucuguacugcgucggauccuggucucccgccuuuugguga

SEQ ID NO: 1917 - protein, 313 aa, Artificial Sequence
  HOM-TES-85__Homo_sapiens__B2RBQ6
MASFRKLTLSEKVPPNHPSRKKVNFLDMSLDDIIIYKELEGTNAEEEKNKRQNHSKKESPSRQQSKAHRHRHRRDYSRCRSNSEEGNHDKKPSQKPSGFKSGQHPLNGQPLIEQEKCSDNYEAQAEKNQGQSEGNQHQSEGNPDKSEESQGQPEENHHSERSRNHLERSLSQSDRSQGQLKRHHPQYERSHGQYKRSHGQSERSHGHSERSHGHSERSHGHSERSHGHSKRSRSQGDLVDTQSDLIATQRDLIATQKDLIATQRDLIATQRDLIVTQRDLVATERDLINQSGRSHGQSERHQRYSTGKNTITT

SEQ ID NO: 1918 - RNA, 942 nt, Artificial Sequence
  HOM-TES-85__Homo_sapiens__BAG37303
auggcuucguuucggaagcuaacgcuuucugaaaaagugccgccaaaucaucccagucggaaaaagguuaacuuccuagauaugucucuagacgacauuauaaucuauaaagaguuagaagggacaaaugcugaagaagaaaagaauaaaagacagaaccauaguaaaaaggaaucgccuucaagacagcaaucaaaagcucauagacaucgccaucggagagacuacucaagaugcagaagcaacucugaggaaggaaaucaugauaaaaaaccaucccaaaaaccuucuggauucaagucuggacaacacccuuuaaaugggcagccuuuaauugagcaggagaagugcagugacaauuaugaggcccaagcagagaagaaucaaggccagucagaggggaaccagcaucaaucagaaggaaauccggacaaaucagaagaaucccagggccaaccagaagaaaaucaucauucugagcgaucccgaaaccacuuagagagaucucuuucucagucagacagaucucaagggcagcuaaagagacaucauccccaauaugagagaucucauggccaauacaagagaucucauggucagucugagagaucucauggccacucagagagaucucauggucacucagagagaucucauggucacucagagagaucucauggucacucaaagagaucucguagccagggagaucuuguggacacucagagugaucucauagccacucagagagaucucauagccacucagaaagaucucauagccacucagagagaucucauagccacucagagagaucucauagucacucagagagaucucguggccacugagagagaucucauaaaucagucagggagaucucauggccaaucagaaagacaucagagauacucaacagguaaaaauacaauaacuacuuaa

SEQ ID NO: 1919 - RNA, 942 nt, Artificial Sequence
  derived and/or modified sequence opt1 from HOM-TES-85__Homo_sapiens__BAG37303
auggccagcuuccgcaagcugacccucuccgagaaggugcccccgaaccaccccagccggaagaaggucaacuuccuggacaugucccuggacgacaucaucaucuacaaggagcucgagggcaccaacgccgaggaggagaagaacaagcgccagaaccacagcaagaaggagucccccagccggcagcaguccaaggcgcaccgccaccggcaccgccgggacuacagccgcugccgguccaacagcgaggaggggaaccacgacaagaagcccucccagaagccgagcggcuucaaguccgggcagcacccccugaacggccagccccugaucgagcaggagaagugcagcgacaacuacgaggcccaggccgagaagaaccaggggcaguccgagggcaaccagcaccagagcgagggcaaccccgacaaguccgaggagagccaggggcagccggaggagaaccaccacuccgagcgcagccggaaccaccucgagcgcagccugucccagagcgaccggucccagggccagcugaagcgccaccacccccaguacgagcggagccacgggcaguacaagcgcucccacggccagagcgagcggucccacgggcacagcgagcgcucccacggccacagcgagcggucccacggccacagcgagcgcucccacgggcacagcaagcggucccgcagccagggcgaccucguggacacgcaguccgaccugaucgccacccagcgcgaccugaucgccacccagaaggaccucaucgcgacccagcgggaccugaucgccacgcagcgcgaccugaucgugacccagcgggaccucgucgccaccgagcgcgaccugaucaaccagagcgggcggucccacggccagagcgagcgccaccagcgguacagcaccggcaagaacacgaucaccaccuga

SEQ ID NO: 1920 - RNA, 942 nt, Artificial Sequence
  derived and/or modified sequence opt2 from HOM-TES-85__Homo_sapiens__BAG37303
auggccuccuuccgcaagcucacccucuccgagaaggucccccccaaccaccccucccgcaagaaggucaacuuccucgacaugucccucgacgacaucaucaucuacaaggagcucgagggcaccaacgccgaggaggagaagaacaagcgccagaaccacuccaagaaggagucccccucccgccagcaguccaaggcccaccgccaccgccaccgccgcgacuacucccgcugccgcuccaacuccgaggagggcaaccacgacaagaagcccucccagaagcccuccggcuucaaguccggccagcacccccucaacggccagccccucaucgagcaggagaagugcuccgacaacuacgaggcccaggccgagaagaaccagggccaguccgagggcaaccagcaccaguccgagggcaaccccgacaaguccgaggagucccagggccagcccgaggagaaccaccacuccgagcgcucccgcaaccaccucgagcgcucccucucccaguccgaccgcucccagggccagcucaagcgccaccacccccaguacgagcgcucccacggccaguacaagcgcucccacggccaguccgagcgcucccacggccacuccgagcgcucccacggccacuccgagcgcucccacggccacuccgagcgcucccacggccacuccaagcgcucccgcucccagggcgaccucgucgacacccaguccgaccucaucgccacccagcgcgaccucaucgccacccagaaggaccucaucgccacccagcgcgaccucaucgccacccagcgcgaccucaucgucacccagcgcgaccucgucgccaccgagcgcgaccucaucaaccaguccggccgcucccacggccaguccgagcgccaccagcgcuacuccaccggcaagaacaccaucaccaccuga

SEQ ID NO: 1921 - RNA, 942 nt, Artificial Sequence
  derived and/or modified sequence opt3 from HOM-TES-85__Homo_sapiens__BAG37303
auggccagcuucagaaagcugacccucuccgagaaagugcccccuaaccacccaucuaggaagaaagucaauuuucuugacaugucacuggaugacaucauuauauacaaggaauuggagggcacaaacgcugaagaggagaaaaauaagcggcagaaccauaguaagaaagaaagcccgucccgccaacagucuaaggcacaccgacaucgucacagaagggauuauucgcggugccgcucaaauagcgaggaagggaaccaugacaaaaagcccagucagaaaccuuccggauucaagucuggucagcacccauuaaauggccaaccccugaucgagcaggaaaaguguagcgauaacuacgaggcccaggcggagaaaaaucaggggcaauccgaaggaaaccagcaccagucagagggcaauccugacaagagugaagagagccagggucaaccagaagagaaccaucacucugagagauccaggaaucaucuagaacggucacucagccagagugaucgcucucaggggcaacugaaacgacaccacccccaguaugagagaucccauggacaguacaagaggagccacggccagucggaacggucucauggccacuccgagcguucacaugggcacagugaacgcagccacggacauuccgagagaucucacggucauagcaaaaggucacggagucaaggcgaccuuguugauacucaguccgaccugauugcuacgcagcgagauuugaucgccacccagaaggaccucauugcaacacaacgcgaucugaucgccacucagagagaccugauagugacccagagggaccucguagcuacagagcgggauuuaaucaaccagagcgggcgcucucacggacaaucagaaagacaccagagguauaguaccggcaaaaauacuauuacaaccuga

SEQ ID NO: 1922 - RNA, 942 nt, Artificial Sequence
  derived and/or modified sequence opt4 from HOM-TES-85__Homo_sapiens__BAG37303
auggccagcuucagaaagcugacccugagcgagaaggugccccccaaccaccccagcagaaagaaggugaacuuccuggacaugagccuggacgacaucaucaucuacaaggagcuggagggcaccaacgccgaggaggagaagaacaagagacagaaccacagcaagaaggagagccccagcagacagcagagcaaggcccacagacacagacacagaagagacuacagcagaugcagaagcaacagcgaggagggcaaccacgacaagaagcccagccagaagcccagcggcuucaagagcggccagcacccccugaacggccagccccugaucgagcaggagaagugcagcgacaacuacgaggcccaggccgagaagaaccagggccagagcgagggcaaccagcaccagagcgagggcaaccccgacaagagcgaggagagccagggccagcccgaggagaaccaccacagcgagagaagcagaaaccaccuggagagaagccugagccagagcgacagaagccagggccagcugaagagacaccacccccaguacgagagaagccacggccaguacaagagaagccacggccagagcgagagaagccacggccacagcgagagaagccacggccacagcgagagaagccacggccacagcgagagaagccacggccacagcaagagaagcagaagccagggcgaccugguggacacccagagcgaccugaucgccacccagagagaccugaucgccacccagaaggaccugaucgccacccagagagaccugaucgccacccagagagaccugaucgugacccagagagaccugguggccaccgagagagaccugaucaaccagagcggcagaagccacggccagagcgagagacaccagagauacagcaccggcaagaacaccaucaccaccuga

SEQ ID NO: 1923 - RNA, 942 nt, Artificial Sequence
  derived and/or modified sequence opt5 from HOM-TES-85__Homo_sapiens__BAG37303
auggccagcuucagaaagcugacccucuccgagaaagugcccccuaaccacccgucucggaagaaagucaauuuucuggacaugagccuugaugacaucauuaucuacaaggaacuggagggcacaaacgcugaagaggagaaaaauaagcgccagaaccauuccaagaaagaaucucccagcagacaacaguccaaggcccaccggcaucgccacagacgggauuauucucgcugcagaagcaauuccgaggaagggaaccaugacaaaaagccuagccagaaacccucuggauucaaguccggccagcacccucucaaugggcaaccccugauugagcaggaaaaguguagcgauaacuacgaggcgcaggcugagaaaaaucagggacaaucugaaggcaaccagcaccaguccgaggggaauccugacaagagcgaagagucucagggacaaccggaagagaaccaucacuccgagcggagccgcaaucaucuugaaagaucccugucucagagcgaucggucccagggccaacucaaacgccaccacccccaguaugagagaagccauggccaguacaagcggucucacgggcaguccgaacgcagccauggacacucugagagaagccauggccacuccgaacggucucacgggcauagcgagagaucccacggacauagcaaacgcucucggucccaaggcgaccugguugauacgcagagcgaccugaucgccacccagagagaucucauugccacacagaaggaccugaucgcuacccaacgcgaucuuaucgccacacagcgggaccugauugugacccagagagaccucguggcuacagagcgcgaucugaucaaccagucugggcggucccacggacaaagcgaaagacaccagcgcuauuccaccggcaaaaauacgauuaccacauga

SEQ ID NO: 1924 - protein, 313 aa, Artificial Sequence
  HOM-TES-85__Homo_sapiens__Q9P127
MASFRKLTLSEKVPPNHPSRKKVNFLDMSLDDIIIYKELEGTNAEEEKNKRQNHSKKESPSRQQSKAHRHRHRRGYSRCRSNSEEGNHDKKPSQKPSGFKSGQHPLNGQPLIEQEKCSDNYEAQAEKNQGQSEGNQHQSEGNPDKSEESQGQPEENHHSERSRNHLERSLSQSDRSQGQLKRHHPQYERSHGQYKRSHGQSERSHGHSERSHGHSERSHGHSERSHGHSKRSRSQGDLVDTQSDLIATQRDLIATQKDLIATQRDLIATQRDLIVTQRDLVATERDLINQSGRSHGQSERHQRYSTGKNTITT

SEQ ID NO: 1925 - RNA, 942 nt, Artificial Sequence
  HOM-TES-85__Homo_sapiens__AAI28135
auggcuucguuucggaagcuaacgcuuucugaaaaagugccgccaaaucaucccagucggaaaaagguuaacuuccuagauaugucucuagacgacauuauaaucuauaaagaguuagaagggacaaaugcugaagaagaaaagaauaaaagacagaaccauaguaaaaaggaaucgccuucaagacagcaaucaaaagcucauagacaucgccaucggagaggcuacucaagaugcagaagcaacucugaggaaggaaaucaugauaaaaaaccaucccaaaaaccuucuggauucaagucuggacaacacccuuuaaaugggcagccuuuaauugagcaggagaagugcagugacaauuaugaggcccaagcagagaagaaucaaggccagucagaggggaaccagcaucaaucagaaggaaauccggacaaaucagaagaaucccagggccaaccagaagaaaaucaucauucugagcgaucccgaaaccacuuagagagaucucuuucucagucagacagaucucaagggcagcuaaagagacaucauccccaauaugagagaucucauggccaauacaagagaucucauggucaaucugagagaucucauggccacucagagagaucucauggucacucagagagaucucauggucacucagagagaucucauggucacucaaagagaucucguagccagggagaucuuguggacacucagagugaucucauagccacucagagagaucucauagccacucagaaagaucucauagccacucagagagaucucauagccacucagagagaucucauagucacucagagagaucucguggccacugagagagaucucauaaaucagucagggagaucucauggccaaucagaaagacaucagagauacucaacagguaaaaauacaauaacuacuuaa

SEQ ID NO: 1926 - RNA, 942 nt, Artificial Sequence
  derived and/or modified sequence opt1 from HOM-TES-85__Homo_sapiens__AAI28135
auggccagcuuccgcaagcugacccucuccgagaaggugcccccgaaccaccccagccggaagaaggucaacuuccuggacaugucccuggacgacaucaucaucuacaaggagcucgagggcaccaacgccgaggaggagaagaacaagcgccagaaccacagcaagaaggagucccccagccggcagcaguccaaggcgcaccgccaccggcaccgccggggguacagccgcugccgguccaacagcgaggagggcaaccacgacaagaagcccucccagaagccgagcggguucaaguccggccagcacccccugaacgggcagccccugaucgagcaggagaagugcagcgacaacuacgaggcccaggccgagaagaaccagggccaguccgagggcaaccagcaccagagcgaggggaaccccgacaaguccgaggagagccagggccagccggaggagaaccaccacuccgagcgcagccggaaccaccucgagcgcagccugucccagagcgaccggucccaggggcagcugaagcgccaccacccccaguacgagcggagccacggccaguacaagcgcucccacgggcagagcgagcggucccacggccacagcgagcgcucccacggccacagcgagcggucccacgggcacagcgagcgcucccacggccacagcaagcggucccgcagccagggggaccucguggacacgcaguccgaccugaucgccacccagcgcgaccugaucgccacccagaaggaccucaucgcgacccagcgggaccugaucgccacgcagcgcgaccugaucgugacccagcgggaccucgucgccaccgagcgcgaccugaucaaccagagcggccggucccacggccagagcgagcgccaccagcgguacagcaccgggaagaacacgaucaccaccuga

SEQ ID NO: 1927 - RNA, 942 nt, Artificial Sequence
  derived and/or modified sequence opt2 from HOM-TES-85__Homo_sapiens__AAI28135
auggccuccuuccgcaagcucacccucuccgagaaggucccccccaaccaccccucccgcaagaaggucaacuuccucgacaugucccucgacgacaucaucaucuacaaggagcucgagggcaccaacgccgaggaggagaagaacaagcgccagaaccacuccaagaaggagucccccucccgccagcaguccaaggcccaccgccaccgccaccgccgcggcuacucccgcugccgcuccaacuccgaggagggcaaccacgacaagaagcccucccagaagcccuccggcuucaaguccggccagcacccccucaacggccagccccucaucgagcaggagaagugcuccgacaacuacgaggcccaggccgagaagaaccagggccaguccgagggcaaccagcaccaguccgagggcaaccccgacaaguccgaggagucccagggccagcccgaggagaaccaccacuccgagcgcucccgcaaccaccucgagcgcucccucucccaguccgaccgcucccagggccagcucaagcgccaccacccccaguacgagcgcucccacggccaguacaagcgcucccacggccaguccgagcgcucccacggccacuccgagcgcucccacggccacuccgagcgcucccacggccacuccgagcgcucccacggccacuccaagcgcucccgcucccagggcgaccucgucgacacccaguccgaccucaucgccacccagcgcgaccucaucgccacccagaaggaccucaucgccacccagcgcgaccucaucgccacccagcgcgaccucaucgucacccagcgcgaccucgucgccaccgagcgcgaccucaucaaccaguccggccgcucccacggccaguccgagcgccaccagcgcuacuccaccggcaagaacaccaucaccaccuga

SEQ ID NO: 1928 - RNA, 942 nt, Artificial Sequence
  derived and/or modified sequence opt3 from HOM-TES-85__Homo_sapiens__AAI28135
auggccagcuucagaaagcugacccucuccgagaaagugcccccuaaccacccaucuaggaagaaagucaauuuucuugacaugucacuggaugacaucauuauauacaaggaauuggagggcacaaacgcugaagaggagaaaaauaagcggcagaaccauaguaagaaagaaagcccgucccgccaacagucuaaggcacaccgacaucgucacagaaggggguauucgcggugccgcucaaauagcgaggaaggaaaccaugauaaaaagcccagucagaaaccuuccgguuucaagucuggccagcacccauuaaaugggcaaccccugaucgagcaggaaaaguguagcgacaacuacgaggcccaggcggagaaaaaucagggacaauccgaaggcaaccagcaccagucagaggguaauccugauaagagugaagagagccaggggcaaccagaagagaaccaucacucugagagauccaggaaucaucuagaacggucacucagccagagugaccgcucucagggacaacugaaacgacaccacccccaguaugagagaucccauggccaguacaagaggagccacggccagucggaacggucucaugggcacuccgagcguucacauggacacagugaacgcagccacggucauuccgagagaucucacggccauagcaaaaggucacggagucaaggggaucuuguugacacucaguccgaucugauugcuacgcagcgagacuugaucgccacccagaaggaucucauugcaacacaacgcgaccugaucgccacucagagagaucugauagugacccagagggaccucguagcuacagagcgggacuuaaucaaccagagcggacgcucucacggccaaucagaaagacaccagagguauaguaccgguaaaaauacuauuacaaccuga

SEQ ID NO: 1929 - RNA, 942 nt, Artificial Sequence
  derived and/or modified sequence opt4 from HOM-TES-85__Homo_sapiens__AAI28135
auggccagcuucagaaagcugacccugagcgagaaggugccccccaaccaccccagcagaaagaaggugaacuuccuggacaugagccuggacgacaucaucaucuacaaggagcuggagggcaccaacgccgaggaggagaagaacaagagacagaaccacagcaagaaggagagccccagcagacagcagagcaaggcccacagacacagacacagaagaggcuacagcagaugcagaagcaacagcgaggagggcaaccacgacaagaagcccagccagaagcccagcggcuucaagagcggccagcacccccugaacggccagccccugaucgagcaggagaagugcagcgacaacuacgaggcccaggccgagaagaaccagggccagagcgagggcaaccagcaccagagcgagggcaaccccgacaagagcgaggagagccagggccagcccgaggagaaccaccacagcgagagaagcagaaaccaccuggagagaagccugagccagagcgacagaagccagggccagcugaagagacaccacccccaguacgagagaagccacggccaguacaagagaagccacggccagagcgagagaagccacggccacagcgagagaagccacggccacagcgagagaagccacggccacagcgagagaagccacggccacagcaagagaagcagaagccagggcgaccugguggacacccagagcgaccugaucgccacccagagagaccugaucgccacccagaaggaccugaucgccacccagagagaccugaucgccacccagagagaccugaucgugacccagagagaccugguggccaccgagagagaccugaucaaccagagcggcagaagccacggccagagcgagagacaccagagauacagcaccggcaagaacaccaucaccaccuga

SEQ ID NO: 1930 - RNA, 942 nt, Artificial Sequence
  derived and/or modified sequence opt5 from HOM-TES-85__Homo_sapiens__AAI28135
auggccagcuucagaaagcugacccucuccgagaaagugcccccuaaccacccgucucggaagaaagucaauuuucuggacaugagccuugaugacaucauuaucuacaaggaacuggagggcacaaacgcugaagaggagaaaaauaagcgccagaaccauuccaagaaagaaucucccagcagacaacaguccaaggcccaccggcaucgccacagacggggguauucucgcugcagaagcaauuccgaggaaggaaaccaugauaaaaagccuagccagaaacccucuggcuucaaguccgggcagcacccucucaauggacaaccccugauugagcaggaaaaguguagcgacaacuacgaggcgcaggcugagaaaaaucagggccaaucugaagggaaccagcaccaguccgagggaaauccugauaagagcgaagagucucagggccaaccggaagagaaccaucacuccgagcggagccgcaaucaucuugaaagaucccugucucagagcgaccggucccagggccaacucaaacgccaccacccccaguaugagagaagccaugggcaguacaagcggucucacggacaguccgaacgcagccauggccacucugagagaagccaugggcacuccgaacggucucacggacauagcgagagaucccacggccauagcaaacgcucucggucccaaggggaucugguugacacgcagagcgaucugaucgccacccagagagaccucauugccacacagaaggaucugaucgcuacccaacgcgaccuuaucgccacacagcgggaucugauugugacccagagagaccucguggcuacagagcgcgaccugaucaaccagucuggacggucccacggccaaagcgaaagacaccagcgcuauuccaccggcaaaaauacgauuaccacauga

SEQ ID NO: 1931 - protein, 127 aa, Artificial Sequence
  HPG1__Homo_sapiens__12543784
MIKKNLKKLGIEETYLNIIKAIYDRPTASIQKTENLSTKTGTSQEYHLSPLWFYIVLEILASTIRQEKNLKDIHTEKEEVKLSLFADAMILYLKKPNDSTRKLLELIKKIHSSCRIKINIHFAFCSQ

SEQ ID NO: 1932 - RNA, 384 nt, Artificial Sequence
  HPG1__Homo_sapiens__12543784
augauaaaaaaaaaucuuaaaaaacuggguauagaagaaacauaccuuaacauaauaaaagccauauaugacagacccacagcuaguauacaaaaaacugaaaaccuuuccacuaaaacuggaacaagccaagaauaccaccugucaccacugugguucuacauaguacuggaaauccuagcuagcacaaucagacaagagaaaaauuuaaaggacauccacacugaaaaagaagaagucaaauuauccuuguuugcugaugcuaugaucuuauauuugaaaaaaccuaaugacuccacaagaaaauuauuagaacugauaaaaaaaauucauucaaguugcaggauaaaaaucaauauacauuuugcauuuuguucacaauga

SEQ ID NO: 1933 - RNA, 384 nt, Artificial Sequence
  derived and/or modified sequence opt1 from HPG1__Homo_sapiens__12543784
augaucaagaagaaccugaagaagcucggcaucgaggagaccuaccugaacaucaucaaggccaucuacgaccgccccaccgccagcauccagaagacggagaaccuguccaccaagaccgggaccagccaggaguaccaccucuccccgcugugguucuacaucgugcuggagauccucgcgagcacgauccggcaggagaagaaccugaaggacauccacaccgagaaggaggaggucaagcugucccucuucgccgacgccaugauccuguaccugaagaagcccaacgacagcacccgcaagcuccuggagcugaucaagaagauccacuccagcugccggaucaagaucaacauccacuucgccuucugcucccaguga

SEQ ID NO: 1934 - RNA, 384 nt, Artificial Sequence
  derived and/or modified sequence opt2 from HPG1__Homo_sapiens__12543784
augaucaagaagaaccucaagaagcucggcaucgaggagaccuaccucaacaucaucaaggccaucuacgaccgccccaccgccuccauccagaagaccgagaaccucuccaccaagaccggcaccucccaggaguaccaccucuccccccucugguucuacaucguccucgagauccucgccuccaccauccgccaggagaagaaccucaaggacauccacaccgagaaggaggaggucaagcucucccucuucgccgacgccaugauccucuaccucaagaagcccaacgacuccacccgcaagcuccucgagcucaucaagaagauccacuccuccugccgcaucaagaucaacauccacuucgccuucugcucccaguga

SEQ ID NO: 1935 - RNA, 384 nt, Artificial Sequence
  derived and/or modified sequence opt3 from HPG1__Homo_sapiens__12543784
augaucaagaaaaaccugaagaaacucggcauugaggaaaccuaccuuaauauaaucaaggccauuuaugacagacccacagcuagcauccagaaaacugagaaccuguccacgaagaccgggacaucucaagaauaccacuugucaccuuuaugguucuauauugugcuggagauccuagcaaguacuauaaggcaggaaaagaaucucaaagauauccauaccgagaaggaggaagucaaacugagccuuuuugccgacgcgaugauucuguacuugaagaaaccaaacgauuccacacggaagcuccuggagcugaucaagaaaauucacucuucgugccgcaucaagauaaauauucauuucgcuuuuuguucacaguga

SEQ ID NO: 1936 - RNA, 384 nt, Artificial Sequence
  derived and/or modified sequence opt4 from HPG1__Homo_sapiens__12543784
augaucaagaagaaccugaagaagcugggcaucgaggagaccuaccugaacaucaucaaggccaucuacgacagacccaccgccagcauccagaagaccgagaaccugagcaccaagaccggcaccagccaggaguaccaccugagcccccugugguucuacaucgugcuggagauccuggccagcaccaucagacaggagaagaaccugaaggacauccacaccgagaaggaggaggugaagcugagccuguucgccgacgccaugauccuguaccugaagaagcccaacgacagcaccagaaagcugcuggagcugaucaagaagauccacagcagcugcagaaucaagaucaacauccacuucgccuucugcagccaguga

SEQ ID NO: 1937 - RNA, 384 nt, Artificial Sequence
  derived and/or modified sequence opt5 from HPG1__Homo_sapiens__12543784
augaucaagaaaaaccugaagaaacucggcauugaggaaaccuaccugaauaucauuaaggccaucuaugacagacccacagcuagcauucagaaaacggagaaccuuuccaccaagacagggaccucucaagaauaccaccugagcccucucugguucuauaucgugcuggagauccuugccuccacaauucggcaggaaaagaaucugaaagauauccauaccgagaaggaggaagucaaacucucucuguuugcggacgcuaugauucuguaccucaagaaaccgaacgauagcacacgcaagcugcuugagcugaucaagaaaauucacuccucuugcagaaucaagauuaauauccauuucgccuuuuguagccaguga

SEQ ID NO: 1938 - protein, 641 aa, Artificial Sequence
  HS71A__Homo_sapiens__P0DMV8
MAKAAAIGIDLGTTYSCVGVFQHGKVEIIANDQGNRTTPSYVAFTDTERLIGDAAKNQVALNPQNTVFDAKRLIGRKFGDPVVQSDMKHWPFQVINDGDKPKVQVSYKGETKAFYPEEISSMVLTKMKEIAEAYLGYPVTNAVITVPAYFNDSQRQATKDAGVIAGLNVLRIINEPTAAAIAYGLDRTGKGERNVLIFDLGGGTFDVSILTIDDGIFEVKATAGDTHLGGEDFDNRLVNHFVEEFKRKHKKDISQNKRAVRRLRTACERAKRTLSSSTQASLEIDSLFEGIDFYTSITRARFEELCSDLFRSTLEPVEKALRDAKLDKAQIHDLVLVGGSTRIPKVQKLLQDFFNGRDLNKSINPDEAVAYGAAVQAAILMGDKSENVQDLLLLDVAPLSLGLETAGGVMTALIKRNSTIPTKQTQIFTTYSDNQPGVLIQVYEGERAMTKDNNLLGRFELSGIPPAPRGVPQIEVTFDIDANGILNVTATDKSTGKANKITITNDKGRLSKEEIERMVQEAEKYKAEDEVQRERVSAKNALESYAFNMKSAVEDEGLKGKISEADKKKVLDKCQEVISWLDANTLAEKDEFEHKRKELEQVCNPIISGLYQGAGGPGPGGFGAQGPKGGSGSGPTIEEVD

SEQ ID NO: 1939 - RNA, 1926 nt, Artificial Sequence
  HS71A__Homo_sapiens__AAA63226
auggccaaagccgcggcgaucggcaucgaccugggcaccaccuacuccugcguggggguguuccaacacggcaagguggagaucaucgccaacgaccagggcaaccgcaccacccccagcuacguggccuucacggacaccgagcggcucaucggggaugcggccaagaaccagguggcgcugaacccgcagaacaccguguuugacgcgaagcgccugauuggccgcaaguucggcgacccgguggugcagucggacaugaagcacuggccuuuccaggugaucaacgacggagacaagcccaaggugcaggugagcuacaagggggagaccaaggcauucuaccccgaggagaucucguccauggugcugaccaagaugaaggagaucgccgaggcguaccugggcuacccggugaccaacgcggugaucaccgugccggccuacuucaacgacucgcagcgccaggccaccaaggaugcgggugugaucgcggggcucaacgugcugcggaucaucaacgagcccacggccgccgccaucgccuacggccuggacagaacgggcaagggggagcgcaacgugcucaucuuugaccugggcgggggcaccuucgacguguccauccugacgaucgacgacggcaucuucgaggugaaggccacggccggggacacccaccuggguggggaggacuuugacaacaggcuggugaaccacuucguggaggaguucaagagaaaacacaagaaggacaucagccagaacaagcgagccgugaggcggcugcgcaccgccugcgagagggccaagaggacccugucguccagcacccaggccagccuggagaucgacucccuguuugagggcaucgacuucuacacguccaucaccagggcgagguucgaggagcugugcuccgaccuguuccgaagcacccuggagcccguggagaaggcucugcgcgacgccaagcuggacaaggcccagauucacgaccugguccuggucgggggcuccacccgcauccccaaggugcagaagcugcugcaggacuucuucaacgggcgcgaccugaacaagagcaucaaccccgacgaggcuguggccuacggggcggcggugcaggcggccauccugaugggggacaaguccgagaacgugcaggaccugcugcugcuggacguggcuccccugucgcuggggcuggagacggccggaggcgugaugacugcccugaucaagcgcaacuccaccauccccaccaagcagacgcagaucuucaccaccuacuccgacaaccaacccggggugcugauccagguguacgagggcgagagggccaugacgaaagacaacaaucuguuggggcgcuucgagcugagcggcaucccuccggcccccaggggcgugccccagaucgaggugaccuucgacaucgaugccaacggcauccugaacgucacggccacggacaagagcaccggcaaggccaacaagaucaccaucaccaacgacaagggccgccugagcaaggaggagaucgagcgcauggugcaggaggcggagaaguacaaagcggaggacgaggugcagcgcgagagggugucagccaagaacgcccuggaguccuacgccuucaacaugaagagcgccguggaggaugaggggcucaagggcaagaucagcgaggccgacaagaagaaggugcuggacaagugucaagaggucaucucguggcuggacgccaacaccuuggccgagaaggacgaguuugagcacaagaggaaggagcuggagcagguguguaaccccaucaucagcggacuguaccagggugccgguggucccgggccugggggcuucggggcucagggucccaagggagggucugggucaggccccaccauugaggagguagauuag

SEQ ID NO: 1940 - RNA, 1926 nt, Artificial Sequence
  derived and/or modified sequence opt1 from HS71A__Homo_sapiens__AAA63226
auggccaaggccgcggccaucggcaucgaccuggggaccaccuacagcugcgugggcguguuccagcacgggaagguggagaucaucgccaacgaccagggcaaccgcacgacccccuccuacguggccuucaccgacaccgagcggcucaucggggacgccgcgaagaaccaggucgcccugaacccgcagaacacgguguucgacgccaagcgccugaucggccggaaguucggcgaccccgugguccagagcgacaugaagcacuggcccuuccaggugaucaacgacggggacaagcccaaggugcaggucuccuacaagggcgagaccaaggccuucuacccggaggagaucagcuccauggugcucaccaagaugaaggagaucgcggaggccuaccugggguaccccgugaccaacgccgucaucacggugcccgccuacuucaacgacagccagcgccaggccaccaaggacgcgggcgugaucgccgggcugaacguccuccggaucaucaacgagcccaccgccgccgccaucgcguacggccuggaccgcaccggcaagggggagcggaacgugcugaucuucgaccucggcgggggcacguucgacguguccauccugaccaucgacgacggcaucuucgaggucaaggccaccgccggggacacccaccugggcggggaggacuucgacaaccgccucgugaaccacuucguggaggaguucaagcggaagcacaagaaggacaucagccagaacaagcgcgccguccggcgccugcggacggccugcgagcgcgcgaagcggacccuguccagcuccacccaggccagccucgagaucgacucccuguucgagggcaucgacuucuacaccagcaucacgcgcgcccgguucgaggagcugugcuccgaccucuuccgcagcacccuggagccgguggagaaggcccugcgggacgccaagcucgacaaggcgcagauccacgaccuggugcuggucgggggcuccacccgcauccccaaggugcagaagcuccugcaggacuucuucaacggccgggaccugaacaagagcaucaaccccgacgaggccgucgccuacggggccgcggugcaggccgccauccucaugggcgacaaguccgagaacgugcaggaccugcugcuccuggacgucgcgccccugagccucgggcuggagaccgccggcggggugaugacggcccugaucaagcgcaacagcaccaucccgaccaagcagacccagaucuucacgaccuacuccgacaaccagcccggcgugcucauccaggucuacgagggcgagcgcgccaugaccaaggacaacaaccugcuggggcgguucgagcucagcggcaucccgcccgcgccccgcggggugccccagaucgaggugaccuucgacaucgacgccaacggcauccugaacgucacggccaccgacaaguccaccgggaaggccaacaagaucaccaucacgaacgacaagggccggcugagcaaggaggagaucgagcgcauggugcaggaggccgagaaguacaaggccgaggacgaggugcagcgggagcgcgucuccgccaagaacgcccucgagagcuacgcguucaacaugaaguccgccguggaggacgagggccugaaggggaagaucagcgaggccgacaagaagaaggugcuggacaagugccaggaggucaucuccuggcucgacgccaacacccuggcggagaaggacgaguucgagcacaagcggaaggagcuggagcaggucugcaaccccaucaucagcggccucuaccagggggccggcggccccgggccgggcggguucggcgcccaggggcccaagggcggcuccgggagcggccccaccaucgaggagguggacuga

SEQ ID NO: 1941 - RNA, 1926 nt, Artificial Sequence
  derived and/or modified sequence opt2 from HS71A__Homo_sapiens__AAA63226
auggccaaggccgccgccaucggcaucgaccucggcaccaccuacuccugcgucggcgucuuccagcacggcaaggucgagaucaucgccaacgaccagggcaaccgcaccacccccuccuacgucgccuucaccgacaccgagcgccucaucggcgacgccgccaagaaccaggucgcccucaacccccagaacaccgucuucgacgccaagcgccucaucggccgcaaguucggcgaccccgucguccaguccgacaugaagcacuggcccuuccaggucaucaacgacggcgacaagcccaagguccaggucuccuacaagggcgagaccaaggccuucuaccccgaggagaucuccuccaugguccucaccaagaugaaggagaucgccgaggccuaccucggcuaccccgucaccaacgccgucaucaccguccccgccuacuucaacgacucccagcgccaggccaccaaggacgccggcgucaucgccggccucaacguccuccgcaucaucaacgagcccaccgccgccgccaucgccuacggccucgaccgcaccggcaagggcgagcgcaacguccucaucuucgaccucggcggcggcaccuucgacgucuccauccucaccaucgacgacggcaucuucgaggucaaggccaccgccggcgacacccaccucggcggcgaggacuucgacaaccgccucgucaaccacuucgucgaggaguucaagcgcaagcacaagaaggacaucucccagaacaagcgcgccguccgccgccuccgcaccgccugcgagcgcgccaagcgcacccucuccuccuccacccaggccucccucgagaucgacucccucuucgagggcaucgacuucuacaccuccaucacccgcgcccgcuucgaggagcucugcuccgaccucuuccgcuccacccucgagcccgucgagaaggcccuccgcgacgccaagcucgacaaggcccagauccacgaccucguccucgucggcggcuccacccgcauccccaagguccagaagcuccuccaggacuucuucaacggccgcgaccucaacaaguccaucaaccccgacgaggccgucgccuacggcgccgccguccaggccgccauccucaugggcgacaaguccgagaacguccaggaccuccuccuccucgacgucgccccccucucccucggccucgagaccgccggcggcgucaugaccgcccucaucaagcgcaacuccaccauccccaccaagcagacccagaucuucaccaccuacuccgacaaccagcccggcguccucauccaggucuacgagggcgagcgcgccaugaccaaggacaacaaccuccucggccgcuucgagcucuccggcaucccccccgccccccgcggcgucccccagaucgaggucaccuucgacaucgacgccaacggcauccucaacgucaccgccaccgacaaguccaccggcaaggccaacaagaucaccaucaccaacgacaagggccgccucuccaaggaggagaucgagcgcaugguccaggaggccgagaaguacaaggccgaggacgagguccagcgcgagcgcgucuccgccaagaacgcccucgaguccuacgccuucaacaugaaguccgccgucgaggacgagggccucaagggcaagaucuccgaggccgacaagaagaagguccucgacaagugccaggaggucaucuccuggcucgacgccaacacccucgccgagaaggacgaguucgagcacaagcgcaaggagcucgagcaggucugcaaccccaucaucuccggccucuaccagggcgccggcggccccggccccggcggcuucggcgcccagggccccaagggcggcuccggcuccggccccaccaucgaggaggucgacuga

SEQ ID NO: 1942 - RNA, 1926 nt, Artificial Sequence
  derived and/or modified sequence opt3 from HS71A__Homo_sapiens__AAA63226
auggccaaggcugcagccaucggcauugaccuggggaccacauacagcugcgugggagucuuccagcacgguaaaguugagauaaucgcgaacgaucaaggcaauagaacuacgcccuccuauguggcuuuuaccgacacagaaaggcucauuggggaugccgcaaagaaccagguagcccuuaauccucagaacacuguguucgacgcuaaacggcugaucggacgcaaguuuggcgauccagucgugcagucugacaugaaacauuggccguuccaaguuauuaaugauggugacaagcccaaggugcaggucucauacaaaggggagaccaaggcauuuuauccugaagagaucaguagcaugguguugacaaaaaugaaggaaauagccgaggcuuacuuaggauauccaguaaccaacgccguuaucacugugcccgcguacuucaaugauucccagcgacaggcaacaaaagacgccggcgucauugcuggccugaacgugcuacguaucauuaaugagccuaccgccgcagcuaucgccuaugggcucgauagaacgggaaagggugaaaggaacgugcugauauuugaccuuggcgggggaacuuucgaugucucuauucugaccaucgacgacggcauuuuugagguuaaggcgacagccggugauacucaccuugggggagaagacuucgauaaucggcucgugaaccauuuuguagaggaguucaaacgcaagcacaaaaaggacaucucgcaaaauaaaagagcagugaggcggcugcgcaccgcuugugaacgagccaagagaacacugucaagcaguacccaggcuucccucgagaucgauucuuuauuugaaggcauugacuucuacacgagcauaacuagggcccgguucgaggaacugugcuccgaucuuuuucguucaacauuggagccagucgagaaagcacugcgcgacgccaagcuagauaaggcucagauccaugaccucgugcugguuggcgggaguacccggauucccaaagugcagaaguugcugcaagauuucuuuaacggaagggacuugaauaaaagcaucaacccugacgaagcggucgcauacggugccgcugugcaggccgcaauacucaugggcgauaagucugagaacguacaggaccuguuacugcucgauguugccccacuuucccugggguuggaaacugcuggaggcgugaugacagcccuaauuaaaagaaauucaaccaucccgacgaagcaaacccagaucuucacaacuuauagcgacaaccagcccgguguccugauucagguguacgagggggaacgagcaaugaccaaggauaauaaccuccugggccgcuuugagcuuaguggaaucccuccagcgcccagaggcgucccucaaauugaggugacauucgacauagaugcuaaugggauccugaacguuacugccaccgacaaaucuacaggaaaggcaaauaaaauuaccaucacuaacgauaaggguagguuguccaaagaagagaucgaacggauggugcaggaggccgaaaaguauaaggcugaggacgagguacagcgcgaaagagucagcgccaaaaaugcacucgagucguacgcuuuuaacaugaagucugccguggaagaugagggccugaaagggaagauuuccgaggcggacaaaaagaagguuuuagauaaaugucaggaagugauaucauggcuggacgccaauacgcuagcugagaaggacgaguucgaacacaaaaggaaggaacucgagcaagucugcaacccaaucauuaguggacuguaucagggcgccggugggcccggcccgggaggcuuuggggcacagggaccuaaagguggcagcggguccggacccacaaucgaggaaguggauuga

SEQ ID NO: 1943 - RNA, 1926 nt, Artificial Sequence
  derived and/or modified sequence opt4 from HS71A__Homo_sapiens__AAA63226
auggccaaggccgccgccaucggcaucgaccugggcaccaccuacagcugcgugggcguguuccagcacggcaagguggagaucaucgccaacgaccagggcaacagaaccacccccagcuacguggccuucaccgacaccgagagacugaucggcgacgccgccaagaaccagguggcccugaacccccagaacaccguguucgacgccaagagacugaucggcagaaaguucggcgaccccguggugcagagcgacaugaagcacuggcccuuccaggugaucaacgacggcgacaagcccaaggugcaggugagcuacaagggcgagaccaaggccuucuaccccgaggagaucagcagcauggugcugaccaagaugaaggagaucgccgaggccuaccugggcuaccccgugaccaacgccgugaucaccgugcccgccuacuucaacgacagccagagacaggccaccaaggacgccggcgugaucgccggccugaacgugcugagaaucaucaacgagcccaccgccgccgccaucgccuacggccuggacagaaccggcaagggcgagagaaacgugcugaucuucgaccugggcggcggcaccuucgacgugagcauccugaccaucgacgacggcaucuucgaggugaaggccaccgccggcgacacccaccugggcggcgaggacuucgacaacagacuggugaaccacuucguggaggaguucaagagaaagcacaagaaggacaucagccagaacaagagagccgugagaagacugagaaccgccugcgagagagccaagagaacccugagcagcagcacccaggccagccuggagaucgacagccuguucgagggcaucgacuucuacaccagcaucaccagagccagauucgaggagcugugcagcgaccuguucagaagcacccuggagcccguggagaaggcccugagagacgccaagcuggacaaggcccagauccacgaccuggugcuggugggcggcagcaccagaauccccaaggugcagaagcugcugcaggacuucuucaacggcagagaccugaacaagagcaucaaccccgacgaggccguggccuacggcgccgccgugcaggccgccauccugaugggcgacaagagcgagaacgugcaggaccugcugcugcuggacguggccccccugagccugggccuggagaccgccggcggcgugaugaccgcccugaucaagagaaacagcaccauccccaccaagcagacccagaucuucaccaccuacagcgacaaccagcccggcgugcugauccagguguacgagggcgagagagccaugaccaaggacaacaaccugcugggcagauucgagcugagcggcaucccccccgcccccagaggcgugccccagaucgaggugaccuucgacaucgacgccaacggcauccugaacgugaccgccaccgacaagagcaccggcaaggccaacaagaucaccaucaccaacgacaagggcagacugagcaaggaggagaucgagagaauggugcaggaggccgagaaguacaaggccgaggacgaggugcagagagagagagugagcgccaagaacgcccuggagagcuacgccuucaacaugaagagcgccguggaggacgagggccugaagggcaagaucagcgaggccgacaagaagaaggugcuggacaagugccaggaggugaucagcuggcuggacgccaacacccuggccgagaaggacgaguucgagcacaagagaaaggagcuggagcaggugugcaaccccaucaucagcggccuguaccagggcgccggcggccccggccccggcggcuucggcgcccagggccccaagggcggcagcggcagcggccccaccaucgaggagguggacuga

SEQ ID NO: 1944 - RNA, 1926 nt, Artificial Sequence
  derived and/or modified sequence opt5 from HS71A__Homo_sapiens__AAA63226
auggccaaggcugccgcgaucggcauugaccuggggaccacauacagcugcgugggagucuuccagcacggcaaaguugagaucauugcuaacgaucaagggaauagaacgacccccuccuauguggccuuuacagacaccgaacggcucaucggagaugccgcuaagaaccagguggcccugaauccucagaacacagucuucgacgcuaaacgccuuauuggcagaaaguuuggggauccggugguucagucugacaugaaacauuggcccuuccaagugaucaaugauggagacaagccuaagguccaggugagcuacaaaggcgagaccaaggccuuuuaucccgaagagaucuccucuaugguucugacaaaaaugaaggaaauugcggaggccuaccucggcuauccugugaccaacgcugucaucacggugcccgccuacuucaaugauagccagcggcaggcuaccaaagacgccggggugauugcgggacugaacguccuucgcaucauuaaugagccuacagccgcugccaucgcuuauggccuggauagaaccgggaagggagaacggaacguucucauuuuugaccugggcgggggaacauucgauguguccauccugaccaucgacgacggcauuuuugaggugaaggccacggccggcgauacacaccucgggggagaagacuucgauaaucgccuggucaaccauuuuguggaggaguucaaaagaaagcacaaaaaggacaucucucaaaauaaacgggcuguucgcagacuucggaccgcgugugaacgcgccaagagaacacugagcuccagcacccaggcuucucucgagauugauucccuguuugaaggcaucgacuucuacaccagcauuacacgggcccgcuucgaggaacuuugcucugaucuguuuagauccacgcucgagccgguggagaaagcccugcgggacgcuaagcuggauaaggcccagauccaugaccucguccugguugggggaagcaccagaauccccaaagugcagaaacuucugcaagauuucuuuaacggccgcgaccucaauaagucuauuaacccugacgaagcgguggcuuacggggccgccguccaggcugccauccugaugggagauaaguccgagaacgugcaggaccuucugcuccuggaugucgcuccccugagccucggccuggaaacagccggcggggugaugaccgcgcuuauuaaacggaauagcacaaucccuaccaagcaaacgcagauuuucacaaccuauucugacaaccagcccggaguucugauccagguguacgagggcgaaagagccaugaccaaggauaauaaccuccuggggcgcuuugagcuuagcggaaucccgccugcuccccggggcgucccucaaauugaggugacauucgacaucgaugccaaugggauucugaacguuaccgcuacagacaaauccacgggcaaggccaauaaaaucaccauuacaaacgauaagggaagacucagcaaagaagagaucgaacgcauggugcaggaggcggaaaaguauaaggccgaggacgagguccagcgggaaagagugucugcuaaaaaugcccuggaguccuacgcuuuuaacaugaaguccgccguggaagaugagggccugaaagggaagauuucugaggccgacaaaaagaagguucucgauaaaugucaggaagucaucagcuggcuggacgcuaauacccuugcggagaaggacgaguucgaacacaaacgcaaggaacuggagcaagugugcaaccccaucauuuccggacucuaucagggcgccgggggacccggcccugggggcuuuggagcucagggcccgaaagggggaucuggcagcgggcccacaaucgaggaaguggauuga

SEQ ID NO: 1945 - protein, 641 aa, Artificial Sequence; identical to SEQ ID NO: 1938
  HS71B__Homo_sapiens__P0DMV9

SEQ ID NO: 1946 - RNA, 1926 nt, Artificial Sequence
  HS71B__Homo_sapiens__AAA63227
auggccaaagccgcggcgaucggcaucgaccugggcaccaccuacuccugcguggggguguuccaacacggcaagguggagaucaucgccaacgaccagggcaaccgcaccacccccagcuacguggccuucacggacaccgagcggcucaucggggaugcggccaagaaccagguggcgcugaacccgcagaacaccguguuugacgcgaagcgccugaucggccgcaaguucggcgacccgguggugcagucggacaugaagcacuggccuuuccaggugaucaacgacggagacaagcccaaggugcaggugagcuacaagggggagaccaaggcauucuaccccgaggagaucucguccauggugcugaccaagaugaaggagaucgccgaggcguaccugggcuacccggugaccaacgcggugaucaccgugccggccuacuucaacgacucgcagcgccaggccaccaaggaugcgggugugaucgcggggcucaacgugcugcggaucaucaacgagcccacggccgccgccaucgccuacggccuggacagaacgggcaagggggagcgcaacguccugaucuuugaccugggcgggggcaccuucgacguguccauccugacgaucgacgacggcaucuucgaggugaaggccacggccggggacacccaccuggguggggaggacuuugacaacaggcuggugaaccacuucguggaggaguucaagagaaaacacaagaaggacaucagccagaacaagcgagccgugaggcggcugcgcaccgccugcgagagggccaagaggacccugucguccagcacccaggccagccuggagaucgacucccuguuugagggcaucgacuucuacacguccaucaccagggcgagguucgaggagcugugcuccgaccuguuccgaagcacccuggagcccguggagaaggcucugcgcgacgccaagcuggacaaggcccagauucacgaccugguccuggucgggggcuccacccgcauccccaaggugcagaagcugcugcaagacuucuucaacgggcgcgaccugaacaagagcaucaaccccgacgaggcuguggccuacggggcggcggugcaggcggccauccugaugggggacaaguccgagaacgugcaggaccugcugcugcuggacguggcuccccugucgcuggggcuggagacggccggaggcgugaugacugcccugaucaagcgcaacuccaccauccccaccaagcagacgcagaucuucaccaccuacuccgacaaccaacccggggugcugauccagguguacgagggcgagagggccaugacgaaagacaacaaucuguuggggcgcuucgagcugagcggcaucccuccggcccccaggggcgugccccagaucgaggugaccuucgacaucgaugccaacggcauccugaacgucacggccacggacaagagcaccggcaaggccaacaagaucaccaucaccaacgacaagggccgccugagcaaggaggagaucgagcgcauggugcaggaggcggagaaguacaaagcggaggacgaggugcagcgcgagagggugucagccaagaacgcccuggaguccuacgccuucaacaugaagagcgccguggaggaugaggggcucaagggcaagaucagcgaggccgacaagaagaagguucuggacaagugucaagaggucaucucguggcuggacgccaacaccuuggccgagaaggacgaguuugagcacaagaggaaggagcuggagcagguguguaaccccaucaucagcggacuguaccagggugccgguggucccgggccuggcggcuucggggcucagggucccaagggagggucugggucaggcccuaccauugaggagguggauuag

SEQ ID NO: 1947 - RNA, 1926 nt, Artificial Sequence; identical to SEQ ID NO: 1940
  derived and/or modified sequence opt1 from HS71B__Homo_sapiens__AAA63227

SEQ ID NO: 1948 - RNA, 1926 nt, Artificial Sequence; identical to SEQ ID NO: 1941
  derived and/or modified sequence opt2 from HS71B__Homo_sapiens__AAA63227

SEQ ID NO: 1949 - RNA, 1926 nt, Artificial Sequence; identical to SEQ ID NO: 1942
  derived and/or modified sequence opt3 from HS71B__Homo_sapiens__AAA63227

SEQ ID NO: 1950 - RNA, 1926 nt, Artificial Sequence; identical to SEQ ID NO: 1943
  derived and/or modified sequence opt4 from HS71B__Homo_sapiens__AAA63227

SEQ ID NO: 1951 - RNA, 1926 nt, Artificial Sequence; identical to SEQ ID NO: 1944
  derived and/or modified sequence opt5 from HS71B__Homo_sapiens__AAA63227

SEQ ID NO: 1952 - protein, 208 aa, Artificial Sequence
  HST-2__Homo_sapiens__P10767
MALGQKLFITMSRGAGRLQGTLWALVFLGILVGMVVPSPAGTRANNTLLDSRGWGTLLSRSRAGLAGEIAGVNWESGYLVGIKRQRRLYCNVGIGFHLQVLPDGRISGTHEENPYSLLEISTVERGVVSLFGVRSALFVAMNSKGRLYATPSFQEECKFRETLLPNNYNAYESDLYQGTYIALSKYGRVKRGSKVSPIMTVTHFLPRI

SEQ ID NO: 1953 - RNA, 627 nt, Artificial Sequence
  HST-2__Homo_sapiens__AAI21098
auggcccugggacagaaacuguucaucacuaugucccggggagcaggacgucugcagggcacgcugugggcucucgucuuccuaggcauccuagugggcaugguggugcccucgccugcaggcacccgugccaacaacacgcugcuggacucgaggggcuggggcacccugcuguccaggucucgcgcggggcuagcuggagagauugccggggugaacugggaaaguggcuauuugguggggaucaagcggcagcggaggcucuacugcaacgugggcaucggcuuucaccuccaggugcuccccgacggccggaucagcggaacccacgaggagaaccccuacagccugcuggaaauuuccaccguggagcgaggcguggugagucucuuuggagugagaagugcccucuucgucgccaugaacaguaaaggaagauuguacgcaacgcccagcuuccaagaagaaugcaaguucagagaaacccuccugcccaacaauuacaaugccuacgagucagacuuguaccaagggaccuacauugcccugagcaaauacggacggguaaagcggggcagcaagguguccccgaucaugacugucacucauuuccuucccaggaucuaa

SEQ ID NO: 1954 - RNA, 627 nt, Artificial Sequence
  derived and/or modified sequence opt1 from HST-2__Homo_sapiens__AAI21098
auggcccugggccagaagcuguucaucaccaugagccgcggggccggccggcugcaggggacccugugggcgcucguguuccugggcauccuggucgggaugguggugcccuccccggccggcacgcgcgccaacaacacccuccuggacagccggggcugggggacccugcucucccgcagccgggccggccuggccggggagaucgcgggcgucaacugggaguccggguaccuggugggcaucaagcgccagcggcgccucuacugcaacgugggcaucggguuccaccuccagguccugcccgacggccggaucagcgggacccacgaggagaaccccuacucccuccuggagaucagcacgguggagcgcggcguggucucccuguucggcgugcggagcgcccucuucguggccaugaacuccaaggggcgccuguacgccacccccagcuuccaggaggagugcaaguuccgggagacccugcucccgaacaacuacaacgcguacgaguccgaccuguaccagggcaccuacaucgcccugagcaaguacgggcgcgucaagcggggcuccaaggugagccccaucaugacggugacccacuuccucccccgcaucuga

SEQ ID NO: 1955 - RNA, 627 nt, Artificial Sequence
  derived and/or modified sequence opt2 from HST-2__Homo_sapiens__AAI21098
auggcccucggccagaagcucuucaucaccaugucccgcggcgccggccgccuccagggcacccucugggcccucgucuuccucggcauccucgucggcauggucguccccucccccgccggcacccgcgccaacaacacccuccucgacucccgcggcuggggcacccuccucucccgcucccgcgccggccucgccggcgagaucgccggcgucaacugggaguccggcuaccucgucggcaucaagcgccagcgccgccucuacugcaacgucggcaucggcuuccaccuccagguccuccccgacggccgcaucuccggcacccacgaggagaaccccuacucccuccucgagaucuccaccgucgagcgcggcgucgucucccucuucggcguccgcuccgcccucuucgucgccaugaacuccaagggccgccucuacgccacccccuccuuccaggaggagugcaaguuccgcgagacccuccuccccaacaacuacaacgccuacgaguccgaccucuaccagggcaccuacaucgcccucuccaaguacggccgcgucaagcgcggcuccaaggucucccccaucaugaccgucacccacuuccucccccgcaucuga

SEQ ID NO: 1956 - RNA, 627 nt, Artificial Sequence
  derived and/or modified sequence opt3 from HST-2__Homo_sapiens__AAI21098
auggcccugggccagaagcuguucaucaccaugagcagaggggcuggaaggcuucaagguacacugugggcauugguguuuuuaggcauucuggucgggaugguugugcccuccccugccggaacucgggcgaacaauacgcuacucgacucucgcggcugggguacccugcuuucacgaagucgugcugggcuggccggagagauagcaggcguaaacugggaaagcggcuacuugguggggaucaaaagacagaggcggcucuauugcaaugucggaauugguuuccaccuccaggugcugccagauggccgcaucuccgggacacaugaggaaaacccguacucucucuuagagauuucgacuguugaaagaggaguggucucacuguuuggcgugaggagcgcccuuuucguagcuaugaauaguaagggucgguuguaugcaacccccuccuuucaggaggaguguaaauuccgcgaaacacugcuaccuaacaauuacaacgccuaugagucugaccucuaccaagggaccuauaucgcucugagcaaguacggacgaguuaaaagaggcuccaaggugucaccaauaaugacugucacacacuuucuucccaggaucuga

SEQ ID NO: 1957 - RNA, 627 nt, Artificial Sequence
  derived and/or modified sequence opt4 from HST-2__Homo_sapiens__AAI21098
auggcccugggccagaagcuguucaucaccaugagcagaggcgccggcagacugcagggcacccugugggcccugguguuccugggcauccuggugggcaugguggugcccagccccgccggcaccagagccaacaacacccugcuggacagcagaggcuggggcacccugcugagcagaagcagagccggccuggccggcgagaucgccggcgugaacugggagagcggcuaccuggugggcaucaagagacagagaagacuguacugcaacgugggcaucggcuuccaccugcaggugcugcccgacggcagaaucagcggcacccacgaggagaaccccuacagccugcuggagaucagcaccguggagagaggcguggugagccuguucggcgugagaagcgcccuguucguggccaugaacagcaagggcagacuguacgccacccccagcuuccaggaggagugcaaguucagagagacccugcugcccaacaacuacaacgccuacgagagcgaccuguaccagggcaccuacaucgcccugagcaaguacggcagagugaagagaggcagcaaggugagccccaucaugaccgugacccacuuccugcccagaaucuga

SEQ ID NO: 1958 - RNA, 627 nt, Artificial Sequence
  derived and/or modified sequence opt5 from HST-2__Homo_sapiens__AAI21098
auggcccugggccagaaacucuucaucaccaugagcagaggggcuggacggcugcaaggcacacuuugggcccugguguuucucgggauucuggucggaaugguugugcccuccccugcgggcacgcgcgcuaacaauacccuucuggacucuagaggguggggaacacuccugagccggucccgcgccggccuggccggcgagaucgcuggggugaacugggaaucuggauaccucgucggcauuaagagacagcggcgccuguauugcaauguggggaucggauuccaccuucagguucugccggauggcagaauuagcgggacccaugaggaaaaccccuacucccuccuggagaucucuacaguggaacggggagucgugagccuuuuuggcguucgcuccgcccuguucguggcuaugaauagcaagggcagacucuaugccaccccuucuuuucaggaggaguguaaauuccgggaaacacugcugcccaacaauuacaacgcguaugaguccgaccucuaccaagggaccuauaucgcccugagcaaguacggacgcgucaaaagaggcucuaagguguccccuauuaugacggugacccacuuucuuccccggaucuga

SEQ ID NO: 1959 - protein, 523 aa, Artificial Sequence
  hTERT__Homo_sapiens__O94807
MPRAPRCRAVRSLLRSHYREVLPLATFVRRLGPQGWRLVQRGDPAAFRALVAQCLVCVPWDARPPPAAPSFRQVSCLKELVARVLQRLCERGAKNVLAFGFALLDGARGGPPEAFTTSVRSYLPNTVTDALRGSGAWGLLLRRVGDDVLVHLLARCALFVLVAPSCAYQVCGPPLYQLGAATQARPPPHASGPRRRLGCERAWNHSVREAGVPLGLPAPGARRRGGSASRSLPLPKRPRRGAAPEPERTPVGQGSWAHPGRTRGPSDRGFCVVSPARPAEEATSLEGALSGTRHSHPSVGRQHHAGPPSTSRPPRPWDTPCPPVYAETKHFLYSSGDKEQLRPSFLLSSLRPILTGARRLVETIFLGSSPGCQGLPAGCPACPSATGKCGPCFWSCLGTTRSAPTGCSSRRTARCELRSPQQPVSVPGRSPRALWRPPRRRTQTPVAWCSCSASTAPLAGVRLRAGLPAPAGAPRPLGLQAQRRRFLRNTKKFISLGKHAKLSLQELTWKMSVRDCAWLRRSP

SEQ ID NO: 1960 - RNA, 1569 nt, Artificial Sequence
  hTERT__Homo_sapiens__BAA74724
augccgcgcgcuccccgcugccgagccgugcgcucccugcugcgcagccacuaccgcgaggugcugccgcuggccacguucgugcggcgccuggggccccagggcuggcggcuggugcagcgcggggacccggcggcuuuccgcgcgcugguggcccagugccuggugugcgugcccugggacgcacggccgccccccgccgcccccuccuuccgccagguguccugccugaaggagcugguggcccgagugcugcagaggcugugcgagcgcggcgcgaagaacgugcuggccuucggcuucgcgcugcuggacggggcccgcgggggcccccccgaggccuucaccaccagcgugcgcagcuaccugcccaacacggugaccgacgcacugcgggggagcggggcgugggggcugcuguugcgccgcgugggcgacgacgugcugguucaccugcuggcacgcugcgcgcucuuugugcugguggcucccagcugcgccuaccaggugugcgggccgccgcuguaccagcucggcgcugccacucaggcccggcccccgccacacgcuaguggaccccgaaggcgucugggaugcgaacgggccuggaaccauagcgucagggaggccggggucccccugggccugccagccccgggugcgaggaggcgcgggggcagugccagccgaagucugccguugcccaagaggcccaggcguggcgcugccccugagccggagcggacgcccguugggcagggguccugggcccacccgggcaggacgcguggaccgagugaccgugguuucuguguggugucaccugccagacccgccgaagaagccaccucuuuggagggugcgcucucuggcacgcgccacucccacccauccgugggccgccagcaccacgcgggccccccauccacaucgcggccaccacgucccugggacacgccuugucccccgguguacgccgagaccaagcacuuccucuacuccucaggcgacaaggagcagcugcggcccuccuuccuacucagcucucugaggcccauccugacuggcgcucggaggcucguggagaccaucuuucuggguuccagcccuggaugccagggacuccccgcagguugccccgccugccccagcgcuacuggcaaaugcggccccuguuucuggagcugcuugggaaccacgcgcagugccccuacggggugcuccucaagacgcacugcccgcugcgagcugcggucaccccagcagccggugucugugcccgggagaagccccagggcucuguggcggcccccgaggaggaggacacagacccccgucgccuggugcagcugcuccgccagcacagcaccccuggcagguguacggcuucgugcgggccugccugcgccggcuggugcccccaggccucuggggcuccaggcacaacgacgccgcuuccucaggaacaccaagaaguucaucucccuggggaagcaugccaagcucucgcugcaggagcugacguggaagaugagcgugcgggacugcgcuuggcugcgcaggagccca

SEQ ID NO: 1961 - RNA, 1569 nt, Artificial Sequence
  derived and/or modified sequence opt1 from hTERT__Homo_sapiens__BAA74724
augccccgcgccccgcggugccgcgccgugcggagccugcuccgcucccacuaccgggagguccugccccuggcgaccuucgugcgccggcucggcccccagggguggcgccuggugcagcggggcgaccccgccgccuuccgcgcccuggucgcccagugccucgugugcgugccgugggacgcgcggcccccgcccgccgcccccagcuuccgccaggucuccugccugaaggagcugguggcccgggugcuccagcgccugugcgagcgcggggcgaagaacguccuggccuucggcuucgcccuccuggacggggcccggggcggcccgcccgaggccuucaccacgagcgugcgguccuaccugcccaacaccgugaccgacgcgcuccgcgggagcggcgccugggggcugcugcuccggcgcgucggcgacgacgugcuggugcaccuccucgcccggugcgcccuguucguccugguggcccccuccugcgcguaccaggugugcgggccgccccucuaccagcugggcgccgccacccaggcccgcccgccgccccacgccagcggcccccgccggcgccuggggugcgagcgggcguggaaccacuccguccgcgaggccggcgugccccuggggcugcccgcccccggcgcccggcgccggggcgggagcgccucccgcagccugccccuccccaagcggccccgccggggcgcggcccccgagcccgagcgcacgcccguggggcagggcuccugggcccacccggggcggacccgcggccccagcgaccggggcuucugcgucgugucccccgcccgcccggcggaggaggccaccagccuggagggggcccuguccggcacccggcacagccaccccuccguggggcgccagcaccacgccggcccgcccagcacgagccggccgccccgccccugggacacccccugcccgcccgucuacgccgagaccaagcacuuccucuacuccagcggggacaaggagcagcugcgccccuccuuccugcucagcucccugcggcccauccugaccggcgcgcgccggcucguggagacgaucuuccugggcagcucccccgggugccagggccugcccgccgggugccccgccugccccagcgccaccggcaagugcgggccgugcuucugguccugccucggcaccacccgcagcgcccccacgggcugcuccagccggcgcaccgcgcggugcgagcugcgcagcccccagcagcccgucuccgugccggggcggagcccccgcgcccuguggcggccgccccgccggcgcacccagacccccguggccuggugcuccugcuccgccagcacggcgccccucgccggcguccggcugcgcgccgggcugcccgccccggccggcgcgccccggccccucggccugcaggcccagcgccggcgcuuccugcggaacaccaagaaguucaucucccuggggaagcacgccaagcucagccugcaggagcugaccuggaagaugagcgugcgcgacugcgccuggcuccgccgguccccc

SEQ ID NO: 1962 - RNA, 1569 nt, Artificial Sequence
  derived and/or modified sequence opt2 from hTERT__Homo_sapiens__BAA74724
augccccgcgccccccgcugccgcgccguccgcucccuccuccgcucccacuaccgcgagguccucccccucgccaccuucguccgccgccucggcccccagggcuggcgccucguccagcgcggcgaccccgccgccuuccgcgcccucgucgcccagugccucgucugcguccccugggacgcccgccccccccccgccgcccccuccuuccgccaggucuccugccucaaggagcucgucgcccgcguccuccagcgccucugcgagcgcggcgccaagaacguccucgccuucggcuucgcccuccucgacggcgcccgcggcggcccccccgaggccuucaccaccuccguccgcuccuaccuccccaacaccgucaccgacgcccuccgcggcuccggcgccuggggccuccuccuccgccgcgucggcgacgacguccucguccaccuccucgcccgcugcgcccucuucguccucgucgcccccuccugcgccuaccaggucugcggccccccccucuaccagcucggcgccgccacccaggcccgcccccccccccacgccuccggcccccgccgccgccucggcugcgagcgcgccuggaaccacuccguccgcgaggccggcgucccccucggccuccccgcccccggcgcccgccgccgcggcggcuccgccucccgcucccucccccuccccaagcgcccccgccgcggcgccgcccccgagcccgagcgcacccccgucggccagggcuccugggcccaccccggccgcacccgcggccccuccgaccgcggcuucugcgucgucucccccgcccgccccgccgaggaggccaccucccucgagggcgcccucuccggcacccgccacucccaccccuccgucggccgccagcaccacgccggcccccccuccaccucccgccccccccgccccugggacacccccugcccccccgucuacgccgagaccaagcacuuccucuacuccuccggcgacaaggagcagcuccgccccuccuuccuccucuccucccuccgccccauccucaccggcgcccgccgccucgucgagaccaucuuccucggcuccucccccggcugccagggccuccccgccggcugccccgccugccccuccgccaccggcaagugcggccccugcuucugguccugccucggcaccacccgcuccgcccccaccggcugcuccucccgccgcaccgcccgcugcgagcuccgcuccccccagcagcccgucuccguccccggccgcuccccccgcgcccucuggcgccccccccgccgccgcacccagacccccgucgccuggugcuccugcuccgccuccaccgccccccucgccggcguccgccuccgcgccggccuccccgcccccgccggcgccccccgcccccucggccuccaggcccagcgccgccgcuuccuccgcaacaccaagaaguucaucucccucggcaagcacgccaagcucucccuccaggagcucaccuggaagauguccguccgcgacugcgccuggcuccgccgcuccccc

SEQ ID NO: 1963 - RNA, 1569 nt, Artificial Sequence
  derived and/or modified sequence opt3 from hTERT__Homo_sapiens__BAA74724
augcccagagccccuaggugccgggcugugcgcagccugcuccgaucccacuaccgugagguccuuccacuggcaaccuucguuagaagguugggcccgcagggguggcgguuagugcaacgcggagaccccgccgcguuuagagcucugguagcccagugucuagugugcgucccuugggaugcaaggccacccccugccgcuccaucuuuccgccaggugucaugucucaaggaacugguugcacgggugcuucagcgacugugcgagagaggugccaaaaacgucuuggcuuuuggcuucgcccuccuggacggggcgaggggaggucccccugaagcauuuacaacgagugugcggagcuaucugccaaauacuguaaccgaugcccuccguggcuccggggcuuggggauuacugcuucgcagaguuggcgacgauguguugguccaucugcuagccaggugugcacucuucgugcugguggcuccgucuugcgccuaccaagucugugggcccccucuuuaucagcugggcgcggccacacaggcacggccacccccucacgcuucgggaccacgacgcagauuggguugcgagagggccuggaaccauucaguucgggaagcuggcgugccccucgggcugccggccccuggagcacgcagaaggggcgguagcgccagucguuccuuaccccugccaaagcggccucgaagaggggcugcgcccgagccagagaggacucccguaggacagggcucuugggcacacccuggccgcacccgggggccaagcgacagaggauuuuguguggucuccccggccaggcccgcugaagaggccacaucacucgaaggugcacuuaguggcacccgccauagccacccuucuguggggcgacaacaccaugccggaccacccuccacuucacggccuccacgucccugggauacaccgugcccuccaguuuacgcugagaccaaacacuuccuguauagcaguggcgacaaggagcaguugagacccucuuuucuacuguccagccucaggccuauccugacgggugcccgccggcuuguggaaacuauuuuccuggggucgucucccggcugucagggauugccagcaggcugcccugcgugccccuccgcuaccgggaaauguggaccaugcuuuuggucaugucucgguacaacuagaagugccccgaccggcugcagcuccaggcgaacagcacgcugugagcugcggucuccucagcaacccgucagcgugccagggagaucacccagggccuuauggcguccuccacgccggagaacccagacgcccguagcuuggugcaguuguuccgccagcacugcaccucuggcuggaguuaggcuacgagccggccucccggcgccagccggugcuccccggccucuggggcuucaggcacaacgcagaagguucuugcggaauacaaagaaguuuauaucucugggcaaacaugccaagcucucacugcaggaacuuaccuggaaaaugagugugcgagauugcgcuuggcugagacgcagccca

SEQ ID NO: 1964 - RNA, 1569 nt, Artificial Sequence
  derived and/or modified sequence opt4 from hTERT__Homo_sapiens__BAA74724
augcccagagcccccagaugcagagccgugagaagccugcugagaagccacuacagagaggugcugccccuggccaccuucgugagaagacugggcccccagggcuggagacuggugcagagaggcgaccccgccgccuucagagcccugguggcccagugccuggugugcgugcccugggacgccagacccccccccgccgcccccagcuucagacaggugagcugccugaaggagcugguggccagagugcugcagagacugugcgagagaggcgccaagaacgugcuggccuucggcuucgcccugcuggacggcgccagaggcggcccccccgaggccuucaccaccagcgugagaagcuaccugcccaacaccgugaccgacgcccugagaggcagcggcgccuggggccugcugcugagaagagugggcgacgacgugcuggugcaccugcuggccagaugcgcccuguucgugcugguggcccccagcugcgccuaccaggugugcggccccccccuguaccagcugggcgccgccacccaggccagaccccccccccacgccagcggccccagaagaagacugggcugcgagagagccuggaaccacagcgugagagaggccggcgugccccugggccugcccgcccccggcgccagaagaagaggcggcagcgccagcagaagccugccccugcccaagagacccagaagaggcgccgcccccgagcccgagagaacccccgugggccagggcagcugggcccaccccggcagaaccagaggccccagcgacagaggcuucugcguggugagccccgccagacccgccgaggaggccaccagccuggagggcgcccugagcggcaccagacacagccaccccagcgugggcagacagcaccacgccggcccccccagcaccagcagaccccccagacccugggacacccccugcccccccguguacgccgagaccaagcacuuccuguacagcagcggcgacaaggagcagcugagacccagcuuccugcugagcagccugagacccauccugaccggcgccagaagacugguggagaccaucuuccugggcagcagccccggcugccagggccugcccgccggcugccccgccugccccagcgccaccggcaagugcggccccugcuucuggagcugccugggcaccaccagaagcgcccccaccggcugcagcagcagaagaaccgccagaugcgagcugagaagcccccagcagcccgugagcgugcccggcagaagccccagagcccuguggagaccccccagaagaagaacccagacccccguggccuggugcagcugcagcgccagcaccgccccccuggccggcgugagacugagagccggccugcccgcccccgccggcgcccccagaccccugggccugcaggcccagagaagaagauuccugagaaacaccaagaaguucaucagccugggcaagcacgccaagcugagccugcaggagcugaccuggaagaugagcgugagagacugcgccuggcugagaagaagcccc

SEQ ID NO: 1965 - RNA, 1569 nt, Artificial Sequence
  derived and/or modified sequence opt5 from hTERT__Homo_sapiens__BAA74724
augcccagagccccucggugccgcgcugugagaagccugcuccggucccacuaccgcgagguccugccgcuugccaccuucguuagacggcugggcccccagggguggcgccucgugcaaagaggagacccugcggcuuuucgggcccugguggcccagugucuugucugcgugcccugggaugcucgcccucccccugccgcuccgucuuucagacagguuagcugucugaaggaacucguggcccggguccugcagcgccugugcgagagaggcgcgaaaaacgugcucgccuuuggguucgcucugcuugacggagcccggggcgggcccccugaagccuuuacaacguccguucgcucuuaucugcccaauaccgugacagaugcccucagaggaagcggcgcguggggccugcuucugcggagagucggggacgaugugcucgugcaucugcuggcccgcugugcucucuucguccugguugccccuuccugcgcuuaccaaguguguggacccccgcuuuaucagcugggcgccgccacccaggcucggccucccccucacgcgucugggcccagacgccggcucggaugcgagagagccuggaaccauagcgugcgcgaagcuggcgucccccuggggcuuccugccccgggagcccggagacgcggcggcuccgcuagccggucucugccccucccuaagagaccccgccggggcgccgcgccugagcccgagagaacaccggugggacagggcuccugggcucacccugggcggacccgcggacccagcgacagaggcuuuuguguugugucuccugcccggcccgccgaagaggcuacaucccuggaaggggcccugagcggaaccagacauucucacccuuccgucggccgccaacaccaugcugggcccccgagcacgucccggccucccagacccugggauaccccuugcccgcccguguacgccgagacaaaacacuuccucuauucuagcggggacaaggagcagcugcgcccuuccuuucuucugagcucucucagacccauccugaccggagcgcggcgccuuguugaaacaauuuuccugggcuccagcccugggugucagggacuccccgccggcugcccugcuugccccucugccaccgggaaauguggcccgugcuuuuggagcugucugggaacgacaagauccgcuccuaccggcugcucuagccggcgcacagccagaugugagcugcggagcccccagcaaccuguguccguccccgggcgcucuccgagagcgcucuggcggccuccccgcagacggacccagaccccuguggccuggugcuccuguagcgcuucuacagcuccccuggcuggagucagacuucgcgccggccugcccgccccugcuggggcgccgcggccccucggacugcaggcccaaagacgccgguuccugagaaauacgaagaaguuuaucucccuuggcaaacaugcuaagcucagccugcaggaacugaccuggaaaauguccgugcgcgauugcgccuggcuccggagaucuccu

SEQ ID NO: 1966 - protein, 559 aa, Artificial Sequence
  iCE__Homo_sapiens__O00748
MRLHRLRARLSAVACGLLLLLVRGQGQDSASPIRTTHTGQVLGSLVHVKGANAGVQTFLGIPFAKPPLGPLRFAPPEPPESWSGVRDGTTHPAMCLQDLTAVESEFLSQFNMTFPSDSMSEDCLYLSIYTPAHSHEGSNLPVMVWIHGGALVFGMASLYDGSMLAALENVVVVIIQYRLGVLGFFSTGDKHATGNWGYLDQVAALRWVQQNIAHFGGNPDRVTIFGESAGGTSVSSLVVSPISQGLFHGAIMESGVALLPGLIASSADVISTVVANLSACDQVDSEALVGCLRGKSKEEILAINKPFKMIPGVVDGVFLPRHPQELLASADFQPVPSIVGVNNNEFGWLIPKVMRIYDTQKEMDREASQAALQKMLTLLMLPPTFGDLLREEYIGDNGDPQTLQAQFQEMMADSMFVIPALQVAHFQCSRAPVYFYEFQHQPSWLKNIRPPHMKADHGDELPFVFRSFFGGNYIKFTEEEEQLSRKMMKYWANFARNGNPNGEGLPHWPLFDQEEQYLQLNLQPAVGRALKAHRLQFWKKALPQKIQELEEPEERHTEL

SEQ ID NO: 1967 - RNA, 1680 nt, Artificial Sequence
  iCE__Homo_sapiens__BAA23606
augcggcugcacagacuucgugcgcggcugagcgcgguggccugugggcuucugcugcuucuuguccggggccagggccaggacucagccagucccauccggaccacacacacggggcaggugcuggggagucuuguccaugugaagggcgccaaugccgggguccaaaccuuccugggaauuccauuugccaagccaccucuagguccgcugcgauuugcacccccugagcccccugaaucuuggaguggugugagggauggaaccacccauccggccaugugucuacaggaccucaccgcaguggagucagaguuucuuagccaguucaacaugaccuucccuuccgacuccaugucugaggacugccuguaccucagcaucuacacgccggcccauagccaugaaggcucuaaccugccggugaugguguggauccacgguggugcgcuuguuuuuggcauggcuuccuuguaugaugguuccaugcuggcugccuuggagaacguggugguggucaucauccaguaccgccuggguguccugggcuucuucagcacuggagacaagcacgcaaccggcaacuggggcuaccuggaccaaguggcugcacuacgcuggguccagcagaauaucgcccacuuuggaggcaacccugaccgugucaccauuuuuggcgagucugcggguggcacgagugugucuucgcuuguugugucccccauaucccaaggacucuuccacggagccaucauggagaguggcguggcccuccugcccggccucauugccagcucagcugaugucaucuccacggugguggccaaccugucugccugugaccaaguugacucugaggcccuggugggcugccugcggggcaagaguaaagaggagauucuugcaauuaacaagccuuucaagaugauccccggagugguggauggggucuuccugcccaggcacccccaggagcugcuggccucugccgacuuucagccugucccuagcauuguuggugucaacaacaaugaauucggcuggcucauccccaaggucaugaggaucuaugauacccagaaggaaauggacagagaggccucccaggcugcucugcagaaaauguuaacgcugcugauguugccuccuacauuuggugaccugcugagggaggaguacauuggggacaauggggauccccagacccuccaagcgcaguuccaggagaugauggcggacuccauguuugugaucccugcacuccaaguagcacauuuucaguguucccgggccccuguguacuucuacgaguuccagcaucagcccagcuggcucaagaacaucaggccaccgcacaugaaggcagaccauggugaugagcuuccuuuuguuuucagaaguuucuuugggggcaacuacauuaaauucacugaggaagaggagcagcuaagcaggaagaugaugaaguacugggccaacuuugcgagaaaugggaacccgaauggcgagggucugccacacuggccgcuguucgaccaggaggagcaauaccugcagcugaaccuacagccugcggugggccgggcucugaaggcccacaggcuccaguucuggaagaaggcgcugccccaaaagauccaggagcucgaggagccugaagagagacacacagagcuguag

SEQ ID NO: 1968 - RNA, 1680 nt, Artificial Sequence
  derived and/or modified sequence opt1 from iCE__Homo_sapiens__BAA23606
augcgccugcaccggcuccgcgcccggcugagcgccguggcgugcggccugcuccugcugcucguccgcgggcagggccaggacuccgccagccccauccggaccacccacacgggccaggugcuggggucccuggugcacgucaagggggccaacgccggcgugcagaccuuccucggcaucccguucgccaagccgccccuggggccccugcgcuucgcgccgcccgagccgcccgagagcugguccggcgugcgggacgggaccacccaccccgccaugugccuccaggaccugacggccgucgagagcgaguuccugucccaguucaacaugaccuuccccagcgacuccaugagcgaggacugccucuaccuguccaucuacacccccgcccacagccacgagggcuccaaccugcccgugaugguguggauccacgggggcgcgcucgucuucggcauggccagccuguacgacggguccaugcuggccgcccucgagaacgugguggucgugaucauccaguaccgccugggcgugcugggguucuucagcaccggcgacaagcacgccacgggcaacuggggguaccucgaccaggucgcggcccugcggugggugcagcagaacaucgcccacuucggcgggaaccccgaccgcgugaccaucuucggcgaguccgccgggggcaccagcgucuccagccugguggugagccccaucucccagggccucuuccacggggccaucauggagagcggcgucgcgcugcugcccgggcucaucgccuccagcgccgacgugaucuccaccguggucgccaaccugagcgccugcgaccagguggacuccgaggcgcuggucggcugccuccggggcaagagcaaggaggagauccuggccaucaacaagcccuucaagaugaucccgggggugguggacggcgucuuccugccccgccacccccaggagcuccuggccuccgccgacuuccagcccgugccgagcaucgugggggucaacaacaacgaguucggcuggcugauccccaaggugaugcggaucuacgacacgcagaaggagauggaccgcgaggccucccaggcggcccuccagaagaugcugacccugcucaugcugccgcccaccuucggggaccugcuccgggaggaguacaucggcgacaacggggacccccagacccugcaggcccaguuccaggagaugauggccgacagcauguucgugauccccgcgcugcaggucgcccacuuccagugcucccgcgcccccguguacuucuacgaguuccagcaccagcccagcuggcucaagaacauccggccgccccacaugaaggccgaccacggcgacgagcugcccuucguguuccgcuccuucuucggcgggaacuacaucaaguucacggaggaggaggagcagcugagccggaagaugaugaaguacugggccaacuucgcgcgcaacggcaacccgaacggggagggccugccccacuggccccucuucgaccaggaggagcaguaccugcagcugaaccuccagcccgccgucggccgggcccugaaggcccaccgccugcaguucuggaagaaggcccucccgcagaagauccaggagcuggaggagcccgaggagcgccacaccgagcuguga

SEQ ID NO: 1969 - RNA, 1680 nt, Artificial Sequence
  derived and/or modified sequence opt2 from iCE__Homo_sapiens__BAA23606
augcgccuccaccgccuccgcgcccgccucuccgccgucgccugcggccuccuccuccuccucguccgcggccagggccaggacuccgccucccccauccgcaccacccacaccggccagguccucggcucccucguccacgucaagggcgccaacgccggcguccagaccuuccucggcauccccuucgccaagcccccccucggcccccuccgcuucgccccccccgagccccccgaguccugguccggcguccgcgacggcaccacccaccccgccaugugccuccaggaccucaccgccgucgaguccgaguuccucucccaguucaacaugaccuuccccuccgacuccauguccgaggacugccucuaccucuccaucuacacccccgcccacucccacgagggcuccaaccuccccgucauggucuggauccacggcggcgcccucgucuucggcauggccucccucuacgacggcuccaugcucgccgcccucgagaacgucgucgucgucaucauccaguaccgccucggcguccucggcuucuucuccaccggcgacaagcacgccaccggcaacuggggcuaccucgaccaggucgccgcccuccgcuggguccagcagaacaucgcccacuucggcggcaaccccgaccgcgucaccaucuucggcgaguccgccggcggcaccuccgucuccucccucgucgucucccccaucucccagggccucuuccacggcgccaucauggaguccggcgucgcccuccuccccggccucaucgccuccuccgccgacgucaucuccaccgucgucgccaaccucuccgccugcgaccaggucgacuccgaggcccucgucggcugccuccgcggcaaguccaaggaggagauccucgccaucaacaagcccuucaagaugauccccggcgucgucgacggcgucuuccucccccgccacccccaggagcuccucgccuccgccgacuuccagcccguccccuccaucgucggcgucaacaacaacgaguucggcuggcucauccccaaggucaugcgcaucuacgacacccagaaggagauggaccgcgaggccucccaggccgcccuccagaagaugcucacccuccucaugcucccccccaccuucggcgaccuccuccgcgaggaguacaucggcgacaacggcgacccccagacccuccaggcccaguuccaggagaugauggccgacuccauguucgucauccccgcccuccaggucgcccacuuccagugcucccgcgcccccgucuacuucuacgaguuccagcaccagcccuccuggcucaagaacauccgccccccccacaugaaggccgaccacggcgacgagcuccccuucgucuuccgcuccuucuucggcggcaacuacaucaaguucaccgaggaggaggagcagcucucccgcaagaugaugaaguacugggccaacuucgcccgcaacggcaaccccaacggcgagggccucccccacuggccccucuucgaccaggaggagcaguaccuccagcucaaccuccagcccgccgucggccgcgcccucaaggcccaccgccuccaguucuggaagaaggcccucccccagaagauccaggagcucgaggagcccgaggagcgccacaccgagcucuga

SEQ ID NO: 1970 - RNA, 1680 nt, Artificial Sequence
  derived and/or modified sequence opt3 from iCE__Homo_sapiens__BAA23606
augagacugcacaggcuccgggcccgccuuagcgcuguggcaugcggccuguuguuacugcuaguccgagggcagggacaagacuccgccucucccauccguaccacacauacuggucagguucucggcucacuggugcacguaaagggggcgaacgcuggagugcagacguuccuuggcauuccuuuugccaaaccaccgcugggucccuugagauucgcaccuccagagcccccugaaaguuggagcggggucagggauggaaccacacauccagccaugugucuccaggaccugacugcuguggaguccgaauuucugucucaauucaauaugaccuuucccucggauucaaugagcgaggacugccucuacuuaaguauauauaccccugcacacucccaugaaggcucuaaccugccaguuaugguguggauccacggcggggcccuugucuucggaauggcuagcuuguacgaugguuccaugcuggccgcgcuagagaaugugguaguugugauuauccaguaucggcucggcguccugggguuuuucucaacaggagacaagcacgcaacuggcaacugggguuaccuugaucagguggccgcucugcgcugggugcagcaaaauauugcccauuuugggggaaacccggacagagucacaaucuucggcgagagugcaggcgggaccagcguuucuuccuuggugguaucacccauaagccagggacucuuucacggugcuaucauggaaaguggcguggcccuguuaccugggcugauugcgucuuccgccgaugucaucagcacggugguugcaaaucucucggcuugugaccagguggauucugaggcccuugucggaugccugaggggcaaauccaaggaagagauuuuggcuaucaacaaaccauucaagaugauacccggugugguagacgggguuuuucuaccucggcauccacaggagcugcucgccucagcagauuuccaacccgugccgaguauugucggcgugaauaacaaugaguucggauggcugaucccuaaggucaugcgcauuuaugacacucagaaagagauggaccgagaagccagccaggcugcgcuucaaaagaugcugaccuugcucaugcugcccccaacauuuggcgauuuacugagagaggaauacaucggggacaacggagauccucagacucuacaggcacaguuccaagagaugauggccgacuccauguuugugauccccgcucuccagguugcccacuuccaguguucuagggcaccaguguauuuuuacgaguuccagcaccaacccagcuggcugaaaaauauucggccuccacauaugaaggccgaucacggugacgaacuuccguuuguauuccguucauuuuucggcgggaacuacauaaaauuuaccgaggaagaggaacaguugagucgcaagaugaugaaguauugggcuaauuucgccagaaacggaaaccccaauggcgagggucugccucauuggccacucuuugaucaggaggaacaguaccugcaacuuaaccugcagcccgcagucgggagggcguugaaagcucaccggcuccaguucuggaagaaagcccugccucagaagauccaagaguuagaagaaccagaggaacgacauacagagcuguga

SEQ ID NO: 1971 - RNA, 1680 nt, Artificial Sequence
  derived and/or modified sequence opt4 from iCE__Homo_sapiens__BAA23606
augagacugcacagacugagagccagacugagcgccguggccugcggccugcugcugcugcuggugagaggccagggccaggacagcgccagccccaucagaaccacccacaccggccaggugcugggcagccuggugcacgugaagggcgccaacgccggcgugcagaccuuccugggcauccccuucgccaagcccccccugggcccccugagauucgccccccccgagccccccgagagcuggagcggcgugagagacggcaccacccaccccgccaugugccugcaggaccugaccgccguggagagcgaguuccugagccaguucaacaugaccuuccccagcgacagcaugagcgaggacugccuguaccugagcaucuacacccccgcccacagccacgagggcagcaaccugcccgugaugguguggauccacggcggcgcccugguguucggcauggccagccuguacgacggcagcaugcuggccgcccuggagaacguggugguggugaucauccaguacagacugggcgugcugggcuucuucagcaccggcgacaagcacgccaccggcaacuggggcuaccuggaccagguggccgcccugagaugggugcagcagaacaucgcccacuucggcggcaaccccgacagagugaccaucuucggcgagagcgccggcggcaccagcgugagcagccugguggugagccccaucagccagggccuguuccacggcgccaucauggagagcggcguggcccugcugcccggccugaucgccagcagcgccgacgugaucagcaccgugguggccaaccugagcgccugcgaccagguggacagcgaggcccuggugggcugccugagaggcaagagcaaggaggagauccuggccaucaacaagcccuucaagaugauccccggcgugguggacggcguguuccugcccagacacccccaggagcugcuggccagcgccgacuuccagcccgugcccagcaucgugggcgugaacaacaacgaguucggcuggcugauccccaaggugaugagaaucuacgacacccagaaggagauggacagagaggccagccaggccgcccugcagaagaugcugacccugcugaugcugccccccaccuucggcgaccugcugagagaggaguacaucggcgacaacggcgacccccagacccugcaggcccaguuccaggagaugauggccgacagcauguucgugauccccgcccugcagguggcccacuuccagugcagcagagcccccguguacuucuacgaguuccagcaccagcccagcuggcugaagaacaucagacccccccacaugaaggccgaccacggcgacgagcugcccuucguguucagaagcuucuucggcggcaacuacaucaaguucaccgaggaggaggagcagcugagcagaaagaugaugaaguacugggccaacuucgccagaaacggcaaccccaacggcgagggccugccccacuggccccuguucgaccaggaggagcaguaccugcagcugaaccugcagcccgccgugggcagagcccugaaggcccacagacugcaguucuggaagaaggcccugccccagaagauccaggagcuggaggagcccgaggagagacacaccgagcuguga

SEQ ID NO: 1972 - RNA, 1680 nt, Artificial Sequence
  derived and/or modified sequence opt5 from iCE__Homo_sapiens__BAA23606
augagacugcaccggcuccgcgccagacugagcgcuguggccugcggccuucugcuccugcuuguccgggggcagggacaagacuccgcgucucccauccgcaccacacauacgggccagguucuggggagccucgugcacgugaagggagcuaacgccggcguccagaccuuccuggggauuccuuuugccaaaccgccccugggaccucucagauucgcucccccugagcccccugaauccuggucuggcgugcgggauggcacaacccauccggccaugugucugcaggaccuuacagcuguugagagcgaauuucugucccaauucaauaugaccuuucccucugauagcauguccgaggacugccucuaccugagcaucuauaccccugcccacucucaugaaggguccaaccuucccgugauggucuggauucacggaggcgcgcugguguucgggauggccagccucuacgauggaucuaugcuggcugcccuggagaauguuguggucgugaucauucaguaucgccucggcgugcugggguuuuucuccacaggagacaagcacgcuacgggcaacuggggcuaccuugaucaggucgccgcgcugagauggguucagcaaaauaucgcccauuuugggggaaacccugaccgggugaccaucuucggcgagagcgcugggggaacaucuguguccagccucgucgugucccccauuucucagggccuguuucacggggccaucauggaaagcggaguugcccuucugccgggccucauugcuuccagcgccgaugugaucucuaccgucguggcuaaucuguccgcgugugaccagguugauagcgaggcccuggugggcugccuccgcgggaaaucuaaggaagagauucuggcuaucaacaaaccuuucaagaugauucccggagucguggacggcgucuuucuuccuagacauccccaggagcugcucgccagcgccgauuuccaacccgugccuuccaucguuggggugaauaacaaugaauuuggauggcugaucccgaaggucaugcggauuuaugacacacagaaagagauggaccgcgaggcuucucaggccgcgcuucaaaagaugcugacccuccugaugcugcccccuacguuuggcgaucuccugagagaggaauacaucggggacaacggcgauccccagacacuucaggcucaguuccaagagaugauggccgacagcauguuugugauuccugcccugcagguugcucacuuccaguguucccgggcccccguguauuuuuacgaguuccagcaccaaccgagcuggcucaaaaauauccgcccuccccauaugaaggcugaucacggagacgaacugccuuuugucuucagaucuuucuucggcgggaacuacauuaaauuuaccgaggaagaggaacagcugucccggaagaugaugaaguauugggccaauuucgcgagaaacggaaaccccaauggcgaggggcuuccucauuggccccucuuugaucaggaggaacaguaccugcaacugaaccuccagccggccgugggacgcgcucugaaagcccaccggcuucaguucuggaagaaagcucugccucagaagauccaagagcucgaagaacccgaagagagacauacagagcuguga

SEQ ID NO: 1973 - protein, 579 aa, Artificial Sequence
  IF2B3__Homo_sapiens__O00425
MNKLYIGNLSENAAPSDLESIFKDAKIPVSGPFLVKTGYAFVDCPDESWALKAIEALSGKIELHGKPIEVEHSVPKRQRIRKLQIRNIPPHLQWEVLDSLLVQYGVVESCEQVNTDSETAVVNVTYSSKDQARQALDKLNGFQLENFTLKVAYIPDEMAAQQNPLQQPRGRRGLGQRGSSRQGSPGSVSKQKPCDLPLRLLVPTQFVGAIIGKEGATIRNITKQTQSKIDVHRKENAGAAEKSITILSTPEGTSAACKSILEIMHKEAQDIKFTEEIPLKILAHNNFVGRLIGKEGRNLKKIEQDTDTKITISPLQELTLYNPERTITVKGNVETCAKAEEEIMKKIRESYENDIASMNLQAHLIPGLNLNALGLFPPTSGMPPPTSGPPSAMTPPYPQFEQSETETVHLFIPALSVGAIIGKQGQHIKQLSRFAGASIKIAPAEAPDAKVRMVIITGPPEAQFKAQGRIYGKIKEENFVSPKEEVKLEAHIRVPSFAAGRVIGKGGKTVNELQNLSSAEVVVPRDQTPDENDQVVVKITGHFYACQVAQRKIQEILTQVKQHQQQKALQSGPPQSRRK

SEQ ID NO: 1974 - RNA, 1740 nt, Artificial Sequence
  IF2B3__Homo_sapiens__AAH65269
augaacaaacuguauaucggaaaccucagcgagaacgccgcccccucggaccuagaaaguaucuucaaggacgccaagaucccggugucgggacccuuccuggugaagacuggcuacgcguucguggacugcccggacgagagcugggcccucaaggccaucgaggcgcuuucagguaaaauagaacugcacgggaaacccauagaaguugagcacucggucccaaaaaggcaaaggauucggaaacuucagauacgaaauaucccgccucauuuacagugggaggugcuggauaguuuacuaguccaguauggagugguggagagcugugagcaagugaacacugacucggaaacugcaguuguaaauguaaccuauuccaguaaggaccaagcuagacaagcacuagacaaacugaauggauuucaguuagagaauuucaccuugaaaguagccuauaucccugaugaaauggccgcccagcaaaaccccuugcagcagccccgaggucgccgggggcuugggcagaggggcuccucaaggcaggggucuccaggauccguauccaagcagaaaccaugugauuugccucugcgccugcugguucccacccaauuuguuggagccaucauaggaaaagaaggugccaccauucggaacaucaccaaacagacccagucuaaaaucgauguccaccguaaagaaaaugcgggggcugcugagaagucgauuacuauccucucuacuccugaaggcaccucugcggcuuguaagucuauucuggagauuaugcauaaggaagcucaagauauaaaauucacagaagagauccccuugaagauuuuagcucauaauaacuuuguuggacgucuuauugguaaagaaggaagaaaucuuaaaaaaauugagcaagacacagacacuaaaaucacgauaucuccauugcaggaauugacgcuguauaauccagaacgcacuauuacaguuaaaggcaauguugagacaugugccaaagcugaggaggagaucaugaagaaaaucagggagucuuaugaaaaugauauugcuucuaugaaucuucaagcacauuuaauuccuggauuaaaucugaacgccuugggucuguucccacccacuucagggaugccaccucccaccucagggcccccuucagccaugacuccucccuacccgcaguuugagcaaucagaaacggagacuguucaucuguuuaucccagcucuaucagucggugccaucaucggcaagcagggccagcacaucaagcagcuuucucgcuuugcuggagcuucaauuaagauugcuccagcagaagcaccagaugcuaaagugaggauggugauuaucacuggaccaccagaggcucaguucaaggcucagggaagaauuuauggaaaaauuaaagaagaaaacuuuguuaguccuaaagaagaggugaaacuugaagcucauaucagagugccauccuuugcugcuggcagaguuauuggaaaaggaggcaaaacggugaaugaacuucagaauuugucaagugcagaaguuguugucccucgugaccagacaccugaugagaaugaccaagugguugucaaaauaacuggucacuucuaugcuugccagguugcccagagaaaaauucaggaaauucugacucagguaaagcagcaccaacaacagaaggcucugcaaaguggaccaccucagucaagacggaaguaa

SEQ ID NO: 1975 - RNA, 1740 nt, Artificial Sequence
  derived and/or modified sequence opt1 from IF2B3__Homo_sapiens__AAH65269
augaacaagcuguacaucggcaaccucagcgagaacgccgcccccuccgaccuggagagcaucuucaaggacgcgaagaucccgguguccgggcccuuccuggucaagaccggcuacgccuucguggacugccccgacgagagcugggcccucaaggccaucgaggcccuguccgggaagaucgagcugcacggcaagcccaucgagguggagcacagcgucccgaagcgccagcggauccgcaagcuccagauccggaacaucccgccccaccuccagugggaggugcuggacucccugcuggugcaguacggggucguggagagcugcgagcaggucaacaccgacuccgagacggcgguggugaacgugaccuacagcuccaaggaccaggcccgccaggcccuggacaagcucaacggcuuccagcuggagaacuucacccugaaggucgccuacauccccgacgagauggcggcccagcagaacccccuccagcagccccggggccgccgggggcugggccagcgcgggagcucccggcagggcagccccggguccgugagcaagcagaagcccugcgaccugccgcuccgccugcuggugcccacccaguucgucggcgccaucaucggcaaggagggggccacgauccggaacaucaccaagcagacccaguccaagaucgacgugcaccgcaaggagaacgccggcgcggccgagaaguccaucaccauccucagcacgcccgaggggaccagcgccgccugcaagagcauccuggagaucaugcacaaggaggcccaggacaucaaguucaccgaggagaucccccugaagauccucgcgcacaacaacuucgugggccggcugaucggcaaggaggggcgcaaccugaagaagaucgagcaggacaccgacacgaagaucaccaucuccccgcuccaggagcugacccuguacaaccccgagcggaccaucacggucaagggcaacguggagaccugcgccaaggccgaggaggagaucaugaagaagauccgcgagagcuacgagaacgacaucgccuccaugaaccuccaggcccaccugauccccgggcugaaccucaacgcgcugggccuguucccgcccaccagcgggaugcccccgcccaccuccggcccgcccagcgccaugacgccgcccuacccccaguucgagcaguccgagaccgagaccgugcaccucuucauccccgcccugagcgucggcgccaucaucgggaagcagggccagcacaucaagcagcugucccgguucgccggggcgagcaucaagaucgcccccgccgaggcccccgacgcgaaggugcgcauggugaucaucaccggcccgcccgaggcccaguucaaggcccaggggcggaucuacggcaagaucaaggaggagaacuucgucucccccaaggaggaggugaagcucgaggcccacauccgcguccccagcuucgccgcgggccgggugaucgggaagggcgggaagacggugaacgagcugcagaaccuguccagcgccgaggucguggugccccgcgaccagacccccgacgagaacgaccaggucguggugaagaucaccggccacuucuacgccugccaggucgcccagcgcaagauccaggagauccucacccaggugaagcagcaccagcagcagaaggcccugcaguccgggcccccgcagagccggcgcaaguga

SEQ ID NO: 1976 - RNA, 1740 nt, Artificial Sequence
  derived and/or modified sequence opt2 from IF2B3__Homo_sapiens__AAH65269
augaacaagcucuacaucggcaaccucuccgagaacgccgcccccuccgaccucgaguccaucuucaaggacgccaagauccccgucuccggccccuuccucgucaagaccggcuacgccuucgucgacugccccgacgaguccugggcccucaaggccaucgaggcccucuccggcaagaucgagcuccacggcaagcccaucgaggucgagcacuccguccccaagcgccagcgcauccgcaagcuccagauccgcaacauccccccccaccuccagugggagguccucgacucccuccucguccaguacggcgucgucgaguccugcgagcaggucaacaccgacuccgagaccgccgucgucaacgucaccuacuccuccaaggaccaggcccgccaggcccucgacaagcucaacggcuuccagcucgagaacuucacccucaaggucgccuacauccccgacgagauggccgcccagcagaacccccuccagcagccccgcggccgccgcggccucggccagcgcggcuccucccgccagggcucccccggcuccgucuccaagcagaagcccugcgaccucccccuccgccuccucguccccacccaguucgucggcgccaucaucggcaaggagggcgccaccauccgcaacaucaccaagcagacccaguccaagaucgacguccaccgcaaggagaacgccggcgccgccgagaaguccaucaccauccucuccacccccgagggcaccuccgccgccugcaaguccauccucgagaucaugcacaaggaggcccaggacaucaaguucaccgaggagaucccccucaagauccucgcccacaacaacuucgucggccgccucaucggcaaggagggccgcaaccucaagaagaucgagcaggacaccgacaccaagaucaccaucuccccccuccaggagcucacccucuacaaccccgagcgcaccaucaccgucaagggcaacgucgagaccugcgccaaggccgaggaggagaucaugaagaagauccgcgaguccuacgagaacgacaucgccuccaugaaccuccaggcccaccucauccccggccucaaccucaacgcccucggccucuucccccccaccuccggcaugcccccccccaccuccggcccccccuccgccaugaccccccccuacccccaguucgagcaguccgagaccgagaccguccaccucuucauccccgcccucuccgucggcgccaucaucggcaagcagggccagcacaucaagcagcucucccgcuucgccggcgccuccaucaagaucgcccccgccgaggcccccgacgccaagguccgcauggucaucaucaccggcccccccgaggcccaguucaaggcccagggccgcaucuacggcaagaucaaggaggagaacuucgucucccccaaggaggaggucaagcucgaggcccacauccgcguccccuccuucgccgccggccgcgucaucggcaagggcggcaagaccgucaacgagcuccagaaccucuccuccgccgaggucgucgucccccgcgaccagacccccgacgagaacgaccaggucgucgucaagaucaccggccacuucuacgccugccaggucgcccagcgcaagauccaggagauccucacccaggucaagcagcaccagcagcagaaggcccuccaguccggccccccccagucccgccgcaaguga

SEQ ID NO: 1977 - RNA, 1740 nt, Artificial Sequence
  derived and/or modified sequence opt3 from IF2B3__Homo_sapiens__AAH65269
augaacaagcuguacaucggcaaucucagcgagaacgccgcucccuccgaccuugaaucuauuuucaaagaugcaaagauaccugugucagggccauuucuggucaaaaccggauaugccuucguugacugcccggaugagaguugggcguugaaggcuaucgaagccuuaagcgguaaaauugagcugcacggcaagcccaucgaaguggagcauuccguaccuaagagacagaggauucggaaacuacaaauccgcaauauaccaccccaccuccagugggaggugcuggacucucuucugguccaguacggggugguugaaucgugugaacaggugaacacagauucagagacugcagucgugaauguaacguauagcaguaaggaccaagcccgacaggcuuuggauaaacucaacggauuucagcuggagaauuucacccugaagguugcauacaucccugacgagauggccgcucagcaaaacccacuccagcagccccguggcagaagggguuuagggcagcggggauccucucgccaaggcagcccuggcuccgugucaaaacagaagccaugcgaucugccgcuuagauugcugguccccacacaguuugugggggccauuaucggaaaggaaggugcgacuauuaggaauaucaccaaacaaacacagaguaagauagacgugcaucggaaagagaacgcaggcgccgcugaaaagagcauuaccauccuaucuacuccugaggggacauccgccgcauguaaaucaauucucgaaaucaugcacaaggaggcucaggauaucaaauucaccgaggaaauuccacugaagauacuugcccauaauaacuuugucggacgccugaucggcaaggagggucgaaauuugaaaaagauugaacaggacacggauacuaaaaucaccauaagcccccuccaagagcugacauuauauaacccugaaagaacuauuaccguuaaggggaauguggagacaugcgcgaaagccgaggaagagaucaugaagaagaucagggaaaguuacgagaacgacauugcaucuaugaaccugcaggcucaccucaucccaggacuuaaucugaacgccuugggccuauuucccccgaccuccggcaugccucccccaacgagcgggccucccucggcuaugacuccacccuauccucaguucgaacagucugagacagagaccguacaccuguucauuccagcccucuccgugggagcaauaaucgguaaacaaggccagcauauuaagcagcugucacgguuugccggggcuaguaucaaaaucgcgccggcagaagcccccgacgcuaagguccguauggugauuauaacuggaccuccagaggcccaguucaaagcacaaggccgcaucuacgguaagauuaaggaagagaauuuuguuagccccaaagaggaagugaaacuugaggcccacaucagagucccuuccuucgcugccgggagggugauuggcaagggaggcaagacaguaaacgaacugcagaauuugucuagcgcagagguuguggucccacgggaucagacccccgacgaaaacgaucagguggucgugaaaaucacggggcauuucuacgcgugucaaguugcucagcgaaagauacaggagauccucacccaagugaagcagcaccagcagcaaaaagcccugcagucaggaccgccucagagucgcagaaaguga

SEQ ID NO: 1978 - RNA, 1740 nt, Artificial Sequence
  derived and/or modified sequence opt4 from IF2B3__Homo_sapiens__AAH65269
augaacaagcuguacaucggcaaccugagcgagaacgccgcccccagcgaccuggagagcaucuucaaggacgccaagauccccgugagcggccccuuccuggugaagaccggcuacgccuucguggacugccccgacgagagcugggcccugaaggccaucgaggcccugagcggcaagaucgagcugcacggcaagcccaucgagguggagcacagcgugcccaagagacagagaaucagaaagcugcagaucagaaacauccccccccaccugcagugggaggugcuggacagccugcuggugcaguacggcgugguggagagcugcgagcaggugaacaccgacagcgagaccgccguggugaacgugaccuacagcagcaaggaccaggccagacaggcccuggacaagcugaacggcuuccagcuggagaacuucacccugaagguggccuacauccccgacgagauggccgcccagcagaacccccugcagcagcccagaggcagaagaggccugggccagagaggcagcagcagacagggcagccccggcagcgugagcaagcagaagcccugcgaccugccccugagacugcuggugcccacccaguucgugggcgccaucaucggcaaggagggcgccaccaucagaaacaucaccaagcagacccagagcaagaucgacgugcacagaaaggagaacgccggcgccgccgagaagagcaucaccauccugagcacccccgagggcaccagcgccgccugcaagagcauccuggagaucaugcacaaggaggcccaggacaucaaguucaccgaggagaucccccugaagauccuggcccacaacaacuucgugggcagacugaucggcaaggagggcagaaaccugaagaagaucgagcaggacaccgacaccaagaucaccaucagcccccugcaggagcugacccuguacaaccccgagagaaccaucaccgugaagggcaacguggagaccugcgccaaggccgaggaggagaucaugaagaagaucagagagagcuacgagaacgacaucgccagcaugaaccugcaggcccaccugauccccggccugaaccugaacgcccugggccuguucccccccaccagcggcaugcccccccccaccagcggcccccccagcgccaugaccccccccuacccccaguucgagcagagcgagaccgagaccgugcaccuguucauccccgcccugagcgugggcgccaucaucggcaagcagggccagcacaucaagcagcugagcagauucgccggcgccagcaucaagaucgcccccgccgaggcccccgacgccaaggugagaauggugaucaucaccggcccccccgaggcccaguucaaggcccagggcagaaucuacggcaagaucaaggaggagaacuucgugagccccaaggaggaggugaagcuggaggcccacaucagagugcccagcuucgccgccggcagagugaucggcaagggcggcaagaccgugaacgagcugcagaaccugagcagcgccgaggugguggugcccagagaccagacccccgacgagaacgaccaggugguggugaagaucaccggccacuucuacgccugccagguggcccagagaaagauccaggagauccugacccaggugaagcagcaccagcagcagaaggcccugcagagcggccccccccagagcagaagaaaguga

SEQ ID NO: 1979 - RNA, 1740 nt, Artificial Sequence
  derived and/or modified sequence opt5 from IF2B3__Homo_sapiens__AAH65269
augaacaagcuguacaucggcaaucucagcgagaacgccgcucccuccgaccuggaaucuauuuucaaagaugccaagaucccugugagcgggccguuucuugucaaaaccggauaugcguucguugacugccccgaugaguccugggcucugaaggccauugaagcccucucuggcaaaaucgagcugcacgggaagccuauugaaguggagcauagcgugcccaagagacagcggauccgcaaacuucaaaucagaaauauuccuccccaccuucagugggagguccucgacucccugcuggugcaguacggaguuguggaaucuugugagcaggucaacacagauagcgaaacggcugugguuaaugugaccuauuccagcaaggaccaagcccggcaggcucucgauaaacugaacggcuuucagcuugagaauuucacacugaaggucgccuacaucccugacgagauggcggcccagcaaaacccgcuccagcagccccgcgggagacggggacugggccagcgcgggucuuccagacaaggcagcccuggaucuguguccaaacagaagcccugcgaucuuccucugcggcuccuggugcccacccaguuugucggcgcuauuaucgggaaggaaggagccacaauucgcaauaucaccaaacaaacacagagcaagauugacguucauagaaaagagaacgcuggcgccgcggaaaagucuaucaccauccuguccacgccggaggggaccagcgccgcuuguaaauccauucucgaaaucaugcacaaggaggcccaggauauuaaauucacagaggaaaucccucugaagauucuugcucauaauaacuuugugggacggcugaucggcaaggagggccgcaaucucaaaaagaucgaacaggacaccgauacaaaaauuaccaucucuccccugcaagagcuuacgcuguauaacccugaaagaacaauuaccgugaaggggaaugucgagacaugcgccaaagccgaggaagagaucaugaagaagauucgggaaagcuacgagaacgacaucgcuuccaugaaccuccaggcgcaccugauccccggacugaaucucaacgcccugggccuuuuucccccuaccagcgggaugccgcccccuaccucuggacccccuuccgcuaugacacccccguauccucaguucgaacagagcgagacggagaccgugcaccuguucauucccgcccucucuguuggcgccaucauugggaaacaaggacagcauaucaagcagcugagccgcuuugcuggcgccuccauuaaaaucgcgccugcugaagcccccgacgccaaggugagaauggucauuaucacaggcccucccgaggcucaguucaaagcccaagggcggaucuacggaaagauuaaggaagagaauuuugugucuccgaaagaggaaguuaagcuggaggcucacaucagagugccuagcuucgccgcgggccgcgucauugggaaaggaggcaagaccgugaacgaacugcagaaucucuccagcgccgaggucgugguuccccgggaucagacacccgacgaaaacgaucagguggucgugaaaaucaccgggcauuucuacgcuugucaaguugcccagagaaagauucaggagauccugacgcaagugaagcagcaccagcagcaaaaagcucugcagucuggcccuccgcagucccgccggaaguga

SEQ ID NO: 1980 - protein, 380 aa, Artificial Sequence
  IL-13Ra2__Homo_sapiens__Q14627
MAFVCLAIGCLYTFLISTTFGCTSSSDTEIKVNPPQDFEIVDPGYLGYLYLQWQPPLSLDHFKECTVEYELKYRNIGSETWKTIITKNLHYKDGFDLNKGIEAKIHTLLPWQCTNGSEVQSSWAETTYWISPQGIPETKVQDMDCVYYNWQYLLCSWKPGIGVLLDTNYNLFYWYEGLDHALQCVDYIKADGQNIGCRFPYLEASDYKDFYICVNGSSENKPIRSSYFTFQLQNIVKPLPPVYLTFTRESSCEIKLKWSIPLGPIPARCFDYEIEIREDDTTLVTATVENETYTLKTTNETRQLCFVVRSKVNIYCSDDGIWSEWSDKQCWEGEDLSKKTLLRFWLPFGFILILVIFVTGLLLRKPNTYPKMIPEFFCDT

SEQ ID NO: 1981 - RNA, 1143 nt, Artificial Sequence
  IL-13Ra2__Homo_sapiens__AAB17170
auggcuuucguuugcuuggcuaucggaugcuuauauaccuuucugauaagcacaacauuuggcuguacuucaucuucagacaccgagauaaaaguuaacccuccucaggauuuugagauaguggaucccggauacuuagguuaucucuauuugcaauggcaacccccacugucucuggaucauuuuaaggaaugcacaguggaauaugaacuaaaauaccgaaacauugguagugaaacauggaagaccaucauuacuaagaaucuacauuacaaagauggguuugaucuuaacaagggcauugaagcgaagauacacacgcuuuuaccauggcaaugcacaaauggaucagaaguucaaaguuccugggcagaaacuacuuauuggauaucaccacaaggaauuccagaaacuaaaguucaggauauggauugcguauauuacaauuggcaauauuuacucuguucuuggaaaccuggcauagguguacuucuugauaccaauuacaacuuguuuuacugguaugagggcuuggaucaugcauuacaguguguugauuacaucaaggcugauggacaaaauauaggaugcagauuucccuauuuggaggcaucagacuauaaagauuucuauauuuguguuaauggaucaucagagaacaagccuaucagauccaguuauuucacuuuucagcuucaaaauauaguuaaaccuuugccgccagucuaucuuacuuuuacucgggagaguucaugugaaauuaagcugaaauggagcauaccuuugggaccuauuccagcaagguguuuugauuaugaaauugagaucagagaagaugauacuaccuuggugacugcuacaguugaaaaugaaacauacaccuugaaaacaacaaaugaaacccgacaauuaugcuuuguaguaagaagcaaagugaauauuuauugcucagaugacggaauuuggagugaguggagugauaaacaaugcugggaaggugaagaccuaucgaagaaaacuuugcuacguuucuggcuaccauuugguuucaucuuaauauuaguuauauuuguaaccggucugcuuuugcguaagccaaacaccuacccaaaaaugauuccagaauuuuucugugauacauga

SEQ ID NO: 1982 - RNA, 1143 nt, Artificial Sequence
  derived and/or modified sequence opt1 from IL-13Ra2__Homo_sapiens__AAB17170
auggccuucgugugccuggccaucggcugccucuacaccuuccugaucagcaccacguucgggugcaccuccagcuccgacaccgagaucaaggucaacccgccccaggacuucgagaucguggaccccggcuaccugggguaccucuaccugcaguggcagccgccccugagccucgaccacuucaaggagugcaccguggaguacgagcugaaguaccgcaacaucggcuccgagacguggaagaccaucaucaccaagaaccugcacuacaaggacggguucgaccucaacaagggcaucgaggcgaagauccacacccugcugcccuggcagugcacgaacggcagcgagguccaguccagcugggccgagaccaccuacuggaucagcccccaggggauccccgagaccaaggugcaggacauggacugcguguacuacaacuggcaguaccuccugugcuccuggaagcccggcaucgggguccugcucgacacgaacuacaaccuguucuacugguacgagggccuggaccacgcccuccagugcguggacuacaucaaggccgacgggcagaacaucggcugccgguucccguaccuggaggccuccgacuacaaggacuucuacaucugcgugaacggcagcuccgagaacaagcccauccgcagcuccuacuucaccuuccagcugcagaacaucgucaagccccugcccccgguguaccucaccuucacccgggagagcuccugcgagaucaagcugaaguggagcaucccccucgggcccauccccgcgcgcugcuucgacuacgagaucgagauccgggaggacgacacgacccuggugaccgccaccgucgagaacgagacguacacccugaagaccaccaacgagacgcgccagcucugcuucguggugcgguccaaggucaacaucuacugcagcgacgacggcaucuggagcgagugguccgacaagcagugcugggagggggaggaccugagcaagaagacccugcuccgcuucuggcugccguucggcuucauccugauccucgugaucuucgugaccggccugcugcuccggaagcccaacaccuaccccaagaugauccccgaguucuucugcgacacguga

SEQ ID NO: 1983 - RNA, 1143 nt, Artificial Sequence
  derived and/or modified sequence opt2 from IL-13Ra2__Homo_sapiens__AAB17170
auggccuucgucugccucgccaucggcugccucuacaccuuccucaucuccaccaccuucggcugcaccuccuccuccgacaccgagaucaaggucaaccccccccaggacuucgagaucgucgaccccggcuaccucggcuaccucuaccuccaguggcagcccccccucucccucgaccacuucaaggagugcaccgucgaguacgagcucaaguaccgcaacaucggcuccgagaccuggaagaccaucaucaccaagaaccuccacuacaaggacggcuucgaccucaacaagggcaucgaggccaagauccacacccuccuccccuggcagugcaccaacggcuccgagguccaguccuccugggccgagaccaccuacuggaucuccccccagggcauccccgagaccaagguccaggacauggacugcgucuacuacaacuggcaguaccuccucugcuccuggaagcccggcaucggcguccuccucgacaccaacuacaaccucuucuacugguacgagggccucgaccacgcccuccagugcgucgacuacaucaaggccgacggccagaacaucggcugccgcuuccccuaccucgaggccuccgacuacaaggacuucuacaucugcgucaacggcuccuccgagaacaagcccauccgcuccuccuacuucaccuuccagcuccagaacaucgucaagccccucccccccgucuaccucaccuucacccgcgaguccuccugcgagaucaagcucaagugguccaucccccucggccccauccccgcccgcugcuucgacuacgagaucgagauccgcgaggacgacaccacccucgucaccgccaccgucgagaacgagaccuacacccucaagaccaccaacgagacccgccagcucugcuucgucguccgcuccaaggucaacaucuacugcuccgacgacggcaucugguccgagugguccgacaagcagugcugggagggcgaggaccucuccaagaagacccuccuccgcuucuggcuccccuucggcuucauccucauccucgucaucuucgucaccggccuccuccuccgcaagcccaacaccuaccccaagaugauccccgaguucuucugcgacaccuga

SEQ ID NO: 1984 - RNA, 1143 nt, Artificial Sequence
  derived and/or modified sequence opt3 from IL-13Ra2__Homo_sapiens__AAB17170
auggccuucgugugccuggcuaucggcugucucuacaccuuucuuauuagcacaacuuucgggugcacguccucuucagacaccgagauaaaggucaaucccccucaggauuuugaaaucguugacccaggauaucuggguuacuuguauuuacaauggcagccgccccugagucuagaucacuucaaagaguguacaguggaauacgagcucaaguauagaaacauuggcagcgaaacuuggaaaaccaucauuacaaagaaccugcauuacaaagacggguuugaucuuaauaagggaaucgaggcaaagauacacacccuguugccuuggcagugcacuaacggcuccgagguacagucuucgugggccgaaacaaccuauuggaucucaccacaagguauucccgagacgaaagugcaggacauggauugugucuacuacaauuggcaguaucuccugugcagcuggaagccugggaucggagugcugcucgacacuaacuacaauuuauucuauugguacgaaggccuggaucaugcgcuucaguguguugacuauauuaaagcugauggccaaaacaucgggugcagguuuccauacuuggaggccagugacuauaaggauuucuacauaugugugaauggauccucugagaacaaacccauucggagcuccuacuuuaccuuccagcugcagaauaucgucaagccucuaccaccgguguaucucacauuuacucgcgaaucaaguugcgagauuaagcugaaauggagcaucccccuugguccuaucccagcacgauguuucgacuacgaaauugagauacgugaagacgauaccacacugguaaccgccacgguugagaacgagacuuauacauugaagaccacuaaugaaacaagacagcucugcuuuguggucaggucuaaagugaacaucuacugcuccgacgauggcauuuggucagaguggagcgacaagcaauguugggaaggggaggaucugaguaaaaagaccuuacugcgguucuggcuccccuucggauuuauccuuauacuggugauuuucgucacgggcuugcuacugcgcaaaccuaauaccuauccaaagaugauccccgaauuuuucugcgacacauga

SEQ ID NO: 1985 - RNA, 1143 nt, Artificial Sequence
  derived and/or modified sequence opt4 from IL-13Ra2__Homo_sapiens__AAB17170
auggccuucgugugccuggccaucggcugccuguacaccuuccugaucagcaccaccuucggcugcaccagcagcagcgacaccgagaucaaggugaaccccccccaggacuucgagaucguggaccccggcuaccugggcuaccuguaccugcaguggcagcccccccugagccuggaccacuucaaggagugcaccguggaguacgagcugaaguacagaaacaucggcagcgagaccuggaagaccaucaucaccaagaaccugcacuacaaggacggcuucgaccugaacaagggcaucgaggccaagauccacacccugcugcccuggcagugcaccaacggcagcgaggugcagagcagcugggccgagaccaccuacuggaucagcccccagggcauccccgagaccaaggugcaggacauggacugcguguacuacaacuggcaguaccugcugugcagcuggaagcccggcaucggcgugcugcuggacaccaacuacaaccuguucuacugguacgagggccuggaccacgcccugcagugcguggacuacaucaaggccgacggccagaacaucggcugcagauuccccuaccuggaggccagcgacuacaaggacuucuacaucugcgugaacggcagcagcgagaacaagcccaucagaagcagcuacuucaccuuccagcugcagaacaucgugaagccccugccccccguguaccugaccuucaccagagagagcagcugcgagaucaagcugaaguggagcaucccccugggccccauccccgccagaugcuucgacuacgagaucgagaucagagaggacgacaccacccuggugaccgccaccguggagaacgagaccuacacccugaagaccaccaacgagaccagacagcugugcuucguggugagaagcaaggugaacaucuacugcagcgacgacggcaucuggagcgaguggagcgacaagcagugcugggagggcgaggaccugagcaagaagacccugcugagauucuggcugcccuucggcuucauccugauccuggugaucuucgugaccggccugcugcugagaaagcccaacaccuaccccaagaugauccccgaguucuucugcgacaccuga

SEQ ID NO: 1986 - RNA, 1143 nt, Artificial Sequence
  derived and/or modified sequence opt5 from IL-13Ra2__Homo_sapiens__AAB17170
auggccuucgugugccuggcuaucggcugucucuacaccuuucugauuagcacaacguucgggugcaccuccucuagcgacacagagaucaaggucaaucccccucaggauuuugaaauuguugacccgggauaucuuggcuaccuguaucuccaauggcagcccccucugucccuugaucacuucaaagaguguaccguggaauacgagcugaaguauagaaacaucgggucugaaacauggaaaaccauuaucacaaagaaccuccauuacaaagacggauuugaucugaauaagggcaucgaggccaagauucacacccugcuccccuggcagugcacgaacgggagcgaggugcaguccucuugggcggaaaccacauauuggaucagcccucaaggcauucccgagaccaaaguccaggacauggauuguguguacuacaauuggcaguaucugcuuugcuccuggaagccuggaaucggcguucugcucgacacaaacuacaaucuguucuauugguacgaagggcuugaucaugcucugcaguguguggacuauauuaaagccgauggacaaaacaucggcugccgguuuccguaccucgaggccagcgacuauaaggauuucuacauuugugucaaugggucuuccgagaacaaacccauccgcagcucuuacuuuaccuuccagcugcagaauaucgugaagccucugcccccuguuuaucucacguuuacaagagaauccagcugcgagauuaagcugaaauggucuaucccccuuggaccgauuccugcucgguguuucgacuacgaaaucgagauucgcgaagacgauaccacacuggugaccgccaccgucgagaacgagacauauacgcucaagaccacaaaugaaaccagacagcugugcuuuguggugcgguccaaagucaacaucuacugcagcgacgauggcaucugguccgaguggucugacaagcaauguugggaaggggaggaucuuagcaaaaagacacugcuccgcuucuggcugcccuucggauuuauucugauccucguuauuuucgugaccggccugcuucugagaaaaccuaauacguaucccaagaugauccccgaauuuuucugcgacacauga

SEQ ID NO: 1987 - protein, 272 aa, Artificial Sequence
  IL2-RA__Homo_sapiens__P01589
MDSYLLMWGLLTFIMVPGCQAELCDDDPPEIPHATFKAMAYKEGTMLNCECKRGFRRIKSGSLYMLCTGNSSHSSWDNQCQCTSSATRNTTKQVTPQPEEQKERKTTEMQSPMQPVDQASLPGHCREPPPWENEATERIYHFVVGQMVYYQCVQGYRALHRGPAESVCKMTHGKTRWTQPQLICTGEMETSQFPGEEKPQASPEGRPESETSCLVTTTDFQIQTEMAATMETSIFTTEYQVAVAGCVFLLISVLLLSGLTWQRRQRKSRRTI

SEQ ID NO: 1988 - RNA, 819 nt, Artificial Sequence
  IL2-RA__Homo_sapiens__AAA67527
auggauucauaccugcugauguggggacugcucacguucaucauggugccuggcugccaggcagagcucugugacgaugacccgccagagaucccacacgccacauucaaagccauggccuacaaggaaggaaccauguugaacugugaaugcaagagagguuuccgcagaauaaaaagcgggucacucuauaugcucuguacaggaaacucuagccacucguccugggacaaccaaugucaaugcacaagcucugccacucggaacacaacgaaacaagugacaccucaaccugaagaacagaaagaaaggaaaaccacagaaaugcaaaguccaaugcagccaguggaccaagcgagccuuccaggucacugcagggaaccuccaccaugggaaaaugaagccacagagagaauuuaucauuucgugguggggcagaugguuuauuaucagugcguccagggauacagggcucuacacagagguccugcugagagcgucugcaaaaugacccacgggaagacaagguggacccagccccagcucauaugcacaggugaaauggagaccagucaguuuccaggugaagagaagccucaggcaagccccgaaggccguccugagagugagacuuccugccucgucacaacaacagauuuucaaauacagacagaaauggcugcaaccauggagacguccauauuuacaacagaguaccagguagcaguggccggcuguguuuuccugcugaucagcguccuccuccugagugggcucaccuggcagcggagacagaggaagaguagaagaacaaucuag

SEQ ID NO: 1989 - RNA, 819 nt, Artificial Sequence
  derived and/or modified sequence opt1 from IL2-RA__Homo_sapiens__AAA67527
auggacagcuaccugcucauguggggccugcugaccuucaucauggugcccgggugccaggccgagcucugcgacgacgacccgcccgagaucccccacgccaccuucaaggcgauggccuacaaggagggcacgaugcugaacugcgagugcaagcgcggguuccggcgcaucaaguccggcagccuguacaugcucugcaccgggaacuccagccacuccagcugggacaaccagugccagugcaccuccagcgccacccggaacacgaccaagcaggucacgccccagccggaggagcagaaggagcgcaagaccaccgagaugcagucccccaugcagcccguggaccaggccagccugcccggccacugccgggagccgccgcccugggagaacgaggccaccgagcgcaucuaccacuucguggucggccagaugguguacuaccagugcgugcagggguaccgggcgcugcaccgcggccccgccgaguccgucugcaagaugacccacgggaagacccgguggacgcagccccagcucaucugcaccggcgagauggagaccagccaguuccccggggaggagaagccccaggccucccccgagggccgcccggagagcgagaccuccugccuggugacgaccaccgacuuccagauccagaccgagauggccgcgacgauggagaccagcaucuucaccaccgaguaccagguggccgucgccggcugcguguuccugcucaucuccgugcugcugcucagcgggcugacguggcagcggcgccagcggaagucccgccggaccaucuga

SEQ ID NO: 1990 - RNA, 819 nt, Artificial Sequence
  derived and/or modified sequence opt2 from IL2-RA__Homo_sapiens__AAA67527
auggacuccuaccuccucauguggggccuccucaccuucaucaugguccccggcugccaggccgagcucugcgacgacgacccccccgagaucccccacgccaccuucaaggccauggccuacaaggagggcaccaugcucaacugcgagugcaagcgcggcuuccgccgcaucaaguccggcucccucuacaugcucugcaccggcaacuccucccacuccuccugggacaaccagugccagugcaccuccuccgccacccgcaacaccaccaagcaggucaccccccagcccgaggagcagaaggagcgcaagaccaccgagaugcagucccccaugcagcccgucgaccaggccucccuccccggccacugccgcgagcccccccccugggagaacgaggccaccgagcgcaucuaccacuucgucgucggccagauggucuacuaccagugcguccagggcuaccgcgcccuccaccgcggccccgccgaguccgucugcaagaugacccacggcaagacccgcuggacccagccccagcucaucugcaccggcgagauggagaccucccaguuccccggcgaggagaagccccaggccucccccgagggccgccccgaguccgagaccuccugccucgucaccaccaccgacuuccagauccagaccgagauggccgccaccauggagaccuccaucuucaccaccgaguaccaggucgccgucgccggcugcgucuuccuccucaucuccguccuccuccucuccggccucaccuggcagcgccgccagcgcaagucccgccgcaccaucuga

SEQ ID NO: 1991 - RNA, 819 nt, Artificial Sequence
  derived and/or modified sequence opt3 from IL2-RA__Homo_sapiens__AAA67527
auggacagcuaccugcucauguggggccuucugaccuucaucauggugcccgggugccaggccgaguugugugaugacgauccuccagaaauuccgcacgcuacauuuaaggcaauggccuauaaagagggaacuauguuaaacugcgaauguaagagagguuucaggcggauaaaauccggcucucuguacaugcuaugcacgggaaauucaagucauagcuccugggacaaccaaugucagugcaccucuucggcgacacgcaauacuaccaagcaggucacaccccagccugaggaacaaaaagagcgaaagaccacugagaugcagucaccaaugcagcccguugaucaggcuagccucccugggcacugucgugaaccacccccuugggagaacgaagccacagagagaaucuaucauuuugugguaggccaaaugguguacuaucagugcguccaggguuacagggcacugcaccgggggccagccgagaguguguguaagaugacccauggaaaaacgcgcuggacucagccgcaacuuauuugcaccggcgaaauggagacaucccaguuccccggcgaagagaagccucaggcuucuccagaagggagacccgagagcgagacuuccugucugguuaccacaaccgacuuucaaauccagacggaaauggcagccacuauggagacaucaauuuucaccacugaauaucagguggcugucgccggaugcguguuuuugcucaucaguguacugcugcucagcgguuuaacauggcagaggcggcaacgcaaaucucgaagaaccauauga

SEQ ID NO: 1992 - RNA, 819 nt, Artificial Sequence
  derived and/or modified sequence opt4 from IL2-RA__Homo_sapiens__AAA67527
auggacagcuaccugcugauguggggccugcugaccuucaucauggugcccggcugccaggccgagcugugcgacgacgacccccccgagaucccccacgccaccuucaaggccauggccuacaaggagggcaccaugcugaacugcgagugcaagagaggcuucagaagaaucaagagcggcagccuguacaugcugugcaccggcaacagcagccacagcagcugggacaaccagugccagugcaccagcagcgccaccagaaacaccaccaagcaggugaccccccagcccgaggagcagaaggagagaaagaccaccgagaugcagagccccaugcagcccguggaccaggccagccugcccggccacugcagagagcccccccccugggagaacgaggccaccgagagaaucuaccacuucguggugggccagaugguguacuaccagugcgugcagggcuacagagcccugcacagaggccccgccgagagcgugugcaagaugacccacggcaagaccagauggacccagccccagcugaucugcaccggcgagauggagaccagccaguuccccggcgaggagaagccccaggccagccccgagggcagacccgagagcgagaccagcugccuggugaccaccaccgacuuccagauccagaccgagauggccgccaccauggagaccagcaucuucaccaccgaguaccagguggccguggccggcugcguguuccugcugaucagcgugcugcugcugagcggccugaccuggcagagaagacagagaaagagcagaagaaccaucuga

SEQ ID NO: 1993 - RNA, 819 nt, Artificial Sequence
  derived and/or modified sequence opt5 from IL2-RA__Homo_sapiens__AAA67527
auggacagcuaccugcucauguggggccugcuuaccuucaucauggugcccgggugccaggccgagcugugugaugacgauccuccggaaauuccccacgcuacauuuaaggccauggcguauaaagagggaacgaugcucaacugcgaauguaagagaggcuuccggcgcaucaaauccgggucucuguacaugcuuugcaccggaaauagcucccauucuagcugggacaaccaaugucagugcacauccucugcuaccagaaauacaaccaagcaggucacaccucagcccgaggaacaaaaagagcggaagaccacggagaugcagagcccuaugcagcccguugaucaggccucccugccuggccacugucgcgaaccgcccccuugggagaacgaagccaccgagagaauuuaucauuuugugguggggcaaauggucuacuaucagugcgugcagggauaccgggcucuccaccgcggccccgccgagagcguuuguaagaugacacauggcaaaaccagauggacacagccucaacugaucugcaccggggaaauggagacgucucaguuccccggagaagagaagccgcaggcuuccccugaaggccggcccgagagcgagacaucuugucuggugaccacaaccgacuuucaaauucagaccgaaauggccgcgacaauggagacguccaucuucaccacagaauaucaggucgccguggcugggugcguuuuucuccugaucagcgugcuucugcucucuggacugaccuggcagcgcagacaacggaaaucccgcagaacaauuuga

SEQ ID NO: 1994 - protein, 551 aa, Artificial Sequence
  IL2-RB__Homo_sapiens__P14784
MAAPALSWRLPLLILLLPLATSWASAAVNGTSQFTCFYNSRANISCVWSQDGALQDTSCQVHAWPDRRRWNQTCELLPVSQASWACNLILGAPDSQKLTTVDIVTLRVLCREGVRWRVMAIQDFKPFENLRLMAPISLQVVHVETHRCNISWEISQASHYFERHLEFEARTLSPGHTWEEAPLLTLKQKQEWICLETLTPDTQYEFQVRVKPLQGEFTTWSPWSQPLAFRTKPAALGKDTIPWLGHLLVGLSGAFGFIILVYLLINCRNTGPWLKKVLKCNTPDPSKFFSQLSSEHGGDVQKWLSSPFPSSSFSPGGLAPEISPLEVLERDKVTQLLLQQDKVPEPASLSSNHSLTSCFTNQGYFFFHLPDALEIEACQVYFTYDPYSEEDPDEGVAGAPTGSSPQPLQPLSGEDDAYCTFPSRDDLLLFSPSLLGGPSPPSTAPGGSGAGEERMPPSLQERVPRDWDPQPLGPPTPGVPDLVDFQPPPELVLREAGEEVPDAGPREGVSFPWSRPPGQGEFRALNARLPLNTDAYLSLQELQGQDPTHLV

SEQ ID NO: 1995 - RNA, 1656 nt, Artificial Sequence
  IL2-RB__Homo_sapiens__AAA59143
auggcggccccugcucuguccuggcgucugccccuccucauccuccuccugccccuggcuaccucuugggcaucugcagcggugaauggcacuucccaguucacaugcuucuacaacucgagagccaacaucuccugugucuggagccaagauggggcucugcaggacacuuccugccaaguccaugccuggccggacagacggcgguggaaccaaaccugugagcugcuccccgugagucaagcauccugggccugcaaccugauccucggagccccagauucucagaaacugaccacaguugacaucgucacccugagggugcugugccgugagggggugcgauggagggugauggccauccaggacuucaagcccuuugagaaccuucgccugauggcccccaucucccuccaaguuguccacguggagacccacagaugcaacauaagcugggaaaucucccaagccucccacuacuuugaaagacaccuggaguucgaggcccggacgcuguccccaggccacaccugggaggaggccccccugcugacucucaagcagaagcaggaauggaucugccuggagacgcucaccccagacacccaguaugaguuucaggugcgggucaagccucugcaaggcgaguucacgaccuggagccccuggagccagccccuggccuucaggacaaagccugcagcccuugggaaggacaccauuccguggcucggccaccuccucgugggccucagcggggcuuuuggcuucaucaucuuaguguacuugcugaucaacugcaggaacaccgggccauggcugaagaagguccugaaguguaacaccccagaccccucgaaguucuuuucccagcugagcucagagcauggaggagacguccagaaguggcucucuucgcccuuccccucaucguccuucagcccuggcggccuggcaccugagaucucgccacuagaagugcuggagagggacaaggugacgcagcugcuccugcagcaggacaaggugccugagcccgcauccuuaagcagcaaccacucgcugaccagcugcuucaccaaccaggguuacuucuucuuccaccucccggaugccuuggagauagaggccugccagguguacuuuacuuacgaccccuacucagaggaagacccugaugaggguguggccggggcacccacagggucuuccccccaaccccugcagccucugucaggggaggacgacgccuacugcaccuuccccuccagggaugaccugcugcucuucucccccagucuccucgguggccccagccccccaagcacugccccugggggcaguggggccggugaagagaggaugcccccuucuuugcaagaaagaguccccagagacugggacccccagccccuggggccucccaccccaggagucccagaccugguggauuuucagccacccccugagcuggugcugcgagaggcuggggaggaggucccugacgcuggccccagggagggagucaguuuccccugguccaggccuccugggcagggggaguucagggcccuuaaugcucgccugccccugaacacugaugccuacuugucccuccaagaacuccagggucaggacccaacucacuugguguag

SEQ ID NO: 1996 - RNA, 1656 nt, Artificial Sequence
  derived and/or modified sequence opt1 from IL2-RB__Homo_sapiens__AAA59143
auggccgcccccgcgcugagcuggcgccucccgcugcugauccuccugcugccccucgccaccuccugggccagcgccgccgugaacggcaccucccaguucacgugcuucuacaacagccgggcgaacaucuccugcgucuggagccaggacggggcccugcaggacaccuccugccaggugcacgccuggcccgaccgccggcgcuggaaccagaccugcgagcugcuccccgugagccaggccuccugggcgugcaaccugauccugggcgccccggacagccagaagcucaccacggucgacaucgugacccugcgggugcugugccgcgaggggguccgguggcgcgugauggccauccaggacuucaagcccuucgagaaccuccggcugauggcccccaucucccuccaggugguccacguggagacccaccgcugcaacaucagcugggagaucucccaggccagccacuacuucgagcggcaccuggaguucgaggcgcgcacccugucccccggccacacgugggaggaggccccgcugcucacccugaagcagaagcaggaguggaucugccuggagacccucacccccgacacgcaguacgaguuccaggugcgggucaagccccugcagggggaguucaccaccuggagccccuggucccagccgcuggccuuccgcaccaagcccgccgcccucggcaaggacacgauccccuggcugggccaccuccugguggggcugagcggcgcguucggguucaucauccugguguaccuccugaucaacugccggaacaccggccccuggcugaagaagguccucaagugcaacaccccggaccccuccaaguucuucagccagcugagcuccgagcacgggggcgacgugcagaaguggcugagcucccccuuccccagcuccagcuucuccccgggcgggcucgcccccgagaucagcccccuggaggugcuggagcgcgacaaggucacccagcuccugcugcagcaggacaaggugcccgagccggccucccucagcuccaaccacagccugacguccugcuucaccaaccagggcuacuucuucuuccaccuccccgacgcccuggagaucgaggccugccagguguacuucaccuacgaccccuacagcgaggaggaccccgacgagggggucgcgggcgccccgaccggcuccagcccccagccccugcagccgcuguccggggaggacgacgccuacugcacguuccccagccgggacgaccugcuccuguucucccccagccugcucggcgggcccagcccgcccuccaccgcccccggcgggagcggcgccggcgaggagcgcaugcccccgucccugcaggagcgggugccccgcgacugggacccccagccccuggggccgcccacccccggcgugcccgaccucgucgacuuccagccgccgcccgagcuggugcugcgggaggcgggggaggagguccccgacgccggcccccgcgagggggugagcuuccccuggucccgcccgcccggccagggcgaguuccgggcccucaacgcccgccugccccugaacaccgacgcguaccucagccugcaggagcugcaggggcaggaccccacgcaccucguguga

SEQ ID NO: 1997 - RNA, 1656 nt, Artificial Sequence
  derived and/or modified sequence opt2 from IL2-RB__Homo_sapiens__AAA59143
auggccgcccccgcccucuccuggcgccucccccuccucauccuccuccucccccucgccaccuccugggccuccgccgccgucaacggcaccucccaguucaccugcuucuacaacucccgcgccaacaucuccugcgucuggucccaggacggcgcccuccaggacaccuccugccagguccacgccuggcccgaccgccgccgcuggaaccagaccugcgagcuccuccccgucucccaggccuccugggccugcaaccucauccucggcgcccccgacucccagaagcucaccaccgucgacaucgucacccuccgcguccucugccgcgagggcguccgcuggcgcgucauggccauccaggacuucaagcccuucgagaaccuccgccucauggcccccaucucccuccaggucguccacgucgagacccaccgcugcaacaucuccugggagaucucccaggccucccacuacuucgagcgccaccucgaguucgaggcccgcacccucucccccggccacaccugggaggaggccccccuccucacccucaagcagaagcaggaguggaucugccucgagacccucacccccgacacccaguacgaguuccagguccgcgucaagccccuccagggcgaguucaccaccuggucccccuggucccagccccucgccuuccgcaccaagcccgccgcccucggcaaggacaccauccccuggcucggccaccuccucgucggccucuccggcgccuucggcuucaucauccucgucuaccuccucaucaacugccgcaacaccggccccuggcucaagaagguccucaagugcaacacccccgaccccuccaaguucuucucccagcucuccuccgagcacggcggcgacguccagaaguggcucuccucccccuuccccuccuccuccuucucccccggcggccucgcccccgagaucuccccccucgagguccucgagcgcgacaaggucacccagcuccuccuccagcaggacaagguccccgagcccgccucccucuccuccaaccacucccucaccuccugcuucaccaaccagggcuacuucuucuuccaccuccccgacgcccucgagaucgaggccugccaggucuacuucaccuacgaccccuacuccgaggaggaccccgacgagggcgucgccggcgcccccaccggcuccuccccccagccccuccagccccucuccggcgaggacgacgccuacugcaccuuccccucccgcgacgaccuccuccucuucucccccucccuccucggcggccccuccccccccuccaccgcccccggcggcuccggcgccggcgaggagcgcaugccccccucccuccaggagcgcgucccccgcgacugggacccccagccccucggcccccccacccccggcguccccgaccucgucgacuuccagcccccccccgagcucguccuccgcgaggccggcgaggagguccccgacgccggcccccgcgagggcgucuccuuccccuggucccgcccccccggccagggcgaguuccgcgcccucaacgcccgccucccccucaacaccgacgccuaccucucccuccaggagcuccagggccaggaccccacccaccucgucuga

SEQ ID NO: 1998 - RNA, 1656 nt, Artificial Sequence
  derived and/or modified sequence opt3 from IL2-RB__Homo_sapiens__AAA59143
auggccgcucccgcacugagcuggagacucccucuucugaucuuguuacugccacuagccaccuccugggcgucugcugccgugaacggcacaucacaguucacuugcuuuuacaauaguagggcaaacauuagcugugucuggucccaagacggggcccuccaggauacgucuugccagguucacgcuuggccggaccggcgccgauggaaucagaccugugagcugcuucccgugucgcaagcaucaugggccugcaaccugauauugggagcuccugauagccagaagcucacaacuguagacaucgugacccugcguguccuguguagagaaggugugagguggcggguuauggccauucaggauuucaaaccauuugagaaucuccgcuuaauggcgcccaucagucuucaggugguccauguggaaacacacagaugcaacauuuccugggagaucucucaagcaagccauuauuucgaaaggcaccuggaguuugaggcccggaccuuguccccuggccauacuugggaagaggcuccacugcuaacacucaagcagaaacaggaauggauaugucuggagacccuuacgcccgacacucaguacgaguuccaaguacgcguuaagccucugcagggggaauuuaccacauggucaccauggagucagccguuggccuuccgaacuaaacccgcagcucucggaaaggauaccaucccuuggcugggccacuuacuggugggucucagcggggccuuuggauucauuauccuugucuaucuguugauuaauugcagaaacacaggcccauggcuaaagaaagugcugaaguguaauacccccgacccuucuaaauuuuucucccaacucucaagcgagcacggcggggaugugcagaaguggcugaguucuccauuucccuccagcucguucucuccgggaggucuugcgccugaaaucucaccccuggaggucuuggaaagggacaaaguuacgcagcuccuguuacagcaagauaaggugccagagccugccucccugaguagcaaccauucccuaacuucuugcuucacaaaucagggcuacuuuuucuuucaccuccccgacgcacuggagauagaggcuugucagguauauuucaccuacgauccauauagcgaagaagaccccgacgaggggguggccggagcuccuacuggcucaaguccacagccgcuucaacccuuguccggugaagaugacgccuacugcacauuuccuagccgggaugaccugcuccuguucucuccaucacuucugggagggcccaguccuccaagcaccgcacccggcggcuccggggccggagaggagcguaugccgccuucuuugcaggaacgcgucccaagagauugggacccccagccucucggucccccaacgccuggcgugcccgaucugguugacuuucagccaccgccugaguuagugcugagggaagcuggggaggaaguccccgaugcgggaccacgggagggcgugucguuccccuggagccgaccuccaggucaaggggaguuucgcgcacuaaacgccagacucccccugaauaccgacgcuuaccuuuccuugcaggaacugcagggccaggauccuacacaucucguauga

SEQ ID NO: 1999 - RNA, 1656 nt, Artificial Sequence
  derived and/or modified sequence opt4 from IL2-RB__Homo_sapiens__AAA59143
auggccgcccccgcccugagcuggagacugccccugcugauccugcugcugccccuggccaccagcugggccagcgccgccgugaacggcaccagccaguucaccugcuucuacaacagcagagccaacaucagcugcguguggagccaggacggcgcccugcaggacaccagcugccaggugcacgccuggcccgacagaagaagauggaaccagaccugcgagcugcugcccgugagccaggccagcugggccugcaaccugauccugggcgcccccgacagccagaagcugaccaccguggacaucgugacccugagagugcugugcagagagggcgugagauggagagugauggccauccaggacuucaagcccuucgagaaccugagacugauggcccccaucagccugcagguggugcacguggagacccacagaugcaacaucagcugggagaucagccaggccagccacuacuucgagagacaccuggaguucgaggccagaacccugagccccggccacaccugggaggaggccccccugcugacccugaagcagaagcaggaguggaucugccuggagacccugacccccgacacccaguacgaguuccaggugagagugaagccccugcagggcgaguucaccaccuggagccccuggagccagccccuggccuucagaaccaagcccgccgcccugggcaaggacaccauccccuggcugggccaccugcuggugggccugagcggcgccuucggcuucaucauccugguguaccugcugaucaacugcagaaacaccggccccuggcugaagaaggugcugaagugcaacacccccgaccccagcaaguucuucagccagcugagcagcgagcacggcggcgacgugcagaaguggcugagcagccccuuccccagcagcagcuucagccccggcggccuggcccccgagaucagcccccuggaggugcuggagagagacaaggugacccagcugcugcugcagcaggacaaggugcccgagcccgccagccugagcagcaaccacagccugaccagcugcuucaccaaccagggcuacuucuucuuccaccugcccgacgcccuggagaucgaggccugccagguguacuucaccuacgaccccuacagcgaggaggaccccgacgagggcguggccggcgcccccaccggcagcagcccccagccccugcagccccugagcggcgaggacgacgccuacugcaccuuccccagcagagacgaccugcugcuguucagccccagccugcugggcggccccagcccccccagcaccgcccccggcggcagcggcgccggcgaggagagaaugccccccagccugcaggagagagugcccagagacugggacccccagccccugggcccccccacccccggcgugcccgaccugguggacuuccagcccccccccgagcuggugcugagagaggccggcgaggaggugcccgacgccggccccagagagggcgugagcuuccccuggagcagaccccccggccagggcgaguucagagcccugaacgccagacugccccugaacaccgacgccuaccugagccugcaggagcugcagggccaggaccccacccaccugguguga

SEQ ID NO: 2000 - RNA, 1656 nt, Artificial Sequence
  derived and/or modified sequence opt5 from IL2-RB__Homo_sapiens__AAA59143
auggccgcucccgcccugagcuggagacucccucugcuuauccugcuccugccgcuugcgaccuccugggcuucugccgccgugaacggcacaagccaguucacgugcuuuuacaauucccgggcuaacauuucuugugucuggagccaagacggggcccugcaggauaccuccugccagguucacgcuuggcccgaccgcagacgguggaaucagacaugugagcuccugccugugucucaagccagcugggcgugcaaccugauccucggagcccccgauucccagaagcugaccacaguggacauugucacccuucgcgugcuguguagagaaggcguucgguggcgcgugauggcuauccaggauuucaaaccuuuugagaaucucagacugauggcccccauuagccuucaggucgugcauguugaaacacaccggugcaacaucucuugggagaucucccaagcuagccauuauuucgaacgccaccuggaguuugaggccagaacccucucuccugggcauacgugggaagaggcgccgcugcugacccucaagcagaaacaggaauggauuugucuggagacacuuacccccgacacacaguacgaguuccaagugcgggucaagccucugcagggagaauuuaccacguggucccccuggagccagccucucgccuuccgcacaaaacccgcugcccugggcaaggauaccaucccguggcuugggcaucugcucgugggacugucuggcgcuuuuggcuucauuauccugguguaucuccugauuaauugcagaaacacagggccuuggcuuaagaaaguccugaaguguaauacccccgacccuuccaaauuuuucagccaacucuccucugagcacggaggcgauguucagaaguggcugagcucccccuuucccuccucuuccuucagcccugggggacuugccccggaaaucucuccccuggaggugcucgaacgggacaaagugacccagcugcugcuccagcaagauaaggucccugagcccgccagccuguccucuaaccacagccuuacauccugcuucacgaaucagggcuacuuuuucuuucaucugccugacgcucucgagauugaagcgugucagguguauuucaccuacgaucccuauagcgaggaagacccggacgaggggguugccggagcuccuacaggcucuagcccccagccucugcaaccccugagcggcgaagaugacgccuacugcaccuuuccuucucgcgaugaccuucuccuguucucccccagccugcucgggggaccguccccucccucuacagcccccggcgggagcggagcuggcgaggagagaaugccuccgucccugcaggaacgggugcccagagauugggacccucagccccuugggccucccaccccuggaguccccgaucugguggacuuucagccgccucccgagcucguucugcgcgaagccggcgaggaagugccugaugcgggcccccgggagggggucucuuucccguggagcagaccucccggacaaggcgaguuucgcgcucugaacgcccggcuuccucucaauacggacgccuaccugucccugcaggaacuccaggggcaggaucccacacaccugguguga

SEQ ID NO: 2001 - protein, 369 aa, Artificial Sequence
  IL2-RG__Homo_sapiens__P31785
MLKPSLPFTSLLFLQLPLLGVGLNTTILTPNGNEDTTADFFLTTMPTDSLSVSTLPLPEVQCFVFNVEYMNCTWNSSSEPQPTNLTLHYWYKNSDNDKVQKCSHYLFSEEITSGCQLQKKEIHLYQTFVVQLQDPREPRRQATQMLKLQNLVIPWAPENLTLHKLSESQLELNWNNRFLNHCLEHLVQYRTDWDHSWTEQSVDYRHKFSLPSVDGQKRYTFRVRSRFNPLCGSAQHWSEWSHPIHWGSNTSKENPFLFALEAVVISVGSMGLIISLLCVYFWLERTMPRIPTLKNLEDLVTEYHGNFSAWSGVSKGLAESLQPDYSERLCLVSEIPPKGGALGEGPGASPCNQHSPYWAPPCYTLKPET

SEQ ID NO: 2002 - RNA, 1110 nt, Artificial Sequence
  IL2-RG__Homo_sapiens__AAA59145
auguugaagccaucauuaccauucacaucccucuuauuccugcagcugccccugcugggaguggggcugaacacgacaauucugacgcccaaugggaaugaagacaccacagcugauuucuuccugaccacuaugcccacugacucccucaguguuuccacucuaccccucccagagguucaguguuuuguguucaaugucgaguacaugaauugcacuuggaacagcagcucugagccccagccuaccaaccucacucugcauuauugguacaagaacucggauaaugauaaaguccagaagugcagccacuaucuauucucugaagaaaucacuucuggcugucaguugcaaaaaaaggagauccaccucuaccaaacauuuguuguucagcuccaggacccacgggaacccaggagacaggccacacagaugcuaaaacugcagaaucuggugauccccugggcuccagagaaccuaacacuucacaaacugagugaaucccagcuagaacugaacuggaacaacagauucuugaaccacuguuuggagcacuuggugcaguaccggacugacugggaccacagcuggacugaacaaucaguggauuauagacauaaguucuccuugccuaguguggaugggcagaaacgcuacacguuucguguucggagccgcuuuaacccacucuguggaagugcucagcauuggagugaauggagccacccaauccacugggggagcaauacuucaaaagagaauccuuuccuguuugcauuggaagccgugguuaucucuguuggcuccaugggauugauuaucagccuucucuguguguauuucuggcuggaacggacgaugccccgaauucccacccugaagaaccuagaggaucuuguuacugaauaccacgggaacuuuucggccuggaguggugugucuaagggacuggcugagagucugcagccagacuacagugaacgacucugccucgucagugagauucccccaaaaggaggggcccuuggggaggggccuggggccuccccaugcaaccagcauagccccuacugggcccccccauguuacacccuaaagccugaaaccuga

SEQ ID NO: 2003 - RNA, 1110 nt, Artificial Sequence
  derived and/or modified sequence opt1 from IL2-RG__Homo_sapiens__AAA59145
augcugaagcccagccucccguucaccucccugcuguuccuccagcugccccugcucggcguggggcugaacaccacgauccugacccccaacggcaacgaggacaccaccgccgacuucuuccucacgaccaugcccaccgacagccuguccgucagcacccugccgcuccccgaggugcagugcuucguguucaacgucgaguacaugaacugcacguggaacuccagcuccgagccccagcccaccaaccugacccugcacuacugguacaagaacagcgacaacgacaaggugcagaagugcucccacuaccucuucagcgaggagaucaccuccgggugccagcugcagaagaaggagauccaccuguaccagacguucgugguccagcuccaggacccgcgcgagccccggcgccaggccacccagaugcugaagcugcagaaccucgugauccccugggcgcccgagaaccugacccugcacaagcucagcgagucccagcuggagcugaacuggaacaaccgguuccucaaccacugccuggagcaccuggugcaguaccgcaccgacugggaccacagcuggacggagcaguccgucgacuaccggcacaaguucagccucccguccguggacggccagaagcgcuacaccuuccgggugcgcagccgguucaacccccugugcggguccgcccagcacuggagcgaguggagccaccccauccacuggggcuccaacaccagcaaggagaaccccuuccuguucgcccucgaggccgucgugaucuccgugggcagcauggggcugaucaucucccugcucugcgucuacuucuggcuggagcgcaccaugccgcggauccccacgcugaagaaccucgaggaccuggugaccgaguaccacggcaacuucagcgccugguccggggugagcaagggccuggcggagucccuccagcccgacuacagcgagcgccugugccuggucuccgagaucccgcccaagggcggggcccucggcgaggggcccggcgccagccccugcaaccagcacucccccuacugggccccgcccugcuacacccugaagcccgagaccuga

SEQ ID NO: 2004 - RNA, 1110 nt, Artificial Sequence
  derived and/or modified sequence opt2 from IL2-RG__Homo_sapiens__AAA59145
augcucaagcccucccuccccuucaccucccuccucuuccuccagcucccccuccucggcgucggccucaacaccaccauccucacccccaacggcaacgaggacaccaccgccgacuucuuccucaccaccaugcccaccgacucccucuccgucuccacccucccccuccccgagguccagugcuucgucuucaacgucgaguacaugaacugcaccuggaacuccuccuccgagccccagcccaccaaccucacccuccacuacugguacaagaacuccgacaacgacaagguccagaagugcucccacuaccucuucuccgaggagaucaccuccggcugccagcuccagaagaaggagauccaccucuaccagaccuucgucguccagcuccaggacccccgcgagccccgccgccaggccacccagaugcucaagcuccagaaccucgucauccccugggcccccgagaaccucacccuccacaagcucuccgagucccagcucgagcucaacuggaacaaccgcuuccucaaccacugccucgagcaccucguccaguaccgcaccgacugggaccacuccuggaccgagcaguccgucgacuaccgccacaaguucucccuccccuccgucgacggccagaagcgcuacaccuuccgcguccgcucccgcuucaacccccucugcggcuccgcccagcacugguccgaguggucccaccccauccacuggggcuccaacaccuccaaggagaaccccuuccucuucgcccucgaggccgucgucaucuccgucggcuccaugggccucaucaucucccuccucugcgucuacuucuggcucgagcgcaccaugccccgcauccccacccucaagaaccucgaggaccucgucaccgaguaccacggcaacuucuccgccugguccggcgucuccaagggccucgccgagucccuccagcccgacuacuccgagcgccucugccucgucuccgagaucccccccaagggcggcgcccucggcgagggccccggcgccucccccugcaaccagcacucccccuacugggccccccccugcuacacccucaagcccgagaccuga

SEQ ID NO: 2005 - RNA, 1110 nt, Artificial Sequence
  derived and/or modified sequence opt3 from IL2-RG__Homo_sapiens__AAA59145
augcugaagcccagccucccuuucaccucccuucuguuuuugcaguuaccacugcuaggcguggggcucaacacaacuauccugacgccgaauggaaacgaggacaccacagccgauuucuuucuuacuaccaugcccacagacucucugucagucaguaccuugccucucccagaaguucaaugcuucguguuuaauguagaguacaugaacuguacuuggaauagcuccucugaaccccagccuacaaaccugacccugcacuauugguacaaaaauucggauaacgacaaggugcagaaaugcucacauuaucucuucagcgaggaaaucacgagugguugucaguuacaaaagaaagagauacaccuguaccagacuuuugucgugcagcuucaggauccaagagagcccaggcggcaagcuacccagauguugaagcugcagaaucuaguuaucccuugggcaccagaaaaccucacacugcauaaacuuuccgagucucagcuggaauugaauuggaacaaucgcuuccucaaccacugccuggagcauuuagugcaauaucgaacugacugggaucacagcuggaccgagcaguccgucgacuaccgucacaaguuuucacugccgaguguggauggccagaagagauauacauucaggguacggagccgcuuuaauccccucugugggucugcccaacauugguccgaauggucacacccuauucauuggggaagcaacaccaguaaagagaacccauuccuuuuugcgcuggaagcuguugugaucucugucggcuccauggguuugauuaucagccuacugugcguguacuucuggcucgagagaacgaugcccaggauaccuacucugaagaaucuugaagaccuggugacagaguaccacgggaacuucucggccuggucuggagucuccaaaggcuuggcagagucacuccagccagauuauagugaacggcuguguuuaguuagcgagauucccccgaagggcggggcccugggagaagguccuggcgcuucccccugcaaucagcacucuccauacugggcaccucccuguuauacccuaaagccagagacuuga

SEQ ID NO: 2006 - RNA, 1110 nt, Artificial Sequence
  derived and/or modified sequence opt4 from IL2-RG__Homo_sapiens__AAA59145
augcugaagcccagccugcccuucaccagccugcuguuccugcagcugccccugcugggcgugggccugaacaccaccauccugacccccaacggcaacgaggacaccaccgccgacuucuuccugaccaccaugcccaccgacagccugagcgugagcacccugccccugcccgaggugcagugcuucguguucaacguggaguacaugaacugcaccuggaacagcagcagcgagccccagcccaccaaccugacccugcacuacugguacaagaacagcgacaacgacaaggugcagaagugcagccacuaccuguucagcgaggagaucaccagcggcugccagcugcagaagaaggagauccaccuguaccagaccuucguggugcagcugcaggaccccagagagcccagaagacaggccacccagaugcugaagcugcagaaccuggugauccccugggcccccgagaaccugacccugcacaagcugagcgagagccagcuggagcugaacuggaacaacagauuccugaaccacugccuggagcaccuggugcaguacagaaccgacugggaccacagcuggaccgagcagagcguggacuacagacacaaguucagccugcccagcguggacggccagaagagauacaccuucagagugagaagcagauucaacccccugugcggcagcgcccagcacuggagcgaguggagccaccccauccacuggggcagcaacaccagcaaggagaaccccuuccuguucgcccuggaggccguggugaucagcgugggcagcaugggccugaucaucagccugcugugcguguacuucuggcuggagagaaccaugcccagaauccccacccugaagaaccuggaggaccuggugaccgaguaccacggcaacuucagcgccuggagcggcgugagcaagggccuggccgagagccugcagcccgacuacagcgagagacugugccuggugagcgagaucccccccaagggcggcgcccugggcgagggccccggcgccagccccugcaaccagcacagccccuacugggccccccccugcuacacccugaagcccgagaccuga

SEQ ID NO: 2007 - RNA, 1110 nt, Artificial Sequence
  derived and/or modified sequence opt5 from IL2-RG__Homo_sapiens__AAA59145
augcugaagcccagccucccuuucaccucccugcuuuuucugcagcucccgcugcuuggcguggggcugaacacaacgauccucacccccaauggaaacgaggacacaaccgccgauuucuuucugacaaccaugccuacagacucucugagcgucuccacccucccccugccugaaguucaaugcuucguguuuaauguggaguacaugaacuguacguggaacucuagcuccgaaccccagccuaccaaucuuacacugcacuauugguacaaaaauucugauaacgacaagguccagaaaugcagccauuaucucuucuccgaggaaaucaccagcggcugucagcugcaaaagaaagagauccaccuuuaccagacauuugugguucagcugcaggauccgagagagccccggcgccaagccacccagaugcucaagcugcagaaucuggugauuccuugggcccccgaaaaccucacgcugcauaaacuuucugagucccagcuggaacucaauuggaacaauagauuccugaaccacugccuugagcaucugguccaauaucggacagacugggaucacagcuggaccgagcagucuguggacuaccgccacaaguuuucccucccuagcguugaugggcagaagagauauacauuccgggugcgcucuagauuuaauccccuguguggauccgcgcaacauuggagcgaauggucccacccgauccauuggggcucuaacaccagcaaagagaacccuuuccuguuugcucucgaagccgucgugauuuccguggggagcaugggacugaucaucucucuucugugcgucuacuucuggcucgagcggaccaugccccgcauuccuacacugaagaaucuugaagaccugguuacggaguaccacggcaacuucuccgccuggagcggcgugucuaaagggcucgcugagagccugcagcccgauuauuccgaaagacugugucucgugucugagauucccccuaagggaggcgcccugggggaaggaccgggcgcuagccccugcaaucagcacuccccuuacugggcucccccuuguuauacccuuaagcccgagacauga

SEQ ID NO: 2008 - protein, 184 aa, Artificial Sequence
  IMP3__Homo_sapiens__Q9NV31
MVRKLKFHEQKLLKQVDFLNWEVTDHNLHELRVLRRYRLQRREDYTRYNQLSRAVRELARRLRDLPERDQFRVRASAALLDKLYALGLVPTRGSLELCDFVTASSFCRRRLPTVLLKLRMAQHLQAAVAFVEQGHVRVGPDVVTDPAFLVTRSMEDFVTWVDSSKIKRHVLEYNEERDDFDLEA

SEQ ID NO: 2009 - RNA, 555 nt, Artificial Sequence
  IMP3__Homo_sapiens__AAH06487
auggugcggaagcuuaaguuccacgagcagaagcugcugaagcagguggacuuccugaacugggaggucaccgaccacaaccugcacgagcugcgcgugcugcggcguuaccggcugcagcggcgggaggacuacacgcgcuacaaccagcugagccgugccgugcgugagcuggcgcggcgccugcgcgaccugcccgaacgcgaccaguuccgcgugcgcgcuucggccgcgcugcuggacaagcuguaugcucucggcuuggugcccacgcgcgguucgcuggagcucugcgacuucgucacggccucguccuucugccgccgccgccuccccaccgugcuccucaagcugcgcauggcgcagcaccuucaggcugcaguggccuuuguggagcaagggcacguacgcgugggcccugacgugguuaccgaccccgccuuccuugucacgcgcagcauggaggacuuugucacuuggguggacucguccaagaucaagcggcacgugcuagaguacaaugaggagcgcgaugacuucgaucuggaagccuag

SEQ ID NO: 2010 - RNA, 555 nt, Artificial Sequence
  derived and/or modified sequence opt1 from IMP3__Homo_sapiens__AAH06487
auggugcgcaagcugaaguuccacgagcagaagcuccugaagcaggucgacuuccugaacugggaggugaccgaccacaaccuccacgagcugcgggugcugcgccgguaccgccuccagcggcgcgaggacuacacccgguacaaccagcugagccgcgccguccgggagcuggcccgccggcuccgcgaccugcccgagcgggaccaguuccgcgugcgggcguccgccgcccugcucgacaagcuguacgcccugggccucgugccgacgcgcgggagccuggagcugugcgacuucgucaccgccuccagcuucugccggcgccggcuccccaccgugcugcugaagcuccgcauggcgcagcaccuccaggccgccguggccuucgucgagcagggccacgugcggguggggcccgacgucgugaccgaccccgcguuccuggugacgcgcuccauggaggacuucgucaccuggguggacagcuccaagaucaagcgccacgugcuggaguacaacgaggagcgggacgacuucgaccuggaggccuga

SEQ ID NO: 2011 - RNA, 555 nt, Artificial Sequence
  derived and/or modified sequence opt2 from IMP3__Homo_sapiens__AAH06487
augguccgcaagcucaaguuccacgagcagaagcuccucaagcaggucgacuuccucaacugggaggucaccgaccacaaccuccacgagcuccgcguccuccgccgcuaccgccuccagcgccgcgaggacuacacccgcuacaaccagcucucccgcgccguccgcgagcucgcccgccgccuccgcgaccuccccgagcgcgaccaguuccgcguccgcgccuccgccgcccuccucgacaagcucuacgcccucggccucguccccacccgcggcucccucgagcucugcgacuucgucaccgccuccuccuucugccgccgccgccuccccaccguccuccucaagcuccgcauggcccagcaccuccaggccgccgucgccuucgucgagcagggccacguccgcgucggccccgacgucgucaccgaccccgccuuccucgucacccgcuccauggaggacuucgucaccugggucgacuccuccaagaucaagcgccacguccucgaguacaacgaggagcgcgacgacuucgaccucgaggccuga

SEQ ID NO: 2012 - RNA, 555 nt, Artificial Sequence
  derived and/or modified sequence opt3 from IMP3__Homo_sapiens__AAH06487
auggugagaaagcugaaauuccacgagcagaagcuccuuaaacaagucgacuuucugaacugggaaguuaccgaucauaauuugcacgaguuaagggugcugcggcgcuaccgacuacagcguagagaagacuauacaagguacaaccagcucagccgggccguacgcgagcuggcuagaaggcuucgggaucugcccgaacgcgaccaguuccgagugagagcauccgccgcguugcucgauaagcuguaugcucugggccucgucccuacuagggggucuuuagagcugugcgacuuugugacggccucaaguuucugucggcgucgccuuccaaccguuuugcugaaacuaagaauggcacaacaucuccaggccgcuguggcauuugucgagcagggacacgugaggguagguccggauguugugacagaccccgccuuccuggucacucggagcauggaagauuuugugaccuggguggacuccucuaagaucaagcgacauguccuugaguacaaugaggaacgcgaugacuucgaucuggaggcuuga

SEQ ID NO: 2013 - RNA, 555 nt, Artificial Sequence
  derived and/or modified sequence opt4 from IMP3__Homo_sapiens__AAH06487
auggugagaaagcugaaguuccacgagcagaagcugcugaagcagguggacuuccugaacugggaggugaccgaccacaaccugcacgagcugagagugcugagaagauacagacugcagagaagagaggacuacaccagauacaaccagcugagcagagccgugagagagcuggccagaagacugagagaccugcccgagagagaccaguucagagugagagccagcgccgcccugcuggacaagcuguacgcccugggccuggugcccaccagaggcagccuggagcugugcgacuucgugaccgccagcagcuucugcagaagaagacugcccaccgugcugcugaagcugagaauggcccagcaccugcaggccgccguggccuucguggagcagggccacgugagagugggccccgacguggugaccgaccccgccuuccuggugaccagaagcauggaggacuucgugaccuggguggacagcagcaagaucaagagacacgugcuggaguacaacgaggagagagacgacuucgaccuggaggccuga

SEQ ID NO: 2014 - RNA, 555 nt, Artificial Sequence
  derived and/or modified sequence opt5 from IMP3__Homo_sapiens__AAH06487
auggugagaaagcugaaauuccacgagcagaagcuccugaaacaagucgacuuucuuaacugggaaguuaccgaucauaaucugcacgagcuccgggugcugcgcagauaccggcuucagcgcagagaagacuauacacgguacaaccagcugagccgcgccgugagagagcucgcucggcgccugagagaucugcccgaacgggaccaguuccgcgucagagccuccgcggcucuccuggauaaacuuuaugcccugggccucgugccuacgcgggggucucuggagcuuugcgacuuuguuaccgccagcuccuucugucgcagacggcugccgacagugcuccugaagcugagaauggcucaacaucuccaggccgcugucgccuuuguggagcagggacacguucgcgugggccccgaugucgugaccgacccugcguuccuggugacacggucuauggaagauuuugucaccuggguugacagcuccaagaucaagagacaugugcuugaguacaaugaggaacgcgaugacuucgaucuggaggccuga

SEQ ID NO: 2015 - protein, 1049 aa, Artificial Sequence
  ITA5__Homo_sapiens__P08648
MGSRTPESPLHAVQLRWGPRRRPPLLPLLLLLLPPPPRVGGFNLDAEAPAVLSGPPGSFFGFSVEFYRPGTDGVSVLVGAPKANTSQPGVLQGGAVYLCPWGASPTQCTPIEFDSKGSRLLESSLSSSEGEEPVEYKSLQWFGATVRAHGSSILACAPLYSWRTEKEPLSDPVGTCYLSTDNFTRILEYAPCRSDFSWAAGQGYCQGGFSAEFTKTGRVVLGGPGSYFWQGQILSATQEQIAESYYPEYLINLVQGQLQTRQASSIYDDSYLGYSVAVGEFSGDDTEDFVAGVPKGNLTYGYVTILNGSDIRSLYNFSGEQMASYFGYAVAATDVNGDGLDDLLVGAPLLMDRTPDGRPQEVGRVYVYLQHPAGIEPTPTLTLTGHDEFGRFGSSLTPLGDLDQDGYNDVAIGAPFGGETQQGVVFVFPGGPGGLGSKPSQVLQPLWAASHTPDFFGSALRGGRDLDGNGYPDLIVGSFGVDKAVVYRGRPIVSASASLTIFPAMFNPEERSCSLEGNPVACINLSFCLNASGKHVADSIGFTVELQLDWQKQKGGVRRALFLASRQATLTQTLLIQNGAREDCREMKIYLRNESEFRDKLSPIHIALNFSLDPQAPVDSHGLRPALHYQSKSRIEDKAQILLDCGEDNICVPDLQLEVFGEQNHVYLGDKNALNLTFHAQNVGEGGAYEAELRVTAPPEAEYSGLVRHPGNFSSLSCDYFAVNQSRLLVCDLGNPMKAGASLWGGLRFTVPHLRDTKKTIQFDFQILSKNLNNSQSDVVSFRLSVEAQAQVTLNGVSKPEAVLFPVSDWHPRDQPQKEEDLGPAVHHVYELINQGPSSISQGVLELSCPQALEGQQLLYVTRVTGLNCTTNHPINPKGLELDPEGSLHHQQKREAPSRSSASSGPQILKCPEAECFRLRCELGPLHQQESQSLQLHFRVWAKTFLQREHQPFSLQCEAVYKALKMPYRILPRQLPQKERQVATAVQWTKAEGSYGVPLWIIILAILFGLLLLGLLIYILYKLGFFKRSLPYGTAMEKAQLKPPATSDA

SEQ ID NO: 2016 - RNA, 3150 nt, Artificial Sequence
  ITA5__Homo_sapiens__AAH08786
auggggagccggacgccagaguccccucuccacgccgugcagcugcgcuggggcccccggcgccgacccccgcugcugccgcugcuguugcugcugcugccgccgccacccagggucgggggcuucaacuuagacgcggaggccccagcaguacucucggggcccccgggcuccuucuucggauucucaguggaguuuuaccggccgggaacagacggggucagugugcuggugggagcacccaaggcuaauaccagccagccaggagugcugcaggguggugcugucuaccucuguccuuggggugccagccccacacagugcacccccauugaauuugacagcaaaggcucucggcuccuggaguccucacuguccagcucagagggagaggagccuguggaguacaaguccuugcagugguucggggcaacaguucgagcccauggcuccuccaucuuggcaugcgcuccacuguacagcuggcgcacagagaaggagccacugagcgaccccgugggcaccugcuaccucuccacagauaacuucacccgaauucuggaguaugcacccugccgcucagauuucagcugggcagcaggacaggguuacugccaaggaggcuucagugccgaguucaccaagacuggccgugugguuuuagguggaccaggaagcuauuucuggcaaggccagauccugucugccacucaggagcagauugcagaaucuuauuaccccgaguaccugaucaaccugguucaggggcagcugcagacucgccaggccaguuccaucuaugaugacagcuaccuaggauacucuguggcuguuggugaauucaguggugaugacacagaagacuuuguugcuggugugcccaaagggaaccucacuuacggcuaugucaccauccuuaauggcucagacauucgaucccucuacaacuucucaggggaacagauggccuccuacuuuggcuaugcaguggccgccacagacgucaauggggacgggcuggaugacuugcuggugggggcaccccugcucauggaucggaccccugacgggcggccucaggaggugggcagggucuacgucuaccugcagcacccagccggcauagagcccacgcccacccuuacccucacuggccaugaugaguuuggccgauuuggcagcuccuugaccccccugggggaccuggaccaggauggcuacaaugauguggccaucggggcucccuuugguggggagacccagcagggaguaguguuuguauuuccugggggcccaggagggcugggcucuaagccuucccagguucugcagccccugugggcagccagccacaccccagacuucuuuggcucugcccuucgaggaggccgagaccuggauggcaauggauauccugaucugauugugggguccuuugguguggacaaggcugugguauacaggggccgccccaucguguccgcuagugccucccucaccaucuuccccgccauguucaacccagaggagcggagcugcagcuuagaggggaacccuguggccugcaucaaccuuagcuucugccucaaugcuucuggaaaacacguugcugacuccauugguuucacaguggaacuucagcuggacuggcagaagcagaagggagggguacggcgggcacuguuccuggccuccaggcaggcaacccugacccagacccugcucauccagaauggggcucgagaggauugcagagagaugaagaucuaccucaggaacgagucagaauuucgagacaaacucucgccgauucacaucgcucucaacuucuccuuggacccccaagccccaguggacagccacggccucaggccagcccuacauuaucagagcaagagccggauagaggacaaggcucagaucuugcuggacuguggagaagacaacaucugugugccugaccugcagcuggaaguguuuggggagcagaaccauguguaccugggugacaagaaugcccugaaccucacuuuccaugcccagaaugugggugaggguggcgccuaugaggcugagcuucgggucaccgccccuccagaggcugaguacucaggacucgucagacacccagggaacuucuccagccugagcugugacuacuuugccgugaaccagagccgccugcuggugugugaccugggcaaccccaugaaggcaggagccagucugugggguggccuucgguuuacagucccucaucuccgggacacuaagaaaaccauccaguuugacuuccagauccucagcaagaaucucaacaacucgcaaagcgacgugguuuccuuucggcucuccguggaggcucaggcccaggucacccugaacggugucuccaagccugaggcagugcuauucccaguaagcgacuggcauccccgagaccagccucagaaggaggaggaccugggaccugcuguccaccaugucuaugagcucaucaaccaaggccccagcuccauuagccagggugugcuggaacucagcuguccccaggcucuggaaggucagcagcuccuauaugugaccagaguuacgggacucaacugcaccaccaaucaccccauuaacccaaagggccuggaguuggaucccgaggguucccugcaccaccagcaaaaacgggaagcuccaagccgcagcucugcuuccucgggaccucagauccugaaaugcccggaggcugaguguuucaggcugcgcugugagcucgggccccugcaccaacaagagagccaaagucugcaguugcauuuccgagucugggccaagacuuucuugcagcgggagcaccagccauuuagccugcagugugaggcuguguacaaagcccugaagaugcccuaccgaauccugccucggcagcugccccaaaaagagcgucagguggccacagcugugcaauggaccaaggcagaaggcagcuauggcgucccacuguggaucaucauccuagccauccuguuuggccuccugcuccuaggucuacucaucuacauccucuacaagcuuggauucuucaaacgcucccucccauauggcaccgccauggaaaaagcucagcucaagccuccagccaccucugaugccuga

SEQ ID NO: 2017 - RNA, 3150 nt, Artificial Sequence
  derived and/or modified sequence opt1 from ITA5__Homo_sapiens__AAH08786
augggcagccgcacccccgaguccccgcugcacgccgugcagcuccggugggggccccgccggcgccccccccugcugccgcuccugcugcuccugcugcccccccccccgcgggucggcggguucaaccucgacgccgaggcgcccgccgugcugagcggcccccccggguccuucuucggcuucagcguggaguucuaccgcccgggcaccgacggggucuccgugcuggugggcgcccccaaggccaacacgagccagcccgggguccuccagggcggggccguguaccugugccccuggggcgcguccccgacccagugcacccccaucgaguucgacagcaagggcucccggcugcucgagagcucccugagcuccagcgagggggaggagcccguggaguacaagucccugcagugguucggcgccaccguccgcgcccacgggagcuccauccucgccugcgcgccccuguacagcuggcggacggagaaggagccgcuguccgaccccgugggcaccugcuaccucagcaccgacaacuucacccgcauccuggaguacgcccccugccggagcgacuucuccugggccgccggccagggguacugccagggcggguucagcgccgaguucacgaagaccggccgcgugguccuggggggccccggcuccuacuucuggcaggggcagauccucagcgcgacccaggagcagaucgccgaguccuacuacccggaguaccugaucaaccuggugcagggccagcuccagacccggcaggccagcuccaucuacgacgacagcuaccugggguacuccguggccgucggcgaguucagcggggacgacacggaggacuucguggccggcgugcccaagggcaaccugaccuacggguacgucaccauccucaacggcuccgacauccgcagccuguacaacuucuccggggagcagauggcgagcuacuucggcuacgccguggccgccaccgacgugaacggggacggccuggacgaccuccuggucggcgccccccugcucauggaccggacgcccgacgggcgcccgcaggaggugggccggguguacgucuaccugcagcaccccgcggggaucgagcccaccccgacccugacccucacgggccacgacgaguucggccgcuucggguccagccugaccccccugggcgaccucgaccaggacggguacaacgacguggccaucggcgcccccuucgggggcgagacccagcagggcgucguguucguguuccccgggggcccggggggccugggguccaagcccagccagguccugcagccccucugggccgccucccacacccccgacuucuucggcagcgcgcugcggggcgggcgcgaccuggacggcaacggguacccggaccucaucgugggcagcuucgggguggacaaggccgucguguaccggggccgccccaucguguccgccagcgccucccugacgaucuuccccgcgauguucaaccccgaggagcgcagcugcucccuggagggcaacccggucgccugcaucaaccugagcuucugccucaacgccuccgggaagcacguggccgacagcaucggcuucaccguggagcugcagcuggacuggcagaagcagaaggggggcguccggcgcgcccucuuccuggcgucccggcaggccacccugacccagacgcuccugauccagaacggggcccgcgaggacugccgggagaugaagaucuaccugcgcaacgagagcgaguuccgggacaagcucucccccauccacaucgcccugaacuucagccuggacccccaggcccccguggacucccacggccuccgcccggcgcugcacuaccagagcaagucccggaucgaggacaaggcccagauccugcucgacugcggcgaggacaacaucugcgugcccgaccugcagcuggaggucuucggggagcagaaccacguguaccucggcgacaagaacgcccugaaccugaccuuccacgcccagaacgugggggagggcggcgccuacgaggcggagcuccgcgucaccgccccccccgaggccgaguacagcgggcuggugcggcacccgggcaacuucuccagccugagcugcgacuacuucgccgugaaccagucccgccuccuggucugcgaccuggggaaccccaugaaggcgggcgccagccucugggggggccugcgguucaccgugccccaccugcgcgacacgaagaagaccauccaguucgacuuccagauccucuccaagaaccugaacaacagccaguccgacguggucagcuuccggcuguccguggaggcccaggcccaggugacccucaacggcgucagcaagcccgaggccgugcuguucccgguguccgacuggcacccccgcgaccagccccagaaggaggaggaccuggggccggcgguccaccacguguacgagcucaucaaccagggccccagcuccaucagccagggggugcuggagcuguccugcccccaggcccucgagggccagcagcugcuguacgucacccgggugacggggcucaacugcaccaccaaccaccccaucaacccgaagggccuggagcuggaccccgagggcagccuccaccaccagcagaagcgcgaggcccccucccggagcuccgccagcuccgggccccagauccugaagugcccggaggccgagugcuuccgccugcgcugcgagcucggcccccugcaccagcaggagagccagagccugcagcuccacuuccgggugugggcgaagaccuuccugcagcgcgagcaccagcccuucucccugcagugcgaggccgucuacaaggcccucaagaugcccuaccggauccugccgcgccagcugccccagaaggagcggcagguggccaccgccgugcaguggacgaaggcggaggggagcuacggcgucccccucuggaucaucauccuggccauccuguucgggcuccugcugcucggccugcugaucuacauccucuacaagcugggcuucuucaagcgcucccugcccuacgggaccgccauggagaaggcccagcucaagccgcccgcgaccagcgacgccuga

SEQ ID NO: 2018 - RNA, 3150 nt, Artificial Sequence
  derived and/or modified sequence opt2 from ITA5__Homo_sapiens__AAH08786
augggcucccgcacccccgaguccccccuccacgccguccagcuccgcuggggcccccgccgccgccccccccuccucccccuccuccuccuccuccuccccccccccccccgcgucggcggcuucaaccucgacgccgaggcccccgccguccucuccggcccccccggcuccuucuucggcuucuccgucgaguucuaccgccccggcaccgacggcgucuccguccucgucggcgcccccaaggccaacaccucccagcccggcguccuccagggcggcgccgucuaccucugccccuggggcgccucccccacccagugcacccccaucgaguucgacuccaagggcucccgccuccucgaguccucccucuccuccuccgagggcgaggagcccgucgaguacaagucccuccagugguucggcgccaccguccgcgcccacggcuccuccauccucgccugcgccccccucuacuccuggcgcaccgagaaggagccccucuccgaccccgucggcaccugcuaccucuccaccgacaacuucacccgcauccucgaguacgcccccugccgcuccgacuucuccugggccgccggccagggcuacugccagggcggcuucuccgccgaguucaccaagaccggccgcgucguccucggcggccccggcuccuacuucuggcagggccagauccucuccgccacccaggagcagaucgccgaguccuacuaccccgaguaccucaucaaccucguccagggccagcuccagacccgccaggccuccuccaucuacgacgacuccuaccucggcuacuccgucgccgucggcgaguucuccggcgacgacaccgaggacuucgucgccggcguccccaagggcaaccucaccuacggcuacgucaccauccucaacggcuccgacauccgcucccucuacaacuucuccggcgagcagauggccuccuacuucggcuacgccgucgccgccaccgacgucaacggcgacggccucgacgaccuccucgucggcgccccccuccucauggaccgcacccccgacggccgcccccaggaggucggccgcgucuacgucuaccuccagcaccccgccggcaucgagcccacccccacccucacccucaccggccacgacgaguucggccgcuucggcuccucccucaccccccucggcgaccucgaccaggacggcuacaacgacgucgccaucggcgcccccuucggcggcgagacccagcagggcgucgucuucgucuuccccggcggccccggcggccucggcuccaagcccucccagguccuccagccccucugggccgccucccacacccccgacuucuucggcuccgcccuccgcggcggccgcgaccucgacggcaacggcuaccccgaccucaucgucggcuccuucggcgucgacaaggccgucgucuaccgcggccgccccaucgucuccgccuccgccucccucaccaucuuccccgccauguucaaccccgaggagcgcuccugcucccucgagggcaaccccgucgccugcaucaaccucuccuucugccucaacgccuccggcaagcacgucgccgacuccaucggcuucaccgucgagcuccagcucgacuggcagaagcagaagggcggcguccgccgcgcccucuuccucgccucccgccaggccacccucacccagacccuccucauccagaacggcgcccgcgaggacugccgcgagaugaagaucuaccuccgcaacgaguccgaguuccgcgacaagcucucccccauccacaucgcccucaacuucucccucgacccccaggcccccgucgacucccacggccuccgccccgcccuccacuaccaguccaagucccgcaucgaggacaaggcccagauccuccucgacugcggcgaggacaacaucugcguccccgaccuccagcucgaggucuucggcgagcagaaccacgucuaccucggcgacaagaacgcccucaaccucaccuuccacgcccagaacgucggcgagggcggcgccuacgaggccgagcuccgcgucaccgccccccccgaggccgaguacuccggccucguccgccaccccggcaacuucuccucccucuccugcgacuacuucgccgucaaccagucccgccuccucgucugcgaccucggcaaccccaugaaggccggcgccucccucuggggcggccuccgcuucaccgucccccaccuccgcgacaccaagaagaccauccaguucgacuuccagauccucuccaagaaccucaacaacucccaguccgacgucgucuccuuccgccucuccgucgaggcccaggcccaggucacccucaacggcgucuccaagcccgaggccguccucuuccccgucuccgacuggcacccccgcgaccagccccagaaggaggaggaccucggccccgccguccaccacgucuacgagcucaucaaccagggccccuccuccaucucccagggcguccucgagcucuccugcccccaggcccucgagggccagcagcuccucuacgucacccgcgucaccggccucaacugcaccaccaaccaccccaucaaccccaagggccucgagcucgaccccgagggcucccuccaccaccagcagaagcgcgaggcccccucccgcuccuccgccuccuccggcccccagauccucaagugccccgaggccgagugcuuccgccuccgcugcgagcucggcccccuccaccagcaggagucccagucccuccagcuccacuuccgcgucugggccaagaccuuccuccagcgcgagcaccagcccuucucccuccagugcgaggccgucuacaaggcccucaagaugcccuaccgcauccucccccgccagcucccccagaaggagcgccaggucgccaccgccguccaguggaccaaggccgagggcuccuacggcgucccccucuggaucaucauccucgccauccucuucggccuccuccuccucggccuccucaucuacauccucuacaagcucggcuucuucaagcgcucccuccccuacggcaccgccauggagaaggcccagcucaagccccccgccaccuccgacgccuga

SEQ ID NO: 2019 - RNA, 3150 nt, Artificial Sequence
  derived and/or modified sequence opt3 from ITA5__Homo_sapiens__AAH08786
augggcagcagaacccccgaguccccucugcacgccgugcagcucaggugggggccacggcgccgaccgccccuucugccuuuguuacugcuacuccugccacccccuccacgugucggagguuucaaccuugacgcugaagcacccgccguucugucuggcccuccagggucauuuuucggauuuaguguggaguucuacagaccgggcacagaugguguaagcguguuggucggggcgcccaaggcuaauacuucccaaccuggagugcuccagggcggcgccguuuaucugugcccauggggagcaucucccacgcaguguaccccuaucgaauuugacucgaaagggucaaggcugcucgagagcaguuuauccucuagcgaaggugaggagccaguggaauacaagucccugcagugguucggcgccacaguccgggcucaugggucaaguauucuugcaugcgcccccuuguauagcuggcgcacugagaaagaaccgcugucugauccugugggaaccuguuaccuauccacagacaacuuuaccagaauacucgaguaugcucccugcaggucagauuucagcugggccgcgggccaagguuacugucaagggggauuuagugcagaguucacuaagacaggccggguaguucugggcgggccaggaucuuauuuuuggcagggucagauccuuuccgccacccaggaacagauugcugagagcuacuacccugaauaucugaucaauuuggugcagggccagcuccaaacgcgccaggccucgucuauuuacgacgauuccuaucugggguacucagucgcagugggagaguucaguggcgacgauacugaagacuuuguggcugguguccccaaagggaacuuaaccuauggcuacguuacaauccugaauggaagcgauauacgaucccucuauaacuucucuggcgagcagauggccagcuacuucggguacgcgguggccgcaacugacguaaauggagauggucuugacgaccuguuggugggcgcuccacuacugauggauagaacccccgacgggaggccucaagaggucggacggguguauguuuaccuccagcacccagccggcaucgaaccgacacccacccugacgcuuacuggucaugaugaguuugggcguuucggcucaagucugacaccuuugggagaccucgaucaggacggcuauaacgauguggcuauuggggccccauuuggaggugaaacccagcaaggcgucguguucguauuucccgggggaccuggcggucugggguccaagccaagccagguuuuacagccccugugggcagccucucacacuccggacuucuuuggcucagcucuacgcggaggcagagaucucgacgggaauggauacccugaucugaucgugggcaguuucggugucgacaaggcgguggucuauagggggcggccaauugugagcgcauccgccucucuuacaaucuuucccgcuauguucaacccugaggaacgaucgugcagcuuggagggaaaucccguugccuguauaaaccuguccuuuugccucaaugcaucaggcaaacauguggccgacaguauugguuucaccguagagcugcagcuugauuggcaaaagcagaaaggcgggguccgcagagcucuguuuuuggccucuaggcaggcaacgcucacccagacacuguuaauccaaaacggagcgcgggaagacugucgcgagaugaagauuuaccugagaaaugaaagcgaguucagggauaaacuauccccaauccacaucgcucucaacuucucacuggacccucaggcccccguggauagccacggccuucguccagcauugcauuaucagucuaagucccggauugaagacaaggcccagauacugcucgauugcggggaggacaacaucuguguuccggaucugcaauuagagguguuuggagaacagaaucacgucuaccugggcgacaaaaacgcucuuaauuugacuuuccaugcccagaacgugggugaagggggagcauacgaggcugagcuccgaguaaccgccccucccgaggcggaauauaguggccuggugagacacccagguaauuuuagcucucuauccugcgauuacuucgccguuaaccaaucaaggcugcucgucugcgaccugggcaaucccaugaaggcuggggcaagucuuuggggaggcuugcgcuuuacagugccucaucugcgggauacuaaaaagaccauucaguucgacuuucagaucuuaagcaaaaaccucaauaacucgcaguccgacguggucucuuucagacugagcguugaggcccaagcucaggugacacuuaauggggugucaaagccagaagccguacuguuucccgucagugauuggcacccuagggaccagccgcagaaagaggaagauuugggaccagcagugcaccauguuuaugagcucauaaaccaaggccccuccucuauuagccagggugugcuggagcuauccuguccucaggcgcuggaagggcagcaacuccuguacgucacccgcgugacuggacuuaauugcacgacaaaccacccaaucaaucccaagggcuuggagcuggacccugaagguucauuacaucaccagcagaagcgagaggccccgagccggaguucugcuuccagcggcccccaaauccucaaauguccagaagccgagugcuuccgucugagaugugagcuugggccucugcaccagcaggaaucgcagucacuacaacuccauuuuaggguuugggcaaagaccuuccugcagcgcgagcaccagcccuuuucuuugcagugcgaagcuguguauaaagcccugaagaugccauaccggauuuuaccuagacaacucccccagaaagagaggcagguagcaacugccguccaguggaccaaggcugaaggaaguuauggcgugccacuguggaucauuauacuugcgauccuguucggguugcuccugcuaggacugcuuauuuacauccucuacaagcugggcuucuuuaaacgauccuugccguaugguacagccauggagaaggcacaacugaaaccucccgcuaccagcgaugccuga

SEQ ID NO: 2020 - RNA, 3150 nt, Artificial Sequence
  derived and/or modified sequence opt4 from ITA5__Homo_sapiens__AAH08786
augggcagcagaacccccgagagcccccugcacgccgugcagcugagauggggccccagaagaagacccccccugcugccccugcugcugcugcugcugccccccccccccagagugggcggcuucaaccuggacgccgaggcccccgccgugcugagcggcccccccggcagcuucuucggcuucagcguggaguucuacagacccggcaccgacggcgugagcgugcuggugggcgcccccaaggccaacaccagccagcccggcgugcugcagggcggcgccguguaccugugccccuggggcgccagccccacccagugcacccccaucgaguucgacagcaagggcagcagacugcuggagagcagccugagcagcagcgagggcgaggagcccguggaguacaagagccugcagugguucggcgccaccgugagagcccacggcagcagcauccuggccugcgccccccuguacagcuggagaaccgagaaggagccccugagcgaccccgugggcaccugcuaccugagcaccgacaacuucaccagaauccuggaguacgcccccugcagaagcgacuucagcugggccgccggccagggcuacugccagggcggcuucagcgccgaguucaccaagaccggcagaguggugcugggcggccccggcagcuacuucuggcagggccagauccugagcgccacccaggagcagaucgccgagagcuacuaccccgaguaccugaucaaccuggugcagggccagcugcagaccagacaggccagcagcaucuacgacgacagcuaccugggcuacagcguggccgugggcgaguucagcggcgacgacaccgaggacuucguggccggcgugcccaagggcaaccugaccuacggcuacgugaccauccugaacggcagcgacaucagaagccuguacaacuucagcggcgagcagauggccagcuacuucggcuacgccguggccgccaccgacgugaacggcgacggccuggacgaccugcuggugggcgccccccugcugauggacagaacccccgacggcagaccccaggaggugggcagaguguacguguaccugcagcaccccgccggcaucgagcccacccccacccugacccugaccggccacgacgaguucggcagauucggcagcagccugaccccccugggcgaccuggaccaggacggcuacaacgacguggccaucggcgcccccuucggcggcgagacccagcagggcgugguguucguguuccccggcggccccggcggccugggcagcaagcccagccaggugcugcagccccugugggccgccagccacacccccgacuucuucggcagcgcccugagaggcggcagagaccuggacggcaacggcuaccccgaccugaucgugggcagcuucggcguggacaaggccgugguguacagaggcagacccaucgugagcgccagcgccagccugaccaucuuccccgccauguucaaccccgaggagagaagcugcagccuggagggcaaccccguggccugcaucaaccugagcuucugccugaacgccagcggcaagcacguggccgacagcaucggcuucaccguggagcugcagcuggacuggcagaagcagaagggcggcgugagaagagcccuguuccuggccagcagacaggccacccugacccagacccugcugauccagaacggcgccagagaggacugcagagagaugaagaucuaccugagaaacgagagcgaguucagagacaagcugagccccauccacaucgcccugaacuucagccuggacccccaggcccccguggacagccacggccugagacccgcccugcacuaccagagcaagagcagaaucgaggacaaggcccagauccugcuggacugcggcgaggacaacaucugcgugcccgaccugcagcuggagguguucggcgagcagaaccacguguaccugggcgacaagaacgcccugaaccugaccuuccacgcccagaacgugggcgagggcggcgccuacgaggccgagcugagagugaccgccccccccgaggccgaguacagcggccuggugagacaccccggcaacuucagcagccugagcugcgacuacuucgccgugaaccagagcagacugcuggugugcgaccugggcaaccccaugaaggccggcgccagccuguggggcggccugagauucaccgugccccaccugagagacaccaagaagaccauccaguucgacuuccagauccugagcaagaaccugaacaacagccagagcgacguggugagcuucagacugagcguggaggcccaggcccaggugacccugaacggcgugagcaagcccgaggccgugcuguuccccgugagcgacuggcaccccagagaccagccccagaaggaggaggaccugggccccgccgugcaccacguguacgagcugaucaaccagggccccagcagcaucagccagggcgugcuggagcugagcugcccccaggcccuggagggccagcagcugcuguacgugaccagagugaccggccugaacugcaccaccaaccaccccaucaaccccaagggccuggagcuggaccccgagggcagccugcaccaccagcagaagagagaggcccccagcagaagcagcgccagcagcggcccccagauccugaagugccccgaggccgagugcuucagacugagaugcgagcugggcccccugcaccagcaggagagccagagccugcagcugcacuucagagugugggccaagaccuuccugcagagagagcaccagcccuucagccugcagugcgaggccguguacaaggcccugaagaugcccuacagaauccugcccagacagcugccccagaaggagagacagguggccaccgccgugcaguggaccaaggccgagggcagcuacggcgugccccuguggaucaucauccuggccauccuguucggccugcugcugcugggccugcugaucuacauccuguacaagcugggcuucuucaagagaagccugcccuacggcaccgccauggagaaggcccagcugaagccccccgccaccagcgacgccuga

SEQ ID NO: 2021 - RNA, 3150 nt, Artificial Sequence
  derived and/or modified sequence opt5 from ITA5__Homo_sapiens__AAH08786
augggcagcagaacccccgagucuccccugcacgccgugcagcuccggugggggccgcgcagacggcccccucugcuuccccugcuccugcuucugcucccucccccuccgcgcgucggaggcuucaaccuggacgcugaagcccccgcgguucuguccgggccucccggcagcuuuuucggcuuuuccguggaguucuacagaccugggacagauggagugucuguccucgugggcgcucccaaggccaauacgagccaaccgggcguucugcaagggggagccguguaucuuugcccuuggggcgcuucccccacccaguguacaccuaucgaauuugacucuaaagggagccggcugcucgaguccagccugucuuccagcgaaggagaggagcccgucgaauacaagucucuucagugguucggcgccaccgugcgcgcucauggguccagcauucuggccugcgcgccccucuauucuuggagaacagagaaagaaccucuguccgauccgguuggaaccuguuaccugagcacagacaacuuuacccggauccucgaguaugcccccugccgcuccgauuucucuugggcugccggccagggcuacugucaagggggauuuagcgcugaguucacgaagaccggcagagugguccuugggggaccuggcuccuauuuuuggcaggggcagauucugagcgccacacaggaacagaucgcggagucuuacuaccccgaauaucugauuaaucucgugcagggacagcugcaaacccggcaggccuccagcaucuacgacgauucuuaucuuggcuacagcguggcugucggcgaguucuccggggacgauacagaagacuuuguugccggagugccuaaaggcaaccugaccuauggguacgugacgauccucaauggaucugauauucgcagccuguauaacuucuccggcgagcagauggcuagcuacuucggguacgccgucgccgcuacagacgugaauggcgauggacuggacgaccuccugguuggcgcgccccuucugauggauagaaccccggacgggcggccucaagaggugggacgcgucuauguguaccuccagcaccccgccggcaucgaaccuacacccacccugacccuuacagggcaugaugaguuuggaagauucggaucuucccugacgccucucggggaccuggaucaggacggcuauaacgauguugcuauuggagcccccuuuggcggggaaacccagcaaggaguggucuucguguuuccgggcgggccuggaggccuggggagcaagcccucucagguccuccagccccugugggccgcuucccacacaccugacuucuuuggcagcgcccuucggggaggcagagaucuggacgggaauggauacccggaucucaucgugggcuccuucgggguugacaaggcgguggucuaucgcggacggcccauugugucugcuagcgccucccugaccaucuuuccugccauguucaaccccgaggaaagaucuugcagccuggagggcaauccuguugcuuguauuaaccuuuccuuuugccucaaugccagcgggaaacauguggcugacucuaucggcuucacagucgagcugcagcuggauuggcaaaagcagaaaggaggcgugcgccgggcccucuuucuggcguccagacaggccacccuuacgcagacacugcucauccaaaacggggcucgcgaagacugucgggagaugaagauuuaccugagaaaugaaagcgaguuccgcgauaaacugucucccauccacauugcccuuaacuucucccucgacccucaggcucccguggauagccacggacugcggccggcccugcauuaucagucuaagagcagaaucgaagacaaggcgcagauucuccuggauugcggcgaggacaacaucuguguuccugaucuucaacuggaggucuuuggggaacagaaucacguguaccucggagacaaaaacgcccugaaucugaccuuccaugcucagaacgugggcgagggcggggccuacgaagcugagcuucgcgucaccgcucccccugaggccgaauauuccggacucgugcggcaccccggcaauuuuagcucucuguccugcgauuacuucgccguuaaccaaagcagacugcucgugugcgaccuggggaauccgaugaaggcgggagccucccuuuggggcgggcugcgguuuacagucccucaccuccgcgauaccaaaaagacaauccaguucgacuuucagauucugucuaaaaaccugaauaacagccaguccgacgugguuucuuucagacuuagcguggaggcucaagcccaggucacgcucaauggaguguccaagcccgaagccguucuguuuccugugucugauuggcauccccgggaccagccccagaaagaggaagaucugggcccugcuguccaccauguguaugagcucaucaaccaaggcccgagcuccauuagccagggggugcuggagcuuucuuguccccaggcccuggaaggacagcaacuccuguacgucaccagaguuacaggccugaauugcaccacaaaccacccuaucaaucccaaggggcuugagcuggacccugaaggaucccuccaucaccagcagaagcgcgaggcgcccagccggucuuccgcuagcucuggcccucaaauucugaaauguccggaagccgagugcuucagacuccgcugugagcuggggccccuucaccagcaggaaucccagagccugcaacuccauuuuagagugugggccaagaccuuccugcagcgggagcaccagccuuuuucccugcagugcgaagcuguguauaaagcccuuaagaugcccuaccgcauccugccuagacaacucccccagaaagagcggcaggucgcgacggcugugcaguggaccaaggccgaaggaagcuauggcguuccgcuguggaucauuauccucgccauucuguucggccuucugcuccuggggcugcuuaucuacauucuguacaagcucggauucuuuaaacgcucucugccuuauggcacagcuauggagaaggcccaacucaaaccucccgcuaccagcgaugccuga

SEQ ID NO: 2022 - protein, 798 aa, Artificial Sequence
  ITB1__Homo_sapiens__P05556
MNLQPIFWIGLISSVCCVFAQTDENRCLKANAKSCGECIQAGPNCGWCTNSTFLQEGMPTSARCDDLEALKKKGCPPDDIENPRGSKDIKKNKNVTNRSKGTAEKLKPEDITQIQPQQLVLRLRSGEPQTFTLKFKRAEDYPIDLYYLMDLSYSMKDDLENVKSLGTDLMNEMRRITSDFRIGFGSFVEKTVMPYISTTPAKLRNPCTSEQNCTSPFSYKNVLSLTNKGEVFNELVGKQRISGNLDSPEGGFDAIMQVAVCGSLIGWRNVTRLLVFSTDAGFHFAGDGKLGGIVLPNDGQCHLENNMYTMSHYYDYPSIAHLVQKLSENNIQTIFAVTEEFQPVYKELKNLIPKSAVGTLSANSSNVIQLIIDAYNSLSSEVILENGKLSEGVTISYKSYCKNGVNGTGENGRKCSNISIGDEVQFEISITSNKCPKKDSDSFKIRPLGFTEEVEVILQYICECECQSEGIPESPKCHEGNGTFECGACRCNEGRVGRHCECSTDEVNSEDMDAYCRKENSSEICSNNGECVCGQCVCRKRDNTNEIYSGKFCECDNFNCDRSNGLICGGNGVCKCRVCECNPNYTGSACDCSLDTSTCEASNGQICNGRGICECGVCKCTDPKFQGQTCEMCQTCLGVCAEHKECVQCRAFNKGEKKDTCTQECSYFNITKVESRDKLPQPVQPDPVSHCKEKDVDDCWFYFTYSVNGNNEVMVHVVENPECPTGPDIIPIVAGVVAGIVLIGLALLLIWKLLMIIHDRREFAKFEKEKMNAKWDTGENPIYKSAVTTVVNPKYEGK

SEQ ID NO: 2023 - RNA, 2397 nt, Artificial Sequence
  ITB1__Homo_sapiens__AAH20057
augaauuuacaaccaauuuucuggauuggacugaucaguucaguuugcuguguguuugcucaaacagaugaaaauagauguuuaaaagcaaaugccaaaucauguggagaauguauacaagcagggccaaauuguggguggugcacaaauucaacauuuuuacaggaaggaaugccuacuucugcacgaugugaugauuuagaagccuuaaaaaagaaggguugcccuccagaugacauagaaaaucccagaggcuccaaagauauaaagaaaaauaaaaauguaaccaaccguagcaaaggaacagcagagaagcucaagccagaggauauuacucagauccaaccacagcaguugguuuugcgauuaagaucaggggagccacagacauuuacauuaaaauucaagagagcugaagacuaucccauugaccucuacuaccuuauggaccugucuuacucaaugaaagacgauuuggagaauguaaaaagucuuggaacagaucugaugaaugaaaugaggaggauuacuucggacuucagaauuggauuuggcucauuuguggaaaagacugugaugccuuacauuagcacaacaccagcuaagcucaggaacccuugcacaagugaacagaacugcaccagcccauuuagcuacaaaaaugugcucagucuuacuaauaaaggagaaguauuuaaugaacuuguuggaaaacagcgcauaucuggaaauuuggauucuccagaaggugguuucgaugccaucaugcaaguugcaguuuguggaucacugauuggcuggaggaauguuacacggcugcugguguuuuccacagaugccggguuucacuuugcuggagaugggaaacuugguggcauuguuuuaccaaaugauggacaaugucaccuggaaaauaauauguacacaaugagccauuauuaugauuauccuucuauugcucaccuuguccagaaacugagugaaaauaauauucagacaauuuuugcaguuacugaagaauuucagccuguuuacaaggagcugaaaaacuugaucccuaagucagcaguaggaacauuaucugcaaauucuagcaauguaauucaguugaucauugaugcauacaauucccuuuccucagaagucauuuuggaaaacggcaaauugucagaaggaguaacaauaaguuacaaaucuuacugcaagaacggggugaauggaacaggggaaaauggaagaaaauguuccaauauuuccauuggagaugagguucaauuugaaauuagcauaacuucaaauaaguguccaaaaaaggauucugacagcuuuaaaauuaggccucugggcuuuacggaggaaguagagguuauucuucaguacaucugugaaugugaaugccaaagcgaaggcaucccugaaagucccaagugucaugaaggaaaugggacauuugaguguggcgcgugcaggugcaaugaagggcguguugguagacauugugaaugcagcacagaugaaguuaacagugaagacauggaugcuuacugcaggaaagaaaacaguucagaaaucugcaguaacaauggagagugcgucugcggacaguguguuuguaggaagagggauaauacaaaugaaauuuauucuggcaaauucugcgagugugauaauuucaacugugauagauccaauggcuuaauuuguggaggaaaugguguuugcaagugucgugugugugagugcaaccccaacuacacuggcagugcaugugacuguucuuuggauacuaguacuugugaagccagcaacggacagaucugcaauggccggggcaucugugaguguggugucuguaaguguacagauccgaaguuucaagggcaaacgugugagaugugucagaccugccuuggugucugugcugagcauaaagaauguguucagugcagagccuucaauaaaggagaaaagaaagacacaugcacacaggaauguuccuauuuuaacauuaccaagguagaaagucgggacaaauuaccccagccgguccaaccugauccugugucccauuguaaggagaaggauguugacgacuguugguucuauuuuacguauucagugaaugggaacaacgaggucaugguucauguuguggagaauccagagugucccacugguccagacaucauuccaauuguagcuggugugguugcuggaauuguucuuauuggccuugcauuacugcugauauggaagcuuuuaaugauaauucaugacagaagggaguuugcuaaauuugaaaaggagaaaaugaaugccaaaugggacacgggugaaaauccuauuuauaagagugccguaacaacuguggucaauccgaaguaugagggaaaauga

SEQ ID NO: 2024 - RNA, 2397 nt, Artificial Sequence
  derived and/or modified sequence opt1 from ITB1__Homo_sapiens__AAH20057
augaaccugcagcccaucuucuggaucggccucaucagcuccgugugcugcgucuucgcccagaccgacgagaaccgcugccugaaggccaacgccaagagcugcggggagugcauccaggcgggcccgaacugcggguggugcaccaacuccacguuccugcaggagggcaugcccaccagcgcccggugcgacgaccucgaggcccugaagaagaaggggugcccgcccgacgacaucgagaacccccgcggcuccaaggacaucaagaagaacaagaacgugaccaaccggagcaagggcaccgccgagaagcugaagcccgaggacaucacgcagauccagccccagcagcucgugcugcgccugcgguccggggagccccagaccuucacccucaaguucaagcgcgcggaggacuacccgaucgaccuguacuaccugauggaccucagcuacuccaugaaggacgaccuggagaacgucaagagccugggcaccgaccucaugaacgagaugcggcgcaucacguccgacuuccggaucggguucggcagcuucguggagaagaccgugaugcccuacaucuccaccacccccgccaagcugcgcaaccccugcacgagcgagcagaacugcaccuccccguucagcuacaagaacguccugucccucaccaacaagggggagguguucaacgagcuggugggcaagcagcggaucagcggcaaccuggacucccccgagggcggguucgacgccaucaugcaggucgccgugugcgggagccucaucggcuggcgcaacgugacccggcugcuggucuucagcacggacgcgggcuuccacuucgccggggacggcaagcucgggggcaucgugcugcccaacgacgggcagugccaccuggagaacaacauguacaccaugucccacuacuacgacuaccccagcaucgcccaccucgugcagaagcuguccgagaacaacauccagaccaucuucgccgucaccgaggaguuccagccgguguacaaggagcugaagaaccucauccccaagagcgccgugggcacgcuguccgcgaacagcuccaacgucauccagcugaucaucgacgccuacaacagccucuccagcgaggugauccuggagaacggcaagcuguccgagggggugaccaucagcuacaaguccuacugcaagaacggcgucaacgggaccggcgagaacgggcgcaagugcagcaacaucuccaucggcgacgaggugcaguucgagaucagcaucaccuccaacaagugccccaagaaggacagcgacuccuucaagauccggccccucggcuucacggaggagguggaggucauccugcaguacaucugcgagugcgagugccagagcgaggggaucccggagagccccaagugccacgagggcaacgggaccuucgagugcggcgccugccgcugcaacgaggggcgggugggccgccacugcgagugcuccaccgacgaggucaacagcgaggacauggacgccuacugccggaaggagaacuccagcgagaucugcuccaacaacggcgagugcgugugcgggcagugcgugugccgcaagcgggacaacaccaacgagaucuacagcggcaaguucugcgagugcgacaacuucaacugcgaccgcuccaacgggcugaucugcggcggcaacggggucugcaagugccgcgugugcgagugcaaccccaacuacacgggcagcgccugcgacugcucccucgacaccagcacgugcgaggcguccaacgggcagaucugcaacggccgggggaucugcgagugcggcgugugcaagugcaccgaccccaaguuccagggccagaccugcgagaugugccagaccugccugggggucugcgccgagcacaaggagugcgugcagugccgcgccuucaacaagggcgagaagaaggacacgugcacccaggagugcagcuacuucaacaucaccaagguggagucccgggacaagcugccgcagcccguccagcccgaccccgugagccacugcaaggagaaggacguggacgacugcugguucuacuucaccuacuccgucaacgggaacaacgaggugauggugcacgucguggagaacccggagugccccaccggccccgacaucaucccgaucguggccggggucguggccggcaucgugcucaucggccuggcgcugcuccugaucuggaagcugcucaugaucauccacgaccgccgggaguucgccaaguucgagaaggagaagaugaacgccaagugggacaccggggagaaccccaucuacaagagcgccgucaccacgguggugaaccccaaguacgagggcaaguga

SEQ ID NO: 2025 - RNA, 2397 nt, Artificial Sequence
  derived and/or modified sequence opt2 from ITB1__Homo_sapiens__AAH20057
augaaccuccagcccaucuucuggaucggccucaucuccuccgucugcugcgucuucgcccagaccgacgagaaccgcugccucaaggccaacgccaaguccugcggcgagugcauccaggccggccccaacugcggcuggugcaccaacuccaccuuccuccaggagggcaugcccaccuccgcccgcugcgacgaccucgaggcccucaagaagaagggcugcccccccgacgacaucgagaacccccgcggcuccaaggacaucaagaagaacaagaacgucaccaaccgcuccaagggcaccgccgagaagcucaagcccgaggacaucacccagauccagccccagcagcucguccuccgccuccgcuccggcgagccccagaccuucacccucaaguucaagcgcgccgaggacuaccccaucgaccucuacuaccucauggaccucuccuacuccaugaaggacgaccucgagaacgucaagucccucggcaccgaccucaugaacgagaugcgccgcaucaccuccgacuuccgcaucggcuucggcuccuucgucgagaagaccgucaugcccuacaucuccaccacccccgccaagcuccgcaaccccugcaccuccgagcagaacugcaccucccccuucuccuacaagaacguccucucccucaccaacaagggcgaggucuucaacgagcucgucggcaagcagcgcaucuccggcaaccucgacucccccgagggcggcuucgacgccaucaugcaggucgccgucugcggcucccucaucggcuggcgcaacgucacccgccuccucgucuucuccaccgacgccggcuuccacuucgccggcgacggcaagcucggcggcaucguccuccccaacgacggccagugccaccucgagaacaacauguacaccaugucccacuacuacgacuaccccuccaucgcccaccucguccagaagcucuccgagaacaacauccagaccaucuucgccgucaccgaggaguuccagcccgucuacaaggagcucaagaaccucauccccaaguccgccgucggcacccucuccgccaacuccuccaacgucauccagcucaucaucgacgccuacaacucccucuccuccgaggucauccucgagaacggcaagcucuccgagggcgucaccaucuccuacaaguccuacugcaagaacggcgucaacggcaccggcgagaacggccgcaagugcuccaacaucuccaucggcgacgagguccaguucgagaucuccaucaccuccaacaagugccccaagaaggacuccgacuccuucaagauccgcccccucggcuucaccgaggaggucgaggucauccuccaguacaucugcgagugcgagugccaguccgagggcauccccgagucccccaagugccacgagggcaacggcaccuucgagugcggcgccugccgcugcaacgagggccgcgucggccgccacugcgagugcuccaccgacgaggucaacuccgaggacauggacgccuacugccgcaaggagaacuccuccgagaucugcuccaacaacggcgagugcgucugcggccagugcgucugccgcaagcgcgacaacaccaacgagaucuacuccggcaaguucugcgagugcgacaacuucaacugcgaccgcuccaacggccucaucugcggcggcaacggcgucugcaagugccgcgucugcgagugcaaccccaacuacaccggcuccgccugcgacugcucccucgacaccuccaccugcgaggccuccaacggccagaucugcaacggccgcggcaucugcgagugcggcgucugcaagugcaccgaccccaaguuccagggccagaccugcgagaugugccagaccugccucggcgucugcgccgagcacaaggagugcguccagugccgcgccuucaacaagggcgagaagaaggacaccugcacccaggagugcuccuacuucaacaucaccaaggucgagucccgcgacaagcucccccagcccguccagcccgaccccgucucccacugcaaggagaaggacgucgacgacugcugguucuacuucaccuacuccgucaacggcaacaacgaggucaugguccacgucgucgagaaccccgagugccccaccggccccgacaucauccccaucgucgccggcgucgucgccggcaucguccucaucggccucgcccuccuccucaucuggaagcuccucaugaucauccacgaccgccgcgaguucgccaaguucgagaaggagaagaugaacgccaagugggacaccggcgagaaccccaucuacaaguccgccgucaccaccgucgucaaccccaaguacgagggcaaguga

SEQ ID NO: 2026 - RNA, 2397 nt, Artificial Sequence
  derived and/or modified sequence opt3 from ITB1__Homo_sapiens__AAH20057
augaaccugcagcccaucuucuggauuggccucauaagcuccgugugcugugucuuugcccaaaccgacgagaauagaugccuuaaggcuaacgcaaaaucuuguggggaaugcauccaggccggaccuaauugugguuggugcacaaacucaacuuuccugcaggagggcaugccaacgagugcgaggugugaugacuuggaggcuuuaaagaaaaaggggugcccgcccgaugacauugaaaauccucggggaagcaaagauaucaagaagaacaaaaauguuaccaaccgcuccaagggcacagccgaaaaacugaagccagaggacauuacucagauccaaccccagcagcuagugcuccgacugcguucuggugagccucagaccuuuacacuuaaauucaagagagcagaagauuacccaauagaccuguauuacuugauggaucucucguauucaaugaaggacgaucuggagaauguaaaaagccuggggaccgaccucaugaacgaaaugaggcggaucacaagugauuuucgcauuggauucggcuccuuuguggagaagacugucaugcccuacaucucuaccacgccugccaaauuaagaaauccauguacuagcgagcaaaacugcaccuccccguucucauauaagaaugugcugagucuuacaaacaaaggcgaaguuuuuaaugaguugguggggaagcagaggauuagcggaaaccuggacucucccgaagguggcuucgacgcuaucaugcaggucgcagugugugggucccuaauaggauggcggaacguaacucgccuccugguuuuuagcaccgaugccggcuuccacuuugcuggugacgggaaacuuggaggcauugugcugccuaaugauggccagugccauuuggagaacaauauguacacaaugagccacuauuacgacuacccaaguaucgcccaucucguccaaaagcugucugaaaacaauauucagaccaucuucgcggugacggaggaguuccagcccguguauaaggaacugaaaaacuuaaucccuaaguccgcagucgggacucucagcgccaauucgucuaacguuauucaacuuauaaucgaugcuuacaauucccugucaagugaggugauuuuggaaaacggaaaacuaagcgaggguguaacaaucuccuauaagucuuacugcaaaaauggcgugaacgggaccggagaaaauggccgaaaguguagcaacauaucaauuggugacgagguccaguuugagaucaguaucacuuccaauaagugccccaaaaaggauagcgacucuuucaaaauuagaccacugggguuuacagaagagguggaaguuauccuccaguauauuugugagugcgaaugucagucagagggcauaccggagaguccuaagugccacgaaggaaacggcaccuucgaguguggggccuguaggugcaacgaaggacgggugggucgucauugcgaguguagcacggaugaggucaauuccgaagacauggaugcauacugccgcaaagagaacucuucggaaaucugcagcaauaacggcgagugugugugcgggcaauguguaugcagaaagagggacaauaccaacgaaauuuauuccggaaaguuuugugagugcgacaauuucaacugugaucggucaaauggccugaucugcggugggaacggcguuuguaaaugccgagugugugagugcaaucccaacuacacaggaagugcuugcgacuguucucuugauacuucaaccugcgaagccuccaauggccagaucuguaacgggcgcggaauuugcgaguguggugucugcaaguguacagacccaaaauuucagggccagacuugcgaaaugugucaaaccugccugggggugugugcggagcacaaggaaugcguccagugcagagccuucaauaaaggagagaagaaggauacauguacccaggagugcucauacuuuaacauaacuaaaguggaaagcagggacaaguugccucagcccguucaaccagaucccgugucucacuguaaagagaaggacguagaugacugcugguucuauuuuacguacuccgucaacggcaauaacgaagugaugguucauguggucgagaauccugaauguccaacagguccggauaucauucccaucguggcagggguaguggcuggcauuguucucaucggacuggccuuacugcuaauauggaaacuccugaugaucauucacgaccggcgcgaguucgcuaaguuugagaaagaaaagaugaacgccaagugggauaccggcgagaauccuaucuauaaaagugcagucacuaccguggugaacccaaaguacgaagggaaauga

SEQ ID NO: 2027 - RNA, 2397 nt, Artificial Sequence
  derived and/or modified sequence opt4 from ITB1__Homo_sapiens__AAH20057
augaaccugcagcccaucuucuggaucggccugaucagcagcgugugcugcguguucgcccagaccgacgagaacagaugccugaaggccaacgccaagagcugcggcgagugcauccaggccggccccaacugcggcuggugcaccaacagcaccuuccugcaggagggcaugcccaccagcgccagaugcgacgaccuggaggcccugaagaagaagggcugcccccccgacgacaucgagaaccccagaggcagcaaggacaucaagaagaacaagaacgugaccaacagaagcaagggcaccgccgagaagcugaagcccgaggacaucacccagauccagccccagcagcuggugcugagacugagaagcggcgagccccagaccuucacccugaaguucaagagagccgaggacuaccccaucgaccuguacuaccugauggaccugagcuacagcaugaaggacgaccuggagaacgugaagagccugggcaccgaccugaugaacgagaugagaagaaucaccagcgacuucagaaucggcuucggcagcuucguggagaagaccgugaugcccuacaucagcaccacccccgccaagcugagaaaccccugcaccagcgagcagaacugcaccagccccuucagcuacaagaacgugcugagccugaccaacaagggcgagguguucaacgagcuggugggcaagcagagaaucagcggcaaccuggacagccccgagggcggcuucgacgccaucaugcagguggccgugugcggcagccugaucggcuggagaaacgugaccagacugcugguguucagcaccgacgccggcuuccacuucgccggcgacggcaagcugggcggcaucgugcugcccaacgacggccagugccaccuggagaacaacauguacaccaugagccacuacuacgacuaccccagcaucgcccaccuggugcagaagcugagcgagaacaacauccagaccaucuucgccgugaccgaggaguuccagcccguguacaaggagcugaagaaccugauccccaagagcgccgugggcacccugagcgccaacagcagcaacgugauccagcugaucaucgacgccuacaacagccugagcagcgaggugauccuggagaacggcaagcugagcgagggcgugaccaucagcuacaagagcuacugcaagaacggcgugaacggcaccggcgagaacggcagaaagugcagcaacaucagcaucggcgacgaggugcaguucgagaucagcaucaccagcaacaagugccccaagaaggacagcgacagcuucaagaucagaccccugggcuucaccgaggagguggaggugauccugcaguacaucugcgagugcgagugccagagcgagggcauccccgagagccccaagugccacgagggcaacggcaccuucgagugcggcgccugcagaugcaacgagggcagagugggcagacacugcgagugcagcaccgacgaggugaacagcgaggacauggacgccuacugcagaaaggagaacagcagcgagaucugcagcaacaacggcgagugcgugugcggccagugcgugugcagaaagagagacaacaccaacgagaucuacagcggcaaguucugcgagugcgacaacuucaacugcgacagaagcaacggccugaucugcggcggcaacggcgugugcaagugcagagugugcgagugcaaccccaacuacaccggcagcgccugcgacugcagccuggacaccagcaccugcgaggccagcaacggccagaucugcaacggcagaggcaucugcgagugcggcgugugcaagugcaccgaccccaaguuccagggccagaccugcgagaugugccagaccugccugggcgugugcgccgagcacaaggagugcgugcagugcagagccuucaacaagggcgagaagaaggacaccugcacccaggagugcagcuacuucaacaucaccaagguggagagcagagacaagcugccccagcccgugcagcccgaccccgugagccacugcaaggagaaggacguggacgacugcugguucuacuucaccuacagcgugaacggcaacaacgaggugauggugcacgugguggagaaccccgagugccccaccggccccgacaucauccccaucguggccggcgugguggccggcaucgugcugaucggccuggcccugcugcugaucuggaagcugcugaugaucauccacgacagaagagaguucgccaaguucgagaaggagaagaugaacgccaagugggacaccggcgagaaccccaucuacaagagcgccgugaccaccguggugaaccccaaguacgagggcaaguga

SEQ ID NO: 2028 - RNA, 2397 nt, Artificial Sequence
  derived and/or modified sequence opt5 from ITB1__Homo_sapiens__AAH20057
augaaccugcagcccaucuucuggauuggccucaucagcuccgugugcugugucuuugcccaaaccgacgagaauagaugccugaaggcuaacgccaaaucuuguggggaaugcauucaggcgggaccuaauuguggcuggugcacaaacagcacguuccuucaggaggggaugccgaccuccgcucggugugaugaccuggaagcccucaagaaaaagggaugucccccugaugacaucgagaauccccgcggcucuaaagauauuaagaagaacaaaaauguuacaaacagaagcaaggggaccgccgaaaaacugaagccugaggacaucacacagauccaaccccagcagcuugugcugcggcuccgcuccggagagccucagaccuuuacacugaaauucaagagagcugaagauuacccgauugaccuguauuaccucauggaucugucuuauagcaugaaggacgaucuugagaaugugaaaucccugggcaccgaccucaugaacgaaaugcggcgcaucacgagcgauuuuagaauuggcuucgggucuuuugucgagaagaccgugaugcccuacaucuccacaaccccugccaaacugcggaaucccugcacaagcgagcaaaacugcaccucuccuuucuccuauaagaauguucuuagccugacgaacaaaggagaaguguuuaaugagcucgucggcaagcagcgcauuucugggaaccuggacucccccgaaggaggcuucgacgcuaucaugcaaguggccguuugugggagccugauuggauggagaaacgugacacggcuccuggucuuuuccaccgaugcgggcuuccacuuugccggcgacgggaaacuuggaggcaucgugcugccgaaugaugggcagugccaucucgagaacaauauguacacaaugucucacuauuacgacuacccuagcaucgcucaucuggugcagaaacuuuccgaaaacaauauucagaccaucuucgccgucaccgaggaguuccagcccguuuauaaggaacugaagaaccucauuccuaagagcgcugugggaacacugucugccaauuccagcaacgugauccaacugauuaucgaugcguacaauucucucagcuccgaggucauccuggaaaacggcaaacuuucugagggggugacgauuagcuauaaguccuacugcaaaaauggaguuaacggcaccggcgaaaaugggcgcaaguguagcaacaucucuauuggagacgaggugcaguuugagaucuccauuacaagcaauaagugccccaaaaaggauucugacuccuucaaaaucagaccccugggcuuuaccgaagaggucgaagugauccuccaguauauuugugagugcgaaugucagagcgaggggaucccugaguccccgaagugccacgaaggaaacggcacauucgaguguggggccugccgguguaacgaaggccgcguuggaagacauugcgaguguucuaccgaugaggugaauagcgaagacauggaugcuuacugccggaaagagaacuccucugaaauuugcagcaauaacggcgagugugucugcgggcaaugugugugcagaaagcgcgacaauacgaacgaaaucuauuccggaaaguuuugugagugcgacaauuucaacugugaucggagcaauggccugauuugcgggggaaacggcgucuguaaaugcagagugugugagugcaaucccaacuacacagggucugccugcgacuguucccuugauaccucuaccugcgaagcuagcaauggccagaucuguaacggacgcggcauuugcgagugugggguuugcaaguguacagacccuaaauuucagggacagaccugcgaaaugugucaaacaugccugggcgugugugccgagcacaaggaaugcguccagugccgggccuucaauaaaggggagaagaaggauacguguacccaggagugcuccuacuuuaacaucacaaaaguggaaagcagagacaagcucccccagccuguucaacccgauccggugucucacuguaaagagaaggacgucgaugacugcugguucuauuuuaccuacagcgugaacggaaauaacgaagugaugguucaugucguggagaauccugaaugucccacaggcccugauaucauucccaucguggcuggggucguggcgggcauuguucugaucggacuggcccuccugcuuauuuggaaacugcucaugaucauccacgaccgccgggaguucgcuaaguuugagaaagaaaagaugaacgccaagugggauaccggcgagaauccuauuuauaaauccgccgugacgaccgucgugaaccccaaguacgaagggaaauga

SEQ ID NO: 2029 - protein, 788 aa, Artificial Sequence
  ITB6__Homo_sapiens__P18564
MGIELLCLFFLFLGRNDHVQGGCALGGAETCEDCLLIGPQCAWCAQENFTHPSGVGERCDTPANLLAKGCQLNFIENPVSQVEILKNKPLSVGRQKNSSDIVQIAPQSLILKLRPGGAQTLQVHVRQTEDYPVDLYYLMDLSASMDDDLNTIKELGSRLSKEMSKLTSNFRLGFGSFVEKPVSPFVKTTPEEIANPCSSIPYFCLPTFGFKHILPLTNDAERFNEIVKNQKISANIDTPEGGFDAIMQAAVCKEKIGWRNDSLHLLVFVSDADSHFGMDSKLAGIVIPNDGLCHLDSKNEYSMSTVLEYPTIGQLIDKLVQNNVLLIFAVTQEQVHLYENYAKLIPGATVGLLQKDSGNILQLIISAYEELRSEVELEVLGDTEGLNLSFTAICNNGTLFQHQKKCSHMKVGDTASFSVTVNIPHCERRSRHIIIKPVGLGDALELLVSPECNCDCQKEVEVNSSKCHHGNGSFQCGVCACHPGHMGPRCECGEDMLSTDSCKEAPDHPSCSGRGDCYCGQCICHLSPYGNIYGPYCQCDNFSCVRHKGLLCGGNGDCDCGECVCRSGWTGEYCNCTTSTDSCVSEDGVLCSGRGDCVCGKCVCTNPGASGPTCERCPTCGDPCNSKRSCIECHLSAAGQAREECVDKCKLAGATISEEEDFSKDGSVSCSLQGENECLITFLITTDNEGKTIIHSINEKDCPKPPNIPMIMLGVSLAILLIGVVLLCIWKLLVSFHDRKEVAKFEAERSKAKWQTGTNPLYRGSTSTFKNVTYKHREKQKVDLSTDC

SEQ ID NO: 2030 - RNA, 2367 nt, Artificial Sequence
  ITB6__Homo_sapiens__AAA36122
auggggauugaacugcuuugccuguucuuucuauuucuaggaaggaaugaucacguacaagguggcugugcccugggaggugcagaaaccugugaagacugccugcuuauuggaccucagugugccuggugugcucaggagaauuuuacucauccaucuggaguuggcgaaaggugugauaccccagcaaaccuuuuagcuaaaggaugucaauuaaacuucaucgaaaacccugucucccaaguagaaauacuuaaaaauaagccucucaguguaggcagacagaaaaauaguucugacauuguucagauugcgccucaaagcuugauccuuaaguugagaccagguggugcgcagacucugcaggugcauguccgccagacugaggacuacccgguggauuuguauuaccucauggaccucuccgccuccauggaugacgaccucaacacaauaaaggagcugggcucccggcuuuccaaagagaugucuaaauuaaccagcaacuuuagacugggcuucggaucuuuuguggaaaaaccuguauccccuuucgugaaaacaacaccagaagaaauugccaacccuugcaguaguauuccauacuucuguuuaccuacauuuggauucaagcacauuuugccauugacaaaugaugcugaaagauucaaugaaauugugaagaaucagaaaauuucugcuaauauugacacacccgaagguggauuugaugcaauuaugcaagcugcuguguguaaggaaaaaauuggcuggcggaaugacucccuccaccuccuggucuuugugagugaugcugauucucauuuuggaauggacagcaaacuagcaggcaucgucauuccuaaugacgggcucugucacuuggacagcaagaaugaauacuccaugucaacugucuuggaauauccaacaauuggacaacucauugauaaacugguacaaaacaacguguuauugaucuucgcuguaacccaagaacaaguucauuuauaugagaauuacgcaaaacuuauuccuggagcuacaguaggucuacuucagaaggacuccggaaacauucuccagcugaucaucucagcuuaugaagaacugcggucugagguggaacuggaaguauuaggagacacugaaggacucaacuugucauuuacagccaucuguaacaacgguacccucuuccaacaccaaaagaaaugcucucacaugaaagugggagacacagcuuccuucagcgugacugugaauaucccacacugcgagagaagaagcaggcacauuaucauaaagccuguggggcugggggaugcccuggaauuacuugucagcccagaaugcaacugcgacugucagaaagaaguggaagugaacagcuccaaaugucaccacgggaacggcucuuuccaguguggggugugugccugccacccuggccacauggggccucgcugugaguguggcgaggacaugcugagcacagauuccugcaaggaggccccagaucaucccuccugcagcggaaggggugacugcuacugugggcaguguaucugccacuugucucccuauggaaacauuuaugggccuuauugccagugugacaauuucuccugcgugagacacaaagggcugcucugcggagguaacggcgacugugacuguggugaaugugugugcaggagcggcuggacuggcgaguacugcaacugcaccaccagcacggacuccugcgucucugaagauggagugcucugcagcgggcgcggggacuguguuuguggcaaguguguuugcacaaacccuggagccucaggaccaaccugugaacgauguccuaccuguggugaccccuguaacucuaaacggagcugcauugagugccaccugucagcagcuggccaagcccgagaagaauguguggacaagugcaaacuagcuggugcgaccaucagugaagaagaagauuucucaaaggaugguucuguuuccugcucucugcaaggagaaaaugaaugucuuauuacauuccuaauaacuacagauaaugaggggaaaaccaucauucacagcaucaaugaaaaagauuguccgaagccuccaaacauucccaugaucauguuagggguuucccuggcuauucuucucaucgggguuguccuacugugcaucuggaagcuacuggugucauuucaugaucguaaagaaguugccaaauuugaagcagaacgaucaaaagccaaguggcaaacgggaaccaauccacucuacagaggauccacaaguacuuuuaaaaauguaacuuauaaacacagggaaaaacaaaagguagaccuuuccacagauugcuag

SEQ ID NO: 2031 - RNA, 2367 nt, Artificial Sequence
  derived and/or modified sequence opt1 from ITB6__Homo_sapiens__AAA36122
augggcaucgagcugcucugccuguucuuccuguuccucgggcgcaacgaccacgugcagggcgggugcgcccugggcggggccgagaccugcgaggacugccugcucaucggcccccagugcgcguggugcgcccaggagaacuucacccacccgagcggcgucggggagcggugcgacacgcccgccaaccugcuggccaagggcugccagcucaacuucaucgagaaccccgugucccagguggagauccugaagaacaagccccugagcgucgggcgccagaagaacuccagcgacaucgugcagaucgccccgcagucccucauccugaagcugcggcccggcggggcgcagacccuccaggugcacguccgccagaccgaggacuaccccguggaccuguacuaccugauggaccucagcgccuccauggacgacgaccugaacaccaucaaggagcugggcagccggcucuccaaggagaugagcaagcugacguccaacuuccgccugggcuucgggagcuucguggagaagcccgucuccccguucgugaagaccacccccgaggagaucgccaaccccugcagcuccauccccuacuucugccucccgaccuucggcuucaagcacauccugccccugacgaacgacgccgagcgguucaacgagaucgugaagaaccagaagaucagcgcgaacaucgacacccccgagggcggguucgacgccaucaugcaggccgccgucugcaaggagaagaucggcuggcgcaacgacucccuccaccuccugguguucgugagcgacgccgacucccacuucgggauggacagcaagcuggcgggcaucgucauccccaacgacgggcugugccaccuggacagcaagaacgaguacuccaugagcaccgugcucgaguacccgaccaucggccagcugaucgacaagcuggugcagaacaacguccuccugaucuucgccgugacgcaggagcagguccaccuguacgagaacuacgccaagcucauccccggggccaccgugggccugcugcagaaggacuccggcaacauccuccagcugaucaucagcgccuacgaggagcugcgguccgagguggagcucgaggugcugggggacaccgagggccugaaccucagcuucaccgcgaucugcaacaacgggacgcuguuccagcaccagaagaagugcucccacaugaaggucggcgacaccgccagcuucuccgugaccgucaacaucccccacugcgagcgccggagccgccacaucaucaucaagcccguggggcugggcgacgcccuggagcuccugguguccccggagugcaacugcgacugccagaaggaggucgaggugaacagcuccaagugccaccacggcaacgggagcuuccagugcggcgugugcgccugccaccccgggcacaugggcccccggugcgagugcggggaggacaugcuguccaccgacagcugcaaggaggcccccgaccacccguccugcagcggccgcggcgacugcuacugcgggcagugcaucugccaccucucccccuacggcaacaucuacgggcccuacugccagugcgacaacuucagcugcguccggcacaagggccugcugugcggcgggaacggcgacugcgacugcggggagugcgugugccgcagcggcuggacgggggaguacugcaacugcaccaccuccaccgacagcugcguguccgaggacggcguccucugcagcggccgcggggacugcgugugcggcaagugcgugugcacgaaccccggggcguccggcccgaccugcgagcggugcccgaccugcggggaccccugcaacagcaagcgguccugcaucgagugccaccugagcgccgccggccaggcccgcgaggagugcgucgacaagugcaagcuggccggcgcgaccaucuccgaggaggaggacuucagcaaggacggguccgugagcugcucccuccagggcgagaacgagugccugaucacguuccugaucaccaccgacaacgaggggaagaccaucauccacagcaucaacgagaaggacugccccaagccgcccaacauccccaugaucaugcucggcgugucccuggccauccugcucaucggggucgugcugcugugcaucuggaagcuccuggugagcuuccacgaccggaaggaggucgccaaguucgaggccgagcgcuccaaggcgaaguggcagacgggcaccaacccccuguaccgcggcagcaccagcaccuucaagaacgugacguacaagcaccgggagaagcagaagguggaccucuccaccgacugcuga

SEQ ID NO: 2032 - RNA, 2367 nt, Artificial Sequence
  derived and/or modified sequence opt2 from ITB6__Homo_sapiens__AAA36122
augggcaucgagcuccucugccucuucuuccucuuccucggccgcaacgaccacguccagggcggcugcgcccucggcggcgccgagaccugcgaggacugccuccucaucggcccccagugcgccuggugcgcccaggagaacuucacccaccccuccggcgucggcgagcgcugcgacacccccgccaaccuccucgccaagggcugccagcucaacuucaucgagaaccccgucucccaggucgagauccucaagaacaagccccucuccgucggccgccagaagaacuccuccgacaucguccagaucgccccccagucccucauccucaagcuccgccccggcggcgcccagacccuccagguccacguccgccagaccgaggacuaccccgucgaccucuacuaccucauggaccucuccgccuccauggacgacgaccucaacaccaucaaggagcucggcucccgccucuccaaggagauguccaagcucaccuccaacuuccgccucggcuucggcuccuucgucgagaagcccgucucccccuucgucaagaccacccccgaggagaucgccaaccccugcuccuccauccccuacuucugccuccccaccuucggcuucaagcacauccucccccucaccaacgacgccgagcgcuucaacgagaucgucaagaaccagaagaucuccgccaacaucgacacccccgagggcggcuucgacgccaucaugcaggccgccgucugcaaggagaagaucggcuggcgcaacgacucccuccaccuccucgucuucgucuccgacgccgacucccacuucggcauggacuccaagcucgccggcaucgucauccccaacgacggccucugccaccucgacuccaagaacgaguacuccauguccaccguccucgaguaccccaccaucggccagcucaucgacaagcucguccagaacaacguccuccucaucuucgccgucacccaggagcagguccaccucuacgagaacuacgccaagcucauccccggcgccaccgucggccuccuccagaaggacuccggcaacauccuccagcucaucaucuccgccuacgaggagcuccgcuccgaggucgagcucgagguccucggcgacaccgagggccucaaccucuccuucaccgccaucugcaacaacggcacccucuuccagcaccagaagaagugcucccacaugaaggucggcgacaccgccuccuucuccgucaccgucaacaucccccacugcgagcgccgcucccgccacaucaucaucaagcccgucggccucggcgacgcccucgagcuccucgucucccccgagugcaacugcgacugccagaaggaggucgaggucaacuccuccaagugccaccacggcaacggcuccuuccagugcggcgucugcgccugccaccccggccacaugggcccccgcugcgagugcggcgaggacaugcucuccaccgacuccugcaaggaggcccccgaccaccccuccugcuccggccgcggcgacugcuacugcggccagugcaucugccaccucucccccuacggcaacaucuacggccccuacugccagugcgacaacuucuccugcguccgccacaagggccuccucugcggcggcaacggcgacugcgacugcggcgagugcgucugccgcuccggcuggaccggcgaguacugcaacugcaccaccuccaccgacuccugcgucuccgaggacggcguccucugcuccggccgcggcgacugcgucugcggcaagugcgucugcaccaaccccggcgccuccggccccaccugcgagcgcugccccaccugcggcgaccccugcaacuccaagcgcuccugcaucgagugccaccucuccgccgccggccaggcccgcgaggagugcgucgacaagugcaagcucgccggcgccaccaucuccgaggaggaggacuucuccaaggacggcuccgucuccugcucccuccagggcgagaacgagugccucaucaccuuccucaucaccaccgacaacgagggcaagaccaucauccacuccaucaacgagaaggacugccccaagccccccaacauccccaugaucaugcucggcgucucccucgccauccuccucaucggcgucguccuccucugcaucuggaagcuccucgucuccuuccacgaccgcaaggaggucgccaaguucgaggccgagcgcuccaaggccaaguggcagaccggcaccaacccccucuaccgcggcuccaccuccaccuucaagaacgucaccuacaagcaccgcgagaagcagaaggucgaccucuccaccgacugcuga

SEQ ID NO: 2033 - RNA, 2367 nt, Artificial Sequence
  derived and/or modified sequence opt3 from ITB6__Homo_sapiens__AAA36122
augggcaucgagcugcucugccuuuucuuucuguucuuggggagaaacgaccacgugcagggagguugugccuuaggcggggcugaaaccugcgaggauugucugcuaauuggaccccaaugcgcauggugugcccaggaaaauuuuacacauccuagcggcgucggugagaggugcgacacuccagcgaaccuccuggcuaaggggugucagcuuaauuucauagaaaacccgguuucccagguggagauccugaaaaauaagcccuugucuguaggacggcagaaaaacucaagugauauugugcaaaucgccccucagagccucauucugaagcugcgcccaggcggcgcacagacgcuccaaguccacgugcgacagaccgaggacuaccccguugauuuauauuaccugauggaccuuuccgccucuauggaugacgauuugaauacaaucaaagaacuggggucgcgucuaucaaaggagaugagcaagcucacuuccaacuuuagacugggauucgguuccuuuguggaaaaaccugucucuccauucgugaagaccacacccgaggagauagcuaauccuugcagcuccaucccauauuuuugucuuccgaccuucggcuuuaaacauauucugcccuugacuaacgacgcagaaagguucaaugagaucguaaagaaccagaaaauuucagccaauaucgauacaccugaagggggauuugacgcuauaaugcaggccgcgguuugcaaggagaagauuggcuggcggaacgauagucuccaccuguuaguguucgucagcgacgcagacucucauuucgguauggauuccaaacuggccgggaucgugauuccaaaugacggacucugucaccuugauucaaagaacgaauacagcaugaguaccgugcuggaguaucccacgaucggccaauugaucgacaagcuaguccagaacaauguucugcucauuuuugcugugacucaggagcaaguacaccuguacgaaaacuaugccaaacuuauaccuggcgcaaccguggggcuguugcagaaagauucuggaaauauccuccagcugauuaucuccgcuuacgaggaauuacgcagcgaggucgaacuggaggugcuaggugacacagagggccucaaccugucguucacugccauaugcaauaacgggacccuuuuucagcaucaaaagaaaugcucucacaugaagguuggagauacagcguccuucucagugaccgucaauauuccacauugugaaagaaggagucggcacaucaucauuaagcccgugggcuugggugacgcccuggagcuccugguaagcccggaaugcaacugugauugccagaaagagguugaagugaauaguucuaagugucaccaugggaacggcagcuuucagugcggagucugugcaugccacccuggccauauggggccccgcugugagugcggagaggacaugcuuucaacggauaguuguaaagaagcuccagaccacccuuccugcagcggucgaggcgacugcuacugugggcagugcaucugucaucugucucccuauggaaauauuuacggcccauauugccaaugugauaacuucucaugcgugagacacaaggguuugcucugugggggcaauggagacugcgauuguggcgagugcgucuguaggaguggguggacuggagaauacugcaacugcacaaccagcacugacuccugugugucugaggaugguguucugugcucgggccguggggacugugugugcggaaaauguguaugcacaaaucccggcgccagcgguccuaccugugagcggugcccaacguguggggauccgugcaacuccaagcgcucauguauagaaugccacuuaagugcugccggccaggcaagagaggaaugcgucgacaaguguaaacuggccggagcuaccaucucugaggaagaggauuuuagcaaggacggcuccgugucaugcagccuacagggggagaacgaaugucucauuacauuccugaucacuaccgauaaugagggaaaaacaaucauucauucuauaaacgaaaaggacugccccaaaccuccaaauauccccaugauuaugcuuggcguuuccuuggcgauccugcucauuggugugguccuguuauguaucuggaagcugcuugugaguuuucacgauaggaaggagguagcaaaauucgaagccgagcggagcaaggcuaaauggcagacugggaccaacccuuuguaucgaggaucuacauccaccuuuaagaaugugacuuacaaacaucgcgagaagcaaaagguugaccucucaacggacugcuga

SEQ ID NO: 2034 - RNA, 2367 nt, Artificial Sequence
  derived and/or modified sequence opt4 from ITB6__Homo_sapiens__AAA36122
augggcaucgagcugcugugccuguucuuccuguuccugggcagaaacgaccacgugcagggcggcugcgcccugggcggcgccgagaccugcgaggacugccugcugaucggcccccagugcgccuggugcgcccaggagaacuucacccaccccagcggcgugggcgagagaugcgacacccccgccaaccugcuggccaagggcugccagcugaacuucaucgagaaccccgugagccagguggagauccugaagaacaagccccugagcgugggcagacagaagaacagcagcgacaucgugcagaucgccccccagagccugauccugaagcugagacccggcggcgcccagacccugcaggugcacgugagacagaccgaggacuaccccguggaccuguacuaccugauggaccugagcgccagcauggacgacgaccugaacaccaucaaggagcugggcagcagacugagcaaggagaugagcaagcugaccagcaacuucagacugggcuucggcagcuucguggagaagcccgugagccccuucgugaagaccacccccgaggagaucgccaaccccugcagcagcauccccuacuucugccugcccaccuucggcuucaagcacauccugccccugaccaacgacgccgagagauucaacgagaucgugaagaaccagaagaucagcgccaacaucgacacccccgagggcggcuucgacgccaucaugcaggccgccgugugcaaggagaagaucggcuggagaaacgacagccugcaccugcugguguucgugagcgacgccgacagccacuucggcauggacagcaagcuggccggcaucgugauccccaacgacggccugugccaccuggacagcaagaacgaguacagcaugagcaccgugcuggaguaccccaccaucggccagcugaucgacaagcuggugcagaacaacgugcugcugaucuucgccgugacccaggagcaggugcaccuguacgagaacuacgccaagcugauccccggcgccaccgugggccugcugcagaaggacagcggcaacauccugcagcugaucaucagcgccuacgaggagcugagaagcgagguggagcuggaggugcugggcgacaccgagggccugaaccugagcuucaccgccaucugcaacaacggcacccuguuccagcaccagaagaagugcagccacaugaaggugggcgacaccgccagcuucagcgugaccgugaacaucccccacugcgagagaagaagcagacacaucaucaucaagcccgugggccugggcgacgcccuggagcugcuggugagccccgagugcaacugcgacugccagaaggagguggaggugaacagcagcaagugccaccacggcaacggcagcuuccagugcggcgugugcgccugccaccccggccacaugggccccagaugcgagugcggcgaggacaugcugagcaccgacagcugcaaggaggcccccgaccaccccagcugcagcggcagaggcgacugcuacugcggccagugcaucugccaccugagccccuacggcaacaucuacggccccuacugccagugcgacaacuucagcugcgugagacacaagggccugcugugcggcggcaacggcgacugcgacugcggcgagugcgugugcagaagcggcuggaccggcgaguacugcaacugcaccaccagcaccgacagcugcgugagcgaggacggcgugcugugcagcggcagaggcgacugcgugugcggcaagugcgugugcaccaaccccggcgccagcggccccaccugcgagagaugccccaccugcggcgaccccugcaacagcaagagaagcugcaucgagugccaccugagcgccgccggccaggccagagaggagugcguggacaagugcaagcuggccggcgccaccaucagcgaggaggaggacuucagcaaggacggcagcgugagcugcagccugcagggcgagaacgagugccugaucaccuuccugaucaccaccgacaacgagggcaagaccaucauccacagcaucaacgagaaggacugccccaagccccccaacauccccaugaucaugcugggcgugagccuggccauccugcugaucggcguggugcugcugugcaucuggaagcugcuggugagcuuccacgacagaaaggagguggccaaguucgaggccgagagaagcaaggccaaguggcagaccggcaccaacccccuguacagaggcagcaccagcaccuucaagaacgugaccuacaagcacagagagaagcagaagguggaccugagcaccgacugcuga

SEQ ID NO: 2035 - RNA, 2367 nt, Artificial Sequence
  derived and/or modified sequence opt5 from ITB6__Homo_sapiens__AAA36122
augggcaucgagcugcucugccuguucuuucuuuuccuggggagaaacgaccacgugcagggaggcugugcccucgggggagcugaaaccugcgaggauugucugcuuauuggcccccaaugcgccuggugugcgcaggaaaauuuuacacauccuagcggggucggagagcggugcgacacgccggcuaaccugcucgccaagggcugucagcugaauuucaucgaaaaccccguuucccagguggagauucugaaaaauaagccucucucugugggccgccaaaagaacagcuccgauaucguccagauugcuccccagucucugauccuuaagcugagaccugggggagcccagacccuccaagugcacguucggcagacagaggacuaccccguggaucuguauuaccuuauggaccugagcgccuccauggaugacgaucucaauaccaucaaagaacugggcucucgccugagcaaggagauguccaagcucacaagcaacuuuagacugggguucggaucuuuugucgaaaaaccuguguccccguucguuaagaccacacccgaggagauugcuaauccuugcagcucuauccccuauuuuugucuuccuaccuucggcuuuaaacauauucugccccucacgaacgacgccgaacgguucaaugagaucgugaagaaccagaaaauuuccgcgaauaucgauaccccggaagggggauuugacgccauuaugcaggcugccgucugcaaggagaagaucggcuggcgcaacgauagccugcaccuucugguguucgugucugacgcugacucccauuucggcauggauagcaaacucgccgggaucgucauuccuaaugacggacugugucaccuggauuccaagaacgaauacucuaugagcacaguucucgaguaucccaccaucggccaacugauugacaaacuugugcagaacaaugugcugcucaucuuugcggucacacaggagcaagugcaccuguacgaaaacuaugccaaacuuauuccuggggcuaccguuggacugcuccagaaagauuccggcaauauccugcagcugaucauuagcgccuacgaggaacucagaucugagguggaacuggagguccuuggggacacggagggacugaaccucuccuucacagcuaucugcaauaacggcacccuguuucagcaucaaaagaaaugcagccacaugaaggugggcgauacagccucuuucagcguuaccgugaauauuccccauugugaacggcgcuccagacacaucauuaucaagcccgucgggcugggagacgcccuugagcuccuggugucuccugaaugcaacugugauugccagaaagaggucgaagugaauagcuccaagugucaccauggcaacgggagcuuucagugcggaguuugugcuugccacccgggccauauggggccccggugugagugcggcgaggacaugcugucuaccgauuccuguaaagaagcgccugaccaccccagcugcucuggacgcggcgacugcuacugugggcagugcaucugucaucucuccccuuauggaaauauuuacggccccuauugccaaugugauaacuucagcugcgugagacacaaggggcugcuuuguggaggcaauggggacugcgauuguggcgagugcgucugucgguccggauggacaggcgaauacugcaacugcacgaccucuacagacagcuguguguccgaggaugggguucugugcucuggacgcggcgacugugugugcgggaaaugugucugcaccaauccgggagccagcggcccuacaugugagagaugccccaccuguggggauccuugcaacuccaagcggagcuguaucgaaugccaccucucugcugccggccaggccagagaggaaugcguggacaaguguaaacuggcuggagccacgauuuccgaggaagaggauuuuagcaaggacggcucuguguccugcagccugcagggggagaacgaaugucuuaucacauuccucauuaccaccgauaaugagggaaaaacaaucauucauucuaucaacgaaaaggacugccccaaaccucccaauaucccgaugauuaugcugggcguuagccuggcgauccuccugauuggggucgugcuucuguguaucuggaagcuccugguguccuuucacgaucgcaaggaggucgcuaaauucgaagccgagcggagcaaggccaaauggcagaccggaacaaacccucuguauagaggcucuacguccaccuuuaagaaugugacauacaaacaucgcgagaagcaaaagguugaccuuagcaccgacugcuga

SEQ ID NO: 2036 - protein, 261 aa, Artificial Sequence
  kallikrein-2__Homo_sapiens__A0A024R4J4
MWDLVLSIALSVGCTGAVPLIQSRIVGGWECEKHSQPWQVAVYSHGWAHCGGVLVHPQWVLTAAHCLKKNSQVWLGRHNLFEPEDTGQRVPVSHSFPHPLYNMSLLKHQSLRPDEDSSHDLMLLRLSEPAKITDVVKVLGLPTQEPALGTTCYASGWGSIEPEEFLRPRSLQCVSLHLLSNDMCARAYSEKVTEFMLCAGLWTGGKDTCGGDSGGPLVCNGVLQGITSWGPEPCALPEKPAVYTKVVHYRKWIKDTIAANP

SEQ ID NO: 2037 - RNA, 786 nt, Artificial Sequence
  kallikrein-2__Homo_sapiens__EAW71937
augugggaccugguucucuccaucgccuugucuguggggugcacuggugccgugccccucauccagucucggauugugggaggcugggagugugagaagcauucccaacccuggcagguggcuguguacagucauggaugggcacacuguggggguguccuggugcacccccagugggugcucacagcugcccauugccuaaagaagaauagccaggucuggcugggucggcacaaccuguuugagccugaagacacaggccagagggucccugucagccacagcuucccacacccgcucuacaauaugagccuucugaagcaucaaagccuuagaccagaugaagacuccagccaugaccucaugcugcuccgccugucagagccugccaagaucacagauguugugaagguccugggccugcccacccaggagccagcacuggggaccaccugcuacgccucaggcuggggcagcaucgaaccagaggaguucuugcgccccaggagucuucagugugugagccuccaucuccuguccaaugacaugugugcuagagcuuacucugagaaggugacagaguucauguugugugcugggcucuggacaggugguaaagacacuugugggggugauucuggggguccacuugucuguaauggugugcuucaagguaucacaucauggggcccugagccaugugcccugccugaaaagccugcuguguacaccaagguggugcauuaccggaaguggaucaaggacaccaucgcagccaaccccuga

SEQ ID NO: 2038 - RNA, 786 nt, Artificial Sequence
  derived and/or modified sequence opt1 from kallikrein-2__Homo_sapiens__EAW71937
augugggaccuggugcucagcaucgcccuguccgucggcugcaccggggccgugccccugauccagagccgcaucgugggcgggugggagugcgagaagcacucccagccguggcaggucgcgguguacagccacggcugggcccacugcgggggcgugcucguccacccccagugggugcugaccgccgcccacugccugaagaagaacucccagguguggcucggccggcacaaccuguucgagcccgaggacacggggcagcgcguccccgugagccacuccuucccgcacccccuguacaacaugagccuccugaagcaccagucccugcggcccgacgaggacagcucccacgaccucaugcugcugcgccucagcgagcccgccaagaucaccgacguggucaaggugcugggccugccgacccaggagcccgcgcucgggaccacgugcuacgccuccggcugggggagcaucgagcccgaggaguuccugcggccccgcucccugcagugcgugagccuccaccuccuguccaacgacaugugcgcccgggccuacagcgagaaggucaccgaguucaugcugugcgcgggccuguggaccggcgggaaggacacgugcggcggggacuccggcggcccgcuggugugcaacggggugcuccagggcaucaccagcugggggcccgagcccugcgcccugcccgagaagccggccgucuacaccaagguggugcacuaccgcaaguggaucaaggacaccaucgccgccaaccccuga

SEQ ID NO: 2039 - RNA, 786 nt, Artificial Sequence
  derived and/or modified sequence opt2 from kallikrein-2__Homo_sapiens__EAW71937
augugggaccucguccucuccaucgcccucuccgucggcugcaccggcgccgucccccucauccagucccgcaucgucggcggcugggagugcgagaagcacucccagcccuggcaggucgccgucuacucccacggcugggcccacugcggcggcguccucguccacccccaguggguccucaccgccgcccacugccucaagaagaacucccaggucuggcucggccgccacaaccucuucgagcccgaggacaccggccagcgcguccccgucucccacuccuucccccacccccucuacaacaugucccuccucaagcaccagucccuccgccccgacgaggacuccucccacgaccucaugcuccuccgccucuccgagcccgccaagaucaccgacgucgucaagguccucggccuccccacccaggagcccgcccucggcaccaccugcuacgccuccggcuggggcuccaucgagcccgaggaguuccuccgcccccgcucccuccagugcgucucccuccaccuccucuccaacgacaugugcgcccgcgccuacuccgagaaggucaccgaguucaugcucugcgccggccucuggaccggcggcaaggacaccugcggcggcgacuccggcggcccccucgucugcaacggcguccuccagggcaucaccuccuggggccccgagcccugcgcccuccccgagaagcccgccgucuacaccaaggucguccacuaccgcaaguggaucaaggacaccaucgccgccaaccccuga

SEQ ID NO: 2040 - RNA, 786 nt, Artificial Sequence
  derived and/or modified sequence opt3 from kallikrein-2__Homo_sapiens__EAW71937
augugggaccuggugcucagcaucgcccuuuccgucggcugcaccggggcuguuccccugauucagucuagaauagugggagguugggagugugaaaagcacucacaaccuuggcagguagcaguguacagucauggcugggcccacugcgggggagucuuggugcauccacaguggguuuuaacagcggcucacugucugaaaaagaacagccagguguggcuaggcaggcauaaucucuucgagccggaagauacuggucaacggguccccgugucccacucuuuuccucacccacuguauaacaugucgcuucugaaacaucagucauugcgccccgacgaggauagcagucacgaccucaugcugcugcgacucuccgaaccugccaagaucacggauguaguuaaaguguuagggcugccaacccaggagcccgcacuuggaacaacuugcuacgccucuggcuggggcagcauugagccugaagaguucuugcguccaagaucccugcagugugucucacuacaucuccugaguaaugacaugugcgcuagggcauauagcgaaaaggugaccgaguuuaugcuuugugccgggcuguggacaggagguaaggauaccugcggcggggacucuggaggcccguugguguguaacgguguccuccaagggaucacuuccuggggacccgagccuugcgcucugccagaaaaacccgccguuuacacaaaggugguacacuaucggaaauggauuaaggauaccaucgcggcaaauccuuga

SEQ ID NO: 2041 - RNA, 786 nt, Artificial Sequence
  derived and/or modified sequence opt4 from kallikrein-2__Homo_sapiens__EAW71937
augugggaccuggugcugagcaucgcccugagcgugggcugcaccggcgccgugccccugauccagagcagaaucgugggcggcugggagugcgagaagcacagccagcccuggcagguggccguguacagccacggcugggcccacugcggcggcgugcuggugcacccccagugggugcugaccgccgcccacugccugaagaagaacagccagguguggcugggcagacacaaccuguucgagcccgaggacaccggccagagagugcccgugagccacagcuucccccacccccuguacaacaugagccugcugaagcaccagagccugagacccgacgaggacagcagccacgaccugaugcugcugagacugagcgagcccgccaagaucaccgacguggugaaggugcugggccugcccacccaggagcccgcccugggcaccaccugcuacgccagcggcuggggcagcaucgagcccgaggaguuccugagacccagaagccugcagugcgugagccugcaccugcugagcaacgacaugugcgccagagccuacagcgagaaggugaccgaguucaugcugugcgccggccuguggaccggcggcaaggacaccugcggcggcgacagcggcggcccccuggugugcaacggcgugcugcagggcaucaccagcuggggccccgagcccugcgcccugcccgagaagcccgccguguacaccaagguggugcacuacagaaaguggaucaaggacaccaucgccgccaaccccuga

SEQ ID NO: 2042 - RNA, 786 nt, Artificial Sequence
  derived and/or modified sequence opt5 from kallikrein-2__Homo_sapiens__EAW71937
augugggaccuggugcucagcaucgcccuguccgucggcugcaccggggcuguuccccuuauucagucuagaaucgugggaggcugggagugugaaaagcacagccaaccuuggcaaguggccgucuacucccaugggugggcgcacugcggaggcgugcugguucauccgcagugggugcucacagcugcccacugucugaaaaagaacucucaggucuggcuugggcggcauaaucuguucgagcccgaagauacgggacagcgcgugccuguuagccacuccuuuccccacccucucuauaacaugucucugcugaaacaucagagccucagacccgacgaggauuccagccacgaccugaugcuucugcggcucucugaaccugccaagauuaccgauguggucaaagugcugggccuuccgacacaggagcccgcucugggcaccacaugcuacgccuccggguggggaagcaucgagccugaagaguuccuccgccccagaucucugcagugugugucccugcaucuccugagcaaugacaugugcgcucgggccuauucugaaaaggucaccgaguuuaugcuuugugcgggccuguggacagggggaaaggauaccugcggcggggacuccggaggcccucucguuuguaacggcgugcugcaagggauuacgagcuggggacccgagccgugcgcccuuccugaaaaacccgcuguguacaccaaggucgugcacuaucgcaaauggaucaaggauacaaucgccgcuaauccuuga

SEQ ID NO: 2043 - protein, 223 aa, Artificial Sequence
  kallikrein-2__Homo_sapiens__A0A024R4N3
MWDLVLSIALSVGCTGAVPLIQSRIVGGWECEKHSQPWQVAVYSHGWAHCGGVLVHPQWVLTAAHCLKKNSQVWLGRHNLFEPEDTGQRVPVSHSFPHPLYNMSLLKHQSLRPDEDSSHDLMLLRLSEPAKITDVVKVLGLPTQEPALGTTCYASGWGSIEPEEFLRPRSLQCVSLHLLSNDMCARAYSEKVTEFMLCAGLWTGGKDTCGVSHPYSQHLEGKG

SEQ ID NO: 2044 - RNA, 672 nt, Artificial Sequence
  kallikrein-2__Homo_sapiens__EAW71938
augugggaccugguucucuccaucgccuugucuguggggugcacuggugccgugccccucauccagucucggauugugggaggcugggagugugagaagcauucccaacccuggcagguggcuguguacagucauggaugggcacacuguggggguguccuggugcacccccagugggugcucacagcugcccauugccuaaagaagaauagccaggucuggcugggucggcacaaccuguuugagccugaagacacaggccagagggucccugucagccacagcuucccacacccgcucuacaauaugagccuucugaagcaucaaagccuuagaccagaugaagacuccagccaugaccucaugcugcuccgccugucagagccugccaagaucacagauguugugaagguccugggccugcccacccaggagccagcacuggggaccaccugcuacgccucaggcuggggcagcaucgaaccagaggaguucuugcgccccaggagucuucagugugugagccuccaucuccuguccaaugacaugugugcuagagcuuacucugagaaggugacagaguucauguugugugcugggcucuggacaggugguaaagacacuuguggggugagucaucccuacucccaacaucuggaggggaaaggguga

SEQ ID NO: 2045 - RNA, 672 nt, Artificial Sequence
  derived and/or modified sequence opt1 from kallikrein-2__Homo_sapiens__EAW71938
augugggaccuggugcucagcaucgcccuguccgucggcugcaccggggccgugccccugauccagagccgcaucgugggcgggugggagugcgagaagcacucccagccguggcaggucgcgguguacagccacggcugggcccacugcgggggcgugcucguccacccccagugggugcugaccgccgcccacugccugaagaagaacucccagguguggcucggccggcacaaccuguucgagcccgaggacaccgggcagcgcguccccgugagccacuccuucccgcacccccuguacaacaugagccuccugaagcaccagucccugcggcccgacgaggacagcucccacgaccucaugcugcugcgccucagcgagcccgccaagaucaccgacguggucaaggugcugggccugccgacccaggagcccgcgcucgggaccacgugcuacgccuccggcugggggagcaucgagcccgaggaguuccugcggccccgcucccugcagugcgugagccuccaccuccuguccaacgacaugugcgcccgggccuacagcgagaaggucaccgaguucaugcugugcgcgggccuguggaccggcgggaaggacacgugcggcgugucccacccguacagccagcaccuggaggggaagggcuga

SEQ ID NO: 2046 - RNA, 672 nt, Artificial Sequence
  derived and/or modified sequence opt2 from kallikrein-2__Homo_sapiens__EAW71938
augugggaccucguccucuccaucgcccucuccgucggcugcaccggcgccgucccccucauccagucccgcaucgucggcggcugggagugcgagaagcacucccagcccuggcaggucgccgucuacucccacggcugggcccacugcggcggcguccucguccacccccaguggguccucaccgccgcccacugccucaagaagaacucccaggucuggcucggccgccacaaccucuucgagcccgaggacaccggccagcgcguccccgucucccacuccuucccccacccccucuacaacaugucccuccucaagcaccagucccuccgccccgacgaggacuccucccacgaccucaugcuccuccgccucuccgagcccgccaagaucaccgacgucgucaagguccucggccuccccacccaggagcccgcccucggcaccaccugcuacgccuccggcuggggcuccaucgagcccgaggaguuccuccgcccccgcucccuccagugcgucucccuccaccuccucuccaacgacaugugcgcccgcgccuacuccgagaaggucaccgaguucaugcucugcgccggccucuggaccggcggcaaggacaccugcggcgucucccaccccuacucccagcaccucgagggcaagggcuga

SEQ ID NO: 2047 - RNA, 672 nt, Artificial Sequence
  derived and/or modified sequence opt3 from kallikrein-2__Homo_sapiens__EAW71938
augugggaccuggugcucagcaucgcccuuuccgucggcugcaccggggcuguuccccugauucagucuagaauagugggagguugggagugugaaaagcacucacaaccuuggcagguagcaguguacagucauggcugggcccacugcgggggagucuuggugcauccacaguggguuuuaacagcggcucacugucugaaaaagaacagccagguguggcuaggcaggcauaaucucuucgagccggaagauacuggucaacggguccccgugucccacucuuuuccucacccacuguauaacaugucgcuucugaaacaucagucauugcgccccgacgaggauagcagucacgaccucaugcugcugcgacucuccgaaccugccaagaucacggauguaguuaaaguguuagggcugccaacccaggagcccgcacuuggaacaacuugcuacgccucuggcuggggcagcauugagccugaagaguucuugcguccaagaucccugcagugugucucacuacaucuccugaguaaugacaugugcgcuagggcauauagcgaaaaggugaccgaguuuaugcuuugugccgggcuguggacaggagguaaggauaccugcggcgugucucacccguacucccaacacuuggaggggaaaggauga

SEQ ID NO: 2048 - RNA, 672 nt, Artificial Sequence
  derived and/or modified sequence opt4 from kallikrein-2__Homo_sapiens__EAW71938
augugggaccuggugcugagcaucgcccugagcgugggcugcaccggcgccgugccccugauccagagcagaaucgugggcggcugggagugcgagaagcacagccagcccuggcagguggccguguacagccacggcugggcccacugcggcggcgugcuggugcacccccagugggugcugaccgccgcccacugccugaagaagaacagccagguguggcugggcagacacaaccuguucgagcccgaggacaccggccagagagugcccgugagccacagcuucccccacccccuguacaacaugagccugcugaagcaccagagccugagacccgacgaggacagcagccacgaccugaugcugcugagacugagcgagcccgccaagaucaccgacguggugaaggugcugggccugcccacccaggagcccgcccugggcaccaccugcuacgccagcggcuggggcagcaucgagcccgaggaguuccugagacccagaagccugcagugcgugagccugcaccugcugagcaacgacaugugcgccagagccuacagcgagaaggugaccgaguucaugcugugcgccggccuguggaccggcggcaaggacaccugcggcgugagccaccccuacagccagcaccuggagggcaagggcuga

SEQ ID NO: 2049 - RNA, 672 nt, Artificial Sequence
  derived and/or modified sequence opt5 from kallikrein-2__Homo_sapiens__EAW71938
augugggaccuggugcucagcaucgcccuguccgucggcugcaccggggcuguuccccuuauucagucuagaaucgugggaggcugggagugugaaaagcacagccaaccuuggcaaguggccgucuacucccaugggugggcgcacugcggaggcgugcugguucauccgcagugggugcucacagcugcccacugucugaaaaagaacucucaggucuggcuugggcggcauaaucuguucgagcccgaagauacgggacagcgcgugccuguuagccacuccuuuccccacccucucuauaacaugucucugcugaaacaucagagccucagacccgacgaggauuccagccacgaccugaugcuucugcggcucucugaaccugccaagauuaccgauguggucaaagugcugggccuuccgacacaggagcccgcucugggcaccacaugcuacgccuccggguggggaagcaucgagccugaagaguuccuccgccccagaucucugcagugugugucccugcaucuccugagcaaugacaugugcgcucgggccuauucugaaaaggucaccgaguuuaugcuuugugcgggccuguggacagggggaaaggauaccugcggcguuucccacccuuacagccaacaccucgaggggaaaggauga

SEQ ID NO: 2050 - protein, 62 aa, Artificial Sequence
  kallikrein-2__Homo_sapiens__B0AZU9
MSLLKHQSLRPDEDSSHDLMLLRLSEPAKITDVVKVLGLPTQEPALGTTCYASGWGSIEPEE

SEQ ID NO: 2051 - RNA, 189 nt, Artificial Sequence
  kallikrein-2__Homo_sapiens__BAF98781
augagccuucugaagcaucaaagccuuagaccagaugaagacuccagccaugaccucaugcugcuucgccugucagagccugccaagaucacagauguugugaagguccugggccugcccacccaggagccagcacuggggaccaccugcuacgccucaggcuggggcagcaucgaaccagaggaguga

SEQ ID NO: 2052 - RNA, 189 nt, Artificial Sequence
  derived and/or modified sequence opt1 from kallikrein-2__Homo_sapiens__BAF98781
augagccugcucaagcaccagucccugcgccccgacgaggacagcucccacgaccugaugcuccugcggcugagcgagccggccaagaucaccgacguggucaaggugcucggccugcccacccaggagcccgcccuggggacgaccugcuacgcguccggcugggggagcaucgagcccgaggaguga

SEQ ID NO: 2053 - RNA, 189 nt, Artificial Sequence
  derived and/or modified sequence opt2 from kallikrein-2__Homo_sapiens__BAF98781
augucccuccucaagcaccagucccuccgccccgacgaggacuccucccacgaccucaugcuccuccgccucuccgagcccgccaagaucaccgacgucgucaagguccucggccuccccacccaggagcccgcccucggcaccaccugcuacgccuccggcuggggcuccaucgagcccgaggaguga

SEQ ID NO: 2054 - RNA, 189 nt, Artificial Sequence
  derived and/or modified sequence opt3 from kallikrein-2__Homo_sapiens__BAF98781
augagccugcucaagcaccagucccuuagacccgacgaggauucuucacaugaccugauguuguuaaggcugagugaaccugccaaaaucaccgauguggucaagguucuaggccucccaacacaagagccggcucuggggacuacgugcuacgcaagcggaugggguuccauugaacccgaggaauga

SEQ ID NO: 2055 - RNA, 189 nt, Artificial Sequence
  derived and/or modified sequence opt4 from kallikrein-2__Homo_sapiens__BAF98781
augagccugcugaagcaccagagccugagacccgacgaggacagcagccacgaccugaugcugcugagacugagcgagcccgccaagaucaccgacguggugaaggugcugggccugcccacccaggagcccgcccugggcaccaccugcuacgccagcggcuggggcagcaucgagcccgaggaguga

SEQ ID NO: 2056 - RNA, 189 nt, Artificial Sequence
  derived and/or modified sequence opt5 from kallikrein-2__Homo_sapiens__BAF98781
augagccugcucaagcaccagucccugagacccgacgaggauucuagccaugaccuuaugcugcuccggcuguccgaaccugccaaaaucaccgauguggucaagguucuuggccugccgacacaagagcccgcucucgggacgaccugcuacgccucuggauggggcagcauugaaccugaggaauga

SEQ ID NO: 2057 - protein, 244 aa, Artificial Sequence [sequence omitted]

SEQ ID NO: 2058 - RNA, 735 nt, Artificial Sequence
  kallikrein-2__Homo_sapiens__BAG62239
augggcacacuguggggguguccuggugcacccccagugggugcucacagcugcccauugccuaaagaaguaaguaggacccugggaucuggggagggaauggcugugucccacaggaauaacagcgggaugcuucccccagggucacuucucaggaauagccaggucuggcugggucggcacaaccuguuugagccugaagacacaggccggagggucccugucagccacagcuucccacacccgcucuacaauaugagccuucugaagcaucaaagccuuagaccagaugaagacuccagccaugaccucaugcugcuccgccugucagagccugccaagaucacagauguugugaagguccugggccugcccacccaggagccagcacuggggaccaccugcuacgccucaggcuggggcagcaucgaaccagaggaguucuugcgccccaggagucuucagugugugagccuccaucuccuguccaaugacaugugugcuagagcuuacucugagaaggugacagaguucauguugugugcugggcucuggacaggugguaaagacacuugugggggugauucuggggguccacuugucuguaauggugugcuucaagguaucacaucauggggcccugagccaugugcccugccugaaaagccugcuguguacaccaagguggugcauuaccggaaguggaucaaggacaccaucgcagccaaccccuga

SEQ ID NO: 2059 - RNA, 735 nt, Artificial Sequence
  derived and/or modified sequence opt1 from kallikrein-2__Homo_sapiens__BAG62239
augggcacccugugggggugccccggcgccccgcccgugggggcccacagcugcccccuccccaaggaggucucccgcacccugggcagcggggagggcauggcggugucccaccggaacaacagcggcaugcugccgcccgggucccuccugcgcaacagccagguguggcugggccggcacaaccucuucgagcccgaggacacggggcgccggguccccgugucccacagcuucccgcacccccuguacaacaugucccugcucaagcaccagagccugcgccccgacgaggacuccagccacgaccugaugcuccugcggcuguccgagcccgccaagaucaccgacguggucaaggugcucggccugccgacccaggagcccgcccuggggaccacgugcuacgccagcggcuggggcuccaucgagcccgaggaguuccuccgcccccggagccugcagugcgugucccugcaccuccugagcaacgacaugugcgcccgcgcguacuccgagaaggucaccgaguucaugcugugcgccgggcucuggaccggcgggaaggacacgugcggcggcgacagcgggggcccgcuggugugcaacggggugcugcagggcaucaccagcugggggcccgagcccugcgcccuccccgagaagccggccgucuacaccaagguggugcacuaccggaaguggaucaaggacaccaucgcggccaaccccuga

SEQ ID NO: 2060 - RNA, 735 nt, Artificial Sequence
  derived and/or modified sequence opt2 from kallikrein-2__Homo_sapiens__BAG62239
augggcacccucuggggcugccccggcgccccccccgucggcgcccacuccugcccccuccccaaggaggucucccgcacccucggcuccggcgagggcauggccgucucccaccgcaacaacuccggcaugcucccccccggcucccuccuccgcaacucccaggucuggcucggccgccacaaccucuucgagcccgaggacaccggccgccgcguccccgucucccacuccuucccccacccccucuacaacaugucccuccucaagcaccagucccuccgccccgacgaggacuccucccacgaccucaugcuccuccgccucuccgagcccgccaagaucaccgacgucgucaagguccucggccuccccacccaggagcccgcccucggcaccaccugcuacgccuccggcuggggcuccaucgagcccgaggaguuccuccgcccccgcucccuccagugcgucucccuccaccuccucuccaacgacaugugcgcccgcgccuacuccgagaaggucaccgaguucaugcucugcgccggccucuggaccggcggcaaggacaccugcggcggcgacuccggcggcccccucgucugcaacggcguccuccagggcaucaccuccuggggccccgagcccugcgcccuccccgagaagcccgccgucuacaccaaggucguccacuaccgcaaguggaucaaggacaccaucgccgccaaccccuga

SEQ ID NO: 2061 - RNA, 735 nt, Artificial Sequence
  derived and/or modified sequence opt3 from kallikrein-2__Homo_sapiens__BAG62239
augggcacccugugggggugccccggagccccuccagugggugcucacagcuguccgcuccccaaggaggucuccagaacacuuggcucuggggaaggaauggcaguuucacauaggaacaauaguggcaugcugccuccagguagcuuguuacggaacucccagguguggcuggggcgccacaaucuauucgagcccgaagacacuggacgacguguaccugugucucauucguuuccacacccccucuacaacaugucacugcuuaaacaucaaagccugagaccugaugaggacaguucccacgauuugaugcuccugaggcugucugaaccagccaagaucacggacgucgugaaaguucucggcuuaccgacccaggagcccgcgcugggcacaacuugcuaugcuagcggguggggauccauugagccugaagaguuccuucggccacgcucauugcagugugugagucugcaccuacucagcaaugauaugugcgccagagcauacucugaaaaggucaccgaguuuaugcugugugccggucuuuggacaggcgggaaagauaccugcggaggcgacuccggugggccccugguguguaacggaguauugcagggcauaacuucauggggcccugagccaugcgcucuccccgaaaagccggcaguuuauacaaaggugguccauuacaggaaauggaucaaggacaccauugccgcuaauccuuga

SEQ ID NO: 2062 - RNA, 735 nt, Artificial Sequence
  derived and/or modified sequence opt4 from kallikrein-2__Homo_sapiens__BAG62239
augggcacccuguggggcugccccggcgccccccccgugggcgcccacagcugcccccugcccaaggaggugagcagaacccugggcagcggcgagggcauggccgugagccacagaaacaacagcggcaugcugccccccggcagccugcugagaaacagccagguguggcugggcagacacaaccuguucgagcccgaggacaccggcagaagagugcccgugagccacagcuucccccacccccuguacaacaugagccugcugaagcaccagagccugagacccgacgaggacagcagccacgaccugaugcugcugagacugagcgagcccgccaagaucaccgacguggugaaggugcugggccugcccacccaggagcccgcccugggcaccaccugcuacgccagcggcuggggcagcaucgagcccgaggaguuccugagacccagaagccugcagugcgugagccugcaccugcugagcaacgacaugugcgccagagccuacagcgagaaggugaccgaguucaugcugugcgccggccuguggaccggcggcaaggacaccugcggcggcgacagcggcggcccccuggugugcaacggcgugcugcagggcaucaccagcuggggccccgagcccugcgcccugcccgagaagcccgccguguacaccaagguggugcacuacagaaaguggaucaaggacaccaucgccgccaaccccuga

SEQ ID NO: 2063 - RNA, 735 nt, Artificial Sequence
  derived and/or modified sequence opt5 from kallikrein-2__Homo_sapiens__BAG62239
augggcacccugugggggugccccggagccccuccggugggcgcucacagcuguccccucccuaaggaggucuccagaacacuggggucuggagaaggcauggccguuagccaucggaacaauuccgggaugcuucccccuggaucucugcuccgcaacagccagguguggcugggcagacacaaucuuuucgagcccgaagacacgggccggcgcgugccugucucccauucuuuuccgcacccccuguacaacaugagccuccugaaacaucaaucccugagaccugaugaggacagcucucacgaucucaugcugcuucggcuguccgaacccgcgaagaucaccgacgugguuaaagugcucgggcugccuacacaggagcccgcucuuggaaccacaugcuaugccagcggcugggggucuauugagccggaagaguuccugcgcccuagaucccuccagugugucagccugcaucugcucucuaaugauaugugcgcccgggcuuacuccgaaaaggugaccgaguuuaugcugugugccggacuuuggacaggcgggaaagauaccugcggaggcgacagcggcgggccccugguuuguaacggagugcuccagggcaucacguccugggggccugagcccugcgcucugcccgaaaagccugccgucuauaccaagguggugcacuaccgcaaauggauuaaggacacaaucgcggccaauccguga

SEQ ID NO: 2064 - protein, 261 aa, Artificial Sequence; identical to SEQ ID NO: 2036
  kallikrein-2__Homo_sapiens__P20151

SEQ ID NO: 2065 - RNA, 786 nt, Artificial Sequence
  kallikrein-2__Homo_sapiens__AAA74454
augugggaccugguucucuccaucgccuugucuguggggugcacuggugccgugccccucauccagucucggauugugggaggcugggagugugagaagcauucccaacccuggcagguggcuguguacagucauggaugggcacacuguggggguguccuggugcacccccagugggugcucacagcugcccauugccuaaagaagaauagccaggucuggcugggucggcacaaccuguuugagccugaagacacaggccagagggucccugucagccacagcuucccacacccgcucuacaauaugagccuucugaagcaucaaagccuuagaccagaugaagacuccagccaugaccucaugcugcuccgccugucagagccugccaagaucacagauguugugaagguccugggccugcccacccaggagccagcacuggggaccaccugcuacgccucaggcuggggcagcaucgaaccagaggaguucuugcgccccaggagucuucagugugugagccuccaucuccuguccaaugacaugugugcuagagcuuacucugagaaggugacagaguucauguugugugcugggcucuggacaggugguaaagacacuugugggggugauucuggggguccacuugucuguaauggggugcuucaagguaucacaucauggggcccugagccaugugcccugccugaaaagccugcuguguacaccaagguggugcauuaccggaaguggaucaaggacaccaucgcagccaaccccuga

SEQ ID NO: 2066 - RNA, 786 nt, Artificial Sequence; identical to SEQ ID NO: 2038
  derived and/or modified sequence opt1 from kallikrein-2__Homo_sapiens__AAA74454

SEQ ID NO: 2067 - RNA, 786 nt, Artificial Sequence; identical to SEQ ID NO: 2039
  derived and/or modified sequence opt2 from kallikrein-2__Homo_sapiens__AAA74454

SEQ ID NO: 2068 - RNA, 786 nt, Artificial Sequence; identical to SEQ ID NO: 2040
  derived and/or modified sequence opt3 from kallikrein-2__Homo_sapiens__AAA74454

SEQ ID NO: 2069 - RNA, 786 nt, Artificial Sequence; identical to SEQ ID NO: 2041
  derived and/or modified sequence opt4 from kallikrein-2__Homo_sapiens__AAA74454

SEQ ID NO: 2070 - RNA, 786 nt, Artificial Sequence; identical to SEQ ID NO: 2042
  derived and/or modified sequence opt5 from kallikrein-2__Homo_sapiens__AAA74454

SEQ ID NO: 2071 - protein, 49 aa, Artificial Sequence
  kallikrein-2__Homo_sapiens__Q6T774
MWDLVLSIALSVGCTGIARSGWVGTTCLSLKTQARGSLSATASHTRSTI

SEQ ID NO: 2072 - RNA, 150 nt, Artificial Sequence
  kallikrein-2__Homo_sapiens__AAR10469
augugggaccugguucucuccaucgccuugucuguggggugcacuggaauagccaggucuggcugggucggcacaaccuguuugagccugaagacacaggccagagggucccugucagccacagcuucccacacccgcucuacaauauga

SEQ ID NO: 2073 - RNA, 150 nt, Artificial Sequence
  derived and/or modified sequence opt1 from kallikrein-2__Homo_sapiens__AAR10469
augugggaccuggugcucagcaucgcccuguccgucggcugcaccgggaucgcccgcagcggcuggguggggaccacgugccugucccucaagacccaggcgcggggcagccuguccgccaccgccagccacacccgcuccacgaucuga

SEQ ID NO: 2074 - RNA, 150 nt, Artificial Sequence
  derived and/or modified sequence opt2 from kallikrein-2__Homo_sapiens__AAR10469
augugggaccucguccucuccaucgcccucuccgucggcugcaccggcaucgcccgcuccggcugggucggcaccaccugccucucccucaagacccaggcccgcggcucccucuccgccaccgccucccacacccgcuccaccaucuga

SEQ ID NO: 2075 - RNA, 150 nt, Artificial Sequence
  derived and/or modified sequence opt3 from kallikrein-2__Homo_sapiens__AAR10469
augugggaccuggugcucagcaucgcccuuuccgucggcugcaccgggauugcuagaucuggauggguugguacaacuugucugucauugaagacgcaggcaaggggcaguuuaagcgccaccgcgucccacacacggucuacuauauga

SEQ ID NO: 2076 - RNA, 150 nt, Artificial Sequence
  derived and/or modified sequence opt4 from kallikrein-2__Homo_sapiens__AAR10469
augugggaccuggugcugagcaucgcccugagcgugggcugcaccggcaucgccagaagcggcugggugggcaccaccugccugagccugaagacccaggccagaggcagccugagcgccaccgccagccacaccagaagcaccaucuga

SEQ ID NO: 2077 - RNA, 150 nt, Artificial Sequence
  derived and/or modified sequence opt5 from kallikrein-2__Homo_sapiens__AAR10469
augugggaccuggugcucagcaucgcccuguccgucggcugcaccgggauugcuagaucuggauggguuggcacaacgugucuuagccugaagacccaggcccgggggucccucucugcgacagcuagccacacccgcuccacaaucuga

SEQ ID NO: 2078 - protein, 180 aa, Artificial Sequence
  kallikrein-2__Homo_sapiens__Q6T775
MWDLVLSIALSVGCTGAVPLIQSRIVGGWECEKHSQPWQVAVYSHGWAHCGGVLVHPQWVLTAAHCLKKNSQVWLGRHNLFEPEDTGQRVPVSHSFPHPLYNMSLLKHQSLRPDEDSSHDLMLLRLSEPAKITDVVKVLGLPTQEPALGTTCYASGWGSIEPEECTPGPDGVAGSPDAWV

SEQ ID NO: 2079 - RNA, 543 nt, Artificial Sequence
  kallikrein-2__Homo_sapiens__AAR10468
augugggaccugguucucuccaucgccuugucuguggggugcacuggugccgugccccucauccagucucggauugugggaggcugggagugugagaagcauucccaacccuggcagguggcuguguacagucauggaugggcacacuguggggguguccuggugcacccccagugggugcucacagcugcccauugccuaaagaagaauagccaggucuggcugggucggcacaaccuguuugagccugaagacacaggccagagggucccugucagccacagcuucccacacccgcucuacaauaugagccuucugaagcaucaaagccuuagaccagaugaagacuccagccaugaccucaugcugcuccgccugucagagccugccaagaucacagauguugugaagguccugggccugcccacccaggagccagcacuggggaccaccugcuacgccucaggcuggggcagcaucgaaccagaggaguguacgccugggccagaugguguagcugggagcccagaugccugggucuga

SEQ ID NO: 2080 - RNA, 543 nt, Artificial Sequence
  derived and/or modified sequence opt1 from kallikrein-2__Homo_sapiens__AAR10468
augugggaccuggugcucagcaucgcccuguccgucggcugcaccggggccgugccccugauccagagccgcaucgugggcgggugggagugcgagaagcacucccagccguggcaggucgcgguguacagccacggcugggcccacugcgggggcgugcucguccacccccagugggugcugaccgccgcccacugccugaagaagaacucccagguguggcucggccggcacaaccuguucgagcccgaggacacggggcagcgcguccccgugagccacuccuucccgcacccccuguacaacaugagccuccugaagcaccagucccugcggcccgacgaggacagcucccacgaccucaugcugcugcgccucagcgagcccgccaagaucaccgacguggucaaggugcugggccugccgacccaggagcccgcgcucgggaccacgugcuacgccuccggcugggggagcaucgagcccgaggagugcacccccggcccggacggcguggccgggucccccgacgccugggucuga

SEQ ID NO: 2081 - RNA, 543 nt, Artificial Sequence
  derived and/or modified sequence opt2 from kallikrein-2__Homo_sapiens__AAR10468
augugggaccucguccucuccaucgcccucuccgucggcugcaccggcgccgucccccucauccagucccgcaucgucggcggcugggagugcgagaagcacucccagcccuggcaggucgccgucuacucccacggcugggcccacugcggcggcguccucguccacccccaguggguccucaccgccgcccacugccucaagaagaacucccaggucuggcucggccgccacaaccucuucgagcccgaggacaccggccagcgcguccccgucucccacuccuucccccacccccucuacaacaugucccuccucaagcaccagucccuccgccccgacgaggacuccucccacgaccucaugcuccuccgccucuccgagcccgccaagaucaccgacgucgucaagguccucggccuccccacccaggagcccgcccucggcaccaccugcuacgccuccggcuggggcuccaucgagcccgaggagugcacccccggccccgacggcgucgccggcucccccgacgccugggucuga

SEQ ID NO: 2082 - RNA, 543 nt, Artificial Sequence
  derived and/or modified sequence opt3 from kallikrein-2__Homo_sapiens__AAR10468
augugggaccuggugcucagcaucgcccuuuccgucggcugcaccggggcuguuccccugauucagucuagaauagugggagguugggagugugaaaagcacucacaaccuuggcagguagcaguguacagucauggcugggcccacugcgggggagucuuggugcauccacaguggguuuuaacagcggcucacugucugaaaaagaacagccagguguggcuaggcaggcauaaucucuucgagccggaagauacuggucaacggguccccgugucccacucuuuuccucacccacuguauaacaugucgcuucugaaacaucagucauugcgccccgacgaggauagcagucacgaccucaugcugcugcgacucuccgaaccugccaagaucacggauguaguuaaaguguuagggcugccaacccaggagcccgcacuuggaacaacuugcuacgccucuggcuggggcagcauugagccugaagaguguaccccagggccggacggagucgcugguucccccgaugcauggguguga

SEQ ID NO: 2083 - RNA, 543 nt, Artificial Sequence
  derived and/or modified sequence opt4 from kallikrein-2__Homo_sapiens__AAR10468
augugggaccuggugcugagcaucgcccugagcgugggcugcaccggcgccgugccccugauccagagcagaaucgugggcggcugggagugcgagaagcacagccagcccuggcagguggccguguacagccacggcugggcccacugcggcggcgugcuggugcacccccagugggugcugaccgccgcccacugccugaagaagaacagccagguguggcugggcagacacaaccuguucgagcccgaggacaccggccagagagugcccgugagccacagcuucccccacccccuguacaacaugagccugcugaagcaccagagccugagacccgacgaggacagcagccacgaccugaugcugcugagacugagcgagcccgccaagaucaccgacguggugaaggugcugggccugcccacccaggagcccgcccugggcaccaccugcuacgccagcggcuggggcagcaucgagcccgaggagugcacccccggccccgacggcguggccggcagccccgacgccuggguguga

SEQ ID NO: 2084 - RNA, 543 nt, Artificial Sequence
  derived and/or modified sequence opt5 from kallikrein-2__Homo_sapiens__AAR10468
augugggaccuggugcucagcaucgcccuguccgucggcugcaccggggcuguuccccuuauucagucuagaaucgugggaggcugggagugugaaaagcacagccaaccuuggcaaguggccgucuacucccaugggugggcgcacugcggaggcgugcugguucauccgcagugggugcucacagcugcccacugucugaaaaagaacucucaggucuggcuugggcggcauaaucuguucgagcccgaagauacgggacagcgcgugccuguuagccacuccuuuccccacccucucuauaacaugucucugcugaaacaucagagccucagacccgacgaggauuccagccacgaccugaugcuucugcggcucucugaaccugccaagauuaccgauguggucaaagugcugggccuuccgacacaggagcccgcucugggcaccacaugcuacgccuccggguggggaagcaucgagccugaagaguguacccccggcccugacgggguggcuggaucucccgaugccugggucuga

SEQ ID NO: 2085 - protein, 254 aa, Artificial Sequence
  kallikrein-4__Homo_sapiens__A0A0C4DFQ5
MATAGNPWGWFLGYLILGVAGSLVSGSCSQIINGEDCSPHSQPWQAALVMENELFCSGVLVHPQWVLSAAHCFQNSYTIGLGLHSLEADQEPGSQMVEASLSVRHPEYNRPLLANDLMLIKLDESVSESDTIRSISIASQCPTAGNSCLVSGWGLLANGRMPTVLQCVNVSVVSEEVCSKLYDPLYHPSMFCAGGGQDQKDSCNGDSGGPLICNGYLQGLVSFGKAPCGQVGVPGVYTNLCKFTEWIEKTVQAS

SEQ ID NO: 2086 - RNA, 765 nt, Artificial Sequence
  kallikrein-4__Homo_sapiens__EAW71943
auggccacagcaggaaaucccuggggcugguuccugggguaccucauccuuggugucgcaggaucgcucgucucugguagcugcagccaaaucauaaacggcgaggacugcagcccgcacucgcagcccuggcaggcggcacuggucauggaaaacgaauuguucugcucgggcguccuggugcauccgcagugggugcugucagccgcacacuguuuccagaacuccuacaccaucgggcugggccugcacagucuugaggccgaccaagagccagggagccagaugguggaggccagccucuccguacggcacccagaguacaacagacccuugcucgcuaacgaccucaugcucaucaaguuggacgaauccguguccgagucugacaccauccggagcaucagcauugcuucgcagugcccuaccgcggggaacucuugccucguuucuggcuggggucugcuggcgaacggcagaaugccuaccgugcugcagugcgugaacgugucgguggugucugaggaggucugcaguaagcucuaugacccgcuguaccaccccagcauguucugcgccggcggagggcaagaccagaaggacuccugcaacggugacucuggggggccccugaucugcaacggguacuugcagggccuugugucuuucggaaaagccccguguggccaaguuggcgugccaggugucuacaccaaccucugcaaauucacugaguggauagagaaaaccguccaggccaguuaa

SEQ ID NO: 2087 - RNA, 765 nt, Artificial Sequence
  derived and/or modified sequence opt1 from kallikrein-4__Homo_sapiens__EAW71943
auggccaccgccggcaaccccugggggugguuccugggcuaccucauccuggggguggcgggcagccuggucuccgggagcugcucccagaucaucaacggcgaggacugcagcccgcacucccagcccuggcaggccgcccucgugauggagaacgagcuguucugcagcggcgugcugguccacccccagugggugcucuccgccgcccacugcuuccagaacagcuacaccaucgggcugggccugcacucccucgaggcggaccaggagcccgggagccagaugguggaggccucccugagcguccgccacccggaguacaaccggccccugcucgccaacgaccugaugcugaucaagcucgacgaguccgugagcgaguccgacacgauccgcagcaucuccaucgccagccagugccccaccgcgggcaacuccugccuggugagcggguggggccugcucgccaacggccggaugcccaccguccugcagugcgugaacgugagcgucguguccgaggaggugugcagcaagcuguacgacccgcucuaccaccccuccauguucugcgccgggggcgggcaggaccagaaggacagcugcaacggcgacuccggcgggccccugaucugcaacggcuaccugcaggggcucgucagcuucggcaaggcccccugcggccaggugggggugccgggcgucuacaccaaccugugcaaguucacggaguggaucgagaagaccgugcaggccuccuga

SEQ ID NO: 2088 - RNA, 765 nt, Artificial Sequence
  derived and/or modified sequence opt2 from kallikrein-4__Homo_sapiens__EAW71943
auggccaccgccggcaaccccuggggcugguuccucggcuaccucauccucggcgucgccggcucccucgucuccggcuccugcucccagaucaucaacggcgaggacugcuccccccacucccagcccuggcaggccgcccucgucauggagaacgagcucuucugcuccggcguccucguccacccccaguggguccucuccgccgcccacugcuuccagaacuccuacaccaucggccucggccuccacucccucgaggccgaccaggagcccggcucccagauggucgaggccucccucuccguccgccaccccgaguacaaccgcccccuccucgccaacgaccucaugcucaucaagcucgacgaguccgucuccgaguccgacaccauccgcuccaucuccaucgccucccagugccccaccgccggcaacuccugccucgucuccggcuggggccuccucgccaacggccgcaugcccaccguccuccagugcgucaacgucuccgucgucuccgaggaggucugcuccaagcucuacgacccccucuaccaccccuccauguucugcgccggcggcggccaggaccagaaggacuccugcaacggcgacuccggcggcccccucaucugcaacggcuaccuccagggccucgucuccuucggcaaggcccccugcggccaggucggcguccccggcgucuacaccaaccucugcaaguucaccgaguggaucgagaagaccguccaggccuccuga

SEQ ID NO: 2089 - RNA, 765 nt, Artificial Sequence
  derived and/or modified sequence opt3 from kallikrein-4__Homo_sapiens__EAW71943
auggccaccgcuggcaaccccugggggugguuccugggauaccucauccuugguguggcaggcagccuggucuccgggucuugcucacagauuauaaauggagaggacuguaguccucacagccaaccauggcaggccgcguugguuauggaaaacgaguuauuuugcuccggcgugcugguacauccgcagugggugcuaucugcugcccacuguuuccaaaauucguauacaaucggucucgggcugcauucacuugaagcagaucaggagcccggaagccagauggucgaagccagucuguccgugagacacccugaguacaacaggccauugcucgcuaaugaccugaugcugauuaagcucgaugagucuguuagcgaauccgacacuauccggucaauuaguaucgcaagccagugccccacggccggcaacucuuguuuaguguccggcugggggcugcuugcuaauggacgcaugccuaccgucuugcagugcgugaacguaucaguugugagcgaggaagucuguaguaaacuguaugauccacuauaccaucccucuauguuuugcgccgguggcgggcaagaccagaaggauuccuguaauggagacagcggcgguccucucauaugcaacggguaucugcagggacuugugucguucggcaaagcgccauguggccaggugggggucccgggaguuuacacaaaucugugcaaguuuacugaguggaucgagaaaaccgugcaagcaucuuga

SEQ ID NO: 2090 - RNA, 765 nt, Artificial Sequence
  derived and/or modified sequence opt4 from kallikrein-4__Homo_sapiens__EAW71943
auggccaccgccggcaaccccuggggcugguuccugggcuaccugauccugggcguggccggcagccuggugagcggcagcugcagccagaucaucaacggcgaggacugcagcccccacagccagcccuggcaggccgcccuggugauggagaacgagcuguucugcagcggcgugcuggugcacccccagugggugcugagcgccgcccacugcuuccagaacagcuacaccaucggccugggccugcacagccuggaggccgaccaggagcccggcagccagaugguggaggccagccugagcgugagacaccccgaguacaacagaccccugcuggccaacgaccugaugcugaucaagcuggacgagagcgugagcgagagcgacaccaucagaagcaucagcaucgccagccagugccccaccgccggcaacagcugccuggugagcggcuggggccugcuggccaacggcagaaugcccaccgugcugcagugcgugaacgugagcguggugagcgaggaggugugcagcaagcuguacgacccccuguaccaccccagcauguucugcgccggcggcggccaggaccagaaggacagcugcaacggcgacagcggcggcccccugaucugcaacggcuaccugcagggccuggugagcuucggcaaggcccccugcggccaggugggcgugcccggcguguacaccaaccugugcaaguucaccgaguggaucgagaagaccgugcaggccagcuga

SEQ ID NO: 2091 - RNA, 765 nt, Artificial Sequence
  derived and/or modified sequence opt5 from kallikrein-4__Homo_sapiens__EAW71943
auggccaccgcuggcaaccccugggggugguuccugggauaccucauccugggcguggccgggagccuugucuccggaucuugcagccagauuaucaauggcgaggacuguuccccucacucucaaccguggcaggcggcucugguuauggaaaacgagcucuuuugcagcggggugcuggugcauccccaguggguccuuuccgccgcccacuguuuccaaaauucuuauacaauuggacugggccuccauagccuggaagcugaucaggagccuggcucccagaugguggaagccagccugucuguuagacaccccgaguacaaccggccucuccuggcuaaugaccuuaugcugaucaagcucgaugaguccgugagcgaaucugacacgauucgcuccaucagcaucgccucucagugccccaccgcggggaacuccugucuggucagcggauggggccuucuggccaaugggagaaugccuacagugcuccagugcguuaacguguccgucgugucugaggaaguguguagcaaacuguaugauccgcuguaccaucccuccauguuuugcgcuggaggcgggcaagaccagaaggauagcuguaauggagacucuggcggcccucucauuugcaacggguaucugcagggacuugucuccuucggcaaagcccccugugggcagguuggagugccuggcguguacaccaaucugugcaaguuuacagaguggaucgagaaaaccguccaagcuagcuga

SEQ ID NO: 2092 - protein, 75 aa, Artificial Sequence
  kallikrein-4__Homo_sapiens__Q5BQA0
MATAGNPWGWFLGYLILGVAGSLVSGSCSQIINGEDCSPHSQPWQAALVMENELFCSGVLVHPQWVLSAAHCFQK

SEQ ID NO: 2093 - RNA, 228 nt, Artificial Sequence
  kallikrein-4__Homo_sapiens__AAX30051
auggccacagcaggaaaucccuggggcugguuccugggguaccucauccuuggugucgcaggaucgcucgucucugguagcugcagccaaaucauaaacggcgaggacugcagcccgcacucgcagcccuggcaggcggcacuggucauggaaaacgaauuguucugcucgggcguccuggugcauccgcagugggugcugucagccgcacacuguuuccagaaguga

SEQ ID NO: 2094 - RNA, 228 nt, Artificial Sequence
  derived and/or modified sequence opt1 from kallikrein-4__Homo_sapiens__AAX30051
auggccaccgccggcaaccccugggggugguuccugggcuaccucauccuggggguggcgggcagccuggucuccgggagcugcucccagaucaucaacggcgaggacugcagcccgcacucccagcccuggcaggccgcccucgugauggagaacgagcuguucugcagcggcgugcugguccacccccagugggugcucuccgccgcccacugcuuccagaaguga

SEQ ID NO: 2095 - RNA, 228 nt, Artificial Sequence
  derived and/or modified sequence opt2 from kallikrein-4__Homo_sapiens__AAX30051
auggccaccgccggcaaccccuggggcugguuccucggcuaccucauccucggcgucgccggcucccucgucuccggcuccugcucccagaucaucaacggcgaggacugcuccccccacucccagcccuggcaggccgcccucgucauggagaacgagcucuucugcuccggcguccucguccacccccaguggguccucuccgccgcccacugcuuccagaaguga

SEQ ID NO: 2096 - RNA, 228 nt, Artificial Sequence
  derived and/or modified sequence opt3 from kallikrein-4__Homo_sapiens__AAX30051
auggccaccgcuggcaaccccugggggugguuccugggauaccucauccuugguguggcaggcagccuggucuccgggucuugcucacagauuauaaauggagaggacuguaguccucacagccaaccauggcaggccgcguugguuauggaaaacgaguuauuuugcuccggcgugcugguacauccgcagugggugcuaucugcugcccacuguuuccagaaguga

SEQ ID NO: 2097 - RNA, 228 nt, Artificial Sequence
  derived and/or modified sequence opt4 from kallikrein-4__Homo_sapiens__AAX30051
auggccaccgccggcaaccccuggggcugguuccugggcuaccugauccugggcguggccggcagccuggugagcggcagcugcagccagaucaucaacggcgaggacugcagcccccacagccagcccuggcaggccgcccuggugauggagaacgagcuguucugcagcggcgugcuggugcacccccagugggugcugagcgccgcccacugcuuccagaaguga

SEQ ID NO: 2098 - RNA, 228 nt, Artificial Sequence
  derived and/or modified sequence opt5 from kallikrein-4__Homo_sapiens__AAX30051
auggccaccgcuggcaaccccugggggugguuccugggauaccucauccugggcguggccgggagccuugucuccggaucuugcagccagauuaucaauggcgaggacuguuccccucacucucaaccguggcaggcggcucugguuauggaaaacgagcucuuuugcagcggggugcuggugcauccccaguggguccuuuccgccgcccacuguuuccagaaguga

SEQ ID NO: 2099 - protein, 195 aa, Artificial Sequence
  kallikrein-4__Homo_sapiens__Q96PT0
MATAGNPWGWFLGYLILGVAGSLVSGSCSQIINGEDCSPHSQPWQAALVMENELFCSGVLVHPQWVLSAAHCFQNSYTIGLGLHSLEADQEPGSQMVEASLSVRHPEYNRPLLANDLMLIKLDESVSESDTIRSISIASQCPTAGNSCLVSGWGLLANGELTGVCLPSSRRSSAQSRGLTQSSASQAECLPCCSA

SEQ ID NO: 2100 - RNA, 588 nt, Artificial Sequence
  kallikrein-4__Homo_sapiens__AAL14782
auggccacagcaggaaaucccuggggcugguuccugggguaccucauccuuggugucgcaggaucucucgucucugguagcugcagccaaaucauaaacggcgaggacugcagcccgcacucgcagcccuggcaggcggcacuggucauggaaaacgaauuguucugcucgggcguccuggugcauccgcagugggugcugucagccgcacacuguuuccagaacuccuacaccaucgggcugggccugcacagucuugaggccgaccaagagccagggagccagaugguggaggccagccucuccguacggcacccagaguacaacagacccuugcucgcuaacgaccucaugcucaucaaguuggacgaauccguguccgagucugacaccauccggagcaucagcauugcuucgcagugcccuaccgcggggaacucuugccucguuucuggcuggggucugcuggcgaacggugagcucacgggugugugucugcccucuucaaggagguccucugcccagucgcgggggcugacccagagcucugcgucccaggcagaaugccuaccgugcugcagugcguga

SEQ ID NO: 2101 - RNA, 588 nt, Artificial Sequence
  derived and/or modified sequence opt1 from kallikrein-4__Homo_sapiens__AAL14782
auggccaccgccggcaaccccugggggugguuccugggcuaccucauccuggggguggcgggcagccuggucuccgggagcugcucccagaucaucaacggcgaggacugcagcccgcacucccagcccuggcaggccgcccucgugauggagaacgagcuguucugcagcggcgugcugguccacccccagugggugcucuccgccgcccacugcuuccagaacagcuacaccaucgggcugggccugcacucccucgaggcggaccaggagcccgggagccagaugguggaggccucccugagcguccgccacccggaguacaaccggccccugcucgccaacgaccugaugcugaucaagcucgacgaguccgugagcgaguccgacacgauccgcagcaucuccaucgccagccagugccccaccgcgggcaacuccugccuggugagcggguggggccugcucgccaacggcgagcugaccggggucugccugcccagcucccggcgcagcuccgcccagagccggggccucacccaguccagcgccucccaggccgagugccugccgugcugcagcgcguga

SEQ ID NO: 2102 - RNA, 588 nt, Artificial Sequence
  derived and/or modified sequence opt2 from kallikrein-4__Homo_sapiens__AAL14782
auggccaccgccggcaaccccuggggcugguuccucggcuaccucauccucggcgucgccggcucccucgucuccggcuccugcucccagaucaucaacggcgaggacugcuccccccacucccagcccuggcaggccgcccucgucauggagaacgagcucuucugcuccggcguccucguccacccccaguggguccucuccgccgcccacugcuuccagaacuccuacaccaucggccucggccuccacucccucgaggccgaccaggagcccggcucccagauggucgaggccucccucuccguccgccaccccgaguacaaccgcccccuccucgccaacgaccucaugcucaucaagcucgacgaguccgucuccgaguccgacaccauccgcuccaucuccaucgccucccagugccccaccgccggcaacuccugccucgucuccggcuggggccuccucgccaacggcgagcucaccggcgucugccuccccuccucccgccgcuccuccgcccagucccgcggccucacccaguccuccgccucccaggccgagugccuccccugcugcuccgccuga

SEQ ID NO: 2103 - RNA, 588 nt, Artificial Sequence
  derived and/or modified sequence opt3 from kallikrein-4__Homo_sapiens__AAL14782
auggccaccgcuggcaaccccugggggugguuccugggauaccucauccuugguguggcaggcagccuggucuccgggucuugcucacagauuauaaauggagaggacuguaguccucacagccaaccauggcaggccgcguugguuauggaaaacgaguuauuuugcuccggcgugcugguacauccgcagugggugcuaucugcugcccacuguuuccaaaauucguauacaaucggucucgggcugcauucacuugaagcagaucaggagcccggaagccagauggucgaagccagucuguccgugagacacccugaguacaacaggccauugcucgcuaaugaccugaugcugauuaagcucgaugagucuguuagcgaauccgacacuauccggucaauuaguaucgcaagccagugccccacggccggcaacucuuguuuaguguccggcugggggcugcuugcuaauggagaguugaccggugucugccugccuucaagccgccgaaguucugcccagucccguggccuaacacaaagcucggcgucucaggcagaaugucucccaugcuguuccgccuga

SEQ ID NO: 2104 - RNA, 588 nt, Artificial Sequence
  derived and/or modified sequence opt4 from kallikrein-4__Homo_sapiens__AAL14782
auggccaccgccggcaaccccuggggcugguuccugggcuaccugauccugggcguggccggcagccuggugagcggcagcugcagccagaucaucaacggcgaggacugcagcccccacagccagcccuggcaggccgcccuggugauggagaacgagcuguucugcagcggcgugcuggugcacccccagugggugcugagcgccgcccacugcuuccagaacagcuacaccaucggccugggccugcacagccuggaggccgaccaggagcccggcagccagaugguggaggccagccugagcgugagacaccccgaguacaacagaccccugcuggccaacgaccugaugcugaucaagcuggacgagagcgugagcgagagcgacaccaucagaagcaucagcaucgccagccagugccccaccgccggcaacagcugccuggugagcggcuggggccugcuggccaacggcgagcugaccggcgugugccugcccagcagcagaagaagcagcgcccagagcagaggccugacccagagcagcgccagccaggccgagugccugcccugcugcagcgccuga

SEQ ID NO: 2105 - RNA, 588 nt, Artificial Sequence
  derived and/or modified sequence opt5 from kallikrein-4__Homo_sapiens__AAL14782
auggccaccgcuggcaaccccugggggugguuccugggauaccucauccugggcguggccgggagccuugucuccggaucuugcagccagauuaucaauggcgaggacuguuccccucacucucaaccguggcaggcggcucugguuauggaaaacgagcucuuuugcagcggggugcuggugcauccccaguggguccuuuccgccgcccacuguuuccaaaauucuuauacaauuggacugggccuccauagccuggaagcugaucaggagccuggcucccagaugguggaagccagccugucuguuagacaccccgaguacaaccggccucuccuggcuaaugaccuuaugcugaucaagcucgaugaguccgugagcgaaucugacacgauucgcuccaucagcaucgccucucagugccccaccgcggggaacuccugucuggucagcggauggggccuucuggccaauggggagcucacaggagugugccugccuuccucuagacggagcuccgcucagagccgcggccugacccaaucuuccgccagccaggcugaaugucucccgugcuguucugccuga

SEQ ID NO: 2106 - protein, 159 aa, Artificial Sequence
  kallikrein-4__Homo_sapiens__Q96PT1
MATAGNPWGWFLGYLILGVAGSLVSGSCSQIINGEDCSPHSQPWQAALVMENELFCSGVLVHPQWVLSAAHCFQNSYTIGLGLHSLEADQEPGSQMVEASLSVRHPEYNRPLLANDLMLIKLDESVSESDTIRSISIASQCPTAGNSCLVSGWGLLANG

SEQ ID NO: 2107 - RNA, 480 nt, Artificial Sequence
  kallikrein-4__Homo_sapiens__AAL14781
auggccacagcaggaaaucccuggggcugguuccugggguaccucauccuuggugucgcaggaucucucgucucugguagcugcagccaaaucauaaacggcgaggacugcagcccgcacucgcagcccuggcaggcggcacuggucauggaaaacgaauuguucugcucgggcguccuggugcauccgcagugggugcugucagccgcacacuguuuccagaacuccuacaccaucgggcugggccugcacagucuugaggccgaccaagagccagggagccagaugguggaggccagccucuccguacggcacccagaguacaacagacccuugcucgcuaacgaccucaugcucaucaaguuggacgaauccguguccgagucugacaccauccggagcaucagcauugcuucgcagugcccuaccgcggggaacucuugccucguuucuggcuggggucugcuggcgaacggguga

SEQ ID NO: 2108 - RNA, 480 nt, Artificial Sequence
  derived and/or modified sequence opt1 from kallikrein-4__Homo_sapiens__AAL14781
auggccaccgccggcaaccccugggggugguuccugggcuaccucauccuggggguggcgggcagccuggucuccgggagcugcucccagaucaucaacggcgaggacugcagcccgcacucccagcccuggcaggccgcccucgugauggagaacgagcuguucugcagcggcgugcugguccacccccagugggugcucuccgccgcccacugcuuccagaacagcuacaccaucgggcugggccugcacucccucgaggcggaccaggagcccgggagccagaugguggaggccucccugagcguccgccacccggaguacaaccggccccugcucgccaacgaccugaugcugaucaagcucgacgaguccgugagcgaguccgacacgauccgcagcaucuccaucgccagccagugccccaccgcgggcaacuccugccuggugagcggguggggccugcucgccaacggcuga

SEQ ID NO: 2109 - RNA, 480 nt, Artificial Sequence
  derived and/or modified sequence opt2 from kallikrein-4__Homo_sapiens__AAL14781
auggccaccgccggcaaccccuggggcugguuccucggcuaccucauccucggcgucgccggcucccucgucuccggcuccugcucccagaucaucaacggcgaggacugcuccccccacucccagcccuggcaggccgcccucgucauggagaacgagcucuucugcuccggcguccucguccacccccaguggguccucuccgccgcccacugcuuccagaacuccuacaccaucggccucggccuccacucccucgaggccgaccaggagcccggcucccagauggucgaggccucccucuccguccgccaccccgaguacaaccgcccccuccucgccaacgaccucaugcucaucaagcucgacgaguccgucuccgaguccgacaccauccgcuccaucuccaucgccucccagugccccaccgccggcaacuccugccucgucuccggcuggggccuccucgccaacggcuga

SEQ ID NO: 2110 - RNA, 480 nt, Artificial Sequence
  derived and/or modified sequence opt3 from kallikrein-4__Homo_sapiens__AAL14781
auggccaccgcuggcaaccccugggggugguuccugggauaccucauccuugguguggcaggcagccuggucuccgggucuugcucacagauuauaaauggagaggacuguaguccucacagccaaccauggcaggccgcguugguuauggaaaacgaguuauuuugcuccggcgugcugguacauccgcagugggugcuaucugcugcccacuguuuccaaaauucguauacaaucggucucgggcugcauucacuugaagcagaucaggagcccggaagccagauggucgaagccagucuguccgugagacacccugaguacaacaggccauugcucgcuaaugaccugaugcugauuaagcucgaugagucuguuagcgaauccgacacuauccggucaauuaguaucgcaagccagugccccacggccggcaacucuuguuuaguguccggcugggggcugcuugcuaauggauga

SEQ ID NO: 2111 - RNA, 480 nt, Artificial Sequence
  derived and/or modified sequence opt4 from kallikrein-4__Homo_sapiens__AAL14781
auggccaccgccggcaaccccuggggcugguuccugggcuaccugauccugggcguggccggcagccuggugagcggcagcugcagccagaucaucaacggcgaggacugcagcccccacagccagcccuggcaggccgcccuggugauggagaacgagcuguucugcagcggcgugcuggugcacccccagugggugcugagcgccgcccacugcuuccagaacagcuacaccaucggccugggccugcacagccuggaggccgaccaggagcccggcagccagaugguggaggccagccugagcgugagacaccccgaguacaacagaccccugcuggccaacgaccugaugcugaucaagcuggacgagagcgugagcgagagcgacaccaucagaagcaucagcaucgccagccagugccccaccgccggcaacagcugccuggugagcggcuggggccugcuggccaacggcuga

SEQ ID NO: 2112 - RNA, 480 nt, Artificial Sequence
  derived and/or modified sequence opt5 from kallikrein-4__Homo_sapiens__AAL14781
auggccaccgcuggcaaccccugggggugguuccugggauaccucauccugggcguggccgggagccuugucuccggaucuugcagccagauuaucaauggcgaggacuguuccccucacucucaaccguggcaggcggcucugguuauggaaaacgagcucuuuugcagcggggugcuggugcauccccaguggguccuuuccgccgcccacuguuuccaaaauucuuauacaauuggacugggccuccauagccuggaagcugaucaggagccuggcucccagaugguggaagccagccugucuguuagacaccccgaguacaaccggccucuccuggcuaaugaccuuaugcugaucaagcucgaugaguccgugagcgaaucugacacgauucgcuccaucagcaucgccucucagugccccaccgcggggaacuccugucuggucagcggauggggccuucuggccaauggguga

SEQ ID NO: 2113 - protein, 254 aa, Artificial Sequence
  kallikrein-4__Homo_sapiens__Q9Y5K2
MATAGNPWGWFLGYLILGVAGSLVSGSCSQIINGEDCSPHSQPWQAALVMENELFCSGVLVHPQWVLSAAHCFQNSYTIGLGLHSLEADQEPGSQMVEASLSVRHPEYNRPLLANDLMLIKLDESVSESDTIRSISIASQCPTAGNSCLVSGWGLLANGRMPTVLQCVNVSVVSEEVCSKLYDPLYHPSMFCAGGGHDQKDSCNGDSGGPLICNGYLQGLVSFGKAPCGQVGVPGVYTNLCKFTEWIEKTVQAS

SEQ ID NO: 2114 - RNA, 765 nt, Artificial Sequence
  kallikrein-4__Homo_sapiens__AAD21580
auggccacagcaggaaaucccuggggcugguuccugggguaccucauccuuggugucgcaggaucgcucgucucugguagcugcagccaaaucauaaacggcgaggacugcagcccgcacucgcagcccuggcaggcggcacuggucauggaaaacgaauuguucugcucgggcguccuggugcauccgcagugggugcugucagccgcacacuguuuccagaacuccuacaccaucgggcugggccugcacagucuugaggccgaccaagagccagggagccagaugguggaggccagccucuccguacggcacccagaguacaacagacccuugcucgcuaacgaccucaugcucaucaaguuggacgaauccguguccgagucugacaccauccggagcaucagcauugcuucgcagugcccuaccgcggggaacucuugccucguuucuggcuggggucugcuggcgaacggcagaaugccuaccgugcugcagugcgugaacgugucgguggugucugaggaggucugcaguaagcucuaugacccgcuguaccaccccagcauguucugcgccggcggagggcacgaccagaaggacuccugcaacggugacucuggggggccccugaucugcaacggguacuugcagggccuugugucuuucggaaaagccccguguggccaaguuggcgugccaggugucuacaccaaccucugcaaauucacugaguggauagagaaaaccguccaggccaguuaa

SEQ ID NO: 2115 - RNA, 765 nt, Artificial Sequence
  derived and/or modified sequence opt1 from kallikrein-4__Homo_sapiens__AAD21580
auggccaccgccggcaaccccugggggugguuccugggcuaccucauccuggggguggcgggcagccuggucuccgggagcugcucccagaucaucaacggcgaggacugcagcccgcacucccagcccuggcaggccgcccucgugauggagaacgagcuguucugcagcggcgugcugguccacccccagugggugcucuccgccgcccacugcuuccagaacagcuacaccaucgggcugggccugcacucccucgaggcggaccaggagcccgggagccagaugguggaggccucccugagcguccgccacccggaguacaaccggccccugcucgccaacgaccugaugcugaucaagcucgacgaguccgugagcgaguccgacacgauccgcagcaucuccaucgccagccagugccccaccgcgggcaacuccugccuggugagcggguggggccugcucgccaacggccggaugcccaccguccugcagugcgugaacgugagcgucguguccgaggaggugugcagcaagcuguacgacccgcucuaccaccccuccauguucugcgccgggggcgggcacgaccagaaggacagcugcaacggcgacuccggcgggccccugaucugcaacggcuaccugcaggggcucgucagcuucggcaaggcccccugcggccaggugggggugccgggcgucuacaccaaccugugcaaguucacggaguggaucgagaagaccgugcaggccuccuga

SEQ ID NO: 2116 - RNA, 765 nt, Artificial Sequence
  derived and/or modified sequence opt2 from kallikrein-4__Homo_sapiens__AAD21580
auggccaccgccggcaaccccuggggcugguuccucggcuaccucauccucggcgucgccggcucccucgucuccggcuccugcucccagaucaucaacggcgaggacugcuccccccacucccagcccuggcaggccgcccucgucauggagaacgagcucuucugcuccggcguccucguccacccccaguggguccucuccgccgcccacugcuuccagaacuccuacaccaucggccucggccuccacucccucgaggccgaccaggagcccggcucccagauggucgaggccucccucuccguccgccaccccgaguacaaccgcccccuccucgccaacgaccucaugcucaucaagcucgacgaguccgucuccgaguccgacaccauccgcuccaucuccaucgccucccagugccccaccgccggcaacuccugccucgucuccggcuggggccuccucgccaacggccgcaugcccaccguccuccagugcgucaacgucuccgucgucuccgaggaggucugcuccaagcucuacgacccccucuaccaccccuccauguucugcgccggcggcggccacgaccagaaggacuccugcaacggcgacuccggcggcccccucaucugcaacggcuaccuccagggccucgucuccuucggcaaggcccccugcggccaggucggcguccccggcgucuacaccaaccucugcaaguucaccgaguggaucgagaagaccguccaggccuccuga

SEQ ID NO: 2117 - RNA, 765 nt, Artificial Sequence
  derived and/or modified sequence opt3 from kallikrein-4__Homo_sapiens__AAD21580
auggccaccgcuggcaaccccugggggugguuccugggauaccucauccuugguguggcaggcagccuggucuccgggucuugcucacagauuauaaauggagaggacuguaguccucacagccaaccauggcaggccgcguugguuauggaaaacgaguuauuuugcuccggcgugcugguacauccgcagugggugcuaucugcugcccacuguuuccaaaauucguauacaaucggucucgggcugcauucacuugaagcagaucaggagcccggaagccagauggucgaagccagucuguccgugagacacccugaguacaacaggccauugcucgcuaaugaccugaugcugauuaagcucgaugagucuguuagcgaauccgacacuauccggucaauuaguaucgcaagccagugccccacggccggcaacucuuguuuaguguccggcugggggcugcuugcuaauggacgcaugccuaccgucuugcagugcgugaacguaucaguugugagcgaggaagucuguaguaaacuguaugauccacuauaccaucccucuauguuuugcgccgguggcgggcacgaccaaaaggauuccuguaauggagacagcggcgguccucucauaugcaacggguaucugcagggacuugugucguucggcaaagcgccauguggccaggugggggucccgggaguuuacacaaaucugugcaaguuuacugaguggaucgagaaaaccgugcaggcaucuuga

SEQ ID NO: 2118 - RNA, 765 nt, Artificial Sequence
  derived and/or modified sequence opt4 from kallikrein-4__Homo_sapiens__AAD21580
auggccaccgccggcaaccccuggggcugguuccugggcuaccugauccugggcguggccggcagccuggugagcggcagcugcagccagaucaucaacggcgaggacugcagcccccacagccagcccuggcaggccgcccuggugauggagaacgagcuguucugcagcggcgugcuggugcacccccagugggugcugagcgccgcccacugcuuccagaacagcuacaccaucggccugggccugcacagccuggaggccgaccaggagcccggcagccagaugguggaggccagccugagcgugagacaccccgaguacaacagaccccugcuggccaacgaccugaugcugaucaagcuggacgagagcgugagcgagagcgacaccaucagaagcaucagcaucgccagccagugccccaccgccggcaacagcugccuggugagcggcuggggccugcuggccaacggcagaaugcccaccgugcugcagugcgugaacgugagcguggugagcgaggaggugugcagcaagcuguacgacccccuguaccaccccagcauguucugcgccggcggcggccacgaccagaaggacagcugcaacggcgacagcggcggcccccugaucugcaacggcuaccugcagggccuggugagcuucggcaaggcccccugcggccaggugggcgugcccggcguguacaccaaccugugcaaguucaccgaguggaucgagaagaccgugcaggccagcuga

SEQ ID NO: 2119 - RNA, 765 nt, Artificial Sequence
  derived and/or modified sequence opt5 from kallikrein-4__Homo_sapiens__AAD21580
auggccaccgcuggcaaccccugggggugguuccugggauaccucauccugggcguggccgggagccuugucuccggaucuugcagccagauuaucaauggcgaggacuguuccccucacucucaaccguggcaggcggcucugguuauggaaaacgagcucuuuugcagcggggugcuggugcauccccaguggguccuuuccgccgcccacuguuuccaaaauucuuauacaauuggacugggccuccauagccuggaagcugaucaggagccuggcucccagaugguggaagccagccugucuguuagacaccccgaguacaaccggccucuccuggcuaaugaccuuaugcugaucaagcucgaugaguccgugagcgaaucugacacgauucgcuccaucagcaucgccucucagugccccaccgcggggaacuccugucuggucagcggauggggccuucuggccaaugggagaaugccuacagugcuccagugcguuaacguguccgucgugucugaggaaguguguagcaaacuguaugauccgcuguaccaucccuccauguuuugcgcuggaggcgggcacgaccaaaaggauagcuguaauggagacucuggcggcccucucauuugcaacggguaucugcagggacuugucuccuucggcaaagcccccugugggcagguuggagugccuggcguguacaccaaucugugcaaguuuacagaguggaucgagaaaaccguccaggcuagcuga

SEQ ID NO: 2120 - protein, 890 aa, Artificial Sequence
  KI20A__Homo_sapiens__O95235
MSQGILSPPAGLLSDDDVVVSPMFESTAADLGSVVRKNLLSDCSVVSTSLEDKQQVPSEDSMEKVKVYLRVRPLLPSELERQEDQGCVRIENVETLVLQAPKDSFALKSNERGIGQATHRFTFSQIFGPEVGQASFFNLTVKEMVKDVLKGQNWLIYTYGVTNSGKTHTIQGTIKDGGILPRSLALIFNSLQGQLHPTPDLKPLLSNEVIWLDSKQIRQEEMKKLSLLNGGLQEEELSTSLKRSVYIESRIGTSTSFDSGIAGLSSISQCTSSSQLDETSHRWAQPDTAPLPVPANIRFSIWISFFEIYNELLYDLLEPPSQQRKRQTLRLCEDQNGNPYVKDLNWIHVQDAEEAWKLLKVGRKNQSFASTHLNQNSSRSHSIFSIRILHLQGEGDIVPKISELSLCDLAGSERCKDQKSGERLKEAGNINTSLHTLGRCIAALRQNQQNRSKQNLVPFRDSKLTRVFQGFFTGRGRSCMIVNVNPCASTYDETLHVAKFSAIASQLVHAPPMQLGFPSLHSFIKEHSLQVSPSLEKGAKADTGLDDDIENEADISMYGKEELLQVVEAMKTLLLKERQEKLQLEMHLRDEICNEMVEQMQQREQWCSEHLDTQKELLEEMYEEKLNILKESLTSFYQEEIQERDEKIEELEALLQEARQQSVAHQQSGSELALRRSQRLAASASTQQLQEVKAKLQQCKAELNSTTEELHKYQKMLEPPPSAKPFTIDVDKKLEEGQKNIRLLRTELQKLGESLQSAERACCHSTGAGKLRQALTTCDDILIKQDQTLAELQNNMVLVKLDLRKKAACIAEQYHTVLKLQGQVSAKKRLGTNQENQQPNQQPPGKKPFLRNLLPRTPTCQSSTDCSPYARILRSRRSPLLKSGPFGKKY

SEQ ID NO: 2121 - RNA, 2673 nt, Artificial Sequence
  KI20A__Homo_sapiens__AAC83230
augucgcaagggauccuuucuccgccagcgggcuugcuguccgaugacgaugucguaguuucucccauguuugaguccacagcugcagauuuggggucugugguacgcaagaaccugcuaucagacugcucugucgucucuaccucccuagaggacaagcagcagguuccaucugaggacaguauggagaaggugaaaguauacuugaggguuaggcccuuguuaccuucagaguuggaacgacaggaagaucaggguuguguccguauugagaauguggagacccuuguucuacaagcacccaaggacucguuugcccugaagagcaaugaacggggaauuggccaagccacacacagguucaccuuuucccagaucuuugggccagaagugggacaggcauccuucuucaaccuaacugugaaggagaugguaaaggauguacucaaagggcagaacuggcucaucuauacauauggagucacuaacucagggaaaacccacacgauucaagguaccaucaaggauggagggauucucccccggucccuggcgcugaucuucaauagccuccaaggccaacuucauccaacaccugaucugaagcccuugcucuccaaugagguaaucuggcuagacagcaagcagauccgacaggaggaaaugaagaagcugucccugcuaaauggaggccuccaagaggaggagcuguccacuuccuugaagaggagugucuacaucgaaagucggauagguaccagcaccagcuucgacaguggcauugcugggcucucuucuaucagucaguguaccagcaguagccagcuggaugaaacaagucaucgaugggcacagccagacacugccccacuaccugucccggcaaacauucgcuucuccaucuggaucucauucuuugagaucuacaacgaacugcuuuaugaccuauuagaaccgccuagccaacagcgcaagaggcagacuuugcggcuaugcgaggaucaaaauggcaaucccuaugugaaagaucucaacuggauucaugugcaagaugcugaggaggccuggaagcuccuaaaagugggucguaagaaccagagcuuugccagcacccaccucaaccagaacuccagccgcagucacagcaucuucucaaucaggauccuacaccuucagggggaaggagauauaguccccaagaucagcgagcugucacucugugaucuggcuggcucagagcgcugcaaagaucagaagaguggugaacgguugaaggaagcaggaaacauuaacaccucucuacacacccugggccgcuguauugcugcccuucgucaaaaccagcagaaccggucaaagcagaaccugguucccuuccgugacagcaaguugacucgaguguuccaagguuucuucacaggccgaggccguuccugcaugauugucaaugugaaucccugugcaucuaccuaugaugaaacucuucauguggccaaguucucagccauugcuagccagcuugugcaugccccaccuaugcaacugggauucccaucccugcacucguucaucaaggaacauagucuucagguaucccccagcuuagagaaaggggcuaaggcagacacaggccuugaugaugauauugaaaaugaagcugacaucuccauguauggcaaagaggagcuccuacaaguuguggaagccaugaagacacugcuuuugaaggaacgacaggaaaagcuacagcuggagaugcaucuccgagaugaaauuugcaaugagaugguagaacagaugcaacagcgggaacaguggugcagugaacauuuggacacccaaaaggaacuauuggaggaaauguaugaagaaaaacuaaauauccucaaggagucacugacaaguuuuuaccaagaagagauucaggagcgggaugaaaagauugaagagcuagaagcucucuugcaggaagccagacaacagucaguggcccaucagcaaucagggucugaauuggcccuacggcggucacaaagguuggcagcuucugccuccacccagcagcuucaggagguuaaagcuaaauuacagcagugcaaagcagagcuaaacucuaccacugaagaguugcauaaguaucagaaaauguuagaaccaccacccucagccaagcccuucaccauugauguggacaagaaguuagaagagggccagaagaauauaaggcuguugcggacagagcuucagaaacuuggugagucucuccaaucagcagagagagcuuguugccacagcacuggggcaggaaaacuucgucaagccuugaccacuugugaugacaucuuaaucaaacaggaccagacucuggcugaacugcagaacaacauggugcuagugaaacuggaccuucggaagaaggcagcauguauugcugagcaguaucauacuguguugaaacuccaaggccagguuucugccaaaaagcgccuugguaccaaccaggaaaaucagcaaccaaaccaacaaccaccagggaagaaaccauuccuucgaaauuuacuuccccgaacaccaaccugccaaagcucaacagacugcagcccuuaugcccggauccuacgcucacggcguuccccuuuacucaaaucugggccuuuuggcaaaaaguacuaa

SEQ ID NO: 2122 - RNA, 2673 nt, Artificial Sequence
  derived and/or modified sequence opt1 from KI20A__Homo_sapiens__AAC83230
augagccagggcauccuguccccgcccgccgggcuccugagcgacgacgacguggucgugucccccauguucgagagcaccgccgcggaccugggcuccgugguccgcaagaaccuccugagcgacugcuccguggugagcaccucccuggaggacaagcagcagguccccagcgaggacuccauggagaaggugaagguguaccuccggguccgcccccugcugccgagcgagcucgagcggcaggaggaccaggggugcgugcgcaucgagaacguggagacgcugguccugcaggcccccaaggacuccuucgcccucaagagcaacgagcggggcaucgggcaggccacccaccgcuucaccuucucccagaucuucggccccgaggugggccaggccagcuucuucaaccugaccgugaaggagauggucaaggacgugcugaaggggcagaacuggcucaucuacacguacggcgugaccaacuccgggaagacccacaccauccagggcacgaucaaggacgggggcauccugccccggagccuggcgcucaucuucaacucccugcagggccagcugcacccgacccccgaccucaagccccugcugagcaacgaggucaucuggcucgacagcaagcagauccgccaggaggagaugaagaagcugucccugcucaacgggggccugcaggaggaggagcugagcaccucccucaagcggagcguguacaucgagucccgcaucgggaccagcacguccuucgacagcggcaucgccggccuguccagcaucucccagugcaccagcuccagccagcuggacgagaccucccaccggugggcccagcccgacaccgccccgcuccccgugcccgcgaacauccgcuucagcaucuggaucuccuucuucgagaucuacaacgagcugcuguacgaccuccuggagcccccgagccagcagcggaagcgccagacgcugcggcucugcgaggaccagaacgggaaccccuacgucaaggaccugaacuggauccacgugcaggacgccgaggaggccuggaagcugcucaaggugggccgcaagaaccaguccuucgccagcacccaccugaaccagaacagcucccggagccacuccaucuucagcauccgcauccugcaccuccagggggagggcgacaucguccccaagaucuccgagcugagccugugcgaccucgccggguccgagcggugcaaggaccagaaguccggcgagcgccugaaggaggcgggcaacaucaacaccucccugcacacccuggggcggugcaucgccgcccuccgccagaaccagcagaaccgcagcaagcagaaccuggugcccuuccgggacuccaagcugacgcgcgucuuccagggcuucuucaccgggcggggccgcagcugcaugaucgugaacgugaacccgugcgccuccaccuacgacgagacccuccacgucgccaaguucagcgcgaucgccucccagcuggugcacgccccgcccaugcagcugggguuccccagccuccacuccuucaucaaggagcacagccuccaggugagccccucccuggagaagggcgccaaggccgacacgggccuggacgacgacaucgagaacgaggcggacaucagcauguacgggaaggaggagcugcugcaggucguggaggccaugaagacccuccugcugaaggagcggcaggagaagcuccagcuggagaugcaccuccgcgacgagaucugcaacgagaugguggagcagaugcagcagcgggagcaguggugcuccgagcaccuggacacccagaaggagcugcuggaggagauguacgaggagaagcucaacauccugaaggagagccugaccuccuucuaccaggaggagauccaggagcgcgacgagaagaucgaggagcucgaggcccugcugcaggaggcccggcagcagagcgucgcccaccagcaguccggcagcgagcucgcgcugcgccggucccagcgccuggccgccagcgccuccacgcagcagcuccaggaggugaaggcgaagcugcagcagugcaaggccgagcugaacagcaccaccgaggagcuccacaaguaccagaagaugcuggagcccccgcccuccgccaagcccuucaccaucgacguggacaagaagcuggaggaggggcagaagaacauccggcuccugcgcacggagcugcagaagcucggcgagagccugcaguccgccgagcgggccugcugccacagcaccggggcgggcaagcugcgccaggcccucacgaccugcgacgacauccugaucaagcaggaccagacccuggccgagcuccagaacaacaugguccuggugaagcuggaccuccggaagaaggccgccugcaucgcggagcaguaccacaccgugcugaagcugcagggccaggucuccgccaagaagcgccucgggaccaaccaggagaaccagcagcccaaccagcagcccccgggcaagaagcccuuccugcggaaccugcucccccgcaccccgaccugccagagcuccacggacugcagccccuacgcccgcauccugcggagccgccggagcccccugcucaagagcgggcccuucggcaagaaguacuga

SEQ ID NO: 2123 - RNA, 2673 nt, Artificial Sequence
  derived and/or modified sequence opt2 from KI20A__Homo_sapiens__AAC83230
augucccagggcauccucuccccccccgccggccuccucuccgacgacgacgucgucgucucccccauguucgaguccaccgccgccgaccucggcuccgucguccgcaagaaccuccucuccgacugcuccgucgucuccaccucccucgaggacaagcagcagguccccuccgaggacuccauggagaaggucaaggucuaccuccgcguccgcccccuccuccccuccgagcucgagcgccaggaggaccagggcugcguccgcaucgagaacgucgagacccucguccuccaggcccccaaggacuccuucgcccucaaguccaacgagcgcggcaucggccaggccacccaccgcuucaccuucucccagaucuucggccccgaggucggccaggccuccuucuucaaccucaccgucaaggagauggucaaggacguccucaagggccagaacuggcucaucuacaccuacggcgucaccaacuccggcaagacccacaccauccagggcaccaucaaggacggcggcauccucccccgcucccucgcccucaucuucaacucccuccagggccagcuccaccccacccccgaccucaagccccuccucuccaacgaggucaucuggcucgacuccaagcagauccgccaggaggagaugaagaagcucucccuccucaacggcggccuccaggaggaggagcucuccaccucccucaagcgcuccgucuacaucgagucccgcaucggcaccuccaccuccuucgacuccggcaucgccggccucuccuccaucucccagugcaccuccuccucccagcucgacgagaccucccaccgcugggcccagcccgacaccgccccccuccccguccccgccaacauccgcuucuccaucuggaucuccuucuucgagaucuacaacgagcuccucuacgaccuccucgagccccccucccagcagcgcaagcgccagacccuccgccucugcgaggaccagaacggcaaccccuacgucaaggaccucaacuggauccacguccaggacgccgaggaggccuggaagcuccucaaggucggccgcaagaaccaguccuucgccuccacccaccucaaccagaacuccucccgcucccacuccaucuucuccauccgcauccuccaccuccagggcgagggcgacaucguccccaagaucuccgagcucucccucugcgaccucgccggcuccgagcgcugcaaggaccagaaguccggcgagcgccucaaggaggccggcaacaucaacaccucccuccacacccucggccgcugcaucgccgcccuccgccagaaccagcagaaccgcuccaagcagaaccucguccccuuccgcgacuccaagcucacccgcgucuuccagggcuucuucaccggccgcggccgcuccugcaugaucgucaacgucaaccccugcgccuccaccuacgacgagacccuccacgucgccaaguucuccgccaucgccucccagcucguccacgccccccccaugcagcucggcuuccccucccuccacuccuucaucaaggagcacucccuccaggucucccccucccucgagaagggcgccaaggccgacaccggccucgacgacgacaucgagaacgaggccgacaucuccauguacggcaaggaggagcuccuccaggucgucgaggccaugaagacccuccuccucaaggagcgccaggagaagcuccagcucgagaugcaccuccgcgacgagaucugcaacgagauggucgagcagaugcagcagcgcgagcaguggugcuccgagcaccucgacacccagaaggagcuccucgaggagauguacgaggagaagcucaacauccucaaggagucccucaccuccuucuaccaggaggagauccaggagcgcgacgagaagaucgaggagcucgaggcccuccuccaggaggcccgccagcaguccgucgcccaccagcaguccggcuccgagcucgcccuccgccgcucccagcgccucgccgccuccgccuccacccagcagcuccaggaggucaaggccaagcuccagcagugcaaggccgagcucaacuccaccaccgaggagcuccacaaguaccagaagaugcucgagcccccccccuccgccaagcccuucaccaucgacgucgacaagaagcucgaggagggccagaagaacauccgccuccuccgcaccgagcuccagaagcucggcgagucccuccaguccgccgagcgcgccugcugccacuccaccggcgccggcaagcuccgccaggcccucaccaccugcgacgacauccucaucaagcaggaccagacccucgccgagcuccagaacaacaugguccucgucaagcucgaccuccgcaagaaggccgccugcaucgccgagcaguaccacaccguccucaagcuccagggccaggucuccgccaagaagcgccucggcaccaaccaggagaaccagcagcccaaccagcagccccccggcaagaagcccuuccuccgcaaccuccucccccgcacccccaccugccaguccuccaccgacugcucccccuacgcccgcauccuccgcucccgccgcuccccccuccucaaguccggccccuucggcaagaaguacuga

SEQ ID NO: 2124 - RNA, 2673 nt, Artificial Sequence
  derived and/or modified sequence opt3 from KI20A__Homo_sapiens__AAC83230
augagccagggcauccugucucccccugccgggcuccuuuccgacgaugacguggucguuucaccaauguucgagaguaccgcugcagaucugggaagcgugguaagaaagaacuuguuauccgacugcucuguggucucgacaucacuggaagauaaacaacaggugccgagcgaggacaguauggaaaagguuaaaguguaccuaaggguccggccccuccugccuuccgagcuugaacgccaggaggaucaggguugugugcgaauugagaauguagaaacucugguuuugcaagccccaaaggacucuuuugcgcucaaaagcaacgagcguggcauagggcaggcuacgcacagauucaccuuuucccagaucuucggacccgaagugggccaggccucauuuuucaaucugacagucaaggagauggugaaggaugugcugaaaggucaaaacuggcucauuuauacuuacggggucaccaauaguggaaagacacauaccauccagggcacuauuaaagacggcgggaucuuaccuaggagccuggcacuuauauuuaacucuuugcagggacagcugcacccaacacccgaucuaaagccucuccuguccaaugagguuaucuggcuugacucaaaacaaauucggcaggaagagaugaagaagcugagcuugcucaacgguggccugcaggaagaggaauuaaguaccucucugaaacgcuccguguauaucgagagcagaauugggacgucgacuucuuucgauuccggaaucgccggccucucaaguauaagccaaugcaccuccucuagccagcuugacgagacaucacauaggugggcucagccagacacugcaccgcugcccguaccugccaauauucgguuuaguaucuggauuuccuucuuugaaaucuacaacgaguugcuauaugaucugcucgaaccacccagccagcaacgcaagcgacagacccugagacuuugugaggaccagaaugguaacccuuacgugaaagaucugaauuggauccacguccaggacgcugaagaggccuggaaguugcucaaaguggggaggaagaaccaaucuuucgcgucaacacaucugaaucagaacaguagccggucccacucuauauuuucgauucguaucuuacaucugcagggagagggcgauauuguuccaaaaaucagcgaacuaucccucugcgaccuggcaggcucagagcgcuguaaggaucagaagaguggggaaagacuuaaagaggccggaaacauaaauaccucuuugcacacgcuggguaggugcauugcugcccuccggcaaaaccagcagaaucgaagcaagcagaaccuggugcccuuccgcgacuccaaacuuacuagagucuuccaaggcuuuuucacagggaggggacggucauguaugaucgugaauguaaacccgugcgcaagcaccuaugaugaaacucugcacguugcuaaguuuucugccaucgcgucccaguuggugcaugccccucccaugcagcucggcuucccaagucugcacagcuuuauuaaagagcacucuuuacaagucuccccuucacuggagaagggugcaaaggcugacacagggcuagaugacgacaucgaaaaugaggccgauauuaguauguacggcaaagaagaacuccuucagguggucgaggcuaugaagacccuguugcugaaagaacgccaggagaagcuccagcuggaaaugcauuuaagagacgagauauguaacgaaaugguggagcaaaugcagcagagggagcaguggugcagcgaacaccuggauacgcaaaaagagcuuuuggaagagauguacgaagagaagcucaauauccugaaggagucgcuaaccuccuucuaucaggaagagauucaggaacgugacgagaaaaucgaggagcuggaggcccuccugcaggaagcacggcaacagucuguugcccaucagcaaagcggaucagagcuugcuuugcgaagaagucagaggcuggcggcauccgccucuacacagcaguuacaagaagugaaggcuaaacuccagcaguguaaggccgagcugaacagcacuaccgaggaacuucacaaauaccagaagaugcuggagcccccacccuccgcaaagccuuuuacaaucgauguagacaaaaaguuggaagagggccagaaaaauauucgccuccugcggacugaacuacaaaagcugggggagucacuccagagcgccgagagagcuugcugccauaguaccggagccgguaaacugaggcaggcacuuacaaccugugaugacauauugaucaagcaagaucagacucuggcggaauuacagaacaauaugguccucgugaaacuggaccuucgcaagaaggcugccugcauugcagagcaguaucacacgguucugaaacuacaaggccaggugucugccaagaaacgacucgggacaaaccaggaaaaucaacagccaaaccagcagccgcccggaaagaaaccuuuccugcggaacuugcugccacguacccccacuugucaauccagcaccgauugcucgccuuacgcuagaaucuuaaggucacgccggucuccacuccugaagaguggccccuuugguaagaaauauuga

SEQ ID NO: 2125 - RNA, 2673 nt, Artificial Sequence
  derived and/or modified sequence opt4 from KI20A__Homo_sapiens__AAC83230
augagccagggcauccugagcccccccgccggccugcugagcgacgacgacgugguggugagccccauguucgagagcaccgccgccgaccugggcagcguggugagaaagaaccugcugagcgacugcagcguggugagcaccagccuggaggacaagcagcaggugcccagcgaggacagcauggagaaggugaagguguaccugagagugagaccccugcugcccagcgagcuggagagacaggaggaccagggcugcgugagaaucgagaacguggagacccuggugcugcaggcccccaaggacagcuucgcccugaagagcaacgagagaggcaucggccaggccacccacagauucaccuucagccagaucuucggccccgaggugggccaggccagcuucuucaaccugaccgugaaggagauggugaaggacgugcugaagggccagaacuggcugaucuacaccuacggcgugaccaacagcggcaagacccacaccauccagggcaccaucaaggacggcggcauccugcccagaagccuggcccugaucuucaacagccugcagggccagcugcaccccacccccgaccugaagccccugcugagcaacgaggugaucuggcuggacagcaagcagaucagacaggaggagaugaagaagcugagccugcugaacggcggccugcaggaggaggagcugagcaccagccugaagagaagcguguacaucgagagcagaaucggcaccagcaccagcuucgacagcggcaucgccggccugagcagcaucagccagugcaccagcagcagccagcuggacgagaccagccacagaugggcccagcccgacaccgccccccugcccgugcccgccaacaucagauucagcaucuggaucagcuucuucgagaucuacaacgagcugcuguacgaccugcuggagccccccagccagcagagaaagagacagacccugagacugugcgaggaccagaacggcaaccccuacgugaaggaccugaacuggauccacgugcaggacgccgaggaggccuggaagcugcugaaggugggcagaaagaaccagagcuucgccagcacccaccugaaccagaacagcagcagaagccacagcaucuucagcaucagaauccugcaccugcagggcgagggcgacaucgugcccaagaucagcgagcugagccugugcgaccuggccggcagcgagagaugcaaggaccagaagagcggcgagagacugaaggaggccggcaacaucaacaccagccugcacacccugggcagaugcaucgccgcccugagacagaaccagcagaacagaagcaagcagaaccuggugcccuucagagacagcaagcugaccagaguguuccagggcuucuucaccggcagaggcagaagcugcaugaucgugaacgugaaccccugcgccagcaccuacgacgagacccugcacguggccaaguucagcgccaucgccagccagcuggugcacgccccccccaugcagcugggcuuccccagccugcacagcuucaucaaggagcacagccugcaggugagccccagccuggagaagggcgccaaggccgacaccggccuggacgacgacaucgagaacgaggccgacaucagcauguacggcaaggaggagcugcugcaggugguggaggccaugaagacccugcugcugaaggagagacaggagaagcugcagcuggagaugcaccugagagacgagaucugcaacgagaugguggagcagaugcagcagagagagcaguggugcagcgagcaccuggacacccagaaggagcugcuggaggagauguacgaggagaagcugaacauccugaaggagagccugaccagcuucuaccaggaggagauccaggagagagacgagaagaucgaggagcuggaggcccugcugcaggaggccagacagcagagcguggcccaccagcagagcggcagcgagcuggcccugagaagaagccagagacuggccgccagcgccagcacccagcagcugcaggaggugaaggccaagcugcagcagugcaaggccgagcugaacagcaccaccgaggagcugcacaaguaccagaagaugcuggagcccccccccagcgccaagcccuucaccaucgacguggacaagaagcuggaggagggccagaagaacaucagacugcugagaaccgagcugcagaagcugggcgagagccugcagagcgccgagagagccugcugccacagcaccggcgccggcaagcugagacaggcccugaccaccugcgacgacauccugaucaagcaggaccagacccuggccgagcugcagaacaacauggugcuggugaagcuggaccugagaaagaaggccgccugcaucgccgagcaguaccacaccgugcugaagcugcagggccaggugagcgccaagaagagacugggcaccaaccaggagaaccagcagcccaaccagcagccccccggcaagaagcccuuccugagaaaccugcugcccagaacccccaccugccagagcagcaccgacugcagccccuacgccagaauccugagaagcagaagaagcccccugcugaagagcggccccuucggcaagaaguacuga

SEQ ID NO: 2126 - RNA, 2673 nt, Artificial Sequence
  derived and/or modified sequence opt5 from KI20A__Homo_sapiens__AAC83230
augagccagggcauccuguccccucccgccgggcugcugucugacgaugacguggucguuagcccgauguucgaguccaccgcugccgaucuuggaucuguggugagaaagaaccugcucagcgacugcuccgucgugucuacaagccuggaagauaaacaacagguucccuccgaggacagcauggaaaaggugaaagucuaccuucgggugcgcccucugcuccccucugagcuggaaagacaggaggaucagggcuguguucggauugagaauguggaaacgcugguccuccaagcgccuaaggacuccuuugcucugaaaagcaacgagcgcgggaucggacaggccacccacagauucacauuuucucagauuuucggccccgaaguggggcaggccuccuuuuucaaucuuaccgugaaggagauggucaaggauguucugaaaggacaaaacuggcucaucuauacauacggcgugaccaauagcggcaagacacauaccauucaggggacgaucaaagacggaggcauccugccucggucucuugcucugauuuuuaacucccuccaggggcagcugcacccgacccccgaucugaagccucuccugagcaaugaggugaucuggcuugacuccaaacaaauucgccaggaagagaugaagaagcugucucuccugaacggaggccuucaggaagaggaacugagcacaucccucaaaagaagcgucuauaucgagucucggauugggaccuccacauccuucgauucuggaaucgccggccugagcuccauuucucaaugcaccagcuccagccagcuggacgagacgucucaucgcugggcucagcccgacacagccccucuccccgugccggcgaauaucagauuuuccaucuggauuagcuucuuugaaaucuacaacgagcugcuuuaugaucugcucgaaccucccucucagcaacggaagcgccagacccugagacuuugugaggaccagaauggcaacccuuacguuaaagaucugaauuggauucacgugcaggacgccgaagaggcuuggaagcuccugaaagucgggcggaagaaccaauccuucgccagcacacaucugaaucagaacuccucucgcagccacuccaucuuuucuauuagaauccuccaucugcagggagagggcgauaucgugcccaaaauuagcgaacuuucccugugcgaccucgcugggagcgagcgguguaaggaucagaagucuggagaaagacugaaagaggccggcaacaucaauaccucccugcacacccuugggcgcugcauugcggcccuccggcaaaaccagcagaauagaagcaagcagaaccugguucccuuccgcgacucuaaacugacacggguguuccaaggauuuuucacgggcagaggccgcuccuguaugaucgucaaugugaacccuugcgcuagcaccuaugaugaaacacuccacgucgccaaguuuucugcuauugccagccagcuggugcaugccccgcccaugcagcuuggguucccuucccugcacagcuuuaucaaagagcacucucuccaaguuucccccagccuggagaagggagcuaaggcggacaccggccuggaugacgacaucgaaaaugaggccgauauuuccauguacgggaaagaagaacuucuccagguggucgaggcuaugaagacacugcugcucaaagaacggcaggagaagcugcagcuugaaaugcaucugagagacgagaucuguaacgaaaugguggagcaaaugcagcagcgcgagcaguggugcucugaacaccucgauacccaaaaagagcugcuggaagagauguacgaagagaaacuuaauauucucaaggagagccugacguccuucuaucaggaagagauccaggaacgggacgagaaaauugaggagcuggaggcccuccugcaggaagccagacaacagucuguugcucaucagcaaagcggauccgagcuugcccugcgccggucucagagacucgcggcuagcgccuccacacagcagcugcaagaagugaaggccaaacugcagcaguguaaggcugagcuuaacagcaccaccgaggaacuccacaaauaccagaagaugcuggagccucccccgucugccaagccuuuuacaaucgaugucgacaaaaagcuggaagagggccaaaagaauauucggcuccugcgcaccgaacuucagaagcugggggagucccuccagagcgcugagagagccugcugccauucuacaggcgcgggaaaacugcggcaggcccugacgaccugugaugacauccuuaucaagcaagaucagacacuggcugaacuccagaacaauauggugcuggugaaacucgaccugagaaagaaggccgcuugcauugccgagcaguaucacaccguucuuaaacugcaaggccaggucuccgcgaagaaacgccucgggacaaaccaggaaaaucaacagcccaaccagcagccucccggaaagaaaccuuuccugcggaaccugcuucccagaaccccgacgugucaaagcucuaccgauugcuccccuuacgcccgcauccugagaagccggcgcagcccccuccucaagagcggccccuuugggaagaaauauuga

SEQ ID NO: 2127 - protein, 370 aa, Artificial Sequence
  KIAA0205__Homo_sapiens__Q92604
MAITLEEAPWLGWLLVKALMRFAFMVVNNLVAIPSYICYVIILQPLRVLDSKRFWYIEGIMYKWLLGMVASWGWYAGYTVMEWGEDIKAVSKDEAVMLVNHQATGDVCTLMMCLQDKGLVVAQMMWLMDHIFKYTNFGIVSLVHGDFFIRQGRSYRDQQLLLLKKHLENNYRSRDRKWIVLFPEGGFLRKRRETSQAFAKKNNLPFLTNVTLPRSGATKIILNALVAQQKNGSPAGGDAKELDSKSKGLQWIIDTTIAYPKAEPIDIQTWILGYRKPTVTHVHYRIFPIKDVPLETDDLTTWLYQRFVEKEDLLSHFYETGAFPPSKGHKEAVSREMTLSNLWIFLIQSFAFLSGYMWYNIIQYFYHCLF

SEQ ID NO: 2128 - RNA, 1113 nt, Artificial Sequence
  KIAA0205__Homo_sapiens__AAH34621
auggcuauaacuuuggaagaagcuccguggcugggcuggcucuuggugaaagcacugaugagguuugccuucauggucgucaacaaccugguugcuauuccauccuacaucugcuauguaauuauacuucagccccuucgagugcuggacaguaagcgguucugguauaucgaaggaaucauguauaaauggcuuuuaggaaugguagcuuccuggggaugguaugcuggauauacagugauggaauggggagaagauauuaaagcaguuucaaaagaugaagcagugauguuggugaaucaucaggcaacaggagaugugugcacacugaugaugugccuccaggacaaaggacugguuguugcucagaugaugugguugauggaucauauuuuuaaguacacaaacuuuggaauuguuucucuaguucauggagacuucuuuauaagacagggaagaucuuaucgugaccaacagcugcugcuucucaagaagcacuuagaaaauaauuacaggagcagagaucgaaaauggauuguuuuguuuccagaagggggcuuccucaggaagaggcgagaaacaagucaggcauuugccaagaaaaauaacuugccauuucuuacaaauguuacucugccaaggucuggggcaacaaaaauuauuuugaaugcacuuguagcacaacagaaaaauggaaguccagcaggaggagaugcuaaagaauuagacagcaaaucaaaaggccuccaguggauaauagauacaacgauagcuuaucccaaagcugaaccuauagauauucaaaccuggauccuuggauacaggaaaccaacagucacacauguacauuacaggaucuuuccaauuaaagauguaccccuggagacugaugaccuuaccacuuggcucuaucagcgguuuguugaaaaagaagaccucuuaucacauuuuuaugaaacaggagcuuuuccaccuuccaagggccauaaggaagcuguuuccagggagaugacccucagcaacuuguggauauuucucauacagucuuuugcauuuuugucaggcuauaugugguacaacaucauucaguauuuuuaccauugccuguuuuag

SEQ ID NO: 2129 - RNA, 1113 nt, Artificial Sequence
  derived and/or modified sequence opt1 from KIAA0205__Homo_sapiens__AAH34621
auggccaucacccuggaggaggcccccuggcucggcuggcugcuggugaaggcgcucaugcgcuucgccuucauggucgugaacaaccugguggccaucccgagcuacaucugcuacgucaucauccugcagccccuccgggugcuggacuccaagcgcuucugguacaucgaggggaucauguacaaguggcugcucggcaugguggccagcugggggugguacgccggcuacaccgucauggaguggggcgaggacaucaaggcgguguccaaggacgaggccgugaugcuggucaaccaccaggccacgggggacgugugcacccugaugaugugccuccaggacaagggccugguggucgcccagaugauguggcugauggaccacaucuucaaguacaccaacuucgggaucgugagccucgugcacggcgacuucuucauccggcaggggcgcuccuaccgggaccagcagcugcugcuccugaagaagcaccuggagaacaacuaccgcagccgggaccgcaaguggaucguccucuuccccgagggcggguuccugcggaagcgccgggagaccucccaggcguucgccaagaagaacaaccugcccuuccucacgaacgugacccugccgcgcagcggcgccaccaagaucauccugaacgcccucguggcccagcagaagaacggcucccccgccgggggcgacgcgaaggagcuggacagcaaguccaaggggcugcaguggaucaucgacaccacgaucgccuaccccaaggccgagcccaucgacauccagaccuggauccucggcuaccggaagccgaccgucacccacgugcacuaccgcaucuuccccaucaaggacgugccccuggagacggacgaccugaccaccuggcucuaccagcgguucgucgagaaggaggaccugcugagccacuucuacgagaccggcgccuucccgcccuccaaggggcacaaggaggcggugagccgcgagaugacgcucuccaaccuguggaucuuccugauccagagcuucgccuuccucuccggcuacaugugguacaacaucauccaguacuucuaccacugccuguucuga

SEQ ID NO: 2130 - RNA, 1113 nt, Artificial Sequence
  derived and/or modified sequence opt2 from KIAA0205__Homo_sapiens__AAH34621
auggccaucacccucgaggaggcccccuggcucggcuggcuccucgucaaggcccucaugcgcuucgccuucauggucgucaacaaccucgucgccauccccuccuacaucugcuacgucaucauccuccagccccuccgcguccucgacuccaagcgcuucugguacaucgagggcaucauguacaaguggcuccucggcauggucgccuccuggggcugguacgccggcuacaccgucauggaguggggcgaggacaucaaggccgucuccaaggacgaggccgucaugcucgucaaccaccaggccaccggcgacgucugcacccucaugaugugccuccaggacaagggccucgucgucgcccagaugauguggcucauggaccacaucuucaaguacaccaacuucggcaucgucucccucguccacggcgacuucuucauccgccagggccgcuccuaccgcgaccagcagcuccuccuccucaagaagcaccucgagaacaacuaccgcucccgcgaccgcaaguggaucguccucuuccccgagggcggcuuccuccgcaagcgccgcgagaccucccaggccuucgccaagaagaacaaccuccccuuccucaccaacgucacccucccccgcuccggcgccaccaagaucauccucaacgcccucgucgcccagcagaagaacggcucccccgccggcggcgacgccaaggagcucgacuccaaguccaagggccuccaguggaucaucgacaccaccaucgccuaccccaaggccgagcccaucgacauccagaccuggauccucggcuaccgcaagcccaccgucacccacguccacuaccgcaucuuccccaucaaggacgucccccucgagaccgacgaccucaccaccuggcucuaccagcgcuucgucgagaaggaggaccuccucucccacuucuacgagaccggcgccuucccccccuccaagggccacaaggaggccgucucccgcgagaugacccucuccaaccucuggaucuuccucauccaguccuucgccuuccucuccggcuacaugugguacaacaucauccaguacuucuaccacugccucuucuga

SEQ ID NO: 2131 - RNA, 1113 nt, Artificial Sequence
  derived and/or modified sequence opt3 from KIAA0205__Homo_sapiens__AAH34621
auggccaucacccuggaggaagcucccuggcucggcuggcuucuggugaaggcauugaugagauucgccuuuauggucguuaacaauuuaguggcgauuccuagcuacauaugcuauguaaucauucugcagccacuaagggugcucgacuccaaacgguucugguacaucgaggggauuauguauaaguggcugcuuggaauggucgcuucuugggguugguacgccggcuauacagugauggaauggggagaggauaucaaagcaguuucaaaggacgaagccgugaugcuggucaaccaccaagcuacuggggauguguguacguugaugaugugccuccaggacaaaggccugguaguugcacagaugauguggcugauggaucauauauuuaaguacaccaauuucgguaucgugagucucguccacggggacuuuuucauucgccagggacgaagcuaucgugaucaacaguuacugcuuuugaagaaacaucuggagaacaauuacagauccagggaccggaaguggaucgugcuauuuccggagggcggcuuccuccgcaaaagaagggaaacaucucaggccuuugcuaagaaaaacaaucugcccuuccuuacuaacgugacccugccucggucgggggccacaaagauuaucuugaaugcgcucgucgcacagcaaaagaacggaucaccagccgguggcgaugcuaaagagcuggacagcaagaguaaaggguuacaguggauaauugauaccacuaucgccuaccccaaggcagaaccuauugacauccagacauggauccugggauaucgcaaaccaaccguuacgcacgugcauuaccgaauuuuucccauaaaggauguaccucucgagacugacgaccuuaccacauggcuguaucagagauucguggagaaagaagauuugcuaucccacuuuuacgagacuggcgcuuucccaccgucuaagggucacaaggaagccgucagcagggagaugacccuguccaaucucuggaucuuccugauucaaucauuugcguuccuuaguggguauaugugguacaacaucauacaguauuuuuaccauugucuguucuga

SEQ ID NO: 2132 - RNA, 1113 nt, Artificial Sequence
  derived and/or modified sequence opt4 from KIAA0205__Homo_sapiens__AAH34621
auggccaucacccuggaggaggcccccuggcugggcuggcugcuggugaaggcccugaugagauucgccuucaugguggugaacaaccugguggccauccccagcuacaucugcuacgugaucauccugcagccccugagagugcuggacagcaagagauucugguacaucgagggcaucauguacaaguggcugcugggcaugguggccagcuggggcugguacgccggcuacaccgugauggaguggggcgaggacaucaaggccgugagcaaggacgaggccgugaugcuggugaaccaccaggccaccggcgacgugugcacccugaugaugugccugcaggacaagggccuggugguggcccagaugauguggcugauggaccacaucuucaaguacaccaacuucggcaucgugagccuggugcacggcgacuucuucaucagacagggcagaagcuacagagaccagcagcugcugcugcugaagaagcaccuggagaacaacuacagaagcagagacagaaaguggaucgugcuguuccccgagggcggcuuccugagaaagagaagagagaccagccaggccuucgccaagaagaacaaccugcccuuccugaccaacgugacccugcccagaagcggcgccaccaagaucauccugaacgcccugguggcccagcagaagaacggcagccccgccggcggcgacgccaaggagcuggacagcaagagcaagggccugcaguggaucaucgacaccaccaucgccuaccccaaggccgagcccaucgacauccagaccuggauccugggcuacagaaagcccaccgugacccacgugcacuacagaaucuuccccaucaaggacgugccccuggagaccgacgaccugaccaccuggcuguaccagagauucguggagaaggaggaccugcugagccacuucuacgagaccggcgccuucccccccagcaagggccacaaggaggccgugagcagagagaugacccugagcaaccuguggaucuuccugauccagagcuucgccuuccugagcggcuacaugugguacaacaucauccaguacuucuaccacugccuguucuga

SEQ ID NO: 2133 - RNA, 1113 nt, Artificial Sequence
  derived and/or modified sequence opt5 from KIAA0205__Homo_sapiens__AAH34621
auggccaucacccuggaggaagcucccuggcucggcuggcugcuugugaaggcccugaugagauucgcguuuauggucguuaacaaucucguggcuauuccuagcuacaucugcuaugugauuauccugcagccgcuucggguccuggacuccaaacgcuucugguacauugaggggaucauguauaaguggcuccugggaaugguggccucuuggggcugguacgccggguauacaguuauggaauggggagaggauaucaaagcugugagcaaggacgaagccgucaugcuggugaaccaccaagcuacgggcgauguuuguacccucaugaugugccugcaggacaaagggcuuguggucgcccagaugauguggcugauggaucauauuuuuaaguacacaaauuucggaaucgugucccucgugcacggcgacuuuuucauuagacagggccggucuuaucgcgaucaacagcugcuucugcucaagaaacaucuggagaacaauuacagaagccgggaccgcaaguggaucguccuguuucccgaagggggauuccucagaaaacggcgcgagaccucccaggcguuugccaagaaaaacaaucugccuuuccuuacaaacguuacccugcccagaucuggcgcuacaaagauuauccucaaugcccugguggcucagcaaaagaacgggagcccugccggaggcgaugcgaaagagcuugacuccaagagcaaagggcugcaguggauuaucgauaccacgaucgccuaccccaaggcugaaccuauugacauccagaccuggauucucggauaucggaaaccgacagugacccacguccauuaccgcaucuuucccauuaaggaugugccucuggagacagacgaccugaccacguggcucuaucagagauucguugagaaagaagaucugcuuucucacuuuuacgagacaggcgccuuucccccuuccaagggccacaaggaagcugugagccgggagaugacccugucuaaucucuggaucuuccugauccaauccuucgccuuccuuagcggguauaugugguacaacauuauccaguauuuuuaccauugucuguucuga

SEQ ID NO: 2134 - protein, 725 aa, Artificial Sequence
  KIF2C__Homo_sapiens__Q99661
MAMDSSLQARLFPGLAIKIQRSNGLIHSANVRTVNLEKSCVSVEWAEGGATKGKEIDFDDVAAINPELLQLLPLHPKDNLPLQENVTIQKQKRRSVNSKIPAPKESLRSRSTRMSTVSELRITAQENDMEVELPAAANSRKQFSVPPAPTRPSCPAVAEIPLRMVSEEMEEQVHSIRGSSSANPVNSVRRKSCLVKEVEKMKNKREEKKAQNSEMRMKRAQEYDSSFPNWEFARMIKEFRATLECHPLTMTDPIEEHRICVCVRKRPLNKQELAKKEIDVISIPSKCLLLVHEPKLKVDLTKYLENQAFCFDFAFDETASNEVVYRFTARPLVQTIFEGGKATCFAYGQTGSGKTHTMGGDLSGKAQNASKGIYAMASRDVFLLKNQPCYRKLGLEVYVTFFEIYNGKLFDLLNKKAKLRVLEDGKQQVQVVGLQEHLVNSADDVIKMIDMGSACRTSGQTFANSNSSRSHACFQIILRAKGRMHGKFSLVDLAGNERGADTSSADRQTRMEGAEINKSLLALKECIRALGQNKAHTPFRESKLTQVLRDSFIGENSRTCMIATISPGISSCEYTLNTLRYADRVKELSPHSGPSGEQLIQMETEEMEACSNGALIPGNLSKEEEELSSQMSSFNEAMTQIRELEEKAMEELKEIIQQGPDWLELSEMTEQPDYDLETFVNKAESALAQQAKHFSALRDVIKALRLAMQLEEQASRQISSKKRPQ

SEQ ID NO: 2135 - RNA, 2178 nt, Artificial Sequence
  KIF2C__Homo_sapiens__AAH14924
auggccauggacucgucgcuucaggcccgccuguuucccggucucgcuaucaagauccaacgcaguaaugguuuaauucacagugccaauguaaggacugugaacuuggagaaauccuguguuucaguggaaugggcagaaggaggugccacaaagggcaaagagauugauuuugaugauguggcugcaauaaacccagaacucuuacagcuucuucccuuacauccgaaggacaaucugcccuugcaggaaaauguaacaauccagaaacaaaaacggagauccgucaacuccaaaauuccugcuccaaaagaaagucuucgaagccgcuccacucgcauguccacugucucagagcuucgcaucacggcucaggagaaugacauggagguggagcugccugcagcugcaaacucccgcaagcaguuuucaguuccuccugcccccacuaggccuuccugcccugcaguggcugaaauaccauugaggauggucagcgaggagauggaagagcaaguccauuccauccgaggcagcucuucugcaaacccugugaacucaguucggaggaaaucaugucuugugaaggaaguggaaaaaaugaagaacaagcgagaagagaagaaggcccagaacucugaaaugagaaugaagagagcucaggaguaugacaguaguuuuccaaacugggaauuugcccgaaugauuaaagaauuucgggcuacuuuggaaugucauccacuuacuaugacugauccuaucgaagagcacagaauaugugucuguguuaggaaacgcccacugaauaagcaagaauuggccaagaaagaaauugaugugauuuccauuccuagcaagugucuccucuugguacaugaacccaaguugaaaguggacuuaacaaaguaucuggagaaccaagcauucugcuuugacuuugcauuugaugaaacagcuucgaaugaaguugucuacagguucacagcaaggccacugguacagacaaucuuugaagguggaaaagcaacuuguuuugcauauggccagacaggaaguggcaagacacauacuaugggcggagaccucucugggaaagcccagaaugcauccaaagggaucuaugccauggccucccgggacgucuuccuccugaagaaucaacccugcuaccggaaguugggccuggaagucuaugugacauucuucgagaucuacaaugggaagcuguuugaccugcucaacaagaaggccaagcugcgcgugcuggaggacggcaagcaacaggugcaagugguggggcugcaggagcaucugguuaacucugcugaugaugucaucaagaugaucgacaugggcagcgccugcagaaccucugggcagacauuugccaacuccaauuccucccgcucccacgcgugcuuccaaauuauucuucgagcuaaagggagaaugcauggcaaguucucuuugguagaucuggcagggaaugagcgaggcgcggacacuuccagugcugaccggcagacccgcauggagggcgcagaaaucaacaagagucucuuagcccugaaggagugcaucagggcccugggacagaacaaggcucacaccccguuccgugagagcaagcugacacaggugcugagggacuccuucauuggggagaacucuaggacuugcaugauugccacgaucucaccaggcauaagcuccugugaauauacuuuaaacacccugagauaugcagacagggucaaggagcugagcccccacagugggcccaguggagagcaguugauucaaauggaaacagaagagauggaagccugcucuaacggggcgcugauuccaggcaauuuauccaaggaagaggaggaacugucuucccagauguccagcuuuaacgaagccaugacucagaucagggagcuggaggagaaggcuauggaagagcucaaggagaucauacagcaaggaccagacuggcuugagcucucugagaugaccgagcagccagacuaugaccuggagaccuuugugaacaaagcggaaucugcucuggcccagcaagccaagcauuucucagcccugcgagaugucaucaaggccuugcgccuggccaugcagcuggaagagcaggcuagcagacaaauaagcagcaagaaacggccccaguga

SEQ ID NO: 2136 - RNA, 2178 nt, Artificial Sequence
  derived and/or modified sequence opt1 from KIF2C__Homo_sapiens__AAH14924
auggccauggacagcucccugcaggcccgccucuuccccggccuggcgaucaagauccagcggagcaacgggcugauccacuccgccaacgugcgcaccgucaaccucgagaaguccugcgugagcguggagugggccgagggcggggccaccaagggcaaggagaucgacuucgacgacgucgccgcgaucaacccggagcugcugcagcuccugccccugcaccccaaggacaaccucccccugcaggagaacgugacgauccagaagcagaagcggcgcagcgugaacuccaagaucccggcccccaaggagagccugcggucccgcagcacccggauguccaccgucagcgagcuccgcaucaccgcccaggagaacgacauggagguggagcugcccgccgcggccaacucccggaagcaguucagcgugcccccggcccccacgcgccccuccugccccgccgucgccgagaucccgcugcggauggugagcgaggagauggaggagcagguccacuccauccgcgggagcuccagcgcgaaccccgugaacagcgugcggcgcaaguccugccucgugaaggaggucgagaagaugaagaacaagcgggaggagaagaaggcccagaacagcgagaugcgcaugaagcgggcccaggaguacgacuccagcuuccccaacugggaguucgcccgcaugaucaaggaguuccgggccacccuggagugccacccccugaccaugaccgacccgaucgaggagcaccgcaucugcgugugcgugcggaagcgcccccucaacaagcaggagcuggcgaagaaggagaucgacgucaucuccauccccagcaagugccugcuccuggugcacgagcccaagcugaagguggaccucacgaaguaccuggagaaccaggccuucugcuucgacuucgccuucgacgagaccgccuccaacgaggucguguaccgcuucaccgcccggccgcuggugcagaccaucuucgagggcggcaaggcgacgugcuucgccuacgggcagaccggcagcgggaagacccacaccaugggcggggaccucuccggcaaggcccagaacgccagcaagggcaucuacgccauggcgucccgcgacgucuuccugcugaagaaccagcccugcuaccggaagcucgggcuggagguguacgucacguucuucgagaucuacaacggcaagcuguucgaccuccugaacaagaaggccaagcugcgcgugcucgaggacgggaagcagcagguccagguggugggccugcaggagcaccuggugaacagcgccgacgacgucaucaagaugaucgacaugggcuccgccugccggaccagcgggcagaccuucgcgaacuccaacagcucccgcagccacgccugcuuccagaucauccuccgggccaagggccgcaugcacgggaaguucucccugguggaccuggccggcaacgagcgcggggccgacaccagcagcgcggaccggcagacgcggauggagggcgccgagaucaacaagucccuccuggcccugaaggagugcauccgcgcccucggccagaacaaggcccacacccccuuccgggagagcaagcugacccaggugcugcgcgacuccuucaucggggagaacagccggaccugcaugaucgcgacgaucucccccggcaucagcuccugcgaguacacccucaacacccugcgcuacgccgaccgggucaaggagcugagcccgcacuccgggcccagcggcgagcagcugauccagauggagaccgaggagauggaggccugcuccaacggggcccucauccccggcaaccugagcaaggaggaggaggagcuguccagccagauguccagcuucaacgaggccaugacgcagauccgcgagcucgaggagaaggcgauggaggagcugaaggagaucauccagcagggccccgacuggcuggagcucuccgagaugaccgagcagccggacuacgaccuggagaccuucgugaacaaggccgagagcgcccuggcccagcaggcgaagcacuucagcgcccuccgggacgugaucaaggcccugcgccuggccaugcagcucgaggagcaggccucccgccagaucagcuccaagaagcggccccaguga

SEQ ID NO: 2137 - RNA, 2178 nt, Artificial Sequence
  derived and/or modified sequence opt2 from KIF2C__Homo_sapiens__AAH14924
auggccauggacuccucccuccaggcccgccucuuccccggccucgccaucaagauccagcgcuccaacggccucauccacuccgccaacguccgcaccgucaaccucgagaaguccugcgucuccgucgagugggccgagggcggcgccaccaagggcaaggagaucgacuucgacgacgucgccgccaucaaccccgagcuccuccagcuccucccccuccaccccaaggacaaccucccccuccaggagaacgucaccauccagaagcagaagcgccgcuccgucaacuccaagauccccgcccccaaggagucccuccgcucccgcuccacccgcauguccaccgucuccgagcuccgcaucaccgcccaggagaacgacauggaggucgagcuccccgccgccgccaacucccgcaagcaguucuccgucccccccgcccccacccgccccuccugccccgccgucgccgagaucccccuccgcauggucuccgaggagauggaggagcagguccacuccauccgcggcuccuccuccgccaaccccgucaacuccguccgccgcaaguccugccucgucaaggaggucgagaagaugaagaacaagcgcgaggagaagaaggcccagaacuccgagaugcgcaugaagcgcgcccaggaguacgacuccuccuuccccaacugggaguucgcccgcaugaucaaggaguuccgcgccacccucgagugccacccccucaccaugaccgaccccaucgaggagcaccgcaucugcgucugcguccgcaagcgcccccucaacaagcaggagcucgccaagaaggagaucgacgucaucuccauccccuccaagugccuccuccucguccacgagcccaagcucaaggucgaccucaccaaguaccucgagaaccaggccuucugcuucgacuucgccuucgacgagaccgccuccaacgaggucgucuaccgcuucaccgcccgcccccucguccagaccaucuucgagggcggcaaggccaccugcuucgccuacggccagaccggcuccggcaagacccacaccaugggcggcgaccucuccggcaaggcccagaacgccuccaagggcaucuacgccauggccucccgcgacgucuuccuccucaagaaccagcccugcuaccgcaagcucggccucgaggucuacgucaccuucuucgagaucuacaacggcaagcucuucgaccuccucaacaagaaggccaagcuccgcguccucgaggacggcaagcagcagguccaggucgucggccuccaggagcaccucgucaacuccgccgacgacgucaucaagaugaucgacaugggcuccgccugccgcaccuccggccagaccuucgccaacuccaacuccucccgcucccacgccugcuuccagaucauccuccgcgccaagggccgcaugcacggcaaguucucccucgucgaccucgccggcaacgagcgcggcgccgacaccuccuccgccgaccgccagacccgcauggagggcgccgagaucaacaagucccuccucgcccucaaggagugcauccgcgcccucggccagaacaaggcccacacccccuuccgcgaguccaagcucacccagguccuccgcgacuccuucaucggcgagaacucccgcaccugcaugaucgccaccaucucccccggcaucuccuccugcgaguacacccucaacacccuccgcuacgccgaccgcgucaaggagcucuccccccacuccggccccuccggcgagcagcucauccagauggagaccgaggagauggaggccugcuccaacggcgcccucauccccggcaaccucuccaaggaggaggaggagcucuccucccagauguccuccuucaacgaggccaugacccagauccgcgagcucgaggagaaggccauggaggagcucaaggagaucauccagcagggccccgacuggcucgagcucuccgagaugaccgagcagcccgacuacgaccucgagaccuucgucaacaaggccgaguccgcccucgcccagcaggccaagcacuucuccgcccuccgcgacgucaucaaggcccuccgccucgccaugcagcucgaggagcaggccucccgccagaucuccuccaagaagcgcccccaguga

SEQ ID NO: 2138 - RNA, 2178 nt, Artificial Sequence
  derived and/or modified sequence opt3 from KIF2C__Homo_sapiens__AAH14924
auggccauggacagcucccugcaggcuagacucuuccccggccuugcaaucaagauucaaaggucuaacgggcugauacacucagccaaugugcggaccgucaacuuggagaaaaguugcguuagcguggaaugggcggagggaggugcuacaaagggcaaagaaaucgauuuugacgauguagccgcaauuaauccugaguuacugcagcuacucccacugcauccgaaggacaaccuuccccugcaggaaaaugugacuauccagaaacaaaagcgccgauccgucaacucuaagauuccugccccaaaagagucguugcguucaagaagcacgaggaugaguaccguguccgagcuccggaucacagcucaggaaaaugauauggagguugaacugcccgcagccgcuaacucucgcaagcaguucagcgugccuccagcccccacuagaccuuccuguccagcggucgcagagauaccgcugaggauggugucagaggaaauggaggaacagguacacaguauccgggggucuagcuccgccaaucccguuaacucagugcgccgaaaaagcugccucgucaaggagguggagaaaaugaagaauaagagagaggagaaaaaggcucaaaacagugaaaugaggaugaaacgggcccaggaguacgacucuuccuuuccuaauugggaguucgcacguaugauuaaggaguuucgcgcuaccuuagaaugucauccacugacaaugaccgaucccaucgaggagcacagaauuugcgugugugucaggaaacggccucuuaacaagcaggaauuggccaaaaaggagaucgacguuauaagcauuccaucgaagugccugcuacucgugcaugaacccaaacugaagguagaucuuacuaaauaucuggagaaucaggcguucuguuuugacuucgccuuugaugaaacagcaucuaacgagguggucuaccgauucaccgcucgcccguuggugcaaacgaucuuugagggaggcaaggccacuugcuucgcuuauggucagaccggguccggaaaaacacacacuaugggcggcgaccucucagggaaggcccagaacgcaaguaagggaauuuacgccauggcuagcagagauguuuuucugcugaaaaaucaaccuuguuauaggaaguuaggucucgaaguguacgucaccuucuucgagaucuauaacggcaaacuuuuugaccuguugaauaagaaagcgaagcuacgggugcuggaagacgggaagcagcagguacagguugugggacuccaagagcaccuggucaacuccgcagaugacgugaucaaaaugauugauaugggcucugccugccgcacaagcggucagaccuucgcuaauucaaacaguuccagaagccaugccuguuuucagauaauccuuagggcaaaggggcguaugcacggaaaauucucucuggucgacuuggccggcaaugagcggggcgcugauacgucaagugccgaccgacagacuagaauggaaggggcagagauuaacaagagccuccuggcguuaaaagaaugcaucagggcucugggacaaaauaaggcccauacacccuuucgcgaguccaagcuaacccaggugcuccgggauucuuucauaggugaaaacucgagaacuugcaugauugcaacaaucagcccaggcaucuccucaugugaguacacccugaauacgcuuagguacgccgaccgcguuaaagaguugaguccucacucugggcccagcggagaacagcugauucagauggagaccgaagagauggaggcuugcuccaacggcgcccucaucccagguaaucugucaaaggaagaggaagaacuuagcucucaaauguccaguuuuaacgaagcaaugacacagauucgagagcuggaagagaaagcuauggaggaauugaaggagauaauccagcaggggcccgauuggcucgaacugagcgagaugacugagcaaccugacuaugauuuagaaaccuucgugaauaaagccgagucugcgcuggcccagcaggcuaagcacuuuuccgcacuacgggacguaauuaaagcccuccgucuggcuaugcaacuugaagaacaggccucaagacagaucaguagcaagaagaggccacaguga

SEQ ID NO: 2139 - RNA, 2178 nt, Artificial Sequence
  derived and/or modified sequence opt4 from KIF2C__Homo_sapiens__AAH14924
auggccauggacagcagccugcaggccagacuguuccccggccuggccaucaagauccagagaagcaacggccugauccacagcgccaacgugagaaccgugaaccuggagaagagcugcgugagcguggagugggccgagggcggcgccaccaagggcaaggagaucgacuucgacgacguggccgccaucaaccccgagcugcugcagcugcugccccugcaccccaaggacaaccugccccugcaggagaacgugaccauccagaagcagaagagaagaagcgugaacagcaagauccccgcccccaaggagagccugagaagcagaagcaccagaaugagcaccgugagcgagcugagaaucaccgcccaggagaacgacauggagguggagcugcccgccgccgccaacagcagaaagcaguucagcgugccccccgcccccaccagacccagcugccccgccguggccgagaucccccugagaauggugagcgaggagauggaggagcaggugcacagcaucagaggcagcagcagcgccaaccccgugaacagcgugagaagaaagagcugccuggugaaggagguggagaagaugaagaacaagagagaggagaagaaggcccagaacagcgagaugagaaugaagagagcccaggaguacgacagcagcuuccccaacugggaguucgccagaaugaucaaggaguucagagccacccuggagugccacccccugaccaugaccgaccccaucgaggagcacagaaucugcgugugcgugagaaagagaccccugaacaagcaggagcuggccaagaaggagaucgacgugaucagcauccccagcaagugccugcugcuggugcacgagcccaagcugaagguggaccugaccaaguaccuggagaaccaggccuucugcuucgacuucgccuucgacgagaccgccagcaacgaggugguguacagauucaccgccagaccccuggugcagaccaucuucgagggcggcaaggccaccugcuucgccuacggccagaccggcagcggcaagacccacaccaugggcggcgaccugagcggcaaggcccagaacgccagcaagggcaucuacgccauggccagcagagacguguuccugcugaagaaccagcccugcuacagaaagcugggccuggagguguacgugaccuucuucgagaucuacaacggcaagcuguucgaccugcugaacaagaaggccaagcugagagugcuggaggacggcaagcagcaggugcagguggugggccugcaggagcaccuggugaacagcgccgacgacgugaucaagaugaucgacaugggcagcgccugcagaaccagcggccagaccuucgccaacagcaacagcagcagaagccacgccugcuuccagaucauccugagagccaagggcagaaugcacggcaaguucagccugguggaccuggccggcaacgagagaggcgccgacaccagcagcgccgacagacagaccagaauggagggcgccgagaucaacaagagccugcuggcccugaaggagugcaucagagcccugggccagaacaaggcccacacccccuucagagagagcaagcugacccaggugcugagagacagcuucaucggcgagaacagcagaaccugcaugaucgccaccaucagccccggcaucagcagcugcgaguacacccugaacacccugagauacgccgacagagugaaggagcugagcccccacagcggccccagcggcgagcagcugauccagauggagaccgaggagauggaggccugcagcaacggcgcccugauccccggcaaccugagcaaggaggaggaggagcugagcagccagaugagcagcuucaacgaggccaugacccagaucagagagcuggaggagaaggccauggaggagcugaaggagaucauccagcagggccccgacuggcuggagcugagcgagaugaccgagcagcccgacuacgaccuggagaccuucgugaacaaggccgagagcgcccuggcccagcaggccaagcacuucagcgcccugagagacgugaucaaggcccugagacuggccaugcagcuggaggagcaggccagcagacagaucagcagcaagaagagaccccaguga

SEQ ID NO: 2140 - RNA, 2178 nt, Artificial Sequence
  derived and/or modified sequence opt5 from KIF2C__Homo_sapiens__AAH14924
auggccauggacagcucccugcaggcuagacucuuccccggccuggccaucaagauucaacggucuaacgggcuuauccacagcgcgaaugugcgcaccgucaaccuggagaaauccugcguuucuguggaaugggcugagggaggcgccacaaaggggaaagaaauugauuuugacgauguggccgcuaucaauccugagcuccugcagcuucugccgcuccaucccaaggacaaccugccucugcaggaaaaugucacgauucagaaacaaaagagacggagcgugaacuccaagauccccgccccuaaagagucucuccgcagcagauccacccggaugagcacaguuucugagcugcgcaucaccgcucaggaaaaugauauggagguggaacuucccgccgcggccaacuccagaaagcaguucagcgucccuccggcucccacacggccuucuugucccgccguggcugagauuccucugcgcaugguuuccgaggaaauggaggaacaggugcacagcaucagaggaucuuccagcgccaaucccgucaacuccgugcggcgcaaaucuugccucgugaaggaggucgaaaagaugaagaauaagagagaggagaaaaaggcgcaaaacagcgaaaugcggaugaaacgcgcccaggaguacgacuccagcuuuccgaauugggaguucgcuagaaugauuaaggaguuucgggccacccuggaaugucauccucuuacaaugaccgaucccaucgaggagcacagaauuugcguuugugugcgcaaacggccucugaacaagcaggaacucgcuaaaaaggagaucgacgugauuucuauccccuccaagugccugcugcucguccaugaacccaaacugaagguggaucuuacgaaauaucuggagaaucaggccuucuguuuugacuucgccuuugaugaaaccgcuagcaacgagguuguguacagauucacagcgcgcccucucguccaaaccaucuuugagggcgggaaggccacaugcuucgcuuauggacagaccggcucuggcaaaacgcacacaaugggaggggaccugagcggcaaggcccagaacgccuccaaggggauuuacgcuauggccucucgggauguguuucuucugaaaaaucaaccguguuauagaaagcucggacuggaaguuuacgugaccuucuucgagaucuauaacggcaaacuguuugaccuccugaauaagaaagcgaaacuucgcguccuggaagacgggaagcaacaggugcaggucgugggacuccaggagcaccugguuaacagcgcugaugacgugauuaaaaugaucgauaugggcuccgccugccggacaagcggccagaccuucgccaauucuaacuccagcagaucucaugcuuguuuucagauuauccuucgcgccaaggggcggaugcacggaaaauucucccuggucgaccucgcuggcaaugagagaggggccgauaccagcuccgcggaccgccagacacggauggaaggagccgagaucaacaagucucugcuggcucucaaagaaugcauuagagcccugggccaaaauaaggcucauacgcccuuucgggagagcaaacuuacccaggugcugcgcgauuccuucaucggggaaaacucuagaacaugcaugauugccaccaucagcccuggaauuuccagcugugaguacacacucaauacccugcgguacgcggacagaguuaaggagcugucuccccacuccggcccuagcggcgaacagcuuauccagauggagacggaagagauggaagccugcucuaacggggcucucauccccggaaaucuguccaaggaggaggaagaacugagcucucaaaugagcuccuuuaacgaagccaugacacagauucgcgagcucgaagagaaagcuauggaggaacugaaggagaucauucagcagggcccggauuggcuugaacugagcgagaugaccgagcaaccugacuaugaucucgaaaccuucgugaauaaagccgagucugcccuggcucagcaggcgaagcacuuuuccgcccugcgggacgucaucaaagcucuuagacucgccaugcaacuggaggaacaggccagccgccagauuuccucuaagaagagaccccaguga

SEQ ID NO: 2141 - protein, 113 aa, Artificial Sequence
  KK-LC-1__Homo_sapiens__Q5H943
MNFYLLLASSILCALIVFWKYRRFQRNTGEMSSNSTALALVRPSSSGLINSNTDNNLAVYDLSRDILNNFPHSIARQKRILVNLSMVENKLVELEHTLLSKGFRGASPHRKST

SEQ ID NO: 2142 - RNA, 342 nt, Artificial Sequence
  KK-LC-1__Homo_sapiens__AAH62223
augaacuucuauuuacuccuagcgagcagcauucugugugccuugauugucuucuggaaauaucgccgcuuucagagaaacacuggcgaaaugucaucaaauucaacugcucuugcacuagugagacccucuucuucuggguuaauuaacagcaauacagacaacaaucuugcagucuacgaccucucucgggauauuuuaaauaauuucccacacucaauagccaggcagaagcgaauauugguaaaccucaguaugguggaaaacaagcugguugaacuggaacauacucuacuuagcaaggguuucagaggugcaucaccucaccggaaauccaccuaa

SEQ ID NO: 2143 - RNA, 342 nt, Artificial Sequence
  derived and/or modified sequence opt1 from KK-LC-1__Homo_sapiens__AAH62223
augaacuucuaccugcuccuggccagcuccauccugugcgcccucaucguguucuggaaguaccgccgguuccagcgcaacaccggcgagaugagcuccaacagcaccgcgcuggcccugguccggcccuccagcuccgggcucaucaacagcaacacggacaacaaccuggccguguacgaccugucccgcgacauccucaacaacuucccgcacagcaucgcccggcagaagcgcauccuggugaaccuguccauggucgagaacaagcucguggagcuggagcacacccugcucagcaagggcuuccgcggggccagcccccaccggaaguccaccuga

SEQ ID NO: 2144 - RNA, 342 nt, Artificial Sequence
  derived and/or modified sequence opt2 from KK-LC-1__Homo_sapiens__AAH62223
augaacuucuaccuccuccucgccuccuccauccucugcgcccucaucgucuucuggaaguaccgccgcuuccagcgcaacaccggcgagauguccuccaacuccaccgcccucgcccucguccgccccuccuccuccggccucaucaacuccaacaccgacaacaaccucgccgucuacgaccucucccgcgacauccucaacaacuucccccacuccaucgcccgccagaagcgcauccucgucaaccucuccauggucgagaacaagcucgucgagcucgagcacacccuccucuccaagggcuuccgcggcgccuccccccaccgcaaguccaccuga

SEQ ID NO: 2145 - RNA, 342 nt, Artificial Sequence
  derived and/or modified sequence opt3 from KK-LC-1__Homo_sapiens__AAH62223
augaacuucuaccugcuccuugccagcuccauccugugcgcuuugauuguguuuuggaaguauagaagguuccagcggaauaccggcgagaugucuucaaacaguacagcauuagcccugguccgccccagcuccucugggcuaauaaauucgaacacugacaauaaccucgcgguuuacgaucugucacgagacauccuuaauaacuuuccucacagcauugcucgucaaaaacggauccuggugaauuugaguaugguagaaaacaagcucguggagcuggaacauacgcugcucuccaaaggauucaggggugccucuccacacagaaagagcaccuga

SEQ ID NO: 2146 - RNA, 342 nt, Artificial Sequence
  derived and/or modified sequence opt4 from KK-LC-1__Homo_sapiens__AAH62223
augaacuucuaccugcugcuggccagcagcauccugugcgcccugaucguguucuggaaguacagaagauuccagagaaacaccggcgagaugagcagcaacagcaccgcccuggcccuggugagacccagcagcagcggccugaucaacagcaacaccgacaacaaccuggccguguacgaccugagcagagacauccugaacaacuucccccacagcaucgccagacagaagagaauccuggugaaccugagcaugguggagaacaagcugguggagcuggagcacacccugcugagcaagggcuucagaggcgccagcccccacagaaagagcaccuga

SEQ ID NO: 2147 - RNA, 342 nt, Artificial Sequence
  derived and/or modified sequence opt5 from KK-LC-1__Homo_sapiens__AAH62223
augaacuucuaccugcuccuggccagcuccauccuuugcgcucugauuguguuuuggaaguauagacgguuccagcgcaauaccggcgagaugucuagcaacuccacagcccucgcgcuggucagacccucuagcuccgggcuuaucaauucuaacacggacaauaaccuggcuguuuacgaucucagccgggacauucugaauaacuuuccucacuccaucgcccgccaaaaacggauucuggugaaucucagcaugguggaaaacaagcuggucgagcuugaacauacccugcucucuaaaggauucagaggcgccuccccgcaccgcaagagcacauga

SEQ ID NO: 2148 - protein, 860 aa, Artificial Sequence [sequence omitted]

SEQ ID NO: 2149 - RNA, 2583 nt, Artificial Sequence
  LDLR__Homo_sapiens__AAA56833
auggggcccuggggcuggaaauugcgcuggaccgucgccuugcuccucgccgcggcggggacugcagugggcgacagaugugaaagaaacgaguuccagugccaagacgggaaaugcaucuccuacaagugggucugcgauggcagcgcugagugccaggauggcucugaugagucccaggagacgugcuugucugucaccugcaaauccggggacuucagcugugggggccgugucaaccgcugcauuccucaguucuggaggugcgauggccaaguggacugcgacaacggcucagacgagcaaggcuguccccccaagacgugcucccaggacgaguuucgcugccacgaugggaagugcaucucucggcaguucgucugugacucagaccgggacugcuuggacggcucagacgaggccuccugcccggugcucaccuguggucccgccagcuuccagugcaacagcuccaccugcaucccccagcugugggccugcgacaacgaccccgacugcgaagauggcucggaugaguggccgcagcgcuguaggggucuuuacguguuccaaggggacaguagccccugcucggccuucgaguuccacugccuaaguggcgagugcauccacuccagcuggcgcugugaugguggccccgacugcaaggacaaaucugacgaggaaaacugcgcuguggccaccugucgcccugacgaauuccagugcucugauggaaacugcauccauggcagccggcagugugaccgggaauaugacugcaaggacaugagcgaugaaguuggcugcguuaaugugacacucugcgagggacccaacaaguucaagugucacagcggcgaaugcaucacccuggacaaagucugcaacauggcuagagacugccgggacuggucagaugaacccaucaaagagugcgggaccaacgaaugcuuggacaacaacggcggcuguucccacgucugcaaugaccuuaagaucggcuacgagugccugugccccgacggcuuccagcugguggcccagcgaagaugcgaagauaucgaugagugucaggaucccgacaccugcagccagcucugcgugaaccuggaggguggcuacaagugccagugugaggaaggcuuccagcuggacccccacacgaaggccugcaaggcugugggcuccaucgccuaccucuucuucaccaaccggcacgaggucaggaagaugacgcuggaccggagcgaguacaccagccucauccccaaccugaggaacguggucgcucuggacacggagguggccagcaauagaaucuacuggucugaccugucccagagaaugaucugcagcacccagcuugacagagcccacggcgucucuuccuaugacaccgucaucagcagggacauccaggcccccgacgggcuggcuguggacuggauccacagcaacaucuacuggaccgacucuguccugggcacugucucuguugcggauaccaagggcgugaagaggaaaacguuauucagggagaacggcuccaagccaagggccaucgugguggauccuguucauggcuucauguacuggacugacuggggaacucccgccaagaucaagaaagggggccugaaugguguggacaucuacucgcuggugacugaaaacauucaguggcccaauggcaucacccuagaucuccucaguggccgccucuacuggguugacuccaaacuucacuccaucucaagcaucgaugucaaugggggcaaccggaagaccaucuuggaggaugaaaagaggcuggcccaccccuucuccuuggccgucuuugaggacaaaguauuuuggacagauaucaucaacgaagccauuuucagugccaaccgccucacagguuccgaugucaacuuguuggcugaaaaccuacuguccccagaggauaugguccucuuccacaaccucacccagccaagaggagugaacuggugugagaggaccacccugagcaauggcggcugccaguaucugugccucccugccccgcagaucaacccccacucgcccaaguuuaccugcgccugcccggacggcaugcugcuggccagggacaugaggagcugccucacagaggcugaggcugcaguggccacccaggagacauccaccgucaggcuaaaggucagcuccacagccguaaggacacagcacacaaccacccggccuguucccgacaccucccggcugccuggggccaccccugggcucaccacgguggagauagugacaaugucucaccaagcucugggcgacguugcuggcagaggaaaugagaagaagcccaguagcgugagggcucuguccauuguccuccccaucgugcuccucgucuuccuuugccugggggucuuccuucuauggaagaacuggcggcuuaagaacaucaacagcaucaacuuugacaaccccgucuaucagaagaccacagaggaugagguccacauuugccacaaccaggacggcuacagcuaccccucgagacagauggucagucuggaggaugacguggcguga

SEQ ID NO: 2150 - RNA, 2583 nt, Artificial Sequence
  derived and/or modified sequence opt1 from LDLR__Homo_sapiens__AAA56833
augggccccuggggguggaagcugcgcuggaccguggcccuccugcuggccgcggccggcaccgccgucggggaccggugcgagcgcaacgaguuccagugccaggacggcaagugcaucagcuacaagugggugugcgacggguccgccgagugccaggacggcagcgacgagucccaggagacgugccucagcgugaccugcaaguccggcgacuucagcugcgggggccgggucaaccgcugcaucccgcaguucuggcggugcgacggccagguggacugcgacaacggguccgacgagcaggggugcccgcccaagaccugcagccaggacgaguuccgcugccacgacggcaagugcaucucccggcaguucgugugcgacagcgaccgcgacugccuggacggcuccgacgaggccagcugccccguccugaccugcgggcccgcguccuuccagugcaacagcuccacgugcaucccccagcucugggccugcgacaacgaccccgacugcgaggacggcagcgacgaguggccccagcggugccgcgggcuguacguguuccagggcgacuccagcccgugcuccgccuucgaguuccacugccugagcggcgagugcauccacagcuccuggcggugcgacgggggccccgacugcaaggacaagagcgacgaggagaacugcgccguggcgaccugccgccccgacgaguuccagugcuccgacgggaacugcauccacggcagccggcagugcgaccgcgaguacgacugcaaggacauguccgacgaggucgggugcgugaacgugacccucugcgagggccccaacaaguucaagugccacagcggcgagugcaucacccuggacaaggucugcaacauggcccgggacugccgcgacugguccgacgagccgaucaaggagugcgggacgaacgagugccuggacaacaacggcgggugcagccacgugugcaacgaccucaagaucggcuacgagugccugugccccgacggguuccagcugguggcccagcggcgcugcgaggacaucgacgagugccaggaccccgacacgugcucccagcucugcgucaaccuggagggcggcuacaagugccagugcgaggagggguuccagcuggacccccacaccaaggccugcaaggccgugggcagcaucgcguaccucuucuucaccaaccggcacgaggugcgcaagaugacgcuggaccgguccgaguacaccagccugaucccgaaccuccgcaacgucguggcccuggacaccgagguggccuccaaccgcaucuacuggagcgaccugucccagcggaugaucugcagcacccagcucgaccgcgcccacggggucuccagcuacgacacggugaucucccgggacauccaggcccccgacggccuggcgguggacuggauccacagcaacaucuacuggaccgacagcguccuggggaccguguccgucgccgacaccaagggcgugaagcgcaagacccucuuccgggagaacggcagcaagccccgcgccaucguggucgaccccgugcacggguucauguacuggaccgacuggggcaccccggccaagaucaagaagggcgggcugaacggcguggacaucuacucccuggucaccgagaacauccaguggcccaacgggaucacgcucgaccugcugagcggccggcucuacuggguggacuccaagcugcacagcaucuccagcaucgacgugaacgggggcaaccgcaagaccauccuggaggacgagaagcggcucgcccaccccuucucccuggcggucuucgaggacaagguguucuggaccgacaucaucaacgaggccaucuucagcgccaaccgccugaccggguccgacgugaaccuccuggccgagaaccugcucagccccgaggacaugguccuguuccacaaccugacgcagccgcggggcgugaacuggugcgagcgcaccacccucuccaacggcgggugccaguaccugugccugcccgcgccccagaucaacccccacagcccgaaguucacgugcgccugccccgacggcaugcuccuggcccgggacaugcgcuccugccugaccgaggccgaggccgcgguggccacccaggagaccagcaccguccggcugaagguguccagcacggccgugcgcacccagcacaccaccacccggcccgucccggacacgagccgccuccccggggccacccccggccugaccaccguggagaucgugacgaugucccaccaggcccugggggacgucgcgggccggggcaacgagaagaagcccagcuccgugcgcgcccucagcaucgugcugccgaucguccugcucguguuccugugccuggggguguuccuccuguggaagaacuggcgccugaagaacaucaacuccaucaacuucgacaaccccgucuaccagaagaccaccgaggacgaggugcacaucugccacaaccaggacggcuacagcuaccccucccggcagauggugagccucgaggacgacgucgccuga

SEQ ID NO: 2151 - RNA, 2583 nt, Artificial Sequence
  derived and/or modified sequence opt2 from LDLR__Homo_sapiens__AAA56833
augggccccuggggcuggaagcuccgcuggaccgucgcccuccuccucgccgccgccggcaccgccgucggcgaccgcugcgagcgcaacgaguuccagugccaggacggcaagugcaucuccuacaagugggucugcgacggcuccgccgagugccaggacggcuccgacgagucccaggagaccugccucuccgucaccugcaaguccggcgacuucuccugcggcggccgcgucaaccgcugcaucccccaguucuggcgcugcgacggccaggucgacugcgacaacggcuccgacgagcagggcugcccccccaagaccugcucccaggacgaguuccgcugccacgacggcaagugcaucucccgccaguucgucugcgacuccgaccgcgacugccucgacggcuccgacgaggccuccugccccguccucaccugcggccccgccuccuuccagugcaacuccuccaccugcaucccccagcucugggccugcgacaacgaccccgacugcgaggacggcuccgacgaguggccccagcgcugccgcggccucuacgucuuccagggcgacuccucccccugcuccgccuucgaguuccacugccucuccggcgagugcauccacuccuccuggcgcugcgacggcggccccgacugcaaggacaaguccgacgaggagaacugcgccgucgccaccugccgccccgacgaguuccagugcuccgacggcaacugcauccacggcucccgccagugcgaccgcgaguacgacugcaaggacauguccgacgaggucggcugcgucaacgucacccucugcgagggccccaacaaguucaagugccacuccggcgagugcaucacccucgacaaggucugcaacauggcccgcgacugccgcgacugguccgacgagcccaucaaggagugcggcaccaacgagugccucgacaacaacggcggcugcucccacgucugcaacgaccucaagaucggcuacgagugccucugccccgacggcuuccagcucgucgcccagcgccgcugcgaggacaucgacgagugccaggaccccgacaccugcucccagcucugcgucaaccucgagggcggcuacaagugccagugcgaggagggcuuccagcucgacccccacaccaaggccugcaaggccgucggcuccaucgccuaccucuucuucaccaaccgccacgagguccgcaagaugacccucgaccgcuccgaguacaccucccucauccccaaccuccgcaacgucgucgcccucgacaccgaggucgccuccaaccgcaucuacugguccgaccucucccagcgcaugaucugcuccacccagcucgaccgcgcccacggcgucuccuccuacgacaccgucaucucccgcgacauccaggcccccgacggccucgccgucgacuggauccacuccaacaucuacuggaccgacuccguccucggcaccgucuccgucgccgacaccaagggcgucaagcgcaagacccucuuccgcgagaacggcuccaagccccgcgccaucgucgucgaccccguccacggcuucauguacuggaccgacuggggcacccccgccaagaucaagaagggcggccucaacggcgucgacaucuacucccucgucaccgagaacauccaguggcccaacggcaucacccucgaccuccucuccggccgccucuacugggucgacuccaagcuccacuccaucuccuccaucgacgucaacggcggcaaccgcaagaccauccucgaggacgagaagcgccucgcccaccccuucucccucgccgucuucgaggacaaggucuucuggaccgacaucaucaacgaggccaucuucuccgccaaccgccucaccggcuccgacgucaaccuccucgccgagaaccuccucucccccgaggacaugguccucuuccacaaccucacccagccccgcggcgucaacuggugcgagcgcaccacccucuccaacggcggcugccaguaccucugccuccccgccccccagaucaacccccacucccccaaguucaccugcgccugccccgacggcaugcuccucgcccgcgacaugcgcuccugccucaccgaggccgaggccgccgucgccacccaggagaccuccaccguccgccucaaggucuccuccaccgccguccgcacccagcacaccaccacccgccccguccccgacaccucccgccuccccggcgccacccccggccucaccaccgucgagaucgucaccaugucccaccaggcccucggcgacgucgccggccgcggcaacgagaagaagcccuccuccguccgcgcccucuccaucguccuccccaucguccuccucgucuuccucugccucggcgucuuccuccucuggaagaacuggcgccucaagaacaucaacuccaucaacuucgacaaccccgucuaccagaagaccaccgaggacgagguccacaucugccacaaccaggacggcuacuccuaccccucccgccagauggucucccucgaggacgacgucgccuga

SEQ ID NO: 2152 - RNA, 2583 nt, Artificial Sequence
  derived and/or modified sequence opt3 from LDLR__Homo_sapiens__AAA56833
augggccccuggggguggaagcugagauggaccguggcccuccuucuggcugcagccggaacagcggucggugacaggugcgagcggaacgaauuucagugucaagauggcaaaugcaucagcuacaaguggguuugugacggguccgcugagugccaggauggaucugacgaaucacaggagacuuguuugagugugacgugcaaaagcggcgauuuuuccuguggugggcgcguaaaucgaugcauuccucaguucuggcguugugacggacaaguggauugcgacaacggcucugaugaacagggcuguccaccgaagaccugcucgcaggacgaguuuagaugccacgaugggaaauguauaucaaggcaguucgucugcgacagcgaucgggacuguuuagacggaagugaugaggccuccugccccgugcugacaugugguccugcaucuuuucaaugcaauagcuccacuuguaucccacagcuaugggccugcgacaacgaucccgacugugaagauggcucagacgaguggccucagcgcugcagagggcucuauguuuuccagggagauaguagcccauguucugcuuuugaguuccauugccuguccggcgaaugcauucacucaagcuggaggugugacggugggcccgauugcaaggacaagagugaugaggaaaauugugcaguggcuaccugccggccugacgaguuucaauguucugacggaaacugcauccauggcucccgccagugugaucgagaauacgacugcaaagauaugagcgacgaggucggcugugugaauguaacacuuugcgaagggccaaacaaguucaaaugucacucgggagagugcauuacccuggauaagguuugcaauauggccagagacuguagggauuggucugacgagccgaucaaagaaugcgguacuaacgaguguuuggauaauaacggcgggugcucccauguguguaaugaccucaagauaggauaugaaugccugugucccgauggcuuucagcuggucgcccaacggcguugcgaggacaucgaugaaugucaggacccugacacaugcucacagcucugugugaacuuagaggguggguacaagugccagugcgaggaaggcuuccaacuggauccacacaccaaagcguguaaggcagugggaaguauugccuaucuuuucuucacgaaucgccacgaggucagaaaaaugacuuuggacaggagcgaauacaccucccugauccccaaccuacggaacguuguggcucucgauacagagguagccucuaaucgaauuuauuggagcgaccugucacagcgcaugaucugcaguacucagcuugauagagcacauggcguguccagcuacgacaccgucauaucuagggauauucaggcuccugacgggcuggccguggauuggauccacucaaacauuuacuggacagacaguguuuugggaaccgugagcgucgcggauacgaagggugugaaacggaagacucucuuccgcgaaaauggcuccaaaccaagagccaucguaguugaccccgugcauggguuuauguauuggacagauuggggaaccccggcaaagaucaagaaaggcggucugaacggggucgacauuuacucuuuagugacugagaauauacaauggccuaacggcaucacacuggaccuccuuucgggaaggcuguauugggucgauagcaaguugcacuccauuucaaguaucgacgugaauggcgggaaccguaaaaccauacuagaggaugaaaagcggcuggcucaccccuucucucucgccguuuuugaggacaaaguguucuggacggauauuaucaaugaagcuaucuuuagcgccaaccgacugaccggauccgacguaaaucuucuggcagagaacuugcucucaccagaggauaugguccuguuccauaauuuaacacagccuagaggugugaacuggugugaaaggacuacccugagcaauggcgggugccaguaccuaugucuccccgccccacagauuaacccccacucuccuaaguuuacaugcgcuuguccagacggaaugcugcuugcgcgcgauaugcgguccugcuugacugaggcagaagccgcuguugccacccaagagacaaguaccgugagacugaaggucagcucuacugcagugaggacgcagcauacaaccacucgcccgguacccgacaccucccgacucccuggcgccacaccaggucugaccacuguggaaaucguuacaaugucacaccaggcucuuggggaugucgccggccggggaaacgagaaaaagcccaguagcgugcgugcacugucgauuguguugccuauaguccuccugguuuucuuaugucugggcguguuucuacucuggaaaaauuggagacugaagaacaucaauuccauuaacuucgacaauccaguguaucagaaaacgaccgaggacgaaguacauaucugccacaaccaagauggguacucuuaucccagcaggcagauggucucacuugaggacgauguggcguga

SEQ ID NO: 2153 - RNA, 2583 nt, Artificial Sequence
  derived and/or modified sequence opt4 from LDLR__Homo_sapiens__AAA56833
augggccccuggggcuggaagcugagauggaccguggcccugcugcuggccgccgccggcaccgccgugggcgacagaugcgagagaaacgaguuccagugccaggacggcaagugcaucagcuacaagugggugugcgacggcagcgccgagugccaggacggcagcgacgagagccaggagaccugccugagcgugaccugcaagagcggcgacuucagcugcggcggcagagugaacagaugcaucccccaguucuggagaugcgacggccagguggacugcgacaacggcagcgacgagcagggcugcccccccaagaccugcagccaggacgaguucagaugccacgacggcaagugcaucagcagacaguucgugugcgacagcgacagagacugccuggacggcagcgacgaggccagcugccccgugcugaccugcggccccgccagcuuccagugcaacagcagcaccugcaucccccagcugugggccugcgacaacgaccccgacugcgaggacggcagcgacgaguggccccagagaugcagaggccuguacguguuccagggcgacagcagccccugcagcgccuucgaguuccacugccugagcggcgagugcauccacagcagcuggagaugcgacggcggccccgacugcaaggacaagagcgacgaggagaacugcgccguggccaccugcagacccgacgaguuccagugcagcgacggcaacugcauccacggcagcagacagugcgacagagaguacgacugcaaggacaugagcgacgaggugggcugcgugaacgugacccugugcgagggccccaacaaguucaagugccacagcggcgagugcaucacccuggacaaggugugcaacauggccagagacugcagagacuggagcgacgagcccaucaaggagugcggcaccaacgagugccuggacaacaacggcggcugcagccacgugugcaacgaccugaagaucggcuacgagugccugugccccgacggcuuccagcugguggcccagagaagaugcgaggacaucgacgagugccaggaccccgacaccugcagccagcugugcgugaaccuggagggcggcuacaagugccagugcgaggagggcuuccagcuggacccccacaccaaggccugcaaggccgugggcagcaucgccuaccuguucuucaccaacagacacgaggugagaaagaugacccuggacagaagcgaguacaccagccugauccccaaccugagaaacgugguggcccuggacaccgagguggccagcaacagaaucuacuggagcgaccugagccagagaaugaucugcagcacccagcuggacagagcccacggcgugagcagcuacgacaccgugaucagcagagacauccaggcccccgacggccuggccguggacuggauccacagcaacaucuacuggaccgacagcgugcugggcaccgugagcguggccgacaccaagggcgugaagagaaagacccuguucagagagaacggcagcaagcccagagccaucgugguggaccccgugcacggcuucauguacuggaccgacuggggcacccccgccaagaucaagaagggcggccugaacggcguggacaucuacagccuggugaccgagaacauccaguggcccaacggcaucacccuggaccugcugagcggcagacuguacuggguggacagcaagcugcacagcaucagcagcaucgacgugaacggcggcaacagaaagaccauccuggaggacgagaagagacuggcccaccccuucagccuggccguguucgaggacaagguguucuggaccgacaucaucaacgaggccaucuucagcgccaacagacugaccggcagcgacgugaaccugcuggccgagaaccugcugagccccgaggacauggugcuguuccacaaccugacccagcccagaggcgugaacuggugcgagagaaccacccugagcaacggcggcugccaguaccugugccugcccgccccccagaucaacccccacagccccaaguucaccugcgccugccccgacggcaugcugcuggccagagacaugagaagcugccugaccgaggccgaggccgccguggccacccaggagaccagcaccgugagacugaaggugagcagcaccgccgugagaacccagcacaccaccaccagacccgugcccgacaccagcagacugcccggcgccacccccggccugaccaccguggagaucgugaccaugagccaccaggcccugggcgacguggccggcagaggcaacgagaagaagcccagcagcgugagagcccugagcaucgugcugcccaucgugcugcugguguuccugugccugggcguguuccugcuguggaagaacuggagacugaagaacaucaacagcaucaacuucgacaaccccguguaccagaagaccaccgaggacgaggugcacaucugccacaaccaggacggcuacagcuaccccagcagacagauggugagccuggaggacgacguggccuga

SEQ ID NO: 2154 - RNA, 2583 nt, Artificial Sequence
  derived and/or modified sequence opt5 from LDLR__Homo_sapiens__AAA56833
augggccccuggggguggaagcugagauggaccguggcccuccugcuugcugccgcgggaacagcugucggcgaccggugcgagcgcaacgaguuccagugucaagaugggaaaugcaucagcuacaaguggguuugugacggauccgccgaaugccaggauggcucugacgaaagccaggagacgugucuguccgugaccugcaaaucuggggauuuuagcuguggaggcagagugaaucggugcauuccucaguucuggcgcugugacggccaagucgauugcgacaacggguccgaugaacagggauguccgcccaagacaugcucucaggacgaguuuagaugccacgauggcaaauguaucagccggcaguucgugugcgacuccgaucgcgacugucucgacgggagcgaugaggccucuugcccuguucugaccuguggacccgcuuccuuucaaugcaauagcucuacauguauuccucagcuuugggccugcgacaacgaucccgacugugaagauggcuccgacgaguggccucagagaugccgggggcuguauguguuccagggagauagcucuccguguuccgcuuuugaguuccauugccucagcggcgaaugcauccacuccucuuggcgcugugacggcgggcccgauugcaaggacaagagcgaugaggaaaauugugccgucgcgaccugcagaccugacgaguuucaauguuccgacggaaacugcauucauggcagccggcagugugaucgcgaauacgacugcaaagauaugucugacgaggugggguguguuaaugugacacugugcgaaggacccaacaaguucaaaugucacuccggcgagugcaucacccuggauaaggucugcaauauggccagagacugucgggauuggagcgacgagccuaucaaagaaugcgggacgaacgagugucucgauaauaacggaggcugcucucauguguguaaugaccugaagauuggcuaugaaugccuuugucccgauggguuucagcugguggcucaacgcagaugcgaggacaucgaugaaugucaggacccggauaccugcagccagcucugugucaaccuggagggaggcuacaagugccagugcgaggaaggguuccaacuugacccucacacaaaagccuguaaggcuguuggauccauugccuaucuguuuuucaccaaucggcacgaggugagaaaaaugacacucgaccgcucugaauacaccagccugauccccaaccugcggaacguggucgcgcucgauacggagguggccuccaauagaauuuauuggagcgaccugucucagcgcaugaucugcuccacacagcuugaucgggcucauggcguuagcucuuacgacaccgugauuuccagagauauccaggccccugacgggcuggcugucgauuggauccacagcaacauuuacuggacagacuccgugcucggcaccguuucuguggccgauaccaagggagucaaacgcaagacacuguuccgggaaaauggcagcaaacccagagccaucguggucgaccccgugcauggguuuauguauuggacggauuggggaaccccugcuaagauuaagaaaggcgggcuuaacggaguugacaucuacucccuggugacagagaauauucaauggccgaacggcaucacccucgaccugcugucugggcgccucuauugggucgauagcaagcugcacuccaucagcucuauugacgugaauggcggaaaccggaaaacaauccuugaggaugaaaagagacuggcgcaccccuucucccucgccguuuuugaggacaaaguguucuggaccgauauuaucaaugaagcuauuuuuagcgccaaccgccugacgggcucugacgucaaucuucuggccgagaaccuccuguccccugaggauauggugcuguuccauaaucucacacagcccagaggggugaacuggugugaacggaccacccugagcaauggaggcugccaguaccuuugucugccugcuccccagaucaacccgcacucuccuaaguuuacaugcgccugucccgacgggaugcuccuggcgcgggauaugcgcagcugccugaccgaggcugaagccgccguugcuacacaagagacguccaccgucagacuuaaggugagcucuacagccgugcggacccagcauacaaccacgagaccuguccccgacaccucccgccucccuggagcuacacccggccugaccacaguggaaaucguuaccaugagccaccaggcccugggggauguggcgggccggggaaacgagaaaaagccguccucugucagagcccucagcauugugcugccuaucguucuucugguguuccucugucugggcgucuuucugcuuuggaaaaauuggcgccucaagaacauuaauuccaucaacuucgacaaucccguguaucagaaaacgacagaggacgaaguucauauuugccacaaccaagauggguacucuuaucccagcagacagauggugucccuggaggacgaugucgcuuga

SEQ ID NO: 2155 - protein, 433 aa, Artificial Sequence
  LGMN__Homo_sapiens__Q99538
MVWKVAVFLSVALGIGAVPIDDPEDGGKHWVVIVAGSNGWYNYRHQADACHAYQIIHRNGIPDEQIVVMMYDDIAYSEDNPTPGIVINRPNGTDVYQGVPKDYTGEDVTPQNFLAVLRGDAEAVKGIGSGKVLKSGPQDHVFIYFTDHGSTGILVFPNEDLHVKDLNETIHYMYKHKMYRKMVFYIEACESGSMMNHLPDNINVYATTAANPRESSYACYYDEKRSTYLGDWYSVNWMEDSDVEDLTKETLHKQYHLVKSHTNTSHVMQYGNKTISTMKVMQFQGMKRKASSPVPLPPVTHLDLTPSPDVPLTIMKRKLMNTNDLEESRQLTEEIQRHLDARHLIEKSVRKIVSLLAASEAEVEQLLSERAPLTGHSCYPEALLHFRTHCFNWHSPTYEYALRHLYVLVNLCEKPYPLHRIKLSMDHVCLGHY

SEQ ID NO: 2156 - RNA, 1302 nt, Artificial Sequence
  LGMN__Homo_sapiens__CAA70989
augguuuggaaaguagcuguauuccucaguguggcccugggcauuggugccguuccuauagaugauccugaagauggaggcaagcacuggguggugaucguggcagguucaaauggcugguauaauuauaggcaccaggcagacgcgugccaugccuaccagaucauucaccgcaaugggauuccugacgaacagaucguugugaugauguacgaugacauugcuuacucugaagacaaucccacuccaggaauugugaucaacaggcccaauggcacagaugucuaucagggagucccgaaggacuacacuggagaggauguuaccccacaaaauuuccuugcuguguugagaggcgaugcagaagcagugaagggcauaggauccggcaaaguccugaagaguggcccccaggaucacguguucauuuacuucacugaccauggaucuacuggaauacugguuuuucccaaugaagaucuucauguaaaggaccugaaugagaccauccauuacauguacaaacacaaaauguaccgaaagaugguguucuacauugaagccugugagucuggguccaugaugaaccaccugccggauaacaucaauguuuaugcaacuacugcugccaaccccagagagucguccuacgccuguuacuaugaugagaagagguccacguaccugggggacugguacagcgucaacuggauggaagacucggacguggaagaucugacuaaagagacccugcacaagcaguaccaccugguaaaaucgcacaccaacaccagccacgucaugcaguauggaaacaaaacaaucuccaccaugaaagugaugcaguuucaggguaugaaacgcaaagccaguucucccgucccccuaccuccagucacacaccuugaccucacccccagcccugaugugccucucaccaucaugaaaaggaaacugaugaacaccaaugaucuggaggaguccaggcagcucacggaggagauccagcggcaucuggaugccaggcaccucauugagaagucagugcguaagaucgucuccuugcuggcagcguccgaggcugagguggagcagcuccuguccgagagagccccgcucacggggcacagcugcuacccagaggcccugcugcacuuccggacccacugcuucaacuggcacucccccacguacgaguaugcguugagacauuuguacgugcuggucaaccuuugugagaagccguauccacuucacaggauaaaauuguccauggaccacgugugccuuggucacuacuga

SEQ ID NO: 2157 - RNA, 1302 nt, Artificial Sequence
  derived and/or modified sequence opt1 from LGMN__Homo_sapiens__CAA70989
augguguggaaggucgccguguuccugagcguggcccucggcaucggggcgguccccaucgacgacccggaggacggcgggaagcacuggguggugaucgucgccggcuccaacgggugguacaacuaccgccaccaggccgacgccugccacgccuaccagaucauccaccggaacggcauccccgacgagcagaucguggugaugauguacgacgacaucgcguacagcgaggacaaccccacccccggcaucgucaucaaccgcccgaacgggaccgacguguaccagggcgugcccaaggacuacacgggggaggacgucacgccccagaacuuccuggccgugcugcggggcgacgccgaggccgugaaggggaucggcuccggcaagguccucaagagcgggccccaggaccacguguucaucuacuucaccgaccacggcuccaccgggauccugguguucccgaacgaggaccugcacgucaaggaccucaacgagaccauccacuacauguacaagcacaagauguaccgcaagaugguguucuacaucgaggcgugcgagagcggcuccaugaugaaccaccuccccgacaacaucaacguguacgccaccaccgccgccaacccccgggagagcuccuacgccugcuacuacgacgagaagcgcagcaccuaccugggcgacugguacuccgucaacuggauggaggacagcgacguggaggaccugacgaaggagacccugcacaagcaguaccaccuggugaagucccacaccaacaccagccacgucaugcaguacgggaacaagacgaucuccaccaugaaggugaugcaguuccagggcaugaagcggaaggcgagcucccccgucccgcucccgcccgugacccaccuggaccugacccccagccccgacgugccccucacgaucaugaagcgcaagcugaugaacaccaacgaccuggaggagucccggcagcucaccgaggagauccagcgccaccuggacgcccggcaccugaucgagaaguccguccgcaagaucgugagccuccuggccgccagcgaggccgagguggagcagcugcucagcgagcgggcgccccugaccgggcacuccugcuaccccgaggcccugcuccacuuccgcacgcacugcuucaacuggcacagcccgaccuacgaguacgcccugcggcaccuguacguccucgugaaccugugcgagaagcccuacccccugcaccgcaucaagcucuccauggaccacgugugccugggccacuacuga

SEQ ID NO: 2158 - RNA, 1302 nt, Artificial Sequence
  derived and/or modified sequence opt2 from LGMN__Homo_sapiens__CAA70989
auggucuggaaggucgccgucuuccucuccgucgcccucggcaucggcgccguccccaucgacgaccccgaggacggcggcaagcacugggucgucaucgucgccggcuccaacggcugguacaacuaccgccaccaggccgacgccugccacgccuaccagaucauccaccgcaacggcauccccgacgagcagaucgucgucaugauguacgacgacaucgccuacuccgaggacaaccccacccccggcaucgucaucaaccgccccaacggcaccgacgucuaccagggcguccccaaggacuacaccggcgaggacgucaccccccagaacuuccucgccguccuccgcggcgacgccgaggccgucaagggcaucggcuccggcaagguccucaaguccggcccccaggaccacgucuucaucuacuucaccgaccacggcuccaccggcauccucgucuuccccaacgaggaccuccacgucaaggaccucaacgagaccauccacuacauguacaagcacaagauguaccgcaagauggucuucuacaucgaggccugcgaguccggcuccaugaugaaccaccuccccgacaacaucaacgucuacgccaccaccgccgccaacccccgcgaguccuccuacgccugcuacuacgacgagaagcgcuccaccuaccucggcgacugguacuccgucaacuggauggaggacuccgacgucgaggaccucaccaaggagacccuccacaagcaguaccaccucgucaagucccacaccaacaccucccacgucaugcaguacggcaacaagaccaucuccaccaugaaggucaugcaguuccagggcaugaagcgcaaggccuccucccccgucccccucccccccgucacccaccucgaccucacccccucccccgacgucccccucaccaucaugaagcgcaagcucaugaacaccaacgaccucgaggagucccgccagcucaccgaggagauccagcgccaccucgacgcccgccaccucaucgagaaguccguccgcaagaucgucucccuccucgccgccuccgaggccgaggucgagcagcuccucuccgagcgcgccccccucaccggccacuccugcuaccccgaggcccuccuccacuuccgcacccacugcuucaacuggcacucccccaccuacgaguacgcccuccgccaccucuacguccucgucaaccucugcgagaagcccuacccccuccaccgcaucaagcucuccauggaccacgucugccucggccacuacuga

SEQ ID NO: 2159 - RNA, 1302 nt, Artificial Sequence
  derived and/or modified sequence opt3 from LGMN__Homo_sapiens__CAA70989
augguguggaaggucgccguuuuccugagcguggcucucggcaucggggcaguacccauugacgauccugaggacggagguaaacacuggguggucauaguggccggcuccaacgggugguacaauuauagacaucaggcggaugcuugccacgccuaccaaaucauucauaggaacggaaucccagacgaacagauuguugugaugauguaugaugacaucgcauacucugaggauaauccgacccccggcauagucaucaaccggccuaaugguacagacguguaucaggggguaccaaaggauuacacuggagaagacguuacgccccagaacuuucuugccgugcugcgcggcgaugcugaggcagucaaaggcauugggucaggaaagguguugaaaagugguccucaagaccacguguucaucuauuuuaccgaucauggcagcacagggauuuuagucuucccaaaugaagaccugcacguuaaggaccuaaacgagacuauccacuacauguacaagcauaaaauguaucgaaagaugguguuuuacauagaggccugugaauccggaucuaugaugaaucaccuccccgauaacauuaauguauaugcuaccacagccgcgaacccucgugagucgucauacgcaugcuauuacgacgagaaaagaagcaccuaucugggcgauugguacagugugaauuggauggaagacuccgaugucgaggaccuuacuaaggaaacacugcauaaacaguaccacuuggugaagucucacaccaacacgagccauguuaugcaguaugguaauaagacuaucuccaccaugaaagugaugcaguuccaagggaugaagaggaaagccucaaguccagucccgcugcccccugugacacaccucgaucugacuccaagccccgacguaccucucaccauuaugaagcggaaauuaaugaacacaaacgaucuggaggaaucucgccagcuuaccgaggaaauccagagacauuuggacgcuaggcaccugaucgagaaguccguucggaaaauugugucacuacucgccgcaagcgaggcugaagucgagcagcugcuuagugaacgcgccccacugacgggacauucuuguuaccccgaggcguugcuccacuuucgaacucacugcuucaauuggcauuccccgacauaugaauacgcccugagacacuuauaugugcuggucaaccucugugagaagccuuacccccuucauaggauaaagcugagcauggaucacgugugcuugggccacuauuga

SEQ ID NO: 2160 - RNA, 1302 nt, Artificial Sequence
  derived and/or modified sequence opt4 from LGMN__Homo_sapiens__CAA70989
augguguggaagguggccguguuccugagcguggcccugggcaucggcgccgugcccaucgacgaccccgaggacggcggcaagcacuggguggugaucguggccggcagcaacggcugguacaacuacagacaccaggccgacgccugccacgccuaccagaucauccacagaaacggcauccccgacgagcagaucguggugaugauguacgacgacaucgccuacagcgaggacaaccccacccccggcaucgugaucaacagacccaacggcaccgacguguaccagggcgugcccaaggacuacaccggcgaggacgugaccccccagaacuuccuggccgugcugagaggcgacgccgaggccgugaagggcaucggcagcggcaaggugcugaagagcggcccccaggaccacguguucaucuacuucaccgaccacggcagcaccggcauccugguguuccccaacgaggaccugcacgugaaggaccugaacgagaccauccacuacauguacaagcacaagauguacagaaagaugguguucuacaucgaggccugcgagagcggcagcaugaugaaccaccugcccgacaacaucaacguguacgccaccaccgccgccaaccccagagagagcagcuacgccugcuacuacgacgagaagagaagcaccuaccugggcgacugguacagcgugaacuggauggaggacagcgacguggaggaccugaccaaggagacccugcacaagcaguaccaccuggugaagagccacaccaacaccagccacgugaugcaguacggcaacaagaccaucagcaccaugaaggugaugcaguuccagggcaugaagagaaaggccagcagccccgugccccugccccccgugacccaccuggaccugacccccagccccgacgugccccugaccaucaugaagagaaagcugaugaacaccaacgaccuggaggagagcagacagcugaccgaggagauccagagacaccuggacgccagacaccugaucgagaagagcgugagaaagaucgugagccugcuggccgccagcgaggccgagguggagcagcugcugagcgagagagccccccugaccggccacagcugcuaccccgaggcccugcugcacuucagaacccacugcuucaacuggcacagccccaccuacgaguacgcccugagacaccuguacgugcuggugaaccugugcgagaagcccuacccccugcacagaaucaagcugagcauggaccacgugugccugggccacuacuga

SEQ ID NO: 2161 - RNA, 1302 nt, Artificial Sequence
  derived and/or modified sequence opt5 from LGMN__Homo_sapiens__CAA70989
augguguggaaggucgccguuuuccugagcguggcucucggcaucggggccgugcccauugacgauccugaggacggaggcaaacacugggucgugaucguugcgggguccaacggaugguacaauuauagacaucaggcugaugccugccacgccuaccaaauuauccaucggaacggcauuccggacgaacagaucguggucaugauguaugaugacaucgcuuacucugaggauaaucccaccccugggauugugaucaaccgccccaauggaacagacguuuaucagggcgugccuaaggauuacacgggcgaagacgucacaccccagaacuuucuggccgugcuuagaggggaugcugaggccgugaaaggaauuggcagcgggaagguccugaaauccggaccucaagaccacguuuucaucuauuuuaccgaucauggcucuaccgggauucucguguucccgaaugaagaccugcacgugaaggaccuuaacgagacaauccacuacauguacaagcauaaaauguaucggaagauggucuuuuacauugaggcgugugaaagcggauccaugaugaaucaucugcccgauaacaucaauguguaugccaccacagcugccaacccucgcgagucuagcuacgcuugcuauuacgacgagaaaagauccaccuaucucggcgauugguacagcguuaauuggauggaggacucugauguggaggaccugacgaaggaaacccugcacaaacaguaccaccucgucaagucccacacaaacaccagccaugugaugcaguauggcaauaagacaaucucuaccaugaaaguuaugcaguuccaagggaugaagcggaaagccuccagccccgugccucugcccccggucacgcaccuugaucugacaccuucucccgacgugccucucaccauuaugaagcgcaaacugaugaacacaaacgaucuugaggaauccagacagcugaccgaggaaauccagcggcaucucgacgcgcgccaccugauugaaaagagcgucagaaaaaucgugucccugcucgccgcuucugaggccgaaguugagcagcugcuuagcgaacgggcuccccugaccggacauuccuguuaccccgaggcccuccugcacuuucgcacacacugcuucaauuggcauagcccuacguaugaauacgcccuuagacaccuguaugugcucgucaaccugugugagaagccguacccccugcaucggauuaagcucucuauggaucacgugugccugggccacuauuga

SEQ ID NO: 2162 - protein, 598 aa, Artificial Sequence
  LIRB2__Homo_sapiens__Q8N423
MTPIVTVLICLGLSLGPRTHVQTGTIPKPTLWAEPDSVITQGSPVTLSCQGSLEAQEYRLYREKKSASWITRIRPELVKNGQFHIPSITWEHTGRYGCQYYSRARWSELSDPLVLVMTGAYPKPTLSAQPSPVVTSGGRVTLQCESQVAFGGFILCKEGEEEHPQCLNSQPHARGSSRAIFSVGPVSPNRRWSHRCYGYDLNSPYVWSSPSDLLELLVPGVSKKPSLSVQPGPVVAPGESLTLQCVSDVGYDRFVLYKEGERDLRQLPGRQPQAGLSQANFTLGPVSRSYGGQYRCYGAHNLSSECSAPSDPLDILITGQIRGTPFISVQPGPTVASGENVTLLCQSWRQFHTFLLTKAGAADAPLRLRSIHEYPKYQAEFPMSPVTSAHAGTYRCYGSLNSDPYLLSHPSEPLELVVSGPSMGSSPPPTGPISTPAGPEDQPLTPTGSDPQSGLGRHLGVVIGILVAVVLLLLLLLLLFLILRHRRQGKHWTSTQRKADFQHPAGAVGPEPTDRGLQWRSSPAADAQEENLYAAVKDTQPEDGVEMDTRAAASEAPQDVTYAQLHSLTLRRKATEPPPSQEREPPAEPSIYATLAIH

SEQ ID NO: 2163 - RNA, 1797 nt, Artificial Sequence
  LIRB2__Homo_sapiens__AAL36991
augacccccaucgucacaguccugaucugucucgggcugagucugggccccaggacccacgugcagacagggaccauucccaagcccacccugugggcugagccagacucugugaucacccaggggagucccgucacccucaguugucaggggagccuugaagcccaggaguaccgucuauauagggagaaaaaaucagcaucuuggauuacacggauacgaccagagcuugugaagaacggccaguuccacaucccauccaucaccugggaacacacagggcgauauggcugucaguauuacagccgcgcucgguggucugagcucagugacccccuggugcuggugaugacaggagccuacccaaaacccacccucucagcccagcccagcccuguggugaccucaggaggaagggugacccuccagugugagucacagguggcauuuggcggcuucauucuguguaaggaaggagaagaagaacacccacaaugccugaacucccagccccaugcccgugggucgucccgcgccaucuucuccgugggccccgugagcccgaaucgcagguggucgcacaggugcuaugguuaugacuugaacucucccuauguguggucuucacccagugaucuccuggagcuccuggucccagguguuucuaagaagccaucacucucagugcagccggguccugucguggccccuggggaaagccugacccuccagugugucucugaugucggcuaugacagauuuguucuguacaaggagggggaacgugaccuucgccagcucccuggccggcagccccaggcugggcucucccaggccaacuucacccugggcccugugagccgcuccuacgggggccaguacagaugcuacggugcacacaaccucuccucugagugcucggcccccagcgacccccuggacauccugaucacaggacagauccguggcacacccuucaucucagugcagccaggccccacaguggccucaggagagaacgugacccugcugugucagucauggcggcaguuccacacuuuccuucugaccaaggcgggagcagcugaugccccacuccgucuaagaucaauacacgaauauccuaaguaccaggcugaauuccccaugaguccugugaccucagcccacgcggggaccuacaggugcuacggcucacucaacuccgaccccuaccugcugucucaccccagugagccccuggagcucguggucucaggacccuccauggguuccagccccccacccaccggucccaucuccacaccugcaggcccugaggaccagccccucacccccacugggucggauccccaaaguggucugggaaggcaccuggggguugugaucggcaucuugguggccgucguccuacugcuccuccuccuccuccuccucuuccucauccuccgacaucgacgucagggcaaacacuggacaucgacccagagaaaggcugauuuccaacauccugcaggggcuguggggccagagcccacagacagaggccugcaguggagguccagcccagcugccgacgcccaggaagaaaaccucuaugcugccgugaaggacacacagccugaagaugggguggagauggacacucgggcugcugcaucugaagccccccaggaugugaccuacgcccagcugcacagcuugacccucagacggaaggcaacugagccuccuccaucccaggaaagggaaccuccagcugagcccagcaucuacgccacccuggccauccacuag

SEQ ID NO: 2164 - RNA, 1797 nt, Artificial Sequence
  derived and/or modified sequence opt1 from LIRB2__Homo_sapiens__AAL36991
augacccccaucgugaccguccugaucugccucggccugagccuggggccgcgcacgcacgugcagaccggcaccauccccaagcccacccucugggccgagcccgacuccgugaucacgcaggggagcccggucacccuguccugccagggcagccuggaggcccaggaguaccggcucuaccgcgagaagaaguccgcgagcuggaucacccggauccgccccgagcuggugaagaacgggcaguuccacauccccuccaucaccugggagcacacgggccgguacggcugccaguacuacagccgcgcccggugguccgagcugagcgacccccucgugcuggucaugaccggggccuacccgaagcccacccuguccgcccagcccagccccguggugaccuccggcgggcgcgucacgcuccagugcgagagccagguggccuucggcggguucauccugugcaaggagggcgaggaggagcacccgcagugccugaacucccagccccacgcgcggggcagcucccgcgccaucuucagcguggggcccgucucccccaaccggcgcuggagccaccggugcuacggcuacgaccucaacagcccguacgugugguccagccccuccgaccugcuggagcuccuggugcccggggucagcaagaagcccucccugagcgugcagccgggccccguggucgcccccggcgagucccucacccugcagugcgugagcgacgugggguacgaccgcuucguccuguacaaggagggcgagcgggaccuccgccagcugcccgggcggcagccgcaggccggccugucccaggcgaacuucacccucgggcccgugagccgcuccuacggcggccaguaccggugcuacggggcccacaaccugagcuccgagugcagcgcccccuccgacccccuggacauccucaucaccggccagauccgcgggacgccguucaucagcgugcagcccggccccaccgucgccuccggggagaacgugacccugcugugccagagcuggcggcaguuccacaccuuccuccugacgaaggccggcgcggccgacgccccgcugcgccuccgcuccauccacgaguaccccaaguaccaggccgaguuccccaugagccccgucaccagcgcccacgcgggcaccuaccggugcuacgggucccugaacagcgacccguaccugcucucccaccccagcgagccccuggagcuggugguguccggccccagcaugggguccagcccgccgcccaccggccccaucuccacgcccgccgggcccgaggaccagccccucacccccaccggcagcgacccgcaguccggccuggggcgccaccugggcgucgugaucgggauccucguggccgucgugcugcugcuccugcugcugcuccugcuguuccucauccugcggcaccgccggcagggcaagcacuggaccagcacgcagcgcaaggccgacuuccagcaccccgccggcgcgguggggcccgagcccaccgaccggggccugcaguggcgcuccagcccggccgccgacgcccaggaggagaaccucuacgccgcggucaaggacacccagcccgaggacgggguggagauggacacccgggccgccgccuccgaggcgccccaggacgugacguacgcccagcugcacagccugacccuccgccggaaggccaccgagcccccgcccucccaggagcgcgagcccccggccgagcccagcaucuacgccacccuggcgauccacuga

SEQ ID NO: 2165 - RNA, 1797 nt, Artificial Sequence
  derived and/or modified sequence opt2 from LIRB2__Homo_sapiens__AAL36991
augacccccaucgucaccguccucaucugccucggccucucccucggcccccgcacccacguccagaccggcaccauccccaagcccacccucugggccgagcccgacuccgucaucacccagggcucccccgucacccucuccugccagggcucccucgaggcccaggaguaccgccucuaccgcgagaagaaguccgccuccuggaucacccgcauccgccccgagcucgucaagaacggccaguuccacauccccuccaucaccugggagcacaccggccgcuacggcugccaguacuacucccgcgcccgcugguccgagcucuccgacccccucguccucgucaugaccggcgccuaccccaagcccacccucuccgcccagcccucccccgucgucaccuccggcggccgcgucacccuccagugcgagucccaggucgccuucggcggcuucauccucugcaaggagggcgaggaggagcacccccagugccucaacucccagccccacgcccgcggcuccucccgcgccaucuucuccgucggccccgucucccccaaccgccgcuggucccaccgcugcuacggcuacgaccucaacucccccuacgucugguccucccccuccgaccuccucgagcuccucguccccggcgucuccaagaagcccucccucuccguccagcccggccccgucgucgcccccggcgagucccucacccuccagugcgucuccgacgucggcuacgaccgcuucguccucuacaaggagggcgagcgcgaccuccgccagcuccccggccgccagccccaggccggccucucccaggccaacuucacccucggccccgucucccgcuccuacggcggccaguaccgcugcuacggcgcccacaaccucuccuccgagugcuccgcccccuccgacccccucgacauccucaucaccggccagauccgcggcacccccuucaucuccguccagcccggccccaccgucgccuccggcgagaacgucacccuccucugccaguccuggcgccaguuccacaccuuccuccucaccaaggccggcgccgccgacgccccccuccgccuccgcuccauccacgaguaccccaaguaccaggccgaguuccccaugucccccgucaccuccgcccacgccggcaccuaccgcugcuacggcucccucaacuccgaccccuaccuccucucccaccccuccgagccccucgagcucgucgucuccggccccuccaugggcuccucccccccccccaccggccccaucuccacccccgccggccccgaggaccagccccucacccccaccggcuccgacccccaguccggccucggccgccaccucggcgucgucaucggcauccucgucgccgucguccuccuccuccuccuccuccuccuccucuuccucauccuccgccaccgccgccagggcaagcacuggaccuccacccagcgcaaggccgacuuccagcaccccgccggcgccgucggccccgagcccaccgaccgcggccuccaguggcgcuccucccccgccgccgacgcccaggaggagaaccucuacgccgccgucaaggacacccagcccgaggacggcgucgagauggacacccgcgccgccgccuccgaggccccccaggacgucaccuacgcccagcuccacucccucacccuccgccgcaaggccaccgagcccccccccucccaggagcgcgagccccccgccgagcccuccaucuacgccacccucgccauccacuga

SEQ ID NO: 2166 - RNA, 1797 nt, Artificial Sequence
  derived and/or modified sequence opt3 from LIRB2__Homo_sapiens__AAL36991
augacccccaucgugacaguccugauuugccucggccuuagccuggggccuagaacucacguucagacgggaaccauaccaaagccgacauugugggccgagcccgacuccgugaucacucaagguucuccuguaaccuuaucaugucagggcagucuggaagcucaggaguacaggcuauaucgggagaaaaagagcgcauccuggauuacacgcauccgaccagagcucgugaaaaacgggcaguuccauauucccucuaucaccugggaacacacuggacguuacggcugccaauauuacucgagagccagguggucagagcugagcgauccucuuguccuggugaugacaggugcguauccaaagcccaccuugagugcucagccuuccccaguugugacgucugggggacgggucacucuccagugugagagccagguggccuuuggcggcuucauacugugcaaagaaggggaggaagaacauccgcaaugucugaacucccagccccacgcacgcggaucaaguagagccaucuuuagcguagguccuguuucuccaaauaggcgguggucccaucgcugcuacggcuaugaccucaauucacccuacguguggagcaguccuucugauuuacuggagcuuuuggucccagggguguccaagaagcccagccugucggugcagccgggaccugucguugcucccggcgaaucucuaacccuccaguguguguccgacguagguuacgaucgauucgugcuguauaaagagggggaaagagaccuuaggcaacugccaggacggcagccucaggcaggcuugucacaagccaacuuuacacucggccccgucagucguagcuacgggggacaguaucgcugcuacggugcucacaaucuguccucugaguguagcgccccaucagaucccuuagacauucugaucacuggccagauuagagggaccccuuucaucagugugcagccaggaccgacaguugcguccggcgaaaacgugacccuccuuugccaaagcuggaggcaguuucacacguuccuguugacuaaggccggugccgcugaugcaccccuacggcugcgaucuauacaugaguauccuaaauaccaggcagaguuuccaaugucacccgucacaagugcucacgccgggaccuaucgcuguuacggcagccucaauuccgacccuuaccugcuuucucauccaucggaaccccuggaguuggugguaagcggaccguccaugggcucaaguccuccacccacugggccuauuucuacacccgcgggaccagaagaucagccucucacccccacggguagcgacccacaauccggccuggggagacacuuaggaguugugaucggcauucuggucgccgugguccuacuccugcuuuugcugcuccugcuuuuccugaucuugaggcaccggcgccaggguaagcauuggaccucaacacagagaaaagcagauuuucagcacccggcuggggccgugggcccugagcccacugacaggggacuccaauggcguagcucuccagcugccgacgcacaggaagagaaccuguaugccgcuguuaaggauacccagcccgaggacggcguggaaauggauacacgggcggcagccuccgaggcuccucaggacguaacuuacgcccaauuacauagucugacccuacgaagaaaggcaacagaaccacccccuagccaggagagggaaccgccagccgagcccucuaucuaugcuacccucgccauucacuga

SEQ ID NO: 2167 - RNA, 1797 nt, Artificial Sequence
  derived and/or modified sequence opt4 from LIRB2__Homo_sapiens__AAL36991
augacccccaucgugaccgugcugaucugccugggccugagccugggccccagaacccacgugcagaccggcaccauccccaagcccacccugugggccgagcccgacagcgugaucacccagggcagccccgugacccugagcugccagggcagccuggaggcccaggaguacagacuguacagagagaagaagagcgccagcuggaucaccagaaucagacccgagcuggugaagaacggccaguuccacauccccagcaucaccugggagcacaccggcagauacggcugccaguacuacagcagagccagauggagcgagcugagcgacccccuggugcuggugaugaccggcgccuaccccaagcccacccugagcgcccagcccagccccguggugaccagcggcggcagagugacccugcagugcgagagccagguggccuucggcggcuucauccugugcaaggagggcgaggaggagcacccccagugccugaacagccagccccacgccagaggcagcagcagagccaucuucagcgugggccccgugagccccaacagaagauggagccacagaugcuacggcuacgaccugaacagccccuacguguggagcagccccagcgaccugcuggagcugcuggugcccggcgugagcaagaagcccagccugagcgugcagcccggccccgugguggcccccggcgagagccugacccugcagugcgugagcgacgugggcuacgacagauucgugcuguacaaggagggcgagagagaccugagacagcugcccggcagacagccccaggccggccugagccaggccaacuucacccugggccccgugagcagaagcuacggcggccaguacagaugcuacggcgcccacaaccugagcagcgagugcagcgcccccagcgacccccuggacauccugaucaccggccagaucagaggcacccccuucaucagcgugcagcccggccccaccguggccagcggcgagaacgugacccugcugugccagagcuggagacaguuccacaccuuccugcugaccaaggccggcgccgccgacgccccccugagacugagaagcauccacgaguaccccaaguaccaggccgaguuccccaugagccccgugaccagcgcccacgccggcaccuacagaugcuacggcagccugaacagcgaccccuaccugcugagccaccccagcgagccccuggagcugguggugagcggccccagcaugggcagcagccccccccccaccggccccaucagcacccccgccggccccgaggaccagccccugacccccaccggcagcgacccccagagcggccugggcagacaccugggcguggugaucggcauccugguggccguggugcugcugcugcugcugcugcugcugcuguuccugauccugagacacagaagacagggcaagcacuggaccagcacccagagaaaggccgacuuccagcaccccgccggcgccgugggccccgagcccaccgacagaggccugcaguggagaagcagccccgccgccgacgcccaggaggagaaccuguacgccgccgugaaggacacccagcccgaggacggcguggagauggacaccagagccgccgccagcgaggccccccaggacgugaccuacgcccagcugcacagccugacccugagaagaaaggccaccgagcccccccccagccaggagagagagccccccgccgagcccagcaucuacgccacccuggccauccacuga

SEQ ID NO: 2168 - RNA, 1797 nt, Artificial Sequence
  derived and/or modified sequence opt5 from LIRB2__Homo_sapiens__AAL36991
augacccccaucgugacaguccugauuugccucggccugagccuugggccuagaacgcacguucagaccggaacaaucccgaagcccacccugugggccgagccugacuccgugauuacacaaggcucucccgugacccucagcugucaggggucccuggaagcucaggaguaccggcuuuaucgcgagaaaaagucugccagcuggaucacacggauuagaccugagcuggucaaaaacggacaguuccauauccccuccaucaccugggaacacacgggccgcuacgggugccaauauuacucuagagcgcgguggagcgagcucuccgauccucuggugcugguuaugaccggagcuuauccgaagcccacacucagcgcccagccuucucccguggucaccuccggcggccgcgugacacugcagugugagagccagguugccuuugggggauucauucuuugcaaagaaggcgaggaagaacauccucaaugucugaacucucagccccacgcuagaggguccagccgggccaucuuuucugugggaccggucuccccuaaucgcagauggagccaucggugcuacggcuaugaccucaauucccccuacguguggucuagcccuuccgaucugcuugagcugcucgugcccggggucagcaagaagcccucucuguccguucagccuggaccggugguggcucccggcgaaagccugacccuccagugugucucugacgugggcuacgaucgcuucguucuguauaaagagggggaaagagaccuucggcaacugccuggacgccagccccaggccggccucagccaagcgaacuuuacgcuggggccuguguccagaucuuacggaggccaguaucggugcuacggggcccacaaucuuagcuccgaguguagcgcucccucugauccgcuggacauucucaucacaggacagauuagaggcaccccuuucaucuccguccagcccggcccuacaguggccagcggggaaaacguuacccugcugugccaaucuuggcgccaguuucacaccuuccuccugacaaaggcuggagccgcggaugcuccccuucggcugagauccauucaugaguauccuaaauaccaggccgaguuucccaugagcccggugacguccgcccacgcuggcaccuaucgcuguuacgggucucucaauagcgacccuuaccugcuuucccaucccucugaaccccuggagcucgucgugagcggaccuuccaugggcagcucuccgcccccuacagggcccaucuccaccccugccggccccgaagaucagccucugacacccaccggaagcgacccgcaaucuggccuggggcggcaccucggagucgugaucggcauucugguugccgugguccuucugcuccugcugcuucuccugcuguuccucauccugagacaccgccggcaggggaagcauuggacguccacacagagaaaagcugauuuucagcacccugcgggagccgugggccccgagccuaccgaccgcgggcuucaauggcggagcucucccgcugccgacgcccaggaagagaaccuguaugcugccguuaaggauacccagccggaggacggcguggaaauggauacaagagcggcugccagcgaggccccucaggacgucaccuacgcucaacuccauucccugacacugcgccggaaggccacggaacccccucccagccaggagagagaacccccugcugagccgucuauuuaugccacccuugcgauccacuga

SEQ ID NO: 2169 - protein, 165 aa, Artificial Sequence
  LY6K__Homo_sapiens__Q17RY6
MALLALLLVVALPRVWTDANLTARQRDPEDSQRTDEGDNRVWCHVCERENTFECQNPRRCKWTEPYCVIAAVKIFPRFFMVAKQCSAGCAAMERPKPEEKRFLLEEPMPFFYLKCCKIRYCNLEGPPINSSVFKEYAGSMGESCGGLWLAILLLLASIAAGLSLS

SEQ ID NO: 2170 - RNA, 498 nt, Artificial Sequence
  LY6K__Homo_sapiens__CCDS6385.2
auggcgcugcucgccuugcugcuggucguggcccuaccgcggguguggacagacgccaaccugacugcgagacaacgagauccagaggacucccagcgaacggacgagggugacaauagaguguggugucauguuugugagagagaaaacacuuucgagugccagaacccaaggaggugcaaauggacagagccauacugcguuauagcggccgugaaaauauuuccacguuuuuucaugguugcgaagcagugcuccgcugguugugcagcgauggagagacccaagccagaggagaagcgguuucuccuggaagagcccaugcccuucuuuuaccucaaguguuguaaaauucgcuacugcaauuuagaggggccaccuaucaacucaucaguguucaaagaauaugcugggagcaugggugagagcuguggugggcuguggcuggccauccuccugcugcuggccuccauugcagccggccucagccugucuuga

SEQ ID NO: 2171 - RNA, 498 nt, Artificial Sequence
  derived and/or modified sequence opt1 from LY6K__Homo_sapiens__CCDS6385.2
auggcccugcucgcccugcugcucguggucgcgcugccccgcguguggaccgacgccaaccugaccgcccggcagcgcgacccggaggacagccagcggacggacgagggcgacaaccgcguguggugccacgucugcgagcgggagaacaccuucgagugccagaacccccgccggugcaaguggaccgagcccuacugcgugaucgccgccgugaagaucuucccccgcuucuucauggucgcgaagcagugcuccgccgggugcgccgccauggagcggccgaagcccgaggagaagcgcuuccuccuggaggagcccaugcccuucuucuaccugaagugcugcaagauccgguacugcaaccucgagggcccgcccaucaacagcuccguguucaaggaguacgcggggagcaugggcgaguccugcgggggccuguggcuggccauccuccugcugcucgccagcaucgccgccggccugucccugagcuga

SEQ ID NO: 2172 - RNA, 498 nt, Artificial Sequence
  derived and/or modified sequence opt2 from LY6K__Homo_sapiens__CCDS6385.2
auggcccuccucgcccuccuccucgucgucgcccucccccgcgucuggaccgacgccaaccucaccgcccgccagcgcgaccccgaggacucccagcgcaccgacgagggcgacaaccgcgucuggugccacgucugcgagcgcgagaacaccuucgagugccagaacccccgccgcugcaaguggaccgagcccuacugcgucaucgccgccgucaagaucuucccccgcuucuucauggucgccaagcagugcuccgccggcugcgccgccauggagcgccccaagcccgaggagaagcgcuuccuccucgaggagcccaugcccuucuucuaccucaagugcugcaagauccgcuacugcaaccucgagggcccccccaucaacuccuccgucuucaaggaguacgccggcuccaugggcgaguccugcggcggccucuggcucgccauccuccuccuccucgccuccaucgccgccggccucucccucuccuga

SEQ ID NO: 2173 - RNA, 498 nt, Artificial Sequence
  derived and/or modified sequence opt3 from LY6K__Homo_sapiens__CCDS6385.2
auggcccugcucgcacuucuguugguggucgcuuuacccagaguuuggaccgacgccaaccugacagcgaggcagcgggauccugaggacagccaacgcacugaugaaggcgacaaucgaguguggugccacguaugugagcgugaaaacacguucgagugccagaauccaagaagguguaaguggaccgaaccguacugcgugaucgcugccgucaaaauuuuuccccgguucuuuaugguggcaaagcaguguuccgccgggugcgcugcaauggagcgcccuaaaccagaggaaaagagauuccuacucgaggaacccaugccauuuuucuaucugaaauguugcaagauaagguacuguaaccuugagggaccucccaucaauucuucaguuuuuaaggaguaugccgguaguaugggcgaaagcugcgggggacugugguuggcuauucuccugcugcucgccuccaucgcggcaggcuuaucucugucguga

SEQ ID NO: 2174 - RNA, 498 nt, Artificial Sequence
  derived and/or modified sequence opt4 from LY6K__Homo_sapiens__CCDS6385.2
auggcccugcuggcccugcugcuggugguggcccugcccagaguguggaccgacgccaaccugaccgccagacagagagaccccgaggacagccagagaaccgacgagggcgacaacagaguguggugccacgugugcgagagagagaacaccuucgagugccagaaccccagaagaugcaaguggaccgagcccuacugcgugaucgccgccgugaagaucuuccccagauucuucaugguggccaagcagugcagcgccggcugcgccgccauggagagacccaagcccgaggagaagagauuccugcuggaggagcccaugcccuucuucuaccugaagugcugcaagaucagauacugcaaccuggagggcccccccaucaacagcagcguguucaaggaguacgccggcagcaugggcgagagcugcggcggccuguggcuggccauccugcugcugcuggccagcaucgccgccggccugagccugagcuga

SEQ ID NO: 2175 - RNA, 498 nt, Artificial Sequence
  derived and/or modified sequence opt5 from LY6K__Homo_sapiens__CCDS6385.2
auggcccugcucgcucugcuucugguggucgcccuccccagaguuuggaccgacgcgaaccugacagcucggcagcgcgauccugaggacagccaaagaacggaugaaggcgacaaucggguguggugccacgugugugagcgcgaaaacaccuucgagugccagaauccgagacgguguaaguggacagaacccuacugcgucaucgccgccgugaaaauuuuuccucgcuucuuuaugguugcuaagcaguguuccgccgggugcgcugccauggagagacccaaaccugaggaaaagcgguuccuucuggaggaacccaugccguuuuucuaucucaaauguugcaagauccgcuacuguaaccuggagggaccucccauuaauucuagcguguuuaaggaguaugcgggcuccaugggggaaucuugcggaggccuguggcucgccauccugcuucugcucgcuagcauugccgcugggcugucccuuucuuga

SEQ ID NO: 2176 - protein, 124 aa, Artificial Sequence
  MAGA5__Homo_sapiens__P43359
MSLEQKSQHCKPEEGLDTQEEALGLVGVQAATTEEQEAVSSSSPLVPGTLGEVPAAGSPGPLKSPQGASAIPTAIDFTLWRQSIKGSSNQEEEGPSTSPDPESVFRAALSKKVADLIHFLLLKY

SEQ ID NO: 2177 - RNA, 375 nt, Artificial Sequence
  MAGA5__Homo_sapiens__AAA68873
augucucuugagcagaagagucagcacugcaagccugaggaaggccuugacacccaagaagaggcccugggccuggugggugugcaggcugccacuacugaggagcaggaggcuguguccuccuccucuccucuggucccaggcacccugggggaggugccugcugcugggucaccagguccucucaagaguccucagggagccuccgccauccccacugccaucgauuucacucuauggaggcaauccauuaagggcuccagcaaccaagaagaggaggggccaagcaccuccccugacccagagucuguguuccgagcagcacucaguaagaagguggcugacuugauucauuuucugcuccucaaguauuaa

SEQ ID NO: 2178 - RNA, 375 nt, Artificial Sequence
  derived and/or modified sequence opt1 from MAGA5__Homo_sapiens__AAA68873
augagccuggagcagaagucccagcacugcaagcccgaggagggccucgacacccaggaggaggcccuggggcuggugggcguccaggccgcgaccacggaggagcaggaggccgugagcuccagcuccccgcucgugcccgggacccugggcgagguccccgccgccgggagccccggcccgcugaaguccccgcagggcgccagcgcgauccccaccgccaucgacuucacccucuggcgccaguccaucaaggggagcuccaaccaggaggaggagggccccagcacgucccccgaccccgagagcguguuccgggccgcccuguccaagaagguggcggaccugauccacuuccuccugcugaaguacuga

SEQ ID NO: 2179 - RNA, 375 nt, Artificial Sequence
  derived and/or modified sequence opt2 from MAGA5__Homo_sapiens__AAA68873
augucccucgagcagaagucccagcacugcaagcccgaggagggccucgacacccaggaggaggcccucggccucgucggcguccaggccgccaccaccgaggagcaggaggccgucuccuccuccuccccccucguccccggcacccucggcgagguccccgccgccggcucccccggcccccucaaguccccccagggcgccuccgccauccccaccgccaucgacuucacccucuggcgccaguccaucaagggcuccuccaaccaggaggaggagggccccuccaccucccccgaccccgaguccgucuuccgcgccgcccucuccaagaaggucgccgaccucauccacuuccuccuccucaaguacuga

SEQ ID NO: 2180 - RNA, 375 nt, Artificial Sequence
  derived and/or modified sequence opt3 from MAGA5__Homo_sapiens__AAA68873
augagccuggagcagaagucccaacacugcaaacccgaagagggccucgacacccaggaagaggcccuugggcuggugggaguccaggcugcaacaacugaggaacaggaggccguuucuucaaguagcccuuuggugccagguacguuaggcgaaguaccggcggcugggucccccggaccucugaagucuccacaaggcgccucggcaauccccaccgccauugauuucacacuauggagacagucaauaaaagguagcaguaaccaggaggaagaggggccuuccacuucuccagaccccgagagcguguuuagggcugcacucuccaagaaagucgccgaucugauccauuuccuucuguugaaguacuga

SEQ ID NO: 2181 - RNA, 375 nt, Artificial Sequence
  derived and/or modified sequence opt4 from MAGA5__Homo_sapiens__AAA68873
augagccuggagcagaagagccagcacugcaagcccgaggagggccuggacacccaggaggaggcccugggccuggugggcgugcaggccgccaccaccgaggagcaggaggccgugagcagcagcagcccccuggugcccggcacccugggcgaggugcccgccgccggcagccccggcccccugaagagcccccagggcgccagcgccauccccaccgccaucgacuucacccuguggagacagagcaucaagggcagcagcaaccaggaggaggagggccccagcaccagccccgaccccgagagcguguucagagccgcccugagcaagaagguggccgaccugauccacuuccugcugcugaaguacuga

SEQ ID NO: 2182 - RNA, 375 nt, Artificial Sequence
  derived and/or modified sequence opt5 from MAGA5__Homo_sapiens__AAA68873
augagccuggagcagaagucccaacacugcaaacccgaagagggccucgacacccaggaagaggcccuggggcuugugggaguccaggcugccacaacggaggaacaggaggcgguuucuagcuccucuccucuggugccgggcacccucggggaagugcccgcugccggaagcccuggcccccugaaguccccucaaggggccucugcuauccccacagccauugauuucacccuuuggagacagagcaucaaaggauccagcaaccaggaggaagagggcccuucuacauccccggaccccgagagcgucuuucgggcugcccugucuaagaaaguggcggaucucauucauuuccugcugcucaaguacuga

SEQ ID NO: 2183 - protein, 318 aa, Artificial Sequence
  MAGA8__Homo_sapiens__P43361
MLLGQKSQRYKAEEGLQAQGEAPGLMDVQIPTAEEQKAASSSSTLIMGTLEEVTDSGSPSPPQSPEGASSSLTVTDSTLWSQSDEGSSSNEEEGPSTSPDPAHLESLFREALDEKVAELVRFLLRKYQIKEPVTKAEMLESVIKNYKNHFPDIFSKASECMQVIFGIDVKEVDPAGHSYILVTCLGLSYDGLLGDDQSTPKTGLLIIVLGMILMEGSRAPEEAIWEALSVMGLYDGREHSVYWKLRKLLTQEWVQENYLEYRQAPGSDPVRYEFLWGPRALAETSYVKVLEHVVRVNARVRISYPSLHEEALGEEKGV

SEQ ID NO: 2184 - RNA, 957 nt, Artificial Sequence
  MAGA8__Homo_sapiens__AAH02455
augcuucuugggcagaagagucagcgcuacaaggcugaggaaggccuucaggcccaaggagaggcaccagggcuuauggaugugcagauucccacagcugaggagcagaaggcugcauccuccuccucuacucugaucaugggaacccuugaggaggugacugauucugggucaccaaguccuccccagaguccugagggugccuccucuucccugacugucaccgacagcacucuguggagccaauccgaugaggguuccagcagcaaugaagaggaggggccaagcaccuccccggacccagcucaccuggagucccuguuccgggaagcacuugaugagaaaguggcugaguuaguucguuuccugcuccgcaaauaucaaauuaaggagccggucacaaaggcagaaaugcuugagagugucaucaaaaauuacaagaaccacuuuccugauaucuucagcaaagccucugagugcaugcaggugaucuuuggcauugaugugaaggaaguggacccugccggccacuccuacauccuugucaccugccugggccucuccuaugauggccugcugggugaugaucagaguacgcccaagaccggccuccugauaaucguccugggcaugaucuuaauggagggcagccgcgccccggaggaggcaaucugggaagcguugagugugauggggcuguaugaugggagggagcacagugucuauuggaagcucaggaagcugcucacccaagagugggugcaggagaacuaccuggaguaccgccaggcgcccggcagugauccugugcgcuacgaguuccugugggguccaagggcccuugcugaaaccagcuaugugaaaguccuggagcauguggucagggucaaugcaagaguucgcauuuccuacccaucccugcaugaagaggcuuugggagaggagaaaggaguuuga

SEQ ID NO: 2185 - RNA, 957 nt, Artificial Sequence
  derived and/or modified sequence opt1 from MAGA8__Homo_sapiens__AAH02455
augcugcucggccagaagucccagcgcuacaaggccgaggaggggcugcaggcccagggcgaggcgcccgggcugauggacgugcagaucccgaccgccgaggagcagaaggccgccagcagcuccagcacccucaucaugggcacgcuggaggaggucaccgacuccgggagccccuccccgccccagagccccgagggcgccuccagcucccugaccgugaccgacagcacgcucuggucccagagcgacgagggcuccagcuccaacgaggaggaggggcccagcaccucccccgaccccgcgcaccuggagagccuguuccgggaggcccucgacgagaagguggccgagcugguccgcuuccugcuccggaaguaccagaucaaggagccggugaccaaggccgagaugcuggagagcgugaucaagaacuacaagaaccacuuccccgacaucuucuccaaggcgagcgagugcaugcaggucaucuucggcaucgacgugaaggagguggaccccgccgggcacuccuacauccuggugaccugccucggccugagcuacgacgggcugcucggcgacgaccaguccacgcccaagaccggccugcugaucaucguccucgggaugauccugauggagggcagccgcgccccggaggaggccaucugggaggcccuguccgugauggggcucuacgacggccgggagcacagcgucuacuggaagcugcgcaagcugcucacccaggagugggugcaggagaacuaccuggaguaccggcaggcgcccggcuccgaccccgugcgcuacgaguuccugugggggccccgggcccucgccgagaccagcuacgucaaggugcuggagcacgugguccgcgugaacgcccgggugcgcaucuccuacccgagccugcacgaggaggcccucggcgaggagaagggggucuga

SEQ ID NO: 2186 - RNA, 957 nt, Artificial Sequence
  derived and/or modified sequence opt2 from MAGA8__Homo_sapiens__AAH02455
augcuccucggccagaagucccagcgcuacaaggccgaggagggccuccaggcccagggcgaggcccccggccucauggacguccagauccccaccgccgaggagcagaaggccgccuccuccuccuccacccucaucaugggcacccucgaggaggucaccgacuccggcucccccucccccccccagucccccgagggcgccuccuccucccucaccgucaccgacuccacccucuggucccaguccgacgagggcuccuccuccaacgaggaggagggccccuccaccucccccgaccccgcccaccucgagucccucuuccgcgaggcccucgacgagaaggucgccgagcucguccgcuuccuccuccgcaaguaccagaucaaggagcccgucaccaaggccgagaugcucgaguccgucaucaagaacuacaagaaccacuuccccgacaucuucuccaaggccuccgagugcaugcaggucaucuucggcaucgacgucaaggaggucgaccccgccggccacuccuacauccucgucaccugccucggccucuccuacgacggccuccucggcgacgaccaguccacccccaagaccggccuccucaucaucguccucggcaugauccucauggagggcucccgcgcccccgaggaggccaucugggaggcccucuccgucaugggccucuacgacggccgcgagcacuccgucuacuggaagcuccgcaagcuccucacccaggaguggguccaggagaacuaccucgaguaccgccaggcccccggcuccgaccccguccgcuacgaguuccucuggggcccccgcgcccucgccgagaccuccuacgucaagguccucgagcacgucguccgcgucaacgcccgcguccgcaucuccuaccccucccuccacgaggaggcccucggcgaggagaagggcgucuga

SEQ ID NO: 2187 - RNA, 957 nt, Artificial Sequence
  derived and/or modified sequence opt3 from MAGA8__Homo_sapiens__AAH02455
augcugcucggccaaaagagccagagauacaaagccgaggaagggcuucaggcucagggagaggcacccggucugauggacgugcagaucccuaccgccgaggaacaaaaggcggcuuccucuucaaguacauugauuaugggcacuuuagaagaggucacggauagcggguccccaucuccgccccagucgccugagggagccucaagcagucugaccguuacagacuccacucuauggucucagagcgaugaaggcuccucaaguaacgaggaagaggguccaagcaccucucccgacccugcacaccucgagucccuguucagggaagcccuugaugagaaaguggcugaacugguacgguuuuugcuccgcaaguaucagauaaaagagccagugacaaaggcagaaaugcuggagucagucaucaagaauuacaaaaaccauuuccccgacauuuuuagcaaggccagugagugcaugcaagugaucuucgggauugauguuaaagaaguggacccugcuggacacucuuauauccuggucaccugucucggcuuauccuacgauggccugcuuggggacgaucagagcacuccaaagacaggauugcugauaaucgugcuagguaugauucucauggagggcucgcgagccccggaagaggcgaucugggaagcacugucuguaauggggcuuuaugacggacgugagcauuccguuuacuggaaacugagaaaguugcucacccaggagugggugcaggaaaauuaucuggaguacaggcaagcccccggcucagauccuguccgguacgaauuuuuaugggguccacgcgcucuggccgagacgaguuaugugaaggugcucgaacacgucguuagagugaacgcaaggguacggauuagcuaccccucccuucaugaggaggcucugggggaagagaaaggaguguga

SEQ ID NO: 2188 - RNA, 957 nt, Artificial Sequence
  derived and/or modified sequence opt4 from MAGA8__Homo_sapiens__AAH02455
augcugcugggccagaagagccagagauacaaggccgaggagggccugcaggcccagggcgaggcccccggccugauggacgugcagauccccaccgccgaggagcagaaggccgccagcagcagcagcacccugaucaugggcacccuggaggaggugaccgacagcggcagccccagccccccccagagccccgagggcgccagcagcagccugaccgugaccgacagcacccuguggagccagagcgacgagggcagcagcagcaacgaggaggagggccccagcaccagccccgaccccgcccaccuggagagccuguucagagaggcccuggacgagaagguggccgagcuggugagauuccugcugagaaaguaccagaucaaggagcccgugaccaaggccgagaugcuggagagcgugaucaagaacuacaagaaccacuuccccgacaucuucagcaaggccagcgagugcaugcaggugaucuucggcaucgacgugaaggagguggaccccgccggccacagcuacauccuggugaccugccugggccugagcuacgacggccugcugggcgacgaccagagcacccccaagaccggccugcugaucaucgugcugggcaugauccugauggagggcagcagagcccccgaggaggccaucugggaggcccugagcgugaugggccuguacgacggcagagagcacagcguguacuggaagcugagaaagcugcugacccaggagugggugcaggagaacuaccuggaguacagacaggcccccggcagcgaccccgugagauacgaguuccuguggggccccagagcccuggccgagaccagcuacgugaaggugcuggagcacguggugagagugaacgccagagugagaaucagcuaccccagccugcacgaggaggcccugggcgaggagaagggcguguga

SEQ ID NO: 2189 - RNA, 957 nt, Artificial Sequence
  derived and/or modified sequence opt5 from MAGA8__Homo_sapiens__AAH02455
augcugcucggccaaaagagccagagauacaaagccgaggaagggcugcaggcucagggagaggcccccggccuuauggacgugcagaucccuaccgcggaggaacaaaaggcugccuccucuagcuccacacugauuauggggacgcucgaagaggucaccgauucuggaagcccgucucccccucagucccccgagggcgccagcuccagccugacaguuaccgacucuacacuuuggucccagagcgaugaagggucuuccagcaacgaggaagagggaccuucuaccucccccgacccugcucaccuggagagccucuuccgggaagcccuggaugagaaaguggcugaacuggugcgcuuucuccugagaaaguaucagaucaaagagccggucacaaaggccgaaaugcuugaguccgugauuaagaauuacaaaaaccauuuccccgacaucuuuucuaaggcgagcgagugcaugcaaguuauuuucggcaucgaugugaaagaagucgacccugccggccacuccuauauccuggugaccugucucgggcugagcuacgauggacuucugggcgacgaucagucuacgcccaagaccgggcuccugauuaucguucugggaaugauucucauggagggcucccgggcuccugaagaggccaucugggaagcucugagcgugauggggcuuuaugacggacgcgagcauucugucuacuggaaacugagaaagcuccugacacaggagugggugcaggaaaauuaucuugaguaccggcaagcccccggcagcgauccggugcgcuacgaauuucuguggggcccuagagcgcucgccgagaccuccuaugucaagguucuggaacacguggugcgggucaacgcucgcgugagaauuucuuaccccagccugcaugaggaggcccucggggaagagaaaggaguuuga

SEQ ID NO: 2190 - protein, 429 aa, Artificial Sequence
  MAGAB__Homo_sapiens__P43364
METQFRRGGLGCSPASIKRKKKREDSGDFGLQVSTMFSEDDFQSTERAPYGPQLQWSQDLPRVQVFREQANLEDRSPRRTQRITGGEQVLWGPITQIFPTVRPADLTRVIMPLEQRSQHCKPEEGLQAQEEDLGLVGAQALQAEEQEAAFFSSTLNVGTLEELPAAESPSPPQSPQEESFSPTAMDAIFGSLSDEGSGSQEKEGPSTSPDLIDPESFSQDILHDKIIDLVHLLLRKYRVKGLITKAEMLGSVIKNYEDYFPEIFREASVCMQLLFGIDVKEVDPTSHSYVLVTSLNLSYDGIQCNEQSMPKSGLLIIVLGVIFMEGNCIPEEVMWEVLSIMGVYAGREHFLFGEPKRLLTQNWVQEKYLVYRQVPGTDPACYEFLWGPRAHAETSKMKVLEYIANANGRDPTSYPSLYEDALREEGEGV

SEQ ID NO: 2191 - RNA, 1290 nt, Artificial Sequence
  MAGAB__Homo_sapiens__AAH04479
auggagacucaguuccgcagagggggucuggggugcagcccugccagcaucaagaggaagaagaagagggaggacucaggagacuuuggacuccaggugagcacuauguucucagaggacgacuuccagucaacagaaagagccccauaugguccacaacuacaguggucccaggaucugccaagaguccagguuuuuagagaacaggccaaccuggaggacaggagucccaggagaacccagaggaucacuggaggagaacaagugcuguggggccccaucacccagauauuucccacaguucggccugcugaccuaaccagagucaucaugccucuugagcaaagaagucagcacugcaagccugaggaaggccuucaggcccaagaagaagaccugggccuggugggugcacaggcucuccaagcugaggagcaggaggcugccuucuucuccucuacucugaaugugggcacucuagaggaguugccugcugcugagucaccaaguccuccccagaguccucaggaagaguccuucucucccacugccauggaugccaucuuugggagccuaucugaugagggcucuggcagccaagaaaaggaggggccaaguaccucgccugaccugauagacccugaguccuuuucccaagauauacuacaugacaagauaauugauuugguucauuuauugcuccgcaaguaucgagucaaggggcugaucacaaaggcagaaaugcuggggagugucaucaaaaauuaugaggacuacuuuccugagauauuuagggaagccucuguaugcaugcaacugcucuuuggcauugaugugaaggaaguggaccccacuagccacuccuauguccuugucaccucccucaaccucucuuaugauggcauacaguguaaugagcagagcaugcccaagucuggccuccugauaauaguccuggguguaaucuucauggaggggaacugcaucccugaagagguuaugugggaaguccugagcauuauggggguguaugcuggaagggagcacuuccucuuuggggagcccaagaggcuccuuacccaaaauugggugcaggaaaaguaccugguguaccggcaggugcccggcacugauccugcaugcuaugaguuccugugggguccaagggcccacgcugagaccagcaagaugaaaguucuugaguacauagccaaugccaaugggagggaucccacuucuuacccaucccuguaugaagaugcuuugagagaggagggagagggagucuga

SEQ ID NO: 2192 - RNA, 1290 nt, Artificial Sequence
  derived and/or modified sequence opt1 from MAGAB__Homo_sapiens__AAH04479
auggagacccaguuccgccggggcgggcugggcugcagccccgccuccaucaagcgcaagaagaagcgggaggacagcggggacuucggccuccagguguccaccauguucagcgaggacgacuuccaguccacggagcgcgccccguacgggccccagcugcaguggagccaggaccugccccggguccagguguuccgcgagcaggcgaaccucgaggaccggagcccccgccggacccagcgcaucaccggcggcgagcagguccugugggggccgaucacccagaucuuccccacggugcggcccgccgaccugacccgcgugaucaugccccucgagcagcggucccagcacugcaagccggaggagggccugcaggcccaggaggaggaccuggggcucgugggcgcccaggcccugcaggcggaggagcaggaggccgccuucuucuccagcacccugaacgucgggacccucgaggagcugcccgccgcggagucccccagcccgccgcagagcccccaggaggaguccuucucccccacggccauggacgccaucuucggcagccuguccgacgagggcagcgggucccaggagaaggagggccccagcaccagcccggaccucaucgaccccgaguccuucagccaggacauccugcacgacaagaucaucgaccuggugcaccuccugcugcgcaaguaccgggugaaggggcucaucaccaaggccgagaugcugggcuccgucaucaagaacuacgaggacuacuuccccgagaucuuccgcgaggccagcgugugcaugcagcuccuguucggcaucgacgugaaggaggucgaccccaccucccacagcuacgugcuggugacgucccugaaccucagcuacgacgggauccagugcaacgagcaguccaugcccaagagcggccugcugaucaucguccucggggugaucuucauggagggcaacugcauccccgaggaggugaugugggagguccuguccaucauggggguguacgcgggccgggagcacuuccuguucggcgagcccaagcgccuccugacccagaacugggugcaggagaaguaccuggucuaccgccaggugcccgggaccgacccggccugcuacgaguuccucuggggcccccgggcccacgccgagaccagcaagaugaaggugcuggaguacaucgccaacgcgaacgggcgggaccccacguccuaccccagccuguacgaggacgcccuccgcgaggagggcgagggggucuga

SEQ ID NO: 2193 - RNA, 1290 nt, Artificial Sequence
  derived and/or modified sequence opt2 from MAGAB__Homo_sapiens__AAH04479
auggagacccaguuccgccgcggcggccucggcugcucccccgccuccaucaagcgcaagaagaagcgcgaggacuccggcgacuucggccuccaggucuccaccauguucuccgaggacgacuuccaguccaccgagcgcgcccccuacggcccccagcuccaguggucccaggaccucccccgcguccaggucuuccgcgagcaggccaaccucgaggaccgcuccccccgccgcacccagcgcaucaccggcggcgagcagguccucuggggccccaucacccagaucuuccccaccguccgccccgccgaccucacccgcgucaucaugccccucgagcagcgcucccagcacugcaagcccgaggagggccuccaggcccaggaggaggaccucggccucgucggcgcccaggcccuccaggccgaggagcaggaggccgccuucuucuccuccacccucaacgucggcacccucgaggagcuccccgccgccgagucccccucccccccccaguccccccaggaggaguccuucucccccaccgccauggacgccaucuucggcucccucuccgacgagggcuccggcucccaggagaaggagggccccuccaccucccccgaccucaucgaccccgaguccuucucccaggacauccuccacgacaagaucaucgaccucguccaccuccuccuccgcaaguaccgcgucaagggccucaucaccaaggccgagaugcucggcuccgucaucaagaacuacgaggacuacuuccccgagaucuuccgcgaggccuccgucugcaugcagcuccucuucggcaucgacgucaaggaggucgaccccaccucccacuccuacguccucgucaccucccucaaccucuccuacgacggcauccagugcaacgagcaguccaugcccaaguccggccuccucaucaucguccucggcgucaucuucauggagggcaacugcauccccgaggaggucaugugggagguccucuccaucaugggcgucuacgccggccgcgagcacuuccucuucggcgagcccaagcgccuccucacccagaacuggguccaggagaaguaccucgucuaccgccagguccccggcaccgaccccgccugcuacgaguuccucuggggcccccgcgcccacgccgagaccuccaagaugaagguccucgaguacaucgccaacgccaacggccgcgaccccaccuccuaccccucccucuacgaggacgcccuccgcgaggagggcgagggcgucuga

SEQ ID NO: 2194 - RNA, 1290 nt, Artificial Sequence
  derived and/or modified sequence opt3 from MAGAB__Homo_sapiens__AAH04479
auggagacccaguucagaaggggcgggcugggaugcagccccgccuccaucaagcggaaaaagaaacgcgaagacucuggugauuuuggccuccaagugucaacaauguucagugaggacgauuuucagagcacugaacgagcuccuuacgggccacagcuucaguggucccaagaccugccgcguguccagguuuucagagagcaggcaaacuuggaagauaggucuccccggcgcacgcagagaauuaccggaggcgagcaaguguuaugggguccuauaacacagaucuuuccaacuguaaggcccgccgaccugacccgggugauuaugccucuagagcagcgcucgcagcacuguaagccagaagaggggcuccaagcgcaggaagaggaucugggacuugucggcgcucaggcccugcaagcagaggaacaggaggccgcuuucuuuucaagcacauugaaugugggcacccucgaggaacugcccgcagccgaaaguccuuccccaccgcagucuccccaggaggagagcuucuccccuacugcuauggacgccaucuuugggucacugagugaugaaggaagcgguucucaagagaaagaaggcccauccacaucacccgaccucauugauccugagagcuucagucaggacaucuuacaugauaagauaaucgaccugguucaccuuuugcugcgaaaguauagagugaaagggcuaauuaccaaggcggaaaugcucggaucugucaucaaaaacuacgaggacuauuuuccagagauuuucagggaagcauccgugugcaugcagcugcuuuuuggcaucgauguaaaggagguugaccccacgagccauucguacgugcuggucacuucuuugaaucucuccuaugaugguauacaguguaacgaacaaucaaugccgaaaagugggcuguuaauuaucgugcugggagugauuuucauggagggcaauugcaucccugaagaggucaugugggagguucucagcaucaugggcguguacgccgggcgggaacacuuccuuuuuggagagcccaagcgucuguugacccagaacuggguacaggaaaaguaucuaguguaccgccaggucccagguacagacccugcuuguuacgaguuccuguggggccccagagcccaugcagagacuuccaaaaugaaggugcucgaauauauugcuaaugccaacgggagggauccaaccucuuaccccagccuguaugaggacgcgcuucgggaagagggagaaggcguuuga

SEQ ID NO: 2195 - RNA, 1290 nt, Artificial Sequence
  derived and/or modified sequence opt4 from MAGAB__Homo_sapiens__AAH04479
auggagacccaguucagaagaggcggccugggcugcagccccgccagcaucaagagaaagaagaagagagaggacagcggcgacuucggccugcaggugagcaccauguucagcgaggacgacuuccagagcaccgagagagcccccuacggcccccagcugcaguggagccaggaccugcccagagugcagguguucagagagcaggccaaccuggaggacagaagccccagaagaacccagagaaucaccggcggcgagcaggugcuguggggccccaucacccagaucuuccccaccgugagacccgccgaccugaccagagugaucaugccccuggagcagagaagccagcacugcaagcccgaggagggccugcaggcccaggaggaggaccugggccuggugggcgcccaggcccugcaggccgaggagcaggaggccgccuucuucagcagcacccugaacgugggcacccuggaggagcugcccgccgccgagagccccagccccccccagagcccccaggaggagagcuucagccccaccgccauggacgccaucuucggcagccugagcgacgagggcagcggcagccaggagaaggagggccccagcaccagccccgaccugaucgaccccgagagcuucagccaggacauccugcacgacaagaucaucgaccuggugcaccugcugcugagaaaguacagagugaagggccugaucaccaaggccgagaugcugggcagcgugaucaagaacuacgaggacuacuuccccgagaucuucagagaggccagcgugugcaugcagcugcuguucggcaucgacgugaaggagguggaccccaccagccacagcuacgugcuggugaccagccugaaccugagcuacgacggcauccagugcaacgagcagagcaugcccaagagcggccugcugaucaucgugcugggcgugaucuucauggagggcaacugcauccccgaggaggugaugugggaggugcugagcaucaugggcguguacgccggcagagagcacuuccuguucggcgagcccaagagacugcugacccagaacugggugcaggagaaguaccugguguacagacaggugcccggcaccgaccccgccugcuacgaguuccuguggggccccagagcccacgccgagaccagcaagaugaaggugcuggaguacaucgccaacgccaacggcagagaccccaccagcuaccccagccuguacgaggacgcccugagagaggagggcgagggcguguga

SEQ ID NO: 2196 - RNA, 1290 nt, Artificial Sequence
  derived and/or modified sequence opt5 from MAGAB__Homo_sapiens__AAH04479
auggagacccaguucagacggggcgggcugggaugcagccccgccuccaucaagcgcaaaaagaaaagagaagacucuggcgauuuugggcuccaagugagcacaauguucuccgaggacgauuuucagucuacggaacgggcuccuuacggaccgcagcugcaguggagccaagaccuuccccgcguccagguuuucagagagcaggccaaccuggaagaucgguccccucgcagaacccagcggauuacaggcggggagcaagugcucuggggacccaucacccagauuuuuccuacagugcgccccgcggaccugaccagagucaucaugccucuugagcagcggucucagcacuguaagccggaagagggccugcaagcucaggaagaggaucucggccuggugggggcccaggcccugcaagcugaggaacaggaggccgcuuucuuuagcuccacacucaauguuggaacccuggaggaacuucccgccgcggaaagcccuucucccccucagagcccccaggaggaguccuucucuccgacggccauggacgcuauuuuuggcucccugagcgaugaagggucuggaucccaagagaaagaaggcccuagcaccucccccgaccucaucgauccugagucuuucagccaggacauccugcaugauaagauuaucgaccuugugcaucugcuccugcgcaaguauagagucaaagggcugauuacaaaggccgaaaugcucggauccgugaucaaaaacuacgaggacuauuuucccgagauuuuccgggaagcuagcguuugcaugcagcugcuuuuuggcaucgaugugaaggaggucgaccccaccucucacuccuacgugcuggugacaagccucaaucugucuuaugauggcauucaguguaacgaacaaagcaugccuaaauccgggcuucugaucaucguccucggaguuauuuucauggagggcaauugcaucccggaagaggugaugugggaggugcugucuauuaugggggucuacgccggacgcgaacacuuccuguuuggcgagcccaagagacuccugacccagaacugggugcaggaaaaguaucuuguuuacagacaggugccugggacggaccccgcguguuacgaguuccuguggggaccucgggcccaugcugagacaagcaaaaugaagguccucgaauauaucgccaaugcuaacggccgcgaucccaccuccuacccgagccuguaugaggacgcccuucgggaagagggcgaagggguguga

SEQ ID NO: 2197 - protein, 369 aa, Artificial Sequence
  MAGE-A10__Homo_sapiens__A0A024RC14
MPRAPKRQRCMPEEDLQSQSETQGLEGAQAPLAVEEDASSSTSTSSSFPSSFPSSSSSSSSSCYPLIPSTPEEVSADDETPNPPQSAQIACSSPSVVASLPLDQSDEGSSSQKEESPSTLQVLPDSESLPRSEIDEKVTDLVQFLLFKYQMKEPITKAEILESVIKNYEDHFPLLFSEASECMLLVFGIDVKEVDPTGHSFVLVTSLGLTYDGMLSDVQSMPKTGILILILSIIFIEGYCTPEEVIWEALNMMGLYDGMEHLIYGEPRKLLTQDWVQENYLEYRQVPGSDPARYEFLWGPRAHAEIRKMSLLKFLAKVNGSDPRSFPLWYEEALKDEEERAQDRIATTDDTTAMASASSSATGSFSYPE

SEQ ID NO: 2198 - RNA, 1110 nt, Artificial Sequence
  MAGE-A10__Homo_sapiens__EAW99421
augccucgagcuccaaagcgucagcgcugcaugccugaagaagaucuucaaucccaaagugagacacagggccucgagggugcacaggcuccccuggcuguggaggaggaugcuucaucauccacuuccaccagcuccucuuuuccauccucuuuucccuccuccuccucuuccuccuccuccuccugcuauccucuaauaccaagcaccccagaggagguuucugcugaugaugagacaccaaauccuccccagagugcucagauagccugcuccucccccucggucguugcuucccuuccauuagaucaaucugaugagggcuccagcagccaaaaggaggagaguccaagcacccuacagguccugccagacagugagucuuuacccagaagugagauagaugaaaaggugacugauuuggugcaguuucugcucuucaaguaucaaaugaaggagccgaucacaaaggcagaaauacuggagagugucauaaaaaauuaugaagaccacuucccuuuguuguuuagugaagccuccgagugcaugcugcuggucuuuggcauugauguaaaggaaguggaucccacuggccacuccuuuguccuugucaccucccugggccucaccuaugaugggaugcugagugauguccagagcaugcccaagacuggcauucucauacuuauccuaagcauaaucuucauagagggcuacugcaccccugaggaggucaucugggaagcacugaauaugauggggcuguaugaugggauggagcaccucauuuauggggagcccaggaagcugcucacccaagauugggugcaggaaaacuaccuggaguaccggcaggugccuggcagugauccugcacgguaugaguuucugugggguccaagggcucaugcugaaauuaggaagaugagucuccugaaauuuuuggccaagguaaaugggagugauccaagauccuucccacugugguaugaggaggcuuugaaagaugaggaagagagagcccaggacagaauugccaccacagaugauacuacugccauggccagugcaaguucuagcgcuacagguagcuucuccuacccugaauaa

SEQ ID NO: 2199 - RNA, 1110 nt, Artificial Sequence
  derived and/or modified sequence opt1 from MAGE-A10__Homo_sapiens__EAW99421
augccccgcgccccgaagcggcagcgcugcaugcccgaggaggaccugcagagccaguccgagacccagggccucgagggggcccaggcgccccuggccguggaggaggacgccagcuccagcaccuccacgagcuccagcuuccccuccagcuucccguccagcuccagcuccagcuccagcuccugcuacccccugauccccagcacccccgaggaggucagcgccgacgacgagaccccgaacccgccccaguccgcccagaucgcgugcagcucccccagcgugguggccucccucccccuggaccagagcgacgagggcuccagcucccagaaggaggagagccccuccacccugcagguccuccccgacagcgagucccugccccggagcgagaucgacgagaaggugacggaccuggugcaguuccuccuguucaaguaccagaugaaggagccgaucaccaaggccgagauccuggaguccgucaucaagaacuacgaggaccacuucccccuccuguucagcgaggccuccgagugcaugcugcucguguucgggaucgacgugaaggaggucgaccccaccggccacagcuucgugcuggugaccucccuggggcucacguacgacggcaugcugagcgacguccagagcaugcccaagaccggcauccugauccucauccuguccaucaucuucaucgagggguacugcaccccggaggaggugaucugggaggcgcugaacaugaugggccucuacgacgggauggagcaccugaucuacggcgagccccgcaagcugcucacccaggacugggugcaggagaacuaccuggaguaccggcagguccccgggagcgaccccgcccgcuacgaguuccuguggggcccgcgggcccacgccgagauccgcaagaugucccuccugaaguuccuggccaaggugaacggcagcgacccccgguccuucccccucugguacgaggaggcgcugaaggacgaggaggagcgcgcccaggaccggaucgccacgaccgacgacaccaccgccauggccagcgcguccagcuccgccacggggagcuucuccuaccccgaguga

SEQ ID NO: 2200 - RNA, 1110 nt, Artificial Sequence
  derived and/or modified sequence opt2 from MAGE-A10__Homo_sapiens__EAW99421
augccccgcgcccccaagcgccagcgcugcaugcccgaggaggaccuccagucccaguccgagacccagggccucgagggcgcccaggccccccucgccgucgaggaggacgccuccuccuccaccuccaccuccuccuccuuccccuccuccuuccccuccuccuccuccuccuccuccuccuccugcuacccccucauccccuccacccccgaggaggucuccgccgacgacgagacccccaaccccccccaguccgcccagaucgccugcuccucccccuccgucgucgccucccucccccucgaccaguccgacgagggcuccuccucccagaaggaggagucccccuccacccuccagguccuccccgacuccgagucccucccccgcuccgagaucgacgagaaggucaccgaccucguccaguuccuccucuucaaguaccagaugaaggagcccaucaccaaggccgagauccucgaguccgucaucaagaacuacgaggaccacuucccccuccucuucuccgaggccuccgagugcaugcuccucgucuucggcaucgacgucaaggaggucgaccccaccggccacuccuucguccucgucaccucccucggccucaccuacgacggcaugcucuccgacguccaguccaugcccaagaccggcauccucauccucauccucuccaucaucuucaucgagggcuacugcacccccgaggaggucaucugggaggcccucaacaugaugggccucuacgacggcauggagcaccucaucuacggcgagccccgcaagcuccucacccaggacuggguccaggagaacuaccucgaguaccgccagguccccggcuccgaccccgcccgcuacgaguuccucuggggcccccgcgcccacgccgagauccgcaagaugucccuccucaaguuccucgccaaggucaacggcuccgacccccgcuccuucccccucugguacgaggaggcccucaaggacgaggaggagcgcgcccaggaccgcaucgccaccaccgacgacaccaccgccauggccuccgccuccuccuccgccaccggcuccuucuccuaccccgaguga

SEQ ID NO: 2201 - RNA, 1110 nt, Artificial Sequence
  derived and/or modified sequence opt3 from MAGE-A10__Homo_sapiens__EAW99421
augcccagagccccuaagaggcagcggugcaugccagaggaagaccugcaaagccaguccgagacccagggccucgaaggggcucaggcaccgcuugccguggaggaagaugcgucuucaaguacaagcacuuccucuucguuccccagcucauuuccuaguuccucuagcuccucaaguagcucuuguuacccacugauccccuccacgccugaggaggucucagcugacgaugaaaccccaaaucccccucaaagcgcccagauugcaugcaguucuccauccguuguggccagcuugccguuagaccagucggaugagggaucuuccucacagaaagaagagagucccagcacacugcaaguacuaccugacuccgagucucucccacgcagcgaaauagaugagaaggugacugaccugguccaguuccuucuguuuaaauaucagaugaaggaacccaucaccaaagcugagauuuuggaaucagugaucaagaacuacgaggaucacuucccucuccuguuuagugaggcauccgaauguaugcugcucguuuucgguauugacgugaaggaggucgauccaacaggccauagcuuuguguuaguaaccucucuggggcuuacuuaugacggaauguugucagauguucagaguaugcccaaaacaggcauccugauacuaauccucagcauuaucuucauugaagguuacugcaccccggaggaagugaucugggaggcccugaacaugauggggcuuuaugacggaauggagcaccugauauacggcgaaccucgaaaguugcucacgcaagacuggguccaggagaauuaucuggaauaccgucaggugcccggcuccgauccagcuagauacgaguuuuuaugggggccuagggcccaugcggaaauucggaaaaugucucugcucaaguuccuugcaaaagugaacggaucggacccccgcagcuuuccacugugguaugaggaggccuugaaggaugaagaggaaagagcucaagacaggaucgccacuaccgaugacacaacugcaauggcuuccgccucaaguucugcgaccgguagcuucuccuaccccgaguga

SEQ ID NO: 2202 - RNA, 1110 nt, Artificial Sequence
  derived and/or modified sequence opt4 from MAGE-A10__Homo_sapiens__EAW99421
augcccagagcccccaagagacagagaugcaugcccgaggaggaccugcagagccagagcgagacccagggccuggagggcgcccaggccccccuggccguggaggaggacgccagcagcagcaccagcaccagcagcagcuuccccagcagcuuccccagcagcagcagcagcagcagcagcagcugcuacccccugauccccagcacccccgaggaggugagcgccgacgacgagacccccaaccccccccagagcgcccagaucgccugcagcagccccagcgugguggccagccugccccuggaccagagcgacgagggcagcagcagccagaaggaggagagccccagcacccugcaggugcugcccgacagcgagagccugcccagaagcgagaucgacgagaaggugaccgaccuggugcaguuccugcuguucaaguaccagaugaaggagcccaucaccaaggccgagauccuggagagcgugaucaagaacuacgaggaccacuucccccugcuguucagcgaggccagcgagugcaugcugcugguguucggcaucgacgugaaggagguggaccccaccggccacagcuucgugcuggugaccagccugggccugaccuacgacggcaugcugagcgacgugcagagcaugcccaagaccggcauccugauccugauccugagcaucaucuucaucgagggcuacugcacccccgaggaggugaucugggaggcccugaacaugaugggccuguacgacggcauggagcaccugaucuacggcgagcccagaaagcugcugacccaggacugggugcaggagaacuaccuggaguacagacaggugcccggcagcgaccccgccagauacgaguuccuguggggccccagagcccacgccgagaucagaaagaugagccugcugaaguuccuggccaaggugaacggcagcgaccccagaagcuucccccugugguacgaggaggcccugaaggacgaggaggagagagcccaggacagaaucgccaccaccgacgacaccaccgccauggccagcgccagcagcagcgccaccggcagcuucagcuaccccgaguga

SEQ ID NO: 2203 - RNA, 1110 nt, Artificial Sequence
  derived and/or modified sequence opt5 from MAGE-A10__Homo_sapiens__EAW99421
augcccagagccccuaagcggcagcgcugcaugccggaggaagaccugcaaagccaguccgagacccagggacucgaaggggcucaggcgccccuggccguggaggaagaugcuucuagcuccacaucuacgagcuccucuuucccuagcuccuuucccagcagcuccucuucuuccuccucuuccuguuacccucuuauccccagcaccccugaggaggucuccgccgacgaugaaacaccgaaucccccucaaucugcccagauugcuugcagcucccccagcguuguggccucucugccucucgaccaguccgaugagggaagcucuagccagaaagaagagucccccucuacccugcaagugcuuccggacagcgagucccugccuagaagcgaaaucgaugagaaggucacagaccucgugcaguuccugcuguuuaaauaucagaugaaggaacccauuaccaaagcugagauccucgaaucuguuauuaagaacuacgaggaucacuucccucugcuuuuuagcgaggccagcgaauguaugcugcucguguucggcaucgacgucaaggagguggaucccacagggcauucuuuuguucuggugaccucccuuggacugacguaugacggcaugcucagcgauguccaguccaugcccaaaaccgggauccugauucugauccucucuauuaucuucauugaaggauacugcacaccugaggaagugaucugggaggcgcugaacaugaugggccuuuaugacggcauggagcaccugauuuacggggaaccgcggaagcuccugacccaagacugggugcaggagaauuaucuugaauaccgccagguccccggaagcgauccugccagauacgaguuucuguggggcccccgggcucaugccgaaauccgcaaaaugucccuccugaaguuccuggcuaaaguuaacgggucugacccucggagcuuuccccucugguaugaggaggcccugaaggaugaagaggaaagagcgcaagaccgcaucgccacaaccgaugacacgacagcuauggccuccgcuucuagcuccgccaccggcagcuucucuuacccggaguga

SEQ ID NO: 2204 - protein, 314 aa, Artificial Sequence
  MAGE-A12__Homo_sapiens__P43365
MPLEQRSQHCKPEEGLEAQGEALGLVGAQAPATEEQETASSSSTLVEVTLREVPAAESPSPPHSPQGASTLPTTINYTLWSQSDEGSSNEEQEGPSTFPDLETSFQVALSRKMAELVHFLLLKYRAREPFTKAEMLGSVIRNFQDFFPVIFSKASEYLQLVFGIEVVEVVRIGHLYILVTCLGLSYDGLLGDNQIVPKTGLLIIVLAIIAKEGDCAPEEKIWEELSVLEASDGREDSVFAHPRKLLTQDLVQENYLEYRQVPGSDPACYEFLWGPRALVETSYVKVLHHLLKISGGPHISYPPLHEWAFREGEE

SEQ ID NO: 2205 - RNA, 945 nt, Artificial Sequence
  MAGE-A12__Homo_sapiens__AAH03408
augccacuugagcagaggagucagcacugcaagccugaggaaggccuugaggcccaaggagaggcccugggcuuggugggugcgcaggcuccugcuacugaggagcaggagacugccuccuccuccucuacucuaguggaagucacccugcgggaggugccugcugccgagucaccaaguccuccccacaguccucagggagccuccacccuccccacuaccaucaacuauacucucuggagucaauccgaugagggcuccagcaacgaagaacaggaagggccaagcaccuuuccugaccuggagacgagcuuccaaguagcacucaguaggaagauggcugaguugguucauuuucugcuccucaaguaucgagccagggagccauucacaaaggcagaaaugcuggggagugucaucagaaauuuccaggacuucuuuccugugaucuucagcaaagccuccgaguacuugcagcuggucuuuggcaucgaggugguggaagugguccgcaucggccacuuguacauccuugucaccugccugggccucuccuacgauggccugcugggcgacaaucagaucgugcccaagacaggccuccugauaaucguccuggccauaaucgcaaaagagggcgacugugccccugaggagaaaaucugggaggagcugaguguguuggaggcaucugaugggagggaggacagugucuuugcgcaucccaggaagcugcucacccaagauuuggugcaggaaaacuaccuggaguaccggcagguccccggcagugauccugcaugcuacgaguuccugugggguccaagggcccucguugaaaccagcuaugugaaaguccugcaccauuugcuaaagaucaguggaggaccucacauuuccuacccaccccugcaugaaugggcuuuuagagagggggaagaguga

SEQ ID NO: 2206 - RNA, 945 nt, Artificial Sequence
  derived and/or modified sequence opt1 from MAGE-A12__Homo_sapiens__AAH03408
augccccuggagcagcgcagccagcacugcaagccggaggagggccucgaggcccagggggaggcccugggccuggugggggcgcaggcccccgccaccgaggagcaggagaccgccuccagcuccagcacgcucgucgaggugacccugcgggaggugcccgccgcggagucccccagcccgccccacagcccccagggcgccuccacccugcccaccacgaucaacuacacccucuggucccagagcgacgagggguccagcaacgaggagcaggagggcccguccaccuuccccgaccuggagaccagcuuccaggucgcccugucccgcaagauggccgagcucgugcacuuccugcugcucaaguaccgggcgcgcgagcccuucacgaaggccgagaugcugggcagcgugauccggaacuuccaggacuucuuccccgucaucuucuccaaggccagcgaguaccugcagcucguguucgggaucgagguggucgagguggugcgcaucggccaccuguacauccuggugaccugccucgggcuguccuacgacggccugcucggggacaaccagaucgucccgaagaccggccugcugaucaucgugcucgccaucaucgccaaggagggcgacugcgcgcccgaggagaagaucugggaggagcugagcguccuggaggccagcgacgggcgggaggacuccguguucgcccacccccgcaagcuccugacccaggaccuggugcaggagaacuaccucgaguaccggcagguccccggcagcgacccggccugcuacgaguuccugugggggccccgcgcccugguggagacguccuacgugaagguccuccaccaccuccugaagaucagcggcggcccccacaucuccuacccgccccugcacgagugggcguuccgggagggggaggaguga

SEQ ID NO: 2207 - RNA, 945 nt, Artificial Sequence
  derived and/or modified sequence opt2 from MAGE-A12__Homo_sapiens__AAH03408
augccccucgagcagcgcucccagcacugcaagcccgaggagggccucgaggcccagggcgaggcccucggccucgucggcgcccaggcccccgccaccgaggagcaggagaccgccuccuccuccuccacccucgucgaggucacccuccgcgagguccccgccgccgagucccccucccccccccacuccccccagggcgccuccacccuccccaccaccaucaacuacacccucuggucccaguccgacgagggcuccuccaacgaggagcaggagggccccuccaccuuccccgaccucgagaccuccuuccaggucgcccucucccgcaagauggccgagcucguccacuuccuccuccucaaguaccgcgcccgcgagcccuucaccaaggccgagaugcucggcuccgucauccgcaacuuccaggacuucuuccccgucaucuucuccaaggccuccgaguaccuccagcucgucuucggcaucgaggucgucgaggucguccgcaucggccaccucuacauccucgucaccugccucggccucuccuacgacggccuccucggcgacaaccagaucguccccaagaccggccuccucaucaucguccucgccaucaucgccaaggagggcgacugcgcccccgaggagaagaucugggaggagcucuccguccucgaggccuccgacggccgcgaggacuccgucuucgcccacccccgcaagcuccucacccaggaccucguccaggagaacuaccucgaguaccgccagguccccggcuccgaccccgccugcuacgaguuccucuggggcccccgcgcccucgucgagaccuccuacgucaagguccuccaccaccuccucaagaucuccggcggcccccacaucuccuaccccccccuccacgagugggccuuccgcgagggcgaggaguga

SEQ ID NO: 2208 - RNA, 945 nt, Artificial Sequence
  derived and/or modified sequence opt3 from MAGE-A12__Homo_sapiens__AAH03408
augccccuggagcagagaagccaacacugcaagccugaagagggccucgaagcccagggggaggcucuuggacuggugggugcacaggccccagcgaccgaagaacaggagacagcuuccucuucaaguacuuuggucgaaguuacguuaagggaggugccggccgcagaaagccccuccccuccacauucuccccaaggcgccucgacccugccuacaacuaucaacuacacccuauggucacagagcgacgaggggaguuccaaugaggaacaggagggaccaucuacauuccccgaucucgaaaccagcuuucagguagcucugucccggaaaauggcagagcuugugcacuuccuguugcucaaguaccgcgcccgagaaccuuuuacuaaagcugagaugcugggcucagucauucguaacuuccaagacuuuuucccagugauauuuaguaaggccagcgaguaccugcagcucguuuucgguaucgaaguggucgaggugguaagaauugggcauuuauauauccugguuacaugucuuggauugucuuacgauggccugcuaggcgacaaucagauugugccgaaaaccgggcuccugaucauaguccuugcgaucauugcaaaggaaggagauugcgcccccgaggaaaagaucugggaggagcuguccguguuggaggcuucagacgguagggaggauagcguguuugcccacccucggaaacuccugacgcaggacuuaguccaagaaaacuaucuggaguaccgccagguuccaggcagugaucccgcauguuaugaguuccucugggggccuagagcucuuguggaaacuucuuacguaaaggugcugcaucacuugcuaaaaauuuccggaggcccacacaucagcuaucccccgcugcaugagugggccuuuagggaaggugaggaauga

SEQ ID NO: 2209 - RNA, 945 nt, Artificial Sequence
  derived and/or modified sequence opt4 from MAGE-A12__Homo_sapiens__AAH03408
augccccuggagcagagaagccagcacugcaagcccgaggagggccuggaggcccagggcgaggcccugggccuggugggcgcccaggcccccgccaccgaggagcaggagaccgccagcagcagcagcacccugguggaggugacccugagagaggugcccgccgccgagagccccagccccccccacagcccccagggcgccagcacccugcccaccaccaucaacuacacccuguggagccagagcgacgagggcagcagcaacgaggagcaggagggccccagcaccuuccccgaccuggagaccagcuuccagguggcccugagcagaaagauggccgagcuggugcacuuccugcugcugaaguacagagccagagagcccuucaccaaggccgagaugcugggcagcgugaucagaaacuuccaggacuucuuccccgugaucuucagcaaggccagcgaguaccugcagcugguguucggcaucgaggugguggagguggugagaaucggccaccuguacauccuggugaccugccugggccugagcuacgacggccugcugggcgacaaccagaucgugcccaagaccggccugcugaucaucgugcuggccaucaucgccaaggagggcgacugcgcccccgaggagaagaucugggaggagcugagcgugcuggaggccagcgacggcagagaggacagcguguucgcccaccccagaaagcugcugacccaggaccuggugcaggagaacuaccuggaguacagacaggugcccggcagcgaccccgccugcuacgaguuccuguggggccccagagcccugguggagaccagcuacgugaaggugcugcaccaccugcugaagaucagcggcggcccccacaucagcuaccccccccugcacgagugggccuucagagagggcgaggaguga

SEQ ID NO: 2210 - RNA, 945 nt, Artificial Sequence
  derived and/or modified sequence opt5 from MAGE-A12__Homo_sapiens__AAH03408
augccccuggagcagagaagccaacacugcaagccugaagagggccucgaagcccagggggaggcucugggacuugugggcgcccaggcgccggcuaccgaagaacaggagacagccuccucuagcuccacgcuggucgaaguuacccuccgggaggugcccgccgcugaaucuccuagcccuccccauucuccccaaggggccuccacacugccuaccacaaucaacuacacccuuuggagccaguccgacgagggaagcucuaaugaggaacaggagggcccguccacauuccccgaucuggaaaccagcuuucagguggcucucucucgcaaaauggccgagcugguccacuuccugcuccugaaguacagagcgcgggaaccuuuuacgaaagccgagaugcuuggguccgugauucgcaacuuccaagacuuuuuccccguuaucuuuagcaaggcuucugaguaccugcagcucguguucggaauugaagucguggagguugugagaaucggccaucuguauauucuugucaccugucugggccucuccuacgaugggcugcugggagacaaucagaucgugccuaaaacaggccuccugaucauugugcuugccaucauugcuaaggaaggggauugcgcccccgaggaaaagaucugggaggagcugagcguccucgaagcguccgacggacgggaggauucuguuuuugcccacccgcgcaaacugcuuacccaggaccuggugcaagaaaacuaucucgaguacagacaggugccuggcagcgaucccgcuuguuaugaguuccugugggggccucgggcccuggucgagacauccuacgugaagguucuccaucaucugcuuaaaauuagcggaggcccccacaucucuuaucccccucugcacgagugggcuuuucgcgaaggcgaggaauga

SEQ ID NO: 2211 - protein, 309 aa, Artificial Sequence
  MAGE-A1__Homo_sapiens__P43355
MSLEQRSLHCKPEEALEAQQEALGLVCVQAATSSSSPLVLGTLEEVPTAGSTDPPQSPQGASAFPTTINFTRQRQPSEGSSSREEEGPSTSCILESLFRAVITKKVADLVGFLLLKYRAREPVTKAEMLESVIKNYKHCFPEIFGKASESLQLVFGIDVKEADPTGHSYVLVTCLGLSYDGLLGDNQIMPKTGFLIIVLVMIAMEGGHAPEEEIWEELSVMEVYDGREHSAYGEPRKLLTQDLVQEKYLEYRQVPDSDPARYEFLWGPRALAETSYVKVLEYVIKVSARVRFFFPSLREAALREEEEGV

SEQ ID NO: 2212 - RNA, 930 nt, Artificial Sequence
  MAGE-A1__Homo_sapiens__AAA03229
augucucuugagcagaggagucugcacugcaagccugaggaagcccuugaggcccaacaagaggcccugggccuggugugugugcaggcugccaccuccuccuccucuccucugguccugggcacccuggaggaggugcccacugcugggucaacagauccuccccagaguccucagggagccuccgccuuucccacuaccaucaacuucacucgacagaggcaacccagugaggguuccagcagccgugaagaggaggggccaagcaccucuuguauccuggaguccuuguuccgagcaguaaucacuaagaagguggcugauuugguugguuuucugcuccucaaauaucgagccagggagccagucacaaaggcagaaaugcuggagagugucaucaaaaauuacaagcacuguuuuccugagaucuucggcaaagccucugaguccuugcagcuggucuuuggcauugacgugaaggaagcagaccccaccggccacuccuauguccuugucaccugccuaggucucuccuaugauggccugcugggugauaaucagaucaugcccaagacaggcuuccugauaauuguccuggucaugauugcaauggagggcggccaugcuccugaggaggaaaucugggaggagcugagugugauggagguguaugaugggagggagcacagugccuauggggagcccaggaagcugcucacccaagauuuggugcaggaaaaguaccuggaguaccggcaggugccggacagugaucccgcacgcuaugaguuccugugggguccaagggcccucgcugaaaccagcuaugugaaaguccuugaguaugugaucaaggucagugcaagaguucgcuuuuucuucccaucccugcgugaagcagcuuugagagaggaggaagagggagucuga

SEQ ID NO: 2213 - RNA, 930 nt, Artificial Sequence
  derived and/or modified sequence opt1 from MAGE-A1__Homo_sapiens__AAA03229
augagccuggagcagcgcucccuccacugcaagcccgaggaggcccuggaggcccagcaggaggcgcugggccucgugugcguccaggccgccaccagcuccagcuccccgcuggugcuggggacccucgaggaggugcccacggccggcagcaccgacccgccccaguccccgcagggggccagcgcguuccccaccaccaucaacuucacgcggcagcgccagcccuccgagggcagcuccagccgggaggaggaggggcccuccaccagcugcauccuggagucccuguuccgcgccgucaucaccaagaagguggccgaccucgugggcuuccugcugcucaaguaccgggcccgcgagcccgucaccaaggcggagaugcuggagagcgugaucaagaacuacaagcacugcuuccccgagaucuucggcaaggccuccgagagccugcagcucguguucgggaucgacgucaaggaggccgaccccacgggccacuccuacgugcuggugaccugccuggggcucagcuacgacggccugcugggggacaaccagaucaugcccaagaccggcuuccucaucaucguccuggugaugaucgccauggagggcgggcacgccccggaggaggagaucugggaggagcugagcgugauggaggucuacgacggccgggagcacuccgcguacggggagccccgcaagcuccugacccaggaccuggugcaggagaaguaccucgaguaccgccaggugcccgacagcgaccccgcccgguacgaguuccuguggggcccgcgggcccuggccgagacguccuacgucaaggugcucgaguacgugaucaaggucagcgcccgcgugcgguucuucuuccccucccugcgcgaggcggcccugcgggaggaggaggagggcguguga

SEQ ID NO: 2214 - RNA, 930 nt, Artificial Sequence
  derived and/or modified sequence opt2 from MAGE-A1__Homo_sapiens__AAA03229
augucccucgagcagcgcucccuccacugcaagcccgaggaggcccucgaggcccagcaggaggcccucggccucgucugcguccaggccgccaccuccuccuccuccccccucguccucggcacccucgaggagguccccaccgccggcuccaccgaccccccccaguccccccagggcgccuccgccuuccccaccaccaucaacuucacccgccagcgccagcccuccgagggcuccuccucccgcgaggaggagggccccuccaccuccugcauccucgagucccucuuccgcgccgucaucaccaagaaggucgccgaccucgucggcuuccuccuccucaaguaccgcgcccgcgagcccgucaccaaggccgagaugcucgaguccgucaucaagaacuacaagcacugcuuccccgagaucuucggcaaggccuccgagucccuccagcucgucuucggcaucgacgucaaggaggccgaccccaccggccacuccuacguccucgucaccugccucggccucuccuacgacggccuccucggcgacaaccagaucaugcccaagaccggcuuccucaucaucguccucgucaugaucgccauggagggcggccacgcccccgaggaggagaucugggaggagcucuccgucauggaggucuacgacggccgcgagcacuccgccuacggcgagccccgcaagcuccucacccaggaccucguccaggagaaguaccucgaguaccgccagguccccgacuccgaccccgcccgcuacgaguuccucuggggcccccgcgcccucgccgagaccuccuacgucaagguccucgaguacgucaucaaggucuccgcccgcguccgcuucuucuuccccucccuccgcgaggccgcccuccgcgaggaggaggagggcgucuga

SEQ ID NO: 2215 - RNA, 930 nt, Artificial Sequence
  derived and/or modified sequence opt3 from MAGE-A1__Homo_sapiens__AAA03229
augagccuggagcagagaucccuccacugcaagcccgaagaggcccuugaagcucaacaggaggcacugggcuugguguguguccaggccgcgaccucuucaaguagcccuuuaguucuggggacacuagaagaggugccaacugcuggauccacggacccgccccagucuccucaaggugccucggcauucccaaccacaaucaacuuuacuaggcagcggcagcccucagagggcagcaguucccgcgaagaggaagggccuucuaccagcugcauucucgagucccuguuccgagccguaauaaccaaaaagguggcugaucuugucggauuucuguugcucaaauaccgugcaagagagccagugacaaaggccgaaaugcuggagucaguuaucaaaaauuauaagcauuguuuccccgaaauuuuuggcaaggcuagugagagccugcagcucguguucgguaucgacgucaaagaagccgauccuacugggcacucuuacguguuaguaacaugccugggacuuuccuaugacggcuugcugggcgauaaccaaauuaugccaaagaccggguuucuaaucauaguucucgugaugaucgcgauggagggaggucaugcaccggaggaagagauuugggaagaacugucagucauggaaguguacgacggcagggagcacagcgccuauggggagccccggaaacuucugacgcaggauuuggugcaggaaaaguaccucgaguaucgccaggucccugacagugauccagcuagauacgaguuccuguggggacccagggccuuagcagagacuucuuacguuaaagugcuggaauauguaaucaagguguccgcucggguccgcuuuuucuuuccuagccuccgagaggccgcgcuuagagaggaagaggaaggcguguga

SEQ ID NO: 2216 - RNA, 930 nt, Artificial Sequence
  derived and/or modified sequence opt4 from MAGE-A1__Homo_sapiens__AAA03229
augagccuggagcagagaagccugcacugcaagcccgaggaggcccuggaggcccagcaggaggcccugggccuggugugcgugcaggccgccaccagcagcagcagcccccuggugcugggcacccuggaggaggugcccaccgccggcagcaccgaccccccccagagcccccagggcgccagcgccuuccccaccaccaucaacuucaccagacagagacagcccagcgagggcagcagcagcagagaggaggagggccccagcaccagcugcauccuggagagccuguucagagccgugaucaccaagaagguggccgaccuggugggcuuccugcugcugaaguacagagccagagagcccgugaccaaggccgagaugcuggagagcgugaucaagaacuacaagcacugcuuccccgagaucuucggcaaggccagcgagagccugcagcugguguucggcaucgacgugaaggaggccgaccccaccggccacagcuacgugcuggugaccugccugggccugagcuacgacggccugcugggcgacaaccagaucaugcccaagaccggcuuccugaucaucgugcuggugaugaucgccauggagggcggccacgcccccgaggaggagaucugggaggagcugagcgugauggagguguacgacggcagagagcacagcgccuacggcgagcccagaaagcugcugacccaggaccuggugcaggagaaguaccuggaguacagacaggugcccgacagcgaccccgccagauacgaguuccuguggggccccagagcccuggccgagaccagcuacgugaaggugcuggaguacgugaucaaggugagcgccagagugagauucuucuuccccagccugagagaggccgcccugagagaggaggaggagggcguguga

SEQ ID NO: 2217 - RNA, 930 nt, Artificial Sequence
  derived and/or modified sequence opt5 from MAGE-A1__Homo_sapiens__AAA03229
augagccuggagcagagaucccuccacugcaagcccgaagaggcccuggaagcucaacaggaggcccuuggccugguguguguccaggcggcuaccucuagcuccucuccucucguucuggggacacuugaagaggugccgacggccggaagcaccgaucccccucagucuccccaaggcgccuccgcuuucccuacaaccaucaacuuuacacggcagcgccagcccagcgagggguccagcucuagagaagaggaaggaccuuccaccagcugcauucuggagucucucuuccgggccgugaucaccaaaaaggucgcugaccuggugggcuuucugcuccugaaauaccgcgccagagagccgguuacaaaggcggaaaugcuugaguccgugauuaaaaauuauaagcauuguuuccccgaaaucuuugggaaggccagcgagucucugcagcucgucuucggaauugacgugaaagaagcugauccuacgggccacuccuacguucuggugaccugccuuggccugagcuaugacgggcuccugggagauaaccaaaucaugcccaagacaggcuuucugaucauuguccucgugaugaucgccauggaagggggacaugcuccugaggaagagauuugggaggagcuguccgugauggaagucuacgacggccgggagcacucugccuauggggagccccgcaaacuucugacccaggaucucguucaggaaaaguaccuggaguauagacaggugccggacagcgauccugcgcgguacgaguuccuuuggggaccccgcgcccuggcugaaacauccuacgugaaaguccucgaauaugugaucaagguuagcgccagagugcgguuuuucuuuccuucucugcgcgaggcugcccugagagaggaagaggaaggcgucuga

SEQ ID NO: 2218 - protein, 314 aa, Artificial Sequence
  MAGE-A2__Homo_sapiens__P43356
MPLEQRSQHCKPEEGLEARGEALGLVGAQAPATEEQQTASSSSTLVEVTLGEVPAADSPSPPHSPQGASSFSTTINYTLWRQSDEGSSNQEEEGPRMFPDLESEFQAAISRKMVELVHFLLLKYRAREPVTKAEMLESVLRNCQDFFPVIFSKASEYLQLVFGIEVVEVVPISHLYILVTCLGLSYDGLLGDNQVMPKTGLLIIVLAIIAIEGDCAPEEKIWEELSMLEVFEGREDSVFAHPRKLLMQDLVQENYLEYRQVPGSDPACYEFLWGPRALIETSYVKVLHHTLKIGGEPHISYPPLHERALREGEE

SEQ ID NO: 2219 - RNA, 945 nt, Artificial Sequence
  MAGE-A2__Homo_sapiens__AAA17729
augccucuugagcagaggagucagcacugcaagccugaagaaggccuugaggcccgaggagaggcccugggccuggugggugcgcaggcuccugcuacugaggagcagcagaccgcuucuuccucuucuacucuaguggaaguuacccugggggaggugccugcugccgacucaccgaguccuccccacaguccucagggagccuccagcuucucgacuaccaucaacuacacucuuuggagacaauccgaugagggcuccagcaaccaagaagaggaggggccaagaauguuucccgaccuggaguccgaguuccaagcagcaaucaguaggaagaugguugaguugguucauuuucugcuccucaaguaucgagccagggagccggucacaaaggcagaaaugcuggagaguguccucagaaauugccaggacuucuuucccgugaucuucagcaaagccuccgaguacuugcagcuggucuuuggcaucgaggugguggaagugguccccaucagccacuuguacauccuugucaccugccugggccucuccuacgauggccugcugggcgacaaucaggucaugcccaagacaggccuccugauaaucguccuggccauaaucgcaauagagggcgacugugccccugaggagaaaaucugggaggagcugaguauguuggagguguuugaggggagggaggacagugucuucgcacaucccaggaagcugcucaugcaagaucuggugcaggaaaacuaccuggaguaccggcaggugcccggcagugauccugcaugcuacgaguuccugugggguccaagggcccucauugaaaccagcuaugugaaaguccugcaccauacacuaaagaucgguggagaaccucacauuuccuacccaccccugcaugaacgggcuuugagagagggagaagaguga

SEQ ID NO: 2220 - RNA, 945 nt, Artificial Sequence
  derived and/or modified sequence opt1 from MAGE-A2__Homo_sapiens__AAA17729
augccccuggagcagcgcagccagcacugcaagccggaggagggccucgaggcccgcggggaggcccugggccuggugggggcgcaggcccccgccaccgaggagcagcagaccgccuccagcuccagcacgcucgucgaggugacccugggcgaggugcccgccgcggacucccccagcccgccccacagcccccagggggccuccuccuucagcaccaccaucaacuacacgcuguggcggcaguccgacgagggcagcuccaaccaggaggaggagggcccccggauguucccggaccucgagagcgaguuccaggccgccaucucccgcaagauggucgagcuggugcacuuccugcuccugaaguaccgggcgcgcgagcccgugaccaaggccgagaugcuggagagcguccuccggaacugccaggacuucuuccccgugaucuucuccaaggccagcgaguaccugcagcugguguucgggaucgaggucguggaggugguccccaucucccaccucuacauccuggugaccugccugggccucagcuacgacgggcugcugggcgacaaccaggugaugccgaagaccgggcuccugaucaucguccuggccaucaucgccaucgagggcgacugcgcgcccgaggagaagaucugggaggagcucagcaugcuggagguguucgagggccgcgaggacuccguguucgcccacccccggaagcugcucaugcaggaccugguccaggagaacuaccuggaguaccgccaggugcccgggagcgacccggccugcuacgaguuccucuggggcccccgggcccugaucgagacguccuacgugaagguccugcaccacacccucaagaucgggggcgagccccacaucagcuacccgccccugcacgagcgcgcccugcgggagggcgaggaguga

SEQ ID NO: 2221 - RNA, 945 nt, Artificial Sequence
  derived and/or modified sequence opt2 from MAGE-A2__Homo_sapiens__AAA17729
augccccucgagcagcgcucccagcacugcaagcccgaggagggccucgaggcccgcggcgaggcccucggccucgucggcgcccaggcccccgccaccgaggagcagcagaccgccuccuccuccuccacccucgucgaggucacccucggcgagguccccgccgccgacucccccucccccccccacuccccccagggcgccuccuccuucuccaccaccaucaacuacacccucuggcgccaguccgacgagggcuccuccaaccaggaggaggagggcccccgcauguuccccgaccucgaguccgaguuccaggccgccaucucccgcaagauggucgagcucguccacuuccuccuccucaaguaccgcgcccgcgagcccgucaccaaggccgagaugcucgaguccguccuccgcaacugccaggacuucuuccccgucaucuucuccaaggccuccgaguaccuccagcucgucuucggcaucgaggucgucgaggucguccccaucucccaccucuacauccucgucaccugccucggccucuccuacgacggccuccucggcgacaaccaggucaugcccaagaccggccuccucaucaucguccucgccaucaucgccaucgagggcgacugcgcccccgaggagaagaucugggaggagcucuccaugcucgaggucuucgagggccgcgaggacuccgucuucgcccacccccgcaagcuccucaugcaggaccucguccaggagaacuaccucgaguaccgccagguccccggcuccgaccccgccugcuacgaguuccucuggggcccccgcgcccucaucgagaccuccuacgucaagguccuccaccacacccucaagaucggcggcgagccccacaucuccuaccccccccuccacgagcgcgcccuccgcgagggcgaggaguga

SEQ ID NO: 2222 - RNA, 945 nt, Artificial Sequence
  derived and/or modified sequence opt3 from MAGE-A2__Homo_sapiens__AAA17729
augccccuggagcagagaagccaacacugcaagccugaagagggccucgaagccaggggagaggcucuugggcuggugggugcacaggccccagcgaccgaggaacagcagacagcuuccucuucaaguacuuuggucgagguuacguuaggcgaagugccggccgcagacagccccuccccuccacauucuccccaaggggccucgucauucagcaccacaaucaacuacacucuguggcggcagagugaugagggauccucuaaucaggaagaggagggcccucgcauguuuccagaccuagaaagcgaguuccaggcugcaauuucccgaaaaaugguagaacucgugcacuuucugcuucugaaguaccgugccagagagcccgucaccaaagcugaaauguuggagucagugcucaggaacugucaagauuucuuuccuguuauauucaguaaggccagcgaguaccugcagcugguguuugguaucgaagucguggagguaguuccaauuucucaucucuauaucuuagugacaugccuggggcuuuccuacgacggauugcugggcgauaaucaggucaugccgaaaaccggccuacucauuaucgugcuggcgauaaucgcaauugaaggggacugugcccccgaggaaaagaucugggaggagcuuucaaugcuggaaguguucgagggacgggaagauagcgucuuugcucacccucgcaaguugcucaugcaggaccugguucaagagaacuauuuagaauacagacaggugccagguagugaucccgccugcuaugaguuccuguggggcccuagggcacucauugagacuucuuacguaaaagugcuucaucacacacugaagaucgggggagaaccacacauauccuaucccccguugcaugagcgggcucuacgcgaaggcgaggaguga

SEQ ID NO: 2223 - RNA, 945 nt, Artificial Sequence
  derived and/or modified sequence opt4 from MAGE-A2__Homo_sapiens__AAA17729
augccccuggagcagagaagccagcacugcaagcccgaggagggccuggaggccagaggcgaggcccugggccuggugggcgcccaggcccccgccaccgaggagcagcagaccgccagcagcagcagcacccugguggaggugacccugggcgaggugcccgccgccgacagccccagccccccccacagcccccagggcgccagcagcuucagcaccaccaucaacuacacccuguggagacagagcgacgagggcagcagcaaccaggaggaggagggccccagaauguuccccgaccuggagagcgaguuccaggccgccaucagcagaaagaugguggagcuggugcacuuccugcugcugaaguacagagccagagagcccgugaccaaggccgagaugcuggagagcgugcugagaaacugccaggacuucuuccccgugaucuucagcaaggccagcgaguaccugcagcugguguucggcaucgaggugguggagguggugcccaucagccaccuguacauccuggugaccugccugggccugagcuacgacggccugcugggcgacaaccaggugaugcccaagaccggccugcugaucaucgugcuggccaucaucgccaucgagggcgacugcgcccccgaggagaagaucugggaggagcugagcaugcuggagguguucgagggcagagaggacagcguguucgcccaccccagaaagcugcugaugcaggaccuggugcaggagaacuaccuggaguacagacaggugcccggcagcgaccccgccugcuacgaguuccuguggggccccagagcccugaucgagaccagcuacgugaaggugcugcaccacacccugaagaucggcggcgagccccacaucagcuaccccccccugcacgagagagcccugagagagggcgaggaguga

SEQ ID NO: 2224 - RNA, 945 nt, Artificial Sequence
  derived and/or modified sequence opt5 from MAGE-A2__Homo_sapiens__AAA17729
augccccuggagcagagaagccaacacugcaagccugaagagggccucgaagcccggggcgaggcucugggacuugugggcgcccaggcgccggcuaccgaggaacagcagacagccuccucuagcuccacgcuggucgagguuacccucggggaagugcccgccgcugacucuccuagcccuccccauucuccccaaggagccuccagcuucuccacaaccaucaacuacacacuguggcgccagagcgaugaggggucuuccaaucaggaagaggaggggccuagaauguuuccggaccuugaaagcgaguuccaggcugccauuucucggaaaaugguggaacugguccacuuucuccugcugaaguaccgcgcgagagagcccgugaccaaagccgaaaugcucgaguccguucugcggaacugucaagauuucuuuccugugaucuucagcaaggcuucugaguaccuucagcuggucuuuggaauugaagugguugaggugguccccaucucccaucucuauauucuggugacaugccuuggccugagcuacgacggccuccugggggauaaucaggugaugccuaaaaccggacugcucaucaucguccuggccauuaucgcuauugaaggcgacugugcccccgaggaaaagaucugggaggagcuuuccaugcuggaaguuuucgaggggcgcgaagauucuguguuugcgcacccgagaaagcuccugaugcaggaccuugugcaagagaacuaucuggaauaccggcaggucccuggaagcgaucccgccugcuaugaguuccucuggggcccucgcgcucugauugagacguccuacgugaaaguucugcaucacacccucaagaucgggggagaaccccacauuagcuaucccccucugcaugagagagcccuucgggaaggcgaggaguga

SEQ ID NO: 2225 - protein, 314 aa, Artificial Sequence
  MAGE-A3__Homo_sapiens__P43357
MPLEQRSQHCKPEEGLEARGEALGLVGAQAPATEEQEAASSSSTLVEVTLGEVPAAESPDPPQSPQGASSLPTTMNYPLWSQSYEDSSNQEEEGPSTFPDLESEFQAALSRKVAELVHFLLLKYRAREPVTKAEMLGSVVGNWQYFFPVIFSKASSSLQLVFGIELMEVDPIGHLYIFATCLGLSYDGLLGDNQIMPKAGLLIIVLAIIAREGDCAPEEKIWEELSVLEVFEGREDSILGDPKKLLTQHFVQENYLEYRQVPGSDPACYEFLWGPRALVETSYVKVLHHMVKISGGPHISYPPLHEWVLREGEE

SEQ ID NO: 2226 - RNA, 945 nt, Artificial Sequence
  MAGE-A3__Homo_sapiens__AAA17446
augccucuugagcagaggagucagcacugcaagccugaagaaggccuugaggcccgaggagaggcccugggccuggugggugcgcaggcuccugcuacugaggagcaggaggcugccuccuccucuucuacucuaguugaagucacccugggggaggugccugcugccgagucaccagauccuccccagaguccucagggagccuccagccuccccacuaccaugaacuacccucucuggagccaauccuaugaggacuccagcaaccaagaagaggaggggccaagcaccuucccugaccuggaguccgaguuccaagcagcacucaguaggaagguggccgaguugguucauuuucugcuccucaaguaucgagccagggagccggucacaaaggcagaaaugcuggggagugucgucggaaauuggcaguauuucuuuccugugaucuucagcaaagcuuccaguuccuugcagcuggucuuuggcaucgagcugauggaaguggaccccaucggccacuuguacaucuuugccaccugccugggccucuccuacgauggccugcugggugacaaucagaucaugcccaaggcaggccuccugauaaucguccuggccauaaucgcaagagagggcgacugugccccugaggagaaaaucugggaggagcugaguguguuagagguguuugaggggagggaagacaguaucuugggggaucccaagaagcugcucacccaacauuucgugcaggaaaacuaccuggaguaccggcagguccccggcagugauccugcauguuaugaauuccugugggguccaagggcccucguugaaaccagcuaugugaaaguccugcaccauaugguaaagaucaguggaggaccucacauuuccuacccaccccugcaugaguggguuuugagagagggggaagaguga

SEQ ID NO: 2227 - RNA, 945 nt, Artificial Sequence
  derived and/or modified sequence opt1 from MAGE-A3__Homo_sapiens__AAA17446
augccccuggagcagcgcagccagcacugcaagcccgaggagggccucgaggcccgcggggaggcccugggccuggugggggcgcaggcccccgccaccgaggagcaggaggccgccuccagcuccagcacccucgucgaggugacgcugggcgaggugcccgcggccgagucccccgacccgccccagagcccccagggggccuccagccugcccaccaccaugaacuacccgcucuggucccagagcuacgaggacuccagcaaccaggaggaggagggccccuccaccuuccccgaccuggagagcgaguuccaggccgcgcugucccggaaggucgccgagcucgugcacuuccugcugcucaaguaccgggcccgcgagcccgugacgaaggccgagaugcugggcagcgucguggggaacuggcaguacuucuucccggugaucuucuccaaggccagcuccagccugcagcucgucuucggcaucgagcugauggagguggaccccaucgggcaccuguacaucuucgcgaccugccucggccugagcuacgacgggcugcucggcgacaaccagaucaugcccaaggccggccugcugaucaucgugcucgccaucaucgcccgggagggggacugcgcccccgaggagaagaucugggaggagcuguccguccuggagguguucgagggccgcgaggacagcauccucggggacccgaagaagcugcugacccagcacuucgugcaggagaacuaccucgaguaccggcagguccccggcuccgaccccgcgugcuacgaguuccuguggggcccccgcgcccugguggagaccagcuacgugaagguccuccaccacauggugaagaucuccgggggcccgcacaucagcuacccgccccugcacgagugggugcugcgggagggggaggaguga

SEQ ID NO: 2228 - RNA, 945 nt, Artificial Sequence
  derived and/or modified sequence opt2 from MAGE-A3__Homo_sapiens__AAA17446
augccccucgagcagcgcucccagcacugcaagcccgaggagggccucgaggcccgcggcgaggcccucggccucgucggcgcccaggcccccgccaccgaggagcaggaggccgccuccuccuccuccacccucgucgaggucacccucggcgagguccccgccgccgagucccccgaccccccccaguccccccagggcgccuccucccuccccaccaccaugaacuacccccucuggucccaguccuacgaggacuccuccaaccaggaggaggagggccccuccaccuuccccgaccucgaguccgaguuccaggccgcccucucccgcaaggucgccgagcucguccacuuccuccuccucaaguaccgcgcccgcgagcccgucaccaaggccgagaugcucggcuccgucgucggcaacuggcaguacuucuuccccgucaucuucuccaaggccuccuccucccuccagcucgucuucggcaucgagcucauggaggucgaccccaucggccaccucuacaucuucgccaccugccucggccucuccuacgacggccuccucggcgacaaccagaucaugcccaaggccggccuccucaucaucguccucgccaucaucgcccgcgagggcgacugcgcccccgaggagaagaucugggaggagcucuccguccucgaggucuucgagggccgcgaggacuccauccucggcgaccccaagaagcuccucacccagcacuucguccaggagaacuaccucgaguaccgccagguccccggcuccgaccccgccugcuacgaguuccucuggggcccccgcgcccucgucgagaccuccuacgucaagguccuccaccacauggucaagaucuccggcggcccccacaucuccuaccccccccuccacgaguggguccuccgcgagggcgaggaguga

SEQ ID NO: 2229 - RNA, 945 nt, Artificial Sequence
  derived and/or modified sequence opt3 from MAGE-A3__Homo_sapiens__AAA17446
augccccuggagcagagaagccagcacugcaagccugaagagggccucgaagccaggggagaggcucuugggcuggugggugcacaggccccagcgaccgaggaacaggaggcugccuccucuucaaguacauuggucgaaguuacuuuaggcgaggugccggcagccgaaagccccgacccuccacagagcccccaaggggcuucuucgcugccuacgaccaugaacuacccacuauggucacagagcuaugaggauaguuccaaucaggaggaagagggacccucuacauucccugaccucgaaagcgaguuucaggcagcccugucccggaaaguagcugaacuugugcauuuccuguugcucaaguaccgcgcccgagagccagucacuaaagcggagaugcugggcucagugguugguaacuggcaauacuuuuucccggugaucuuuaguaaggcauccucuucccugcagcucgucuucgggauugaauuaauggagguggaucccauaggacaccuguauaucuuugccaccugucuuggcuugucauaugacggccugcuaggggauaaucagauuaugccuaaagcuggacuccugaucauuguacuugccaucauagcacgugaaggugacugcgcuccagaggaaaagaucugggaggagcugagcguuuuggaaguguucgagggcagagaagauaguauucucggggaccccaagaaacuguuaacacagcauuuuguccaagagaacuaccuggaauauaggcaagugccuggaucugauccagccuguuacgaguuccucuggggcccccgggcgcuuguggagaccuccuacgucaagguucugcaccauauggugaaaaucagcggugggccgcacauuucguauccucccuugcacgaauggguacuacgcgagggagaagaguga

SEQ ID NO: 2230 - RNA, 945 nt, Artificial Sequence
  derived and/or modified sequence opt4 from MAGE-A3__Homo_sapiens__AAA17446
augccccuggagcagagaagccagcacugcaagcccgaggagggccuggaggccagaggcgaggcccugggccuggugggcgcccaggcccccgccaccgaggagcaggaggccgccagcagcagcagcacccugguggaggugacccugggcgaggugcccgccgccgagagccccgaccccccccagagcccccagggcgccagcagccugcccaccaccaugaacuacccccuguggagccagagcuacgaggacagcagcaaccaggaggaggagggccccagcaccuuccccgaccuggagagcgaguuccaggccgcccugagcagaaagguggccgagcuggugcacuuccugcugcugaaguacagagccagagagcccgugaccaaggccgagaugcugggcagcguggugggcaacuggcaguacuucuuccccgugaucuucagcaaggccagcagcagccugcagcugguguucggcaucgagcugauggagguggaccccaucggccaccuguacaucuucgccaccugccugggccugagcuacgacggccugcugggcgacaaccagaucaugcccaaggccggccugcugaucaucgugcuggccaucaucgccagagagggcgacugcgcccccgaggagaagaucugggaggagcugagcgugcuggagguguucgagggcagagaggacagcauccugggcgaccccaagaagcugcugacccagcacuucgugcaggagaacuaccuggaguacagacaggugcccggcagcgaccccgccugcuacgaguuccuguggggccccagagcccugguggagaccagcuacgugaaggugcugcaccacauggugaagaucagcggcggcccccacaucagcuaccccccccugcacgagugggugcugagagagggcgaggaguga

SEQ ID NO: 2231 - RNA, 945 nt, Artificial Sequence
  derived and/or modified sequence opt5 from MAGE-A3__Homo_sapiens__AAA17446
augccccuggagcagagaagccaacacugcaagccugaagagggccucgaagcccgcggggaggcucugggacuugugggcgcccaggcgccggcuaccgaggaacaggaggccgccuccucuagcuccacacuggucgaaguuacgcucggggaggugcccgcugccgaaucuccugaucccccucagagcccccaaggagcuuccucucugccuaccacaaugaacuacccgcuuuggagccaguccuaugaggacagcucuaaucaggaggaagagggccccuccaccuucccugaccuggaaagcgaguuucaggccgcgcucucucggaaaguggccgaacugguccauuuccugcuccugaaguacagagcucgggagcccgugacaaaagccgagaugcuuggguccguugugggaaacuggcaauacuuuuucccugucaucuuuagcaaggcuucuuccagccugcagcucguguucggcauugaacugauggagguugaucccaucggccaccuuuauauuuuugccaccugucuggggcucuccuaugacggacugcugggcgauaaucagaucaugccgaaagcggggcuccugauuaucgugcuugccaucauugcucgcgaaggagacugcgccccugaggaaaagaucugggaggagcugucuguccucgaaguguucgagggcagagaagauagcauucugggggaccccaagaaacuucugacacagcauuuugugcaagagaacuaccucgaauaucggcaggucccuggauccgaucccgcuuguuacgaguuccuguggggcccccgcgcccugguugagaccagcuacgugaaggugcuccaccauauggucaaaaucucuggcgggccucacauuuccuauccgccccugcacgaaugggugcuuagagagggagaagaguga

SEQ ID NO: 2232 - protein, 317 aa, Artificial Sequence
  MAGE-A4__Homo_sapiens__A0A024RC12
MSSEQKSQHCKPEEGVEAQEEALGLVGAQAPTTEEQEAAVSSSSPLVPGTLEEVPAAESAGPPQSPQGASALPTTISFTCWRQPNEGSSSQEEEGPSTSPDAESLFREALSNKVDELAHFLLRKYRAKELVTKAEMLERVIKNYKRCFPVIFGKASESLKMIFGIDVKEVDPASNTYTLVTCLGLSYDGLLGNNQIFPKTGLLIIVLGTIAMEGDSASEEEIWEELGVMGVYDGREHTVYGEPRKLLTQDWVQENYLEYRQVPGSNPARYEFLWGPRALAETSYVKVLEHVVRVNARVRIAYPSLREAALLEEEEGV

SEQ ID NO: 2233 - RNA, 954 nt, Artificial Sequence
  MAGE-A4__Homo_sapiens__EAW99410
augucuucugagcagaagagucagcacugcaagccugaggaaggcguugaggcccaagaagaggcccugggccuggugggugcacaggcuccuacuacugaggagcaggaggcugcugucuccuccuccucuccucuggucccuggcacccuggaggaagugccugcugcugagucagcagguccuccccagaguccucagggagccucugccuuacccacuaccaucagcuucacuugcuggaggcaacccaaugaggguuccagcagccaagaagaggaggggccaagcaccucgccugacgcagaguccuuguuccgagaagcacucaguaacaagguggaugaguuggcucauuuucugcuccgcaaguaucgagccaaggagcuggucacaaaggcagaaaugcuggagagagucaucaaaaauuacaagcgcugcuuuccugugaucuucggcaaagccuccgagucccugaagaugaucuuuggcauugacgugaaggaaguggaccccgccagcaacaccuacacccuugucaccugccugggccuuuccuaugauggccugcuggguaauaaucagaucuuucccaagacaggccuucugauaaucguccugggcacaauugcaauggagggcgacagcgccucugaggaggaaaucugggaggagcugggugugauggggguguaugaugggagggagcacacugucuauggggagcccaggaaacugcucacccaagauugggugcaggaaaacuaccuggaguaccggcagguacccggcaguaauccugcgcgcuaugaguuccugugggguccaagggcucuggcugaaaccagcuaugugaaaguccuggagcauguggucagggucaaugcaagaguucgcauugccuacccaucccugcgugaagcagcuuuguuagaggaggaagagggagucuga

SEQ ID NO: 2234 - RNA, 954 nt, Artificial Sequence
  derived and/or modified sequence opt1 from MAGE-A4__Homo_sapiens__EAW99410
augagcuccgagcagaagucccagcacugcaagcccgaggagggcguggaggcccaggaggaggcccuggggcucgucggcgcgcaggccccgaccaccgaggagcaggaggccgccgugagcagcuccagcccccuggugcccgggacgcuggaggagguccccgccgcggaguccgccggcccgccccagagcccccagggggccuccgcccuccccaccaccaucagcuucacgugcuggcgccagccgaacgagggcuccagcucccaggaggaggagggccccagcaccucccccgacgcggagagccuguuccgggaggcccuguccaacaagguggacgagcucgcccacuuccugcugcgcaaguaccgggccaaggagcucgugaccaaggccgagaugcuggagcgcgucaucaagaacuacaagcggugcuuccccgugaucuucgggaaggcgagcgagucccugaagaugaucuucggcaucgacgugaaggaggucgacccggccagcaacaccuacacccucgugacgugccuggggcugagcuacgacggccuccuggggaacaaccagaucuuccccaagaccggccugcucaucaucgugcugggcaccaucgccauggagggggacuccgccagcgaggaggagaucugggaggagcugggcgucauggggguguacgacggccgcgagcacaccguguacggcgagccccggaagcuccugacgcaggacuggguccaggagaacuaccuggaguaccgccaggugcccggguccaacccggcccgguacgaguuccucuggggcccccgcgcgcuggccgagaccagcuacgugaagguccuggagcacguggugcgggucaacgcccgcgugcggaucgccuaccccucccuccgcgaggccgcgcugcuggaggaggaggaggggguguga

SEQ ID NO: 2235 - RNA, 954 nt, Artificial Sequence
  derived and/or modified sequence opt2 from MAGE-A4__Homo_sapiens__EAW99410
auguccuccgagcagaagucccagcacugcaagcccgaggagggcgucgaggcccaggaggaggcccucggccucgucggcgcccaggcccccaccaccgaggagcaggaggccgccgucuccuccuccuccccccucguccccggcacccucgaggagguccccgccgccgaguccgccggccccccccaguccccccagggcgccuccgcccuccccaccaccaucuccuucaccugcuggcgccagcccaacgagggcuccuccucccaggaggaggagggccccuccaccucccccgacgccgagucccucuuccgcgaggcccucuccaacaaggucgacgagcucgcccacuuccuccuccgcaaguaccgcgccaaggagcucgucaccaaggccgagaugcucgagcgcgucaucaagaacuacaagcgcugcuuccccgucaucuucggcaaggccuccgagucccucaagaugaucuucggcaucgacgucaaggaggucgaccccgccuccaacaccuacacccucgucaccugccucggccucuccuacgacggccuccucggcaacaaccagaucuuccccaagaccggccuccucaucaucguccucggcaccaucgccauggagggcgacuccgccuccgaggaggagaucugggaggagcucggcgucaugggcgucuacgacggccgcgagcacaccgucuacggcgagccccgcaagcuccucacccaggacuggguccaggagaacuaccucgaguaccgccagguccccggcuccaaccccgcccgcuacgaguuccucuggggcccccgcgcccucgccgagaccuccuacgucaagguccucgagcacgucguccgcgucaacgcccgcguccgcaucgccuaccccucccuccgcgaggccgcccuccucgaggaggaggagggcgucuga

SEQ ID NO: 2236 - RNA, 954 nt, Artificial Sequence
  derived and/or modified sequence opt3 from MAGE-A4__Homo_sapiens__EAW99410
augagcuccgagcagaagucucaacacugcaaacccgaagagggcguggaagcccaggaggaagcucuggggcucgucggagcacaggccccuaccacagaggagcaggaagcggcuguuucaaguagcuccccacuugugccggguacucuggaggaaguacccgccgcagagucugccggcccuccacaaucgccccagggggcuucagcauugccuacgaccaucagcuucacauguuggagacagccaaacgagggaaguuccucucaggaagaggaaggccccagcacuuccccugacgccgagucauuauuuagggaagcucugaguaauaagguggaugagcuagcccauuuccuccugcggaaauaccgcgcgaaggagcuugucaccaaagcagaaaugcuggagcgagugauuaagaacuauaagcguugcuuuccaguuauauucgguaaagccagcgaaucuuugaagaugaucuuugggauugacgugaaagaggucgauccggcuuccaauacauacacccucgugacuugucugggacugucauaugacggccucuuaggcaacaaucaaaucuuccccaagacagggcugcuuauuaucguauugggaaccauagccauggaaggugauagcgcaagugaggaggaaaucugggaggaacugggcguuauggggguguacgacggaagagagcacacggucuauggcgaaccuaggaaacuacucacucaggauugggugcaggagaacuaccuggaguaucgccaggugccagguucuaaucccgcucgguacgaauuucuuugggggccuagagcccuggcggagaccuccuacgucaagguuuuggaacaugugguaagggugaacgcccggguccgcauugcauauccaagccuccgagaggcugcccuguuagaggaagaggaaggaguguga

SEQ ID NO: 2237 - RNA, 954 nt, Artificial Sequence
  derived and/or modified sequence opt4 from MAGE-A4__Homo_sapiens__EAW99410
augagcagcgagcagaagagccagcacugcaagcccgaggagggcguggaggcccaggaggaggcccugggccuggugggcgcccaggcccccaccaccgaggagcaggaggccgccgugagcagcagcagcccccuggugcccggcacccuggaggaggugcccgccgccgagagcgccggccccccccagagcccccagggcgccagcgcccugcccaccaccaucagcuucaccugcuggagacagcccaacgagggcagcagcagccaggaggaggagggccccagcaccagccccgacgccgagagccuguucagagaggcccugagcaacaagguggacgagcuggcccacuuccugcugagaaaguacagagccaaggagcuggugaccaaggccgagaugcuggagagagugaucaagaacuacaagagaugcuuccccgugaucuucggcaaggccagcgagagccugaagaugaucuucggcaucgacgugaaggagguggaccccgccagcaacaccuacacccuggugaccugccugggccugagcuacgacggccugcugggcaacaaccagaucuuccccaagaccggccugcugaucaucgugcugggcaccaucgccauggagggcgacagcgccagcgaggaggagaucugggaggagcugggcgugaugggcguguacgacggcagagagcacaccguguacggcgagcccagaaagcugcugacccaggacugggugcaggagaacuaccuggaguacagacaggugcccggcagcaaccccgccagauacgaguuccuguggggccccagagcccuggccgagaccagcuacgugaaggugcuggagcacguggugagagugaacgccagagugagaaucgccuaccccagccugagagaggccgcccugcuggaggaggaggagggcguguga

SEQ ID NO: 2238 - RNA, 954 nt, Artificial Sequence
  derived and/or modified sequence opt5 from MAGE-A4__Homo_sapiens__EAW99410
augagcuccgagcagaagucucaacacugcaaacccgaagagggcguggaagcccaggaggaagcucuggggcucgucggagcccaggcgccuaccacagaggagcaggaagcugccguuagcuccucuagcccgcuggugcccggcacgcuugaggaagugccugccgcugaguccgccgggcccccucaaucuccccagggagcuagcgcccugccuaccacaaucuccuucaccuguuggagacagccgaacgagggcucuagcucccaggaagaggaagggcccagcacaucuccugacgcggagucccucuuucgggaagcccugagcaauaaggucgaugagcuugcucauuuccugcuccgcaaauacagagccaaggagcuggugaccaaagcugaaaugcuggagcggguuauuaagaacuauaagcgcugcuuucccgugaucuucggaaaagccucugaaucccucaagaugauuuuuggcaucgacgucaaagagguggauccugcgagcaauacauacacccugguuacgugucuuggccuguccuaugacgggcuccugggaaacaaucaaauuuuccccaagaccggccuucugaucaucgugcucgggacaauugccauggaaggagauucugcuagcgaggaggaaaucugggaggaacugggcgucauggggguguacgacggaagagagcacaccguguauggcgaaccgcggaaacugcucacacaggauuggguccaggagaacuaccuggaguaucgccagguuccuggcuccaaucccgccagauacgaauuucuuugggggccucgggcucuggccgagaccagcuacgugaaggugcucgaacaugucgugcgcguuaacgccagagugcggauugcuuaucccucucugcgcgaggcggcccuucuggaggaagaggaaggagucuga

SEQ ID NO: 2239 - protein, 317 aa, Artificial Sequence; identical to SEQ ID NO: 2232
  MAGE-A4__Homo_sapiens__P43358

SEQ ID NO: 2240 - RNA, 954 nt, Artificial Sequence; identical to SEQ ID NO: 2233
  MAGE-A4__Homo_sapiens__AAA68871

SEQ ID NO: 2241 - RNA, 954 nt, Artificial Sequence; identical to SEQ ID NO: 2234
  derived and/or modified sequence opt1 from MAGE-A4__Homo_sapiens__AAA68871

SEQ ID NO: 2242 - RNA, 954 nt, Artificial Sequence; identical to SEQ ID NO: 2235
  derived and/or modified sequence opt2 from MAGE-A4__Homo_sapiens__AAA68871

SEQ ID NO: 2243 - RNA, 954 nt, Artificial Sequence; identical to SEQ ID NO: 2236
  derived and/or modified sequence opt3 from MAGE-A4__Homo_sapiens__AAA68871

SEQ ID NO: 2244 - RNA, 954 nt, Artificial Sequence; identical to SEQ ID NO: 2237
  derived and/or modified sequence opt4 from MAGE-A4__Homo_sapiens__AAA68871

SEQ ID NO: 2245 - RNA, 954 nt, Artificial Sequence; identical to SEQ ID NO: 2238
  derived and/or modified sequence opt5 from MAGE-A4__Homo_sapiens__AAA68871

SEQ ID NO: 2246 - protein, 317 aa, Artificial Sequence
  MAGE-A4__Homo_sapiens__Q1RN33
MSSEQKSQHCKPEEGVEAQEEALGLVGAQAPTTEEQEAAVSSSSPLVPGTLEEVPAAESAGPPQSPQGASALPTTISFTCWRQPNEGSSSQEEEGPSTSPDAESLFREALSNKVDELAHFLLRKYRAKELVTKAEMLERVIKNYKRCFPVIFGKASESLKMIFGIDVKEVDPTSNTYTLVTCLGLSYDGLLGNNQIFPKTGLLIIVLGTIAMEGDSASEEEIWEELGVMGVYDGREHTVYGEPRKLLTQDWVQENYLEYRQVPGSNPARYEFLWGPRALAETSYVKVLEHVVRVNARVRIAYPSLREAALLEEEEGV

SEQ ID NO: 2247 - RNA, 954 nt, Artificial Sequence
  MAGE-A4__Homo_sapiens__AAY27261
augucuucugagcagaagagucagcacugcaagccugaggaaggcguugaggcccaagaagaggcccugggccuggugggugcgcaggcuccuacuacugaggagcaggaggcugcugucuccuccuccucuccucuggucccuggcacccuggaggaagugccugcugcugagucagcagguccuccccagaguccucagggagccucugccuuacccacuaccaucagcuucacuugcuggaggcaacccaaugaggguuccagcagccaagaagaggaggggccaagcaccucgccugacgcagaguccuuguuccgagaagcacucaguaacaagguggaugaguuggcucauuuucugcuccgcaaguaucgagccaaggagcuggucacaaaggcagaaaugcuggagagagucaucaaaaauuacaagcgcugcuuuccugugaucuucggcaaagccuccgagucccugaagaugaucuuuggcauugacgugaaggaaguggaccccaccagcaacaccuacacccuugucaccugccugggccuuuccuaugauggccugcuggguaauaaucagaucuuucccaagacaggccuucugauaaucguccugggcacaauugcaauggagggcgacagcgccucugaggaggaaaucugggaggagcugggugugauggggguguaugaugggagggagcacacugucuauggggagcccaggaaacugcucacccaagauugggugcaggaaaacuaccuggaguaccggcagguacccggcaguaauccugcgcgcuaugaguuccugugggguccaagggcucuggcugaaaccagcuaugugaaaguccuggagcauguggucagggucaaugcaagaguucgcauugccuacccaucccugcgugaagcagcuuuguuagaggaggaagagggagucuga

SEQ ID NO: 2248 - RNA, 954 nt, Artificial Sequence
  derived and/or modified sequence opt1 from MAGE-A4__Homo_sapiens__AAY27261
augagcuccgagcagaagucccagcacugcaagcccgaggagggcguggaggcccaggaggaggcccuggggcucgucggcgcgcaggccccgaccaccgaggagcaggaggccgccgugagcagcuccagcccccuggugcccgggacgcuggaggagguccccgccgcggaguccgccggcccgccccagagcccccagggggccuccgcccuccccaccaccaucagcuucacgugcuggcgccagccgaacgagggcuccagcucccaggaggaggagggccccagcaccucccccgacgcggagagccuguuccgggaggcccuguccaacaagguggacgagcucgcccacuuccugcugcgcaaguaccgggccaaggagcucgugaccaaggccgagaugcuggagcgcgucaucaagaacuacaagcggugcuuccccgugaucuucgggaaggcgagcgagucccugaagaugaucuucggcaucgacgugaaggaggucgacccgaccagcaacaccuacacgcucgugaccugccuggggcugagcuacgacggccuccuggggaacaaccagaucuuccccaagaccggccugcucaucaucgugcugggcaccaucgccauggagggggacuccgccagcgaggaggagaucugggaggagcugggcgucauggggguguacgacggccgcgagcacacgguguacggcgagccccggaagcuccugacccaggacuggguccaggagaacuaccuggaguaccgccaggugcccggguccaacccggcccgguacgaguuccucuggggcccccgcgcccuggcggagaccagcuacgugaagguccuggagcacguggugcgggucaacgcccgcgugcggaucgccuaccccucccuccgcgaggccgcccugcuggaggaggaggaggggguguga

SEQ ID NO: 2249 - RNA, 954 nt, Artificial Sequence
  derived and/or modified sequence opt2 from MAGE-A4__Homo_sapiens__AAY27261
auguccuccgagcagaagucccagcacugcaagcccgaggagggcgucgaggcccaggaggaggcccucggccucgucggcgcccaggcccccaccaccgaggagcaggaggccgccgucuccuccuccuccccccucguccccggcacccucgaggagguccccgccgccgaguccgccggccccccccaguccccccagggcgccuccgcccuccccaccaccaucuccuucaccugcuggcgccagcccaacgagggcuccuccucccaggaggaggagggccccuccaccucccccgacgccgagucccucuuccgcgaggcccucuccaacaaggucgacgagcucgcccacuuccuccuccgcaaguaccgcgccaaggagcucgucaccaaggccgagaugcucgagcgcgucaucaagaacuacaagcgcugcuuccccgucaucuucggcaaggccuccgagucccucaagaugaucuucggcaucgacgucaaggaggucgaccccaccuccaacaccuacacccucgucaccugccucggccucuccuacgacggccuccucggcaacaaccagaucuuccccaagaccggccuccucaucaucguccucggcaccaucgccauggagggcgacuccgccuccgaggaggagaucugggaggagcucggcgucaugggcgucuacgacggccgcgagcacaccgucuacggcgagccccgcaagcuccucacccaggacuggguccaggagaacuaccucgaguaccgccagguccccggcuccaaccccgcccgcuacgaguuccucuggggcccccgcgcccucgccgagaccuccuacgucaagguccucgagcacgucguccgcgucaacgcccgcguccgcaucgccuaccccucccuccgcgaggccgcccuccucgaggaggaggagggcgucuga

SEQ ID NO: 2250 - RNA, 954 nt, Artificial Sequence
  derived and/or modified sequence opt3 from MAGE-A4__Homo_sapiens__AAY27261
augagcuccgagcagaagucucaacacugcaaacccgaagagggcguggaagcccaggaggaagcucuggggcucgucggagcacaggccccuaccacagaggagcaggaagcggcuguuucaaguagcuccccacuugugccggguacucuggaggaaguacccgccgcagagucugccggcccuccacaaucgccccagggggcuucagcauugccuacgaccaucagcuucacauguuggagacagccaaacgagggaaguuccucucaggaagaggaaggccccagcacuuccccugacgccgagucauuauuuagggaagcucugaguaauaagguggaugagcuagcccauuuccuccugcggaaauaccgcgcgaaggagcuugucaccaaagcagaaaugcuggagcgagugauuaagaacuauaagcguugcuuuccaguuauauucgguaaagccagcgaaucuuugaagaugaucuuugggauugacgugaaagaggucgauccgacauccaauaccuacacucucgugacaugucugggacugucauaugacggccucuuaggcaacaaucaaaucuuccccaagaccgggcugcuuauuaucguauugggaacgauagcuauggaaggugauagcgccagugaggaggaaaucugggaggaacugggcguuauggggguguacgacggaagagagcacacugucuauggcgaaccuaggaaacuacucacccaggauugggugcaggagaacuaccuggaguaucgccaggugccagguucuaaucccgcacgguacgaauuucuuugggggccuagagcucuggccgagacauccuacgucaagguuuuggaacaugugguaagggugaacgcgcggguccgcauugccuauccaagccuccgagaggcagcucuguuagaggaagaggaaggaguguga

SEQ ID NO: 2251 - RNA, 954 nt, Artificial Sequence
  derived and/or modified sequence opt4 from MAGE-A4__Homo_sapiens__AAY27261
augagcagcgagcagaagagccagcacugcaagcccgaggagggcguggaggcccaggaggaggcccugggccuggugggcgcccaggcccccaccaccgaggagcaggaggccgccgugagcagcagcagcccccuggugcccggcacccuggaggaggugcccgccgccgagagcgccggccccccccagagcccccagggcgccagcgcccugcccaccaccaucagcuucaccugcuggagacagcccaacgagggcagcagcagccaggaggaggagggccccagcaccagccccgacgccgagagccuguucagagaggcccugagcaacaagguggacgagcuggcccacuuccugcugagaaaguacagagccaaggagcuggugaccaaggccgagaugcuggagagagugaucaagaacuacaagagaugcuuccccgugaucuucggcaaggccagcgagagccugaagaugaucuucggcaucgacgugaaggagguggaccccaccagcaacaccuacacccuggugaccugccugggccugagcuacgacggccugcugggcaacaaccagaucuuccccaagaccggccugcugaucaucgugcugggcaccaucgccauggagggcgacagcgccagcgaggaggagaucugggaggagcugggcgugaugggcguguacgacggcagagagcacaccguguacggcgagcccagaaagcugcugacccaggacugggugcaggagaacuaccuggaguacagacaggugcccggcagcaaccccgccagauacgaguuccuguggggccccagagcccuggccgagaccagcuacgugaaggugcuggagcacguggugagagugaacgccagagugagaaucgccuaccccagccugagagaggccgcccugcuggaggaggaggagggcguguga

SEQ ID NO: 2252 - RNA, 954 nt, Artificial Sequence
  derived and/or modified sequence opt5 from MAGE-A4__Homo_sapiens__AAY27261
augagcuccgagcagaagucucaacacugcaaacccgaagagggcguggaagcccaggaggaagcucuggggcucgucggagcccaggcgccuaccacagaggagcaggaagcugccguuagcuccucuagcccgcuggugcccggcacgcuugaggaagugccugccgcugaguccgccgggcccccucaaucuccccagggagcuagcgcccugccuaccacaaucuccuucaccuguuggagacagccgaacgagggcucuagcucccaggaagaggaagggcccagcacaucuccugacgcggagucccucuuucgggaagcccugagcaauaaggucgaugagcuugcucauuuccugcuccgcaaauacagagccaaggagcuggugaccaaagcugaaaugcuggagcggguuauuaagaacuauaagcgcugcuuucccgugaucuucggaaaagccucugaaucccucaagaugauuuuuggcaucgacgucaaagagguggauccuacaagcaauaccuacacgcugguuaccugucuuggccuguccuaugacgggcuccugggaaacaaucaaauuuuccccaagacaggccuucugaucaucgugcucgggaccauugcgauggaaggagauucugccagcgaggaggaaaucugggaggaacugggcgucauggggguguacgacggaagagagcacacaguguauggcgaaccgcggaaacugcucacccaggauuggguccaggagaacuaccuggaguaucgccagguuccuggcuccaaucccgcuagauacgaauuucuuugggggccucgggcccuggcugagacgagcuacgugaaggugcucgaacaugucgugcgcguuaacgccagagugcggauugccuaucccucucugcgcgaggcugcgcuucuggaggaagaggaaggagucuga

SEQ ID NO: 2253 - protein, 314 aa, Artificial Sequence [sequence omitted]

SEQ ID NO: 2254 - RNA, 945 nt, Artificial Sequence
  MAGE-A6__Homo_sapiens__BAF82126
augccucuugagcagaggagucagcacugcaagccugaagaaggccuugaggcccgaggagaggcccugggccuggugggugcgcaggcuccugcuacugaggagcaggaggcugccuccuccucuucuacucuaguugaagucacccugggggaggugccugcugccgagucaccagauccuccccagaguccucagggagccuccagccuccccacuaccaugaacuacccucucuggagccaauccuaugaggacuccagcaaccaagaagaggaggggccaagcaccuucccugaccuggagucugaguuccaagcagcacucaguaggaagcuggccaaguugguucauuuucugcuccucaaguaucgagccagggagccggucacaaaggcagaaaugcuggggagugucgucggaaauuggcaguacuucuuuccugugaucuucagcaaagcuuccgauuccuugcagcuggucuuuggcaucgagcugauggaaguggaccccaucggccacguguacaucuuugccaccugccugggccucuccuacgauggccugcugggugacaaucagaucaugcccaagacaggcuuccugauaaucauccuggccauaaucgcaaaagagggcgacugugccccugaggagaaaaucugggaggagcugaguguguuagagguguuugaggggagggaagacauuaucuucggggaucccaagaagcugcucacccaauauuucgugcaggaaaacuaccuggaguaccggcagguccccggcagugauccugcaugcuaugaguuccugugggguccaagggcccucauugaaaccagcuaugugaaaguccugcaccauaugguaaagaucaguggaggaccucgcauuuccuacccacuccugcaugagugggcuuugagagagggggaagaguga

SEQ ID NO: 2255 - RNA, 945 nt, Artificial Sequence
  derived and/or modified sequence opt1 from MAGE-A6__Homo_sapiens__BAF82126
augccccuggagcagcgcagccagcacugcaagccggaggagggccucgaggcccgcggggaggcccugggccuggugggggcgcaggcccccgccaccgaggagcaggaggccgccuccagcuccagcacccucgucgaggugacgcugggcgaggugcccgcggccgagucccccgacccgccccagagcccccagggggccuccagccugcccaccaccaugaacuacccgcucuggucccagagcuacgaggacuccagcaaccaggaggaggagggccccuccaccuuccccgaccuggagagcgaguuccaggccgcgcugucccggaagcucgccaagcugguccacuuccugcuccugaaguaccgggcccgcgagcccgugacgaaggccgagaugcugggcagcguggucgggaacuggcaguacuucuucccggugaucuucuccaaggccagcgacucccuccagcugguguucggcaucgagcugauggaggucgaccccaucgggcacguguacaucuucgcgaccugccucggccugagcuacgacgggcugcucggcgacaaccagaucaugcccaagaccggcuuccugaucaucauccuggccaucaucgccaaggagggggacugcgcccccgaggagaagaucugggaggagcucagcgugcuggaggucuucgagggccgggaggacaucaucuucggggacccgaagaagcugcucacccaguacuucgugcaggagaacuaccuggaguaccgccaggugcccggcuccgaccccgccugcuacgaguuccuguggggcccccgggcgcucaucgagacgagcuacgucaaggugcugcaccacauggugaagaucuccgggggcccgcgcaucagcuacccccugcuccacgagugggcccugcgggagggggaggaguga

SEQ ID NO: 2256 - RNA, 945 nt, Artificial Sequence
  derived and/or modified sequence opt2 from MAGE-A6__Homo_sapiens__BAF82126
augccccucgagcagcgcucccagcacugcaagcccgaggagggccucgaggcccgcggcgaggcccucggccucgucggcgcccaggcccccgccaccgaggagcaggaggccgccuccuccuccuccacccucgucgaggucacccucggcgagguccccgccgccgagucccccgaccccccccaguccccccagggcgccuccucccuccccaccaccaugaacuacccccucuggucccaguccuacgaggacuccuccaaccaggaggaggagggccccuccaccuuccccgaccucgaguccgaguuccaggccgcccucucccgcaagcucgccaagcucguccacuuccuccuccucaaguaccgcgcccgcgagcccgucaccaaggccgagaugcucggcuccgucgucggcaacuggcaguacuucuuccccgucaucuucuccaaggccuccgacucccuccagcucgucuucggcaucgagcucauggaggucgaccccaucggccacgucuacaucuucgccaccugccucggccucuccuacgacggccuccucggcgacaaccagaucaugcccaagaccggcuuccucaucaucauccucgccaucaucgccaaggagggcgacugcgcccccgaggagaagaucugggaggagcucuccguccucgaggucuucgagggccgcgaggacaucaucuucggcgaccccaagaagcuccucacccaguacuucguccaggagaacuaccucgaguaccgccagguccccggcuccgaccccgccugcuacgaguuccucuggggcccccgcgcccucaucgagaccuccuacgucaagguccuccaccacauggucaagaucuccggcggcccccgcaucuccuacccccuccuccacgagugggcccuccgcgagggcgaggaguga

SEQ ID NO: 2257 - RNA, 945 nt, Artificial Sequence
  derived and/or modified sequence opt3 from MAGE-A6__Homo_sapiens__BAF82126
augccccuggagcagagaagccaacacugcaagccugaagagggccucgaagccaggggagaggcucuugggcuggugggugcacaggccccagcgaccgaagaacaggaggcugccuccucuucaaguacauuggucgaaguuacuuuaggcgaggugccggcagccgaaagccccgacccuccacagaguccccaaggggcuucuucgcugccuacgaccaugaacuacccacuauggucacagagcuaugaggauaguuccaaucaggaggaagagggacccucuacauucccugaccucgaaagcgaguuucaggcagcccugucccggaaacuugcuaagcugguacauuucuugcuccugaaauaccgcgcccgagaaccagugacuaaggcggagaugcugggcucagucguggguaacuggcaauauuucuucccgguuaucuuuaguaaagcaagcgauucucuccaguuaguguucgggauugagcugauggaagucgaccccauaggacacguguacaucuuugccaccugucuuggcuuguccuaugauggccugcuaggggacaaucagauuaugccuaagacaggauuccucaucauuauccuggcuauaaucgccaaggagggugauugcgcaccagaagagaaaauuugggaggagcuuucaguacuggagguuuuugaaggccgugaggacaucauuuucggggaucccaagaaauugcucacccaguacuuugugcaagaaaacuaucuggaguacagacaggucccuggaagcgacccagcuuguuacgaauuuuuauggggccccagggcccugaucgagacuuccuaugugaaggugcuccaucacauggucaaaauaucuggugggccgcggauuuccuacccucuucugcaugagugggcguugcgcgaaggagaggaauga

SEQ ID NO: 2258 - RNA, 945 nt, Artificial Sequence
  derived and/or modified sequence opt4 from MAGE-A6__Homo_sapiens__BAF82126
augccccuggagcagagaagccagcacugcaagcccgaggagggccuggaggccagaggcgaggcccugggccuggugggcgcccaggcccccgccaccgaggagcaggaggccgccagcagcagcagcacccugguggaggugacccugggcgaggugcccgccgccgagagccccgaccccccccagagcccccagggcgccagcagccugcccaccaccaugaacuacccccuguggagccagagcuacgaggacagcagcaaccaggaggaggagggccccagcaccuuccccgaccuggagagcgaguuccaggccgcccugagcagaaagcuggccaagcuggugcacuuccugcugcugaaguacagagccagagagcccgugaccaaggccgagaugcugggcagcguggugggcaacuggcaguacuucuuccccgugaucuucagcaaggccagcgacagccugcagcugguguucggcaucgagcugauggagguggaccccaucggccacguguacaucuucgccaccugccugggccugagcuacgacggccugcugggcgacaaccagaucaugcccaagaccggcuuccugaucaucauccuggccaucaucgccaaggagggcgacugcgcccccgaggagaagaucugggaggagcugagcgugcuggagguguucgagggcagagaggacaucaucuucggcgaccccaagaagcugcugacccaguacuucgugcaggagaacuaccuggaguacagacaggugcccggcagcgaccccgccugcuacgaguuccuguggggccccagagcccugaucgagaccagcuacgugaaggugcugcaccacauggugaagaucagcggcggccccagaaucagcuacccccugcugcacgagugggcccugagagagggcgaggaguga

SEQ ID NO: 2259 - RNA, 945 nt, Artificial Sequence
  derived and/or modified sequence opt5 from MAGE-A6__Homo_sapiens__BAF82126
augccccuggagcagagaagccaacacugcaagccugaagagggccucgaagcccgcggggaggcucugggacuugugggcgcccaggcgccggcuaccgaagaacaggaggccgccuccucuagcuccacacuggucgaaguuacgcucggggaggugcccgcugccgaaucuccugaucccccucagagcccccaaggagcuuccucucugccuaccacaaugaacuacccgcuuuggagccaguccuaugaggacagcucuaaucaggaggaagagggccccuccaccuucccugaccuggaaagcgaguuucaggccgcgcucucucggaaacuggccaagcuggugcauuuccuccugcuuaaauacagagcucgggaacccgucacaaaggccgagaugcugggguccgugguuggaaacuggcaauauuucuucccugugaucuuuagcaaggcuucugauucccuccagcuggucuucggcauugagcuuauggaaguggaccccaucggccacguuuacauuuuugccaccugucuggggcucagcuaugauggacugcugggcgacaaucagaucaugccgaaaacaggguuccucauuaucauccuggcgauuaucgccaaggagggagauugcgcuccugaagagaaaauuugggaggagcuuuccgugcuggaggucuuugaaggccgcgaggacaucauuuucggggaucccaagaaacuccugacccaguacuuugugcaagaaaacuaucuugaguacagacaggugccuggaucugaccccgccuguuacgaauuucuguggggcccccgggcucucaucgagacgagcuaugucaagguucugcaucacauggugaaaauuuccggcgggccucgcaucagcuacccgcugcuccaugagugggcccugagagaaggagaggaauga

SEQ ID NO: 2260 - protein, 314 aa, Artificial Sequence
  MAGE-A6__Homo_sapiens__P43360
MPLEQRSQHCKPEEGLEARGEALGLVGAQAPATEEQEAASSSSTLVEVTLGEVPAAESPDPPQSPQGASSLPTTMNYPLWSQSYEDSSNQEEEGPSTFPDLESEFQAALSRKVAKLVHFLLLKYRAREPVTKAEMLGSVVGNWQYFFPVIFSKASDSLQLVFGIELMEVDPIGHVYIFATCLGLSYDGLLGDNQIMPKTGFLIIILAIIAKEGDCAPEEKIWEELSVLEVFEGREDSIFGDPKKLLTQYFVQENYLEYRQVPGSDPACYEFLWGPRALIETSYVKVLHHMVKISGGPRISYPLLHEWALREGEE

SEQ ID NO: 2261 - RNA, 945 nt, Artificial Sequence
  MAGE-A6__Homo_sapiens__AAA19006
augccucuugagcagaggagucagcacugcaagccugaagaaggccuugaggcccgaggagaggcccugggccuggugggugcgcaggcuccugcuacugaggagcaggaggcugccuccuccucuucuacucuaguugaagucacccugggggaggugccugcugccgagucaccagauccuccccagaguccucagggagccuccagccuccccacuaccaugaacuacccucucuggagccaauccuaugaggacuccagcaaccaagaagaggaggggccaagcaccuucccugaccuggagucugaguuccaagcagcacucaguaggaagguggccaaguugguucauuuucugcuccucaaguaucgagccagggagccggucacaaaggcagaaaugcuggggagugucgucggaaauuggcaguacuucuuuccugugaucuucagcaaagcuuccgauuccuugcagcuggucuuuggcaucgagcugauggaaguggaccccaucggccacguguacaucuuugccaccugccugggccucuccuacgauggccugcugggugacaaucagaucaugcccaagacaggcuuccugauaaucauccuggccauaaucgcaaaagagggcgacugugccccugaggagaaaaucugggaggagcugaguguguuagagguguuugaggggagggaagacaguaucuucggggaucccaagaagcugcucacccaauauuucgugcaggaaaacuaccuggaguaccggcagguccccggcagugauccugcaugcuaugaguuccugugggguccaagggcccucauugaaaccagcuaugugaaaguccugcaccauaugguaaagaucaguggaggaccucgcauuuccuacccacuccugcaugagugggcuuugagagagggggaagaguga

SEQ ID NO: 2262 - RNA, 945 nt, Artificial Sequence
  derived and/or modified sequence opt1 from MAGE-A6__Homo_sapiens__AAA19006
augccccuggagcagcgcagccagcacugcaagccggaggagggccucgaggcccgcggggaggcccugggccuggugggggcgcaggcccccgccaccgaggagcaggaggccgccuccagcuccagcacccucgucgaggugacgcugggcgaggugcccgcggccgagucccccgacccgccccagagcccccagggggccuccagccugcccaccaccaugaacuacccgcucuggucccagagcuacgaggacuccagcaaccaggaggaggagggccccuccaccuuccccgaccuggagagcgaguuccaggccgcgcugucccggaaggucgccaagcucgugcacuuccugcugcucaaguaccgggcccgcgagcccgugacgaaggccgagaugcugggcagcgucguggggaacuggcaguacuucuucccggugaucuucuccaaggccagcgacucccugcagcucgucuucggcaucgagcugauggagguggaccccaucgggcacguguacaucuucgcgaccugccugggccucagcuacgacgggcugcugggcgacaaccagaucaugcccaagaccggcuuccucaucaucauccuggccaucaucgccaaggagggggacugcgcccccgaggagaagaucugggaggagcugagcguccucgagguguucgagggccgggaggacuccaucuucggggacccgaagaagcugcugacccaguacuucgugcaggagaacuaccucgaguaccgccagguccccggcagcgaccccgccugcuacgaguuccuguggggcccccgggcgcugaucgagacguccuacgugaaggugcuccaccacauggucaagaucagcgggggcccgcgcaucuccuacccccugcugcacgagugggcccuccgggagggggaggaguga

SEQ ID NO: 2263 - RNA, 945 nt, Artificial Sequence
  derived and/or modified sequence opt2 from MAGE-A6__Homo_sapiens__AAA19006
augccccucgagcagcgcucccagcacugcaagcccgaggagggccucgaggcccgcggcgaggcccucggccucgucggcgcccaggcccccgccaccgaggagcaggaggccgccuccuccuccuccacccucgucgaggucacccucggcgagguccccgccgccgagucccccgaccccccccaguccccccagggcgccuccucccuccccaccaccaugaacuacccccucuggucccaguccuacgaggacuccuccaaccaggaggaggagggccccuccaccuuccccgaccucgaguccgaguuccaggccgcccucucccgcaaggucgccaagcucguccacuuccuccuccucaaguaccgcgcccgcgagcccgucaccaaggccgagaugcucggcuccgucgucggcaacuggcaguacuucuuccccgucaucuucuccaaggccuccgacucccuccagcucgucuucggcaucgagcucauggaggucgaccccaucggccacgucuacaucuucgccaccugccucggccucuccuacgacggccuccucggcgacaaccagaucaugcccaagaccggcuuccucaucaucauccucgccaucaucgccaaggagggcgacugcgcccccgaggagaagaucugggaggagcucuccguccucgaggucuucgagggccgcgaggacuccaucuucggcgaccccaagaagcuccucacccaguacuucguccaggagaacuaccucgaguaccgccagguccccggcuccgaccccgccugcuacgaguuccucuggggcccccgcgcccucaucgagaccuccuacgucaagguccuccaccacauggucaagaucuccggcggcccccgcaucuccuacccccuccuccacgagugggcccuccgcgagggcgaggaguga

SEQ ID NO: 2264 - RNA, 945 nt, Artificial Sequence
  derived and/or modified sequence opt3 from MAGE-A6__Homo_sapiens__AAA19006
augccccuggagcagagaagccaacacugcaagccugaagagggccucgaagccaggggagaggcucuugggcuggugggugcacaggccccagcgaccgaagaacaggaggcugccuccucuucaaguacauuggucgaaguuacuuuaggcgaggugccggcagccgaaagccccgacccuccacagucuccccaaggggcuuccucgcugccuacgaccaugaacuacccacuauggucacagagcuaugaggauaguuccaaucaggaggaagagggacccucuacauucccugaccucgaaagcgaguuucaggcagcccugucccggaaaguagcuaaacuugugcauuuccuguugcucaaguaccgcgcccgagaaccagucacuaaggcggagaugcugggcucagugguugguaacuggcaauauuucuucccggugaucuuuaguaaagcaagcgauucucugcagcucgucuucgggauugaguuaauggaaguggaccccauaggacacguauacaucuuugccaccugucugggccuuuccuaugauggcuugcugggggacaaucagauuaugccuaagacaggauuccuaaucauuauccucgcuauaaucgccaaggagggugauugcgcaccagaagagaaaauuugggaggagcugucaguucuugagguguuugaaggccgugaggacagcaucuucggggaucccaagaaacuguugacccaguacuuuguccaagaaaacuaucucgaguacagacaggugccuggaagugacccagcuuguuacgaauuucuguggggccccagggccuuaauugagacuucuuaugugaagguccugcaucacaugguuaaaaucuccggugggccgcggauaagcuacccucuccuucaugagugggcgcugcgcgaaggagaggaauga

SEQ ID NO: 2265 - RNA, 945 nt, Artificial Sequence
  derived and/or modified sequence opt4 from MAGE-A6__Homo_sapiens__AAA19006
augccccuggagcagagaagccagcacugcaagcccgaggagggccuggaggccagaggcgaggcccugggccuggugggcgcccaggcccccgccaccgaggagcaggaggccgccagcagcagcagcacccugguggaggugacccugggcgaggugcccgccgccgagagccccgaccccccccagagcccccagggcgccagcagccugcccaccaccaugaacuacccccuguggagccagagcuacgaggacagcagcaaccaggaggaggagggccccagcaccuuccccgaccuggagagcgaguuccaggccgcccugagcagaaagguggccaagcuggugcacuuccugcugcugaaguacagagccagagagcccgugaccaaggccgagaugcugggcagcguggugggcaacuggcaguacuucuuccccgugaucuucagcaaggccagcgacagccugcagcugguguucggcaucgagcugauggagguggaccccaucggccacguguacaucuucgccaccugccugggccugagcuacgacggccugcugggcgacaaccagaucaugcccaagaccggcuuccugaucaucauccuggccaucaucgccaaggagggcgacugcgcccccgaggagaagaucugggaggagcugagcgugcuggagguguucgagggcagagaggacagcaucuucggcgaccccaagaagcugcugacccaguacuucgugcaggagaacuaccuggaguacagacaggugcccggcagcgaccccgccugcuacgaguuccuguggggccccagagcccugaucgagaccagcuacgugaaggugcugcaccacauggugaagaucagcggcggccccagaaucagcuacccccugcugcacgagugggcccugagagagggcgaggaguga

SEQ ID NO: 2266 - RNA, 945 nt, Artificial Sequence
  derived and/or modified sequence opt5 from MAGE-A6__Homo_sapiens__AAA19006
augccccuggagcagagaagccaacacugcaagccugaagagggccucgaagcccgcggggaggcucugggacuugugggcgcccaggcgccggcuaccgaagaacaggaggccgccuccucuagcuccacacuggucgaaguuacgcucggggaggugcccgcugccgaaucuccugaucccccucagagcccccaaggagcuuccucucugccuaccacaaugaacuacccgcuuuggagccaguccuaugaggacagcucuaaucaggaggaagagggccccuccaccuucccugaccuggaaagcgaguuucaggccgcgcucucucggaaaguggccaagcugguccauuuccugcuccugaaauacagagcucgggaacccgugacaaaggccgagaugcuuggguccguugugggaaacuggcaauauuucuucccugucaucuuuagcaaggcuucugauucccugcagcucguguucggcauugagcugauggaaguugaccccaucggccacguguacauuuuugccaccugucuugggcugagcuaugauggacuccugggcgacaaucagaucaugccgaaaacaggguuccugauuaucauccucgcgauuaucgccaaggagggagauugcgcuccugaagagaaaauuugggaggagcuguccguccuugagguguuugaaggccgcgaggacucuaucuucggggaucccaagaaacugcucacccaguacuuugugcaagaaaacuaucuggaguacagacaggucccuggaagcgaccccgccuguuacgaauuucuuuggggcccccgggcucugauugagacguccuauguuaaggugcuccaucacauggugaaaaucagcggcgggccucgcauuucuuacccgcugcugcaugagugggcccucagagaaggagaggaauga

SEQ ID NO: 2267 - protein, 314 aa, Artificial Sequence [sequence omitted]

SEQ ID NO: 2268 - RNA, 945 nt, Artificial Sequence
  MAGE-A6__Homo_sapiens__CAG46567
augccacuugagcagaggagucagcacugcaagccugaagaaggccuugaggcccgaggagaggcccugggccuggugggugcgcaggcuccugcuacugaggagcaggaggcugccuccuccucuucuacucuaguugaagucacccugggggaggugccugcugccgagucaccagauccuccccagaguccucagggagccuccagccuccccacuaccaugaacuacccucucuggagccaauccuaugaggacuccagcaaccaagaagaggaggggccaagcaccuucccugaccuggagucugaguuccaagcagcacucaguaggaagguggccaaguugguucauuuucugcuccucaaguaucgagccagggagccggucacaaaggcagaaaugcuggggagugucgucggaaauuggcaguacuucuuuccugugaucuucagcaaagcuuccgauuccuugcagcuggucuuuggcaucgagcugauggaaguggaccccaucggccacguguacaucuuugccaccugccugggccucuccuacgauggccugcugggugacaaucagaucaugcccaagacaggcuuccugauaaucauccuggccauaaucgcaaaagagggcgacugugccccugaggagaaaaucugggaggagcugaguguguuagagguguuugaggggagggaagacaguaucuucggggaucccaagaagcugcucacccaauauuucgugcaggaaaacuaccuggaguaccggcagguccccggcagugauccugcaugcuaugaguuccugugggguccaagggcccucauugaaaccagcuaugugaaaguccugcaccauaugguaaagaucaguggaggaccucgcauuuccuacccacuccugcaugagugggcuuuuagagagggggaagaguga

SEQ ID NO: 2269 - RNA, 945 nt, Artificial Sequence
  derived and/or modified sequence opt1 from MAGE-A6__Homo_sapiens__CAG46567
augccccuggagcagcgcagccagcacugcaagccggaggagggccucgaggcccgcggggaggcccugggccuggugggggcgcaggcccccgccaccgaggagcaggaggccgccuccagcuccagcacccucgucgaggugacgcugggcgaggugcccgcggccgagucccccgacccgccccagagcccccagggggccuccagccugcccaccaccaugaacuacccgcucuggucccagagcuacgaggacuccagcaaccaggaggaggagggccccuccaccuuccccgaccuggagagcgaguuccaggccgcgcugucccggaaggucgccaagcucgugcacuuccugcugcucaaguaccgggcccgcgagcccgugacgaaggccgagaugcugggcagcgucguggggaacuggcaguacuucuucccggugaucuucuccaaggccagcgacucccugcagcucgucuucggcaucgagcugauggagguggaccccaucgggcacguguacaucuucgcgaccugccugggccucagcuacgacgggcugcugggcgacaaccagaucaugcccaagaccggcuuccucaucaucauccuggccaucaucgccaaggagggggacugcgcccccgaggagaagaucugggaggagcugagcguccucgagguguucgagggccgggaggacuccaucuucggggacccgaagaagcugcugacccaguacuucgugcaggagaacuaccucgaguaccgccagguccccggcagcgaccccgccugcuacgaguuccuguggggcccccgggcgcugaucgagacguccuacgugaaggugcuccaccacauggucaagaucagcgggggcccgcgcaucuccuacccccugcugcacgagugggccuuccgggagggggaggaguga

SEQ ID NO: 2270 - RNA, 945 nt, Artificial Sequence
  derived and/or modified sequence opt2 from MAGE-A6__Homo_sapiens__CAG46567
augccccucgagcagcgcucccagcacugcaagcccgaggagggccucgaggcccgcggcgaggcccucggccucgucggcgcccaggcccccgccaccgaggagcaggaggccgccuccuccuccuccacccucgucgaggucacccucggcgagguccccgccgccgagucccccgaccccccccaguccccccagggcgccuccucccuccccaccaccaugaacuacccccucuggucccaguccuacgaggacuccuccaaccaggaggaggagggccccuccaccuuccccgaccucgaguccgaguuccaggccgcccucucccgcaaggucgccaagcucguccacuuccuccuccucaaguaccgcgcccgcgagcccgucaccaaggccgagaugcucggcuccgucgucggcaacuggcaguacuucuuccccgucaucuucuccaaggccuccgacucccuccagcucgucuucggcaucgagcucauggaggucgaccccaucggccacgucuacaucuucgccaccugccucggccucuccuacgacggccuccucggcgacaaccagaucaugcccaagaccggcuuccucaucaucauccucgccaucaucgccaaggagggcgacugcgcccccgaggagaagaucugggaggagcucuccguccucgaggucuucgagggccgcgaggacuccaucuucggcgaccccaagaagcuccucacccaguacuucguccaggagaacuaccucgaguaccgccagguccccggcuccgaccccgccugcuacgaguuccucuggggcccccgcgcccucaucgagaccuccuacgucaagguccuccaccacauggucaagaucuccggcggcccccgcaucuccuacccccuccuccacgagugggccuuccgcgagggcgaggaguga

SEQ ID NO: 2271 - RNA, 945 nt, Artificial Sequence
  derived and/or modified sequence opt3 from MAGE-A6__Homo_sapiens__CAG46567
augccccuggagcagagaagccaacacugcaagccugaagagggccucgaagccaggggagaggcucuugggcuggugggugcacaggccccagcgaccgaagaacaggaggcugccuccucuucaaguacauuggucgaaguuacuuuaggcgaggugccggcagccgaaagccccgacccuccacagucuccccaaggggcuuccucgcugccuacgaccaugaacuacccacuauggucacagagcuaugaggauaguuccaaucaggaggaagagggacccucuacauucccugaccucgaaagcgaguuucaggcagcccugucccggaaaguagcuaaacuugugcauuuccuguugcucaaguaccgcgcccgagaaccagucacuaaggcggagaugcugggcucagugguugguaacuggcaauauuucuucccggugaucuuuaguaaagcaagcgauucucugcagcucgucuucgggauugaguuaauggaaguggaccccauaggacacguauacaucuuugccaccugucugggccuuuccuaugauggcuugcugggggacaaucagauuaugccuaagacaggauuccuaaucauuauccucgcuauaaucgccaaggagggugauugcgcaccagaagagaaaauuugggaggagcugucaguucuugagguguuugaaggccgugaggacagcaucuucggggaucccaagaaacuguugacccaguacuuuguccaagaaaacuaucucgaguacagacaggugccuggaagugacccagcuuguuacgaauuucuguggggccccagggccuuaauugagacuucuuaugugaagguccugcaucacaugguuaaaaucuccggugggccgcggauaagcuacccucuccuucaugagugggcguuucgcgaaggagaggaauga

SEQ ID NO: 2272 - RNA, 945 nt, Artificial Sequence
  derived and/or modified sequence opt4 from MAGE-A6__Homo_sapiens__CAG46567
augccccuggagcagagaagccagcacugcaagcccgaggagggccuggaggccagaggcgaggcccugggccuggugggcgcccaggcccccgccaccgaggagcaggaggccgccagcagcagcagcacccugguggaggugacccugggcgaggugcccgccgccgagagccccgaccccccccagagcccccagggcgccagcagccugcccaccaccaugaacuacccccuguggagccagagcuacgaggacagcagcaaccaggaggaggagggccccagcaccuuccccgaccuggagagcgaguuccaggccgcccugagcagaaagguggccaagcuggugcacuuccugcugcugaaguacagagccagagagcccgugaccaaggccgagaugcugggcagcguggugggcaacuggcaguacuucuuccccgugaucuucagcaaggccagcgacagccugcagcugguguucggcaucgagcugauggagguggaccccaucggccacguguacaucuucgccaccugccugggccugagcuacgacggccugcugggcgacaaccagaucaugcccaagaccggcuuccugaucaucauccuggccaucaucgccaaggagggcgacugcgcccccgaggagaagaucugggaggagcugagcgugcuggagguguucgagggcagagaggacagcaucuucggcgaccccaagaagcugcugacccaguacuucgugcaggagaacuaccuggaguacagacaggugcccggcagcgaccccgccugcuacgaguuccuguggggccccagagcccugaucgagaccagcuacgugaaggugcugcaccacauggugaagaucagcggcggccccagaaucagcuacccccugcugcacgagugggccuucagagagggcgaggaguga

SEQ ID NO: 2273 - RNA, 945 nt, Artificial Sequence
  derived and/or modified sequence opt5 from MAGE-A6__Homo_sapiens__CAG46567
augccccuggagcagagaagccaacacugcaagccugaagagggccucgaagcccgcggggaggcucugggacuugugggcgcccaggcgccggcuaccgaagaacaggaggccgccuccucuagcuccacacuggucgaaguuacgcucggggaggugcccgcugccgaaucuccugaucccccucagagcccccaaggagcuuccucucugccuaccacaaugaacuacccgcuuuggagccaguccuaugaggacagcucuaaucaggaggaagagggccccuccaccuucccugaccuggaaagcgaguuucaggccgcgcucucucggaaaguggccaagcugguccauuuccugcuccugaaauacagagcucgggaacccgugacaaaggccgagaugcuuggguccguugugggaaacuggcaauauuucuucccugucaucuuuagcaaggcuucugauucccugcagcucguguucggcauugagcugauggaaguugaccccaucggccacguguacauuuuugccaccugucuugggcugagcuaugauggacuccugggcgacaaucagaucaugccgaaaacaggguuccugauuaucauccucgcgauuaucgccaaggagggagauugcgcuccugaagagaaaauuugggaggagcuguccguccuugagguguuugaaggccgcgaggacucuaucuucggggaucccaagaaacugcucacccaguacuuugugcaagaaaacuaucuggaguacagacaggucccuggaagcgaccccgccuguuacgaauuucuuuggggcccccgggcucugauugagacguccuauguuaaggugcuccaucacauggugaaaaucagcggcgggccucgcauuucuuacccgcugcugcaugagugggccuuuagagaaggagaggaauga

SEQ ID NO: 2274 - protein, 315 aa, Artificial Sequence
  MAGE-A9__Homo_sapiens__P43362
MSLEQRSPHCKPDEDLEAQGEDLGLMGAQEPTGEEEETTSSSDSKEEEVSAAGSSSPPQSPQGGASSSISVYYTLWSQFDEGSSSQEEEEPSSSVDPAQLEFMFQEALKLKVAELVHFLLHKYRVKEPVTKAEMLESVIKNYKRYFPVIFGKASEFMQVIFGTDVKEVDPAGHSYILVTALGLSCDSMLGDGHSMPKAALLIIVLGVILTKDNCAPEEVIWEALSVMGVYVGKEHMFYGEPRKLLTQDWVQENYLEYRQVPGSDPAHYEFLWGSKAHAETSYEKVINYLVMLNAREPICYPSLYEEVLGEEQEGV

SEQ ID NO: 2275 - RNA, 948 nt, Artificial Sequence
  MAGE-A9__Homo_sapiens__AAA68877
augucucucgagcagaggaguccgcacugcaagccugaugaagaccuugaagcccaaggagaggacuugggccugaugggugcacaggaacccacaggcgaggaggaggagacuaccuccuccucugacagcaaggaggaggaggugucugcugcugggucaucaaguccuccccagaguccucagggaggcgcuuccuccuccauuuccgucuacuacacuuuauggagccaauucgaugagggcuccagcagucaagaagaggaagagccaagcuccucggucgacccagcucagcuggaguucauguuccaagaagcacugaaauugaagguggcugaguugguucauuuccugcuccacaaauaucgagucaaggagccggucacaaaggcagaaaugcuggagagcgucaucaaaaauuacaagcgcuacuuuccugugaucuucggcaaagccuccgaguucaugcaggugaucuuuggcacugaugugaaggagguggaccccgccggccacuccuacauccuugucacugcucuuggccucucgugcgauagcaugcugggugauggucauagcaugcccaaggccgcccuccugaucauuguccugggugugauccuaaccaaagacaacugcgccccugaagagguuaucugggaagcguugagugugauggggguguauguugggaaggagcacauguucuacggggagcccaggaagcugcucacccaagauugggugcaggaaaacuaccuggaguaccggcaggugcccggcagugauccugcgcacuacgaguuccugugggguuccaaggcccacgcugaaaccagcuaugagaaggucauaaauuauuuggucaugcucaaugcaagagagcccaucugcuacccaucccuuuaugaagagguuuugggagaggagcaagagggagucuga

SEQ ID NO: 2276 - RNA, 948 nt, Artificial Sequence
  derived and/or modified sequence opt1 from MAGE-A9__Homo_sapiens__AAA68877
augagccuggagcagcgcagcccccacugcaagccggacgaggaccucgaggcccagggcgaggaccuggggcugaugggcgcccaggagcccaccggggaggaggaggagaccacguccuccagcgacuccaaggaggaggaggugagcgcggccggcuccagcuccccgccccagagcccccagggcggggccuccagcuccaucagcgucuacuacacccucuggucccaguucgacgagggcagcuccagccaggaggaggaggagcccuccagcagcguggaccccgcccagcuggaguucauguuccaggaggcccugaagcucaagguggcggagcugguccacuuccugcuccacaaguaccgggugaaggagcccgugaccaaggccgagaugcuggaguccgucaucaagaacuacaagcgcuacuucccggugaucuucgggaaggccagcgaguucaugcaggucaucuucggcaccgacgugaaggagguggaccccgccgggcacuccuacauccuggugacggcgcucggccugagcugcgacuccaugcugggggacggccacagcaugcccaaggccgcccuccugaucaucguccugggcgugauccucaccaaggacaacugcgcccccgaggaggugaucugggaggcccuguccgucauggggguguacgugggcaaggagcacauguucuacggggagccgcggaagcugcucacccaggacuggguccaggagaacuaccuggaguaccgccaggugcccggcagcgaccccgcgcacuacgaguuccuguggggcuccaaggcccacgccgagaccagcuacgagaaggugaucaacuaccucgucaugcugaacgcccgggagcccaucugcuacccgucccuguacgaggaggugcucggggaggagcaggagggcguguga

SEQ ID NO: 2277 - RNA, 948 nt, Artificial Sequence
  derived and/or modified sequence opt2 from MAGE-A9__Homo_sapiens__AAA68877
augucccucgagcagcgcuccccccacugcaagcccgacgaggaccucgaggcccagggcgaggaccucggccucaugggcgcccaggagcccaccggcgaggaggaggagaccaccuccuccuccgacuccaaggaggaggaggucuccgccgccggcuccuccucccccccccaguccccccagggcggcgccuccuccuccaucuccgucuacuacacccucuggucccaguucgacgagggcuccuccucccaggaggaggaggagcccuccuccuccgucgaccccgcccagcucgaguucauguuccaggaggcccucaagcucaaggucgccgagcucguccacuuccuccuccacaaguaccgcgucaaggagcccgucaccaaggccgagaugcucgaguccgucaucaagaacuacaagcgcuacuuccccgucaucuucggcaaggccuccgaguucaugcaggucaucuucggcaccgacgucaaggaggucgaccccgccggccacuccuacauccucgucaccgcccucggccucuccugcgacuccaugcucggcgacggccacuccaugcccaaggccgcccuccucaucaucguccucggcgucauccucaccaaggacaacugcgcccccgaggaggucaucugggaggcccucuccgucaugggcgucuacgucggcaaggagcacauguucuacggcgagccccgcaagcuccucacccaggacuggguccaggagaacuaccucgaguaccgccagguccccggcuccgaccccgcccacuacgaguuccucuggggcuccaaggcccacgccgagaccuccuacgagaaggucaucaacuaccucgucaugcucaacgcccgcgagcccaucugcuaccccucccucuacgaggagguccucggcgaggagcaggagggcgucuga

SEQ ID NO: 2278 - RNA, 948 nt, Artificial Sequence
  derived and/or modified sequence opt3 from MAGE-A9__Homo_sapiens__AAA68877
augagccuggagcagagaucuccccacugcaagccugacgaagaucucgaggcccaaggcgaagaccuugggcugaugggagcucaggagccaaccggugaagaggaggaaacaacuuccucaagugauagcaaagaggaagagguguccgcagccgggucuucgucaccgccccagagcccucagggcggagcgaguuccucuaucagcgucuacuauacguuguggucccaauucgacgagggcucaaguagccaggaagaggaggaaccaucuuccucaguugaucccgcucaguuagaauuuauguuccaggaggcccugaagcuaaaaguggcagagcucguacauuuucugcuucacaaguacagggugaaagaaccugucaccaaggccgagaugcuggaaagcgugauuaagaacuauaaacgguacuucccaguuauauuugguaaggcuagugaguucaugcaagugaucuuugggacagacgucaaagaaguggaucccgcaggacauucuuauauuuugguaacugcccucggccuguccugugacagcaugcugggcgaugggcacucgaugccuaaggcugcccucuuaaucauuguucugggagugauccuuaccaaagacaauugcgcgccagaggaggucauaugggaagcauugucugugauggguguguacgucggcaaggagcauauguucuauggggaaccgcgcaagcugcuaacacaggauuggguucaggagaacuaccucgaauaccgacaggugcccggauccgacccugcccacuaugaguuucuguggggcucaaaagcucacgccgagaccaguuacgaaaagguaaucaauuaucuugugaugcugaacgcacgugagccaauuuguuaccccagcuuguaugaagagguccucggugaggaacaagaggggguguga

SEQ ID NO: 2279 - RNA, 948 nt, Artificial Sequence
  derived and/or modified sequence opt4 from MAGE-A9__Homo_sapiens__AAA68877
augagccuggagcagagaagcccccacugcaagcccgacgaggaccuggaggcccagggcgaggaccugggccugaugggcgcccaggagcccaccggcgaggaggaggagaccaccagcagcagcgacagcaaggaggaggaggugagcgccgccggcagcagcagccccccccagagcccccagggcggcgccagcagcagcaucagcguguacuacacccuguggagccaguucgacgagggcagcagcagccaggaggaggaggagcccagcagcagcguggaccccgcccagcuggaguucauguuccaggaggcccugaagcugaagguggccgagcuggugcacuuccugcugcacaaguacagagugaaggagcccgugaccaaggccgagaugcuggagagcgugaucaagaacuacaagagauacuuccccgugaucuucggcaaggccagcgaguucaugcaggugaucuucggcaccgacgugaaggagguggaccccgccggccacagcuacauccuggugaccgcccugggccugagcugcgacagcaugcugggcgacggccacagcaugcccaaggccgcccugcugaucaucgugcugggcgugauccugaccaaggacaacugcgcccccgaggaggugaucugggaggcccugagcgugaugggcguguacgugggcaaggagcacauguucuacggcgagcccagaaagcugcugacccaggacugggugcaggagaacuaccuggaguacagacaggugcccggcagcgaccccgcccacuacgaguuccuguggggcagcaaggcccacgccgagaccagcuacgagaaggugaucaacuaccuggugaugcugaacgccagagagcccaucugcuaccccagccuguacgaggaggugcugggcgaggagcaggagggcguguga

SEQ ID NO: 2280 - RNA, 948 nt, Artificial Sequence
  derived and/or modified sequence opt5 from MAGE-A9__Homo_sapiens__AAA68877
augagccuggagcagagaagcccccacugcaagccugacgaagaucucgaggcccaaggcgaagaccuggggcuuaugggagcucaggagccgaccggcgaagaggaggaaacaacgucuagcuccgauucuaaagaggaagaggugagcgccgcgggguccucuagcccuccccagucuccccagggaggcgcuuccuccuccaucagcgucuacuauacccuguggucucaauucgacgagggguccagcucucaggaagaggaggaaccuuccagcuccguugaucccgcccagcucgaauuuauguuccaggaggcccugaaacuuaagguggcugagcuggugcauuuucuccugcacaaguaccgggucaaagaaccugugacaaaggccgagaugcuggaaucuguuauuaagaacuauaaacgcuacuucccggugaucuuuggaaaggcuagcgaguucaugcaagucauuuuuggcaccgacgugaaagaaguugaucccgccggccauuccuauauccucgugacagcgcuggggcuuagcugugacucuaugcugggagauggccacuccaugccuaaggccgcucuccugauuaucguccuuggggugauccugaccaaagacaauugcgcccccgaggaggugauuugggaagcucucagcgucaugggaguuuacgugggcaaggagcauauguucuauggggaaccuagaaagcugcugacacaggauugggugcaggagaacuaccucgaauaccggcagguccccggaucugacccggcccacuaugaguuucuguggggcagcaaagcgcacgccgagaccuccuacgaaaaggugaucaauuaucuuguuaugcugaacgcucgcgagccuauuuguuaccccucucucuaugaagaggugcugggcgaggaacaagagggggucuga

SEQ ID NO: 2281 - protein, 347 aa, Artificial Sequence
  MAGE-B10__Homo_sapiens__Q96LZ2
MPRGQKSKLRAREKRRQARGGLEDLIDALDILEEEEESPPSASACLKDVFQSSLDGASNNPHGLREAQSTSTSATAASHTRHPEGVNDQMEERPICTQDLEATDSFPRGPVDEKVIILVHYLLYKYQMKEPITKADMLRNVTQMSKSQFPVILSRASEHLELIFGLDLKEVEPNKHIYVLVNKLDLGCDAKLSDETGVPKTGLLMTVLGIIFTNGNCVAEEEVWKVFNTMGLYDGIEHFMFGEPRKLLTKDLVKENYLEYQQVPNSDPPRYQFLWGPRAHAETSKMKVLEFLAKVNDTAPSEFSNWYTEALQDEEERARARVAAKARVSATAGARSKVKSSKSSQLQ

SEQ ID NO: 2282 - RNA, 1044 nt, Artificial Sequence
  MAGE-B10__Homo_sapiens__AAI01309
augccucgaggucagaagaguaaacuccgugccagggaaaaacgccgucaggcccgaggagggcuggaagauuugauagaugcucuggacauuuuagaagaggaggaagaaucuccccccucugccucugcuuguuugaaggauguuuuccagaguucacuugauggggcauccaacaauccccauggacuucgggaagcccaauccaccagcacaucugcuacagcugcuucacacacaagacaucccgaaggagucaacgaccaaauggaagaaaggccaauaugcacacaagaucuagaagccacugauagcuuucccagaggcccuguagaugagaaaguaauuauauuggugcauuacuugcuguacaaguaccaaaugaaagagcccauuacaaaggcagauaugcugagaaauguaacccaaauguccaagagccaguucccuguaauccugagcagagcuucugagcaccuggagcugaucuuuggucuugaccugaaggaaguggagccuaauaagcacaucuauguccuugucaacaaacuagaucuaggcugugaugcaaagcugagugaugaaacaggcgugcccaagacuggccugcugaugacuguccuggguauuaucuucacaaauggcaauugugucgcugaggaggaagucuggaaaguguuuaacacgaugggguuauaugacggaauugagcacuucauguuuggggagcccaggaagcuccuuaccaaagauuuggugaaagaaaauuaccuggaguaccagcaagugcccaacagugauccuccacgcuaucaauuccuauggggcccaagagcccaugcugaaaccagcaagaugaaaguucuugaguuuuuggccaagguaaaugauacagcucccagugaauucucaaacugguauacagaggcuuuacaagaugaggaagagagagccagagccagaguugcagccaaggcucgcguuagugccacagccggugcacguuccaagguuaaguccagcaaguccucccaacugcaguaa

SEQ ID NO: 2283 - RNA, 1044 nt, Artificial Sequence
  derived and/or modified sequence opt1 from MAGE-B10__Homo_sapiens__AAI01309
augccccgcggccagaaguccaagcugcgggcccgcgagaagcggcgccaggcccgcgggggccucgaggaccugaucgacgcgcuggacauccucgaggaggaggaggagagcccgcccagcgccuccgccugccugaaggacguguuccagagcucccuggacggggccagcaacaacccccacggccuccgggaggcccaguccaccagcaccuccgcgacggccgccagccacacccggcaccccgagggggugaacgaccagauggaggagcgcccgaucugcacccaggaccuggaggccaccgacuccuucccccggggccccguggacgagaaggugaucauccugguccacuaccuccuguacaaguaccagaugaaggagcccaucacgaaggcggacaugcugcgcaacgugacccagaugagcaagucccaguucccggugauccucagccgggccuccgagcaccuggagcugaucuucggccucgaccugaaggaggucgagcccaacaagcacaucuacgugcuggugaacaagcucgaccuggggugcgacgccaagcugagcgacgagaccggcguccccaagaccgggcuccugaugacggugcugggcaucaucuucaccaacgggaacugcguggccgaggaggaggucuggaagguguucaacaccaugggccucuacgacggcaucgagcacuucauguucggggagccccgcaagcugcugaccaaggaccucgugaaggagaacuaccuggaguaccagcaggucccgaacuccgacccgccccgguaccaguuccuguggggcccccgcgcccacgcggagacgagcaagaugaaggugcucgaguuccuggccaaggugaacgacaccgcccccuccgaguucagcaacugguacaccgaggcccugcaggacgaggaggagcgggcccgcgcgcgggucgccgccaaggcccgcgugagcgccaccgcgggggcccgguccaaggucaagagcuccaagagcucccagcuccaguga

SEQ ID NO: 2284 - RNA, 1044 nt, Artificial Sequence
  derived and/or modified sequence opt2 from MAGE-B10__Homo_sapiens__AAI01309
augccccgcggccagaaguccaagcuccgcgcccgcgagaagcgccgccaggcccgcggcggccucgaggaccucaucgacgcccucgacauccucgaggaggaggaggaguccccccccuccgccuccgccugccucaaggacgucuuccaguccucccucgacggcgccuccaacaacccccacggccuccgcgaggcccaguccaccuccaccuccgccaccgccgccucccacacccgccaccccgagggcgucaacgaccagauggaggagcgccccaucugcacccaggaccucgaggccaccgacuccuucccccgcggccccgucgacgagaaggucaucauccucguccacuaccuccucuacaaguaccagaugaaggagcccaucaccaaggccgacaugcuccgcaacgucacccagauguccaagucccaguuccccgucauccucucccgcgccuccgagcaccucgagcucaucuucggccucgaccucaaggaggucgagcccaacaagcacaucuacguccucgucaacaagcucgaccucggcugcgacgccaagcucuccgacgagaccggcguccccaagaccggccuccucaugaccguccucggcaucaucuucaccaacggcaacugcgucgccgaggaggaggucuggaaggucuucaacaccaugggccucuacgacggcaucgagcacuucauguucggcgagccccgcaagcuccucaccaaggaccucgucaaggagaacuaccucgaguaccagcagguccccaacuccgaccccccccgcuaccaguuccucuggggcccccgcgcccacgccgagaccuccaagaugaagguccucgaguuccucgccaaggucaacgacaccgcccccuccgaguucuccaacugguacaccgaggcccuccaggacgaggaggagcgcgcccgcgcccgcgucgccgccaaggcccgcgucuccgccaccgccggcgcccgcuccaaggucaaguccuccaaguccucccagcuccaguga

SEQ ID NO: 2285 - RNA, 1044 nt, Artificial Sequence
  derived and/or modified sequence opt3 from MAGE-B10__Homo_sapiens__AAI01309
augcccagaggccaaaagagcaaacugagggcccgggagaagcgccgacaggcucgugggggacucgaagaccuuaucgaugcacuggacauuuuggaggaagaggaagaguccccuccaucugccucagcgugcuuaaaagauguguuccagaguagccuggacggugcuuccaacaauccgcacggccuaagagaggcccagucuaccucgacaucagcaacugccgcuagccauacgaggcaccccgaaggggucaacgaucagauggaggaacggccuauauguacccaagaccucgaggcaacagauaguuuuccacgcggacccguugacgagaaggugaucauucugguacauuaccuucuguauaaauaccagaugaaggaaccuaucacuaaggccgauauguugagaaaugugacccagauguccaaaucucaguucccagucauucucagcagggcuuccgagcaccuggaacugaucuuuggccucgacuuaaaggagguggaacccaacaaacauauauauguucuggugaauaaacuugauuuggguugcgacgccaagcugucagaugagacaggggucccuaagaccggacuacucaugacugugcugggcaucauuuucacaaacggcaauuguguagcggaggaagagguuuggaagguguuuaacaccauggggcuuuacgacggaaucgaacacuucauguuuggugagccacggaaacuguugacgaaggaccucgucaaagaaaauuaucuggaguaccaacaggugccgaacagugaucccccucgcuaucaguucuuauggggcccacgagcacacgccgagacuagcaagaugaaagugcuggaauuucucgcuaaggucaaugacaccgcccccucugaguucuccaacugguacacagaagcacuucaggaugaggaagagagagcuagggcccggguugcggccaaagcacgugugucagcuacugccggggcucgcagcaagguaaagaguucuaaauccagccaacugcaguga

SEQ ID NO: 2286 - RNA, 1044 nt, Artificial Sequence
  derived and/or modified sequence opt4 from MAGE-B10__Homo_sapiens__AAI01309
augcccagaggccagaagagcaagcugagagccagagagaagagaagacaggccagaggcggccuggaggaccugaucgacgcccuggacauccuggaggaggaggaggagagcccccccagcgccagcgccugccugaaggacguguuccagagcagccuggacggcgccagcaacaacccccacggccugagagaggcccagagcaccagcaccagcgccaccgccgccagccacaccagacaccccgagggcgugaacgaccagauggaggagagacccaucugcacccaggaccuggaggccaccgacagcuuccccagaggccccguggacgagaaggugaucauccuggugcacuaccugcuguacaaguaccagaugaaggagcccaucaccaaggccgacaugcugagaaacgugacccagaugagcaagagccaguuccccgugauccugagcagagccagcgagcaccuggagcugaucuucggccuggaccugaaggagguggagcccaacaagcacaucuacgugcuggugaacaagcuggaccugggcugcgacgccaagcugagcgacgagaccggcgugcccaagaccggccugcugaugaccgugcugggcaucaucuucaccaacggcaacugcguggccgaggaggagguguggaagguguucaacaccaugggccuguacgacggcaucgagcacuucauguucggcgagcccagaaagcugcugaccaaggaccuggugaaggagaacuaccuggaguaccagcaggugcccaacagcgacccccccagauaccaguuccuguggggccccagagcccacgccgagaccagcaagaugaaggugcuggaguuccuggccaaggugaacgacaccgcccccagcgaguucagcaacugguacaccgaggcccugcaggacgaggaggagagagccagagccagaguggccgccaaggccagagugagcgccaccgccggcgccagaagcaaggugaagagcagcaagagcagccagcugcaguga

SEQ ID NO: 2287 - RNA, 1044 nt, Artificial Sequence
  derived and/or modified sequence opt5 from MAGE-B10__Homo_sapiens__AAI01309
augcccagaggccaaaagagcaaacugcgggcccgcgagaagagacggcaggcucgcgggggacucgaagaccugaucgaugcccuugacauucuggaggaagaggaagaguccccuccgucugcgagcgcuugccucaaagauguguuccaguccucucuggacggcgccagcaacaauccccacgggcuuagagaggcccaguccaccucuacaagcgcuacggccgcuucccauacccggcacccugaaggagugaacgaucagauggaggaacgccccaucuguacacaagaccuggaggccaccgauagcuuuccuagaggccccguugacgagaaggugauuauccucgugcauuaccugcuguauaaauaccagaugaaggaaccuauuacaaaggcggauaugcuccggaaugucacccagaugucuaaaucccaguucccggugauccugagccgcgccucugagcaccuugaacugaucuuugggcucgaccugaaggagguugaacccaacaaacauauuuaugugcuugucaauaagcuggaucucggaugcgacgcuaaacuguccgaugagacaggcgugccuaagaccggccugcucaugacgguucuggggaucauuuucaccaacggaaauuguguggccgaggaagaggucuggaagguguuuaacacaaugggccuuuacgacgggaucgaacacuucauguuuggagagcccagaaaacugcucaccaaggaccuggugaaagaaaauuaucuugaguaccaacaggucccuaacagcgaucccccgcgguaucaguuccuguggggcccucgcgcucacgccgagacaucuaagaugaaaguucucgaauuucuggcgaaggugaaugacaccgcccccuccgaguucagcaacugguacacggaagcucugcaggaugaggaagagagagcccgggcucgcguggccgccaaagcuagagucuccgcgacagccggggcucggucuaaggucaagagcuccaaaagcucucaacuccaguga

SEQ ID NO: 2288 - protein, 324 aa, Artificial Sequence
  MAGE-B16__Homo_sapiens__A2A368
MSQDQESPRCTHDQHLQTFSETQSLEVAQVSKALEKTLLSSSHPLVPGKLKEAPAAKAESPLEVPQSFCSSSIAVTTTSSSESDEASSNQEEEDSPSSSEDTSDPRNVPADALDQKVAFLVNFMLHKCQMKKPITKADMLKIIIKDDESHFSEILLRASEHLEMIFGLDVVEVDPTTHCYGLFIKLGLTYDGMLSGEKGVPKTGLLIIVLGVIFMKGNRATEEEVWEVLNLTGVYSGKKHFIFGEPRMLITKDFVKEKYLEYQQVANSDPARYEFLWGPRAKAETSKMKVLEFVAKVHGSYPHSFPSQYAEALKEEEERARARI

SEQ ID NO: 2289 - RNA, 975 nt, Artificial Sequence
  MAGE-B16__Homo_sapiens__CCDS43927.1
augucucaggaucaggagaguccacgaugcacacaugaucagcaccuucagaccuucagugagacccagagccuggagguugcacaggucuccaaggcucuggagaagacccuccucuccuccucccauccucuagugccuggcaaacugaaggaagcuccugcugcuaaggcagagaguccucuugagguuccucagaguuucugcuccucuuccauugccgucacaaccaccucaucaagugaaucugaugaggcuuccagcaaucaagaagaggaagauaguccaagcuccucagaggauacaucagaccccaggaaugugcccgcagaugcucucgaccagaaaguggcuuuuuuggugaauuucaugcugcacaagugucagaugaaaaagccaauaacaaaggcagauauguugaagauuaucaucaaagaugaugagagccacuucucugagauccuccugagagcuucugagcaccuagagaugauauuuggccuugaugugguggagguggaccccaccacccauugcuauggccucuucaucaaacugggccucaccuaugaugggaugcugaguggugaaaagggugugcccaagacuggccuccugauaauuguccugggugugaucuucaugaagggcaaccgugccacugaagaggaagucugggaagugcugaauuugacgggaguauauucugggaagaagcacuucaucuuuggagagcccagaaugcucaucaccaaagauuuugugaaggagaaguaccuggaguaccagcagguggccaacagugauccugcacgauaugaauuccuguggggcccaagagccaaagcugaaaccagcaagaugaaaguccuggaguuuguggccaaaguucaugggucuuacccacauucuuucccaucucaguaugcggaagcucugaaagaggaagaagagagagcuagagccagaauuuga

SEQ ID NO: 2290 - RNA, 975 nt, Artificial Sequence
  derived and/or modified sequence opt1 from MAGE-B16__Homo_sapiens__CCDS43927.1
augagccaggaccaggagagcccccgcugcacccacgaccagcaccuccagaccuucuccgagacgcagucccuggagguggcccaggucagcaaggcccuggagaagacccugcucuccagcucccacccgcuggugcccggcaagcugaaggaggcgcccgccgccaaggccgagagcccccucgaggugccgcaguccuucugcagcuccagcaucgccgucaccaccacguccagcuccgagagcgacgaggcguccagcaaccaggaggaggaggacucccccagcagcuccgaggacaccagcgacccccggaacgugcccgccgacgcccuggaccagaagguggccuuccuggucaacuucaugcuccacaagugccagaugaagaagccgaucaccaaggcggacaugcugaagaucaucaucaaggacgacgagucccacuucagcgagauccugcuccgcgccuccgagcaccuggagaugaucuucgggcuggacgugguggaggucgaccccaccacgcacugcuacggccucuucaucaagcuggggcugaccuacgacggcaugcucagcggggagaagggcgugcccaagaccggccugcugaucaucgugcucggggucaucuucaugaagggcaaccgggccaccgaggaggaggugugggaggugcugaaccugacgggggucuacuccggcaagaagcacuucaucuucggggagccccgcaugcucaucaccaaggacuucgugaaggagaaguaccuggaguaccagcaggucgccaacagcgacccggcccgguacgaguuccuguggggcccccgcgcgaaggccgagaccuccaagaugaaggugcucgaguucguggccaaggugcacggcagcuacccccacuccuuccccagccaguacgccgaggcccugaaggaggaggaggagcgggcgcgcgcccggaucuga

SEQ ID NO: 2291 - RNA, 975 nt, Artificial Sequence
  derived and/or modified sequence opt2 from MAGE-B16__Homo_sapiens__CCDS43927.1
augucccaggaccaggaguccccccgcugcacccacgaccagcaccuccagaccuucuccgagacccagucccucgaggucgcccaggucuccaaggcccucgagaagacccuccucuccuccucccacccccucguccccggcaagcucaaggaggcccccgccgccaaggccgaguccccccucgaggucccccaguccuucugcuccuccuccaucgccgucaccaccaccuccuccuccgaguccgacgaggccuccuccaaccaggaggaggaggacucccccuccuccuccgaggacaccuccgacccccgcaacguccccgccgacgcccucgaccagaaggucgccuuccucgucaacuucaugcuccacaagugccagaugaagaagcccaucaccaaggccgacaugcucaagaucaucaucaaggacgacgagucccacuucuccgagauccuccuccgcgccuccgagcaccucgagaugaucuucggccucgacgucgucgaggucgaccccaccacccacugcuacggccucuucaucaagcucggccucaccuacgacggcaugcucuccggcgagaagggcguccccaagaccggccuccucaucaucguccucggcgucaucuucaugaagggcaaccgcgccaccgaggaggaggucugggagguccucaaccucaccggcgucuacuccggcaagaagcacuucaucuucggcgagccccgcaugcucaucaccaaggacuucgucaaggagaaguaccucgaguaccagcaggucgccaacuccgaccccgcccgcuacgaguuccucuggggcccccgcgccaaggccgagaccuccaagaugaagguccucgaguucgucgccaagguccacggcuccuacccccacuccuuccccucccaguacgccgaggcccucaaggaggaggaggagcgcgcccgcgcccgcaucuga

SEQ ID NO: 2292 - RNA, 975 nt, Artificial Sequence
  derived and/or modified sequence opt3 from MAGE-B16__Homo_sapiens__CCDS43927.1
augagccaggaccaagagucccccagaugcacccacgaucagcaucugcagacauucucugaaacucagucacucgagguggcccaagucaguaaggcucuugagaaaacgcuguugagcuccucucacccuuuaguuccaggcaagcugaaagaagcaccggccgcgaaggcugaaucgccccuagaggugccucagucauuuuguagcaguuccaucgccguaaccacaacuucuagcuccgagucagacgaagcaaguagcaaccaggaggaagaggauucuccauccucaagcgaggacaccagugaucccaggaaugugccugccgacgcucucgaucagaaagucgcauuccuggugaacuuuaugcuucauaagugccaaaugaagaaaccaauuacaaaggccgacaugcugaaaauaaucauuaaggaugacgaaucucacuucuccgagaucuugcuccgggcuagcgaacaucuggagaugauuuuugggcuggauguuguggaagucgaccccaccacucacuguuacggacucuucaucaaauuaggucugacauaugauggcaugcuuucgggggagaagggagugccuaagaccggcuugcugauaaucguacuagguguuauuuuuaugaaagggaaucgcgccacggaggaagaggugugggaaguccucaaccugacuggaguguacucuggcaagaaacacuucaucuuuggcgagccacgaaugcuuauuaccaaggacuucgugaaagaaaaguaucuggaguaccagcaggucgcaaauuccgacccggcgcguuaugaguuuuugugggggcccagagccaaagcugaaacaucaaagaugaagguucucgaguucguggccaaaguacauggaaguuacccucacagcuuuccaucccaguaugcagaagcucugaaggaggaagaggagagggcccgggcgcgcaucuga

SEQ ID NO: 2293 - RNA, 975 nt, Artificial Sequence
  derived and/or modified sequence opt4 from MAGE-B16__Homo_sapiens__CCDS43927.1
augagccaggaccaggagagccccagaugcacccacgaccagcaccugcagaccuucagcgagacccagagccuggagguggcccaggugagcaaggcccuggagaagacccugcugagcagcagccacccccuggugcccggcaagcugaaggaggcccccgccgccaaggccgagagcccccuggaggugccccagagcuucugcagcagcagcaucgccgugaccaccaccagcagcagcgagagcgacgaggccagcagcaaccaggaggaggaggacagccccagcagcagcgaggacaccagcgaccccagaaacgugcccgccgacgcccuggaccagaagguggccuuccuggugaacuucaugcugcacaagugccagaugaagaagcccaucaccaaggccgacaugcugaagaucaucaucaaggacgacgagagccacuucagcgagauccugcugagagccagcgagcaccuggagaugaucuucggccuggacgugguggagguggaccccaccacccacugcuacggccuguucaucaagcugggccugaccuacgacggcaugcugagcggcgagaagggcgugcccaagaccggccugcugaucaucgugcugggcgugaucuucaugaagggcaacagagccaccgaggaggaggugugggaggugcugaaccugaccggcguguacagcggcaagaagcacuucaucuucggcgagcccagaaugcugaucaccaaggacuucgugaaggagaaguaccuggaguaccagcagguggccaacagcgaccccgccagauacgaguuccuguggggccccagagccaaggccgagaccagcaagaugaaggugcuggaguucguggccaaggugcacggcagcuacccccacagcuuccccagccaguacgccgaggcccugaaggaggaggaggagagagccagagccagaaucuga

SEQ ID NO: 2294 - RNA, 975 nt, Artificial Sequence
  derived and/or modified sequence opt5 from MAGE-B16__Homo_sapiens__CCDS43927.1
augagccaggaccaggagucccccagaugcacccacgaucagcaucugcagacauucucugaaacgcagagccucgagguggcccaagucuccaaggcucuggagaaaacccuucugucuagcucccacccucucguuccgggcaagcugaaagaagcccccgcggcuaaggccgaaucuccucuugaggugccccagagcuuuuguuccagcucuaucgccgugacaaccacauccagcucugaguccgacgaagcuagcucuaaccaggaggaagaggauuccccuagcuccucugaggacaccagcgauccccggaaugucccugccgacgcucuggaucagaaaguggccuuccucguuaacuuuaugcugcauaagugccaaaugaagaaaccgauuacaaaggcggacaugcugaaaaucauuaucaaggaugacgaaucccacuucagcgagauucuccugcgcgccucugaacaucuugagaugaucuuugggcuggauguggucgaaguggaccccaccacgcacuguuacggacucuucaucaaacugggccuuaccuaugaugggaugcuguccggagagaagggcguuccuaagacagggcuccugauuaucgugcugggagucauuuuuaugaaaggcaauagagcuaccgaggaagaggugugggaagugcucaaccugacaggcgucuacagcgggaagaaacacuucaucuuuggagagccccggaugcuuauuaccaaggacuucguuaaagaaaaguaucuggaguaccaacagguggccaauucugacccugcucgcuaugaguuucucuggggccccagagccaaagcggaaacgagcaagaugaaggugcuggaguucgucgccaaagugcauggguccuacccgcacucuuuuccuagccaguaugcugaagcccuuaaggaggaagaggagcgggcucgcgccagaaucuga

SEQ ID NO: 2295 - protein, 336 aa, Artificial Sequence
  MAGE-B17__Homo_sapiens__A8MXT2
MPRGQASKRRAREKRRQARGEDQCLGGAQATAAEKEKLPSSSSPACQSPPQSFPNAGIPQESQRASYPSSPASAVSLTSSDEGAKGQKGESPNSFHGPSSSESTGRDLLNTKTGELVQFLLNKYIRKEPITREAMLKVINRKYKQHFPEILRRSTENVEVVFGLYLKEMDPSRQSYVLVGKLDFPNQGSLSDGGGFPLSGLLMVLLSTIFMHGNRATEEEMWECLNALGMYKGRKHFIYGEPQELVTKDLVREGYLEYQQVPSSDPPRYEFLWGPRARAETSKMKVLEFVAKLNDTVASTYKSRYEEALREEEEQARARAVARDSARARASRSFQP

SEQ ID NO: 2296 - RNA, 1011 nt, Artificial Sequence
  MAGE-B17__Homo_sapiens__CCDS59524.1
augccucgcggucaggcgaguaagcgccgugcccgugagaaacgccgccaggcucgaggugaagaccaaugucucgggggugcucaagccaccgcagcagagaaggaaaagcugccauccuccuccucuccugcaugccagaguccuccccagagcuuccccaaugcaggcauuccucaggagucccagagagccagcuaccccagcucuccugcuucagcuguuucacucacaaguucugaugaaggugccaagggccaaaagggggaaagucccaacuccuuccauggcccguccuccucugagagcacaggaagagaucuucugaacacgaagacgggcgaauuggugcaguuccuccucaacaaguauauaaggaaagagcccauuacgagggaagccaugcugaagguuaucaacagaaaguacaagcagcacuucccugagauccuccggagaagcacugagaacguagagguggucuuuggccucuaccugaaggaaauggaccccagccgucaguccuaugugcuuguuggcaagcuggacuuucccaaucaaggaagcuugagcgauggcgggggcuuuccccugagcgggcuccugaugguucuccugagcaccaucuucaugcauggcaaccgugccacugaggaagagaugugggaaugccugaaugcauuggggauguauaaggguaggaagcacuucaucuauggggagccccaggagcuugucaccaaagauuuggugcgagagggguaccuggaguaccagcaggugcccagcagcgauccuccacgcuacgaguuccuguggggucccagggcccgugcugaaaccagcaaaaugaaaguccuggaguuuguggccaagcucaaugauaccguugccaguaccuacaagucccgguaugaggaggcucugagagaggaggaagagcaagccagagccagagcgguagccagggauagcgccagggccagggcuagcagguccuuucagcccuag

SEQ ID NO: 2297 - RNA, 1011 nt, Artificial Sequence
  derived and/or modified sequence opt1 from MAGE-B17__Homo_sapiens__CCDS59524.1
augccccgcggccaggccagcaagcggcgcgcccgggagaagcgccggcaggcgcgcggggaggaccagugccugggcggggcccaggccaccgccgccgagaaggagaagcucccguccagcuccagccccgcgugccaguccccgccccagagcuuccccaacgccggcaucccccaggagucccagcgggccagcuaccccuccagccccgccuccgcggugagccugaccuccagcgacgagggggccaagggccagaagggcgaguccccgaacagcuuccacgggcccuccagcuccgagagcacgggccgcgaccugcucaacaccaagaccggggagcugguccaguuccugcucaacaaguacauccggaaggagcccaucacccgcgaggccaugcugaaggugaucaaccggaaguacaagcagcacuuccccgagauccugcgccggagcacggagaacguggaggucguguucggccucuaccugaaggagauggacccgucccgccagagcuacgugcuggucgggaagcucgacuuccccaaccagggcucccugagcgacggcgggggcuucccccuguccgggcuccugauggugcugcucagcaccaucuucaugcacggcaaccgggccaccgaggaggagaugugggagugccugaacgcccugggcauguacaaggggcgcaagcacuucaucuacggcgagccccaggagcucgugaccaaggaccugguccgggagggguaccuggaguaccagcaggucccguccagcgacccgccccgcuacgaguuccucuggggcccccgggcgcgcgccgagacguccaagaugaaggugcuggaguucguggccaagcugaacgacaccguggccagcaccuacaagucccgguacgaggaggcccuccgcgaggaggaggagcaggcgcgcgcccgggccguggcccgcgacagcgcccgggcgcgcgccucccggagcuuccagcccuga

SEQ ID NO: 2298 - RNA, 1011 nt, Artificial Sequence
  derived and/or modified sequence opt2 from MAGE-B17__Homo_sapiens__CCDS59524.1
augccccgcggccaggccuccaagcgccgcgcccgcgagaagcgccgccaggcccgcggcgaggaccagugccucggcggcgcccaggccaccgccgccgagaaggagaagcuccccuccuccuccucccccgccugccagucccccccccaguccuuccccaacgccggcaucccccaggagucccagcgcgccuccuaccccuccucccccgccuccgccgucucccucaccuccuccgacgagggcgccaagggccagaagggcgagucccccaacuccuuccacggccccuccuccuccgaguccaccggccgcgaccuccucaacaccaagaccggcgagcucguccaguuccuccucaacaaguacauccgcaaggagcccaucacccgcgaggccaugcucaaggucaucaaccgcaaguacaagcagcacuuccccgagauccuccgccgcuccaccgagaacgucgaggucgucuucggccucuaccucaaggagauggaccccucccgccaguccuacguccucgucggcaagcucgacuuccccaaccagggcucccucuccgacggcggcggcuucccccucuccggccuccucaugguccuccucuccaccaucuucaugcacggcaaccgcgccaccgaggaggagaugugggagugccucaacgcccucggcauguacaagggccgcaagcacuucaucuacggcgagccccaggagcucgucaccaaggaccucguccgcgagggcuaccucgaguaccagcagguccccuccuccgaccccccccgcuacgaguuccucuggggcccccgcgcccgcgccgagaccuccaagaugaagguccucgaguucgucgccaagcucaacgacaccgucgccuccaccuacaagucccgcuacgaggaggcccuccgcgaggaggaggagcaggcccgcgcccgcgccgucgcccgcgacuccgcccgcgcccgcgccucccgcuccuuccagcccuga

SEQ ID NO: 2299 - RNA, 1011 nt, Artificial Sequence
  derived and/or modified sequence opt3 from MAGE-B17__Homo_sapiens__CCDS59524.1
augcccagaggccaggccagcaagaggcgggcucgcgagaaacgacgucaagcaagaggggaagaccagugccugggaggugcccaggcgaccgcugccgagaaggaaaaacucccuuccucuucaaguccagcaugucagagcccgccccaauccuucccuaacgccggcaucccacaggagucucagagggcuucguaccccucaagcccugcaagugccgugucccuuacaucuagcgaugaaggggcuaagggacagaaaggcgaguccccaaauucauuucacggucccaguagcucugaguccacugggcgggaccuguugaacacgaagaccggagaauuaguccaauuccugcuaaauaaguauauucgcaaagagccuauaacaagagaagccaugcucaagguuaucaacaggaaauacaagcagcauuuuccagagauucugcggcgcucaacugagaauguggaaguaguguucggccuuuaucugaaagagauggauccgagccgacagaguuacgucuuggugggcaagcucgacuuucccaaccaggggucucuguccgauggagguggcuucccucugagcgggcucuuaaugguucugcuuucgaccaucuuuaugcacggaaauagagcgacagaagaggaaaugugggagugcuugaacgcacugggcauguauaaggguaggaaacauuucauuuacggggagccacaagagcuagugaccaaggaccucguccgggaaggauaucuggaauaccaacaggugcccucuuccgauccuccacguuacgaguuucuuuggggcccccgcgccagagcugaaacuucaaaaaugaagguacuggaguucguugccaaauugaaugacacaguggcaaguaccuauaagagcagguacgaggaagcucuccgggaggaagaggaacaggcccgagcgcgcgccgucgcaagagauuccgcuagggcccgggcuucucgcagcuuucagccguga

SEQ ID NO: 2300 - RNA, 1011 nt, Artificial Sequence
  derived and/or modified sequence opt4 from MAGE-B17__Homo_sapiens__CCDS59524.1
augcccagaggccaggccagcaagagaagagccagagagaagagaagacaggccagaggcgaggaccagugccugggcggcgcccaggccaccgccgccgagaaggagaagcugcccagcagcagcagccccgccugccagagccccccccagagcuuccccaacgccggcaucccccaggagagccagagagccagcuaccccagcagccccgccagcgccgugagccugaccagcagcgacgagggcgccaagggccagaagggcgagagccccaacagcuuccacggccccagcagcagcgagagcaccggcagagaccugcugaacaccaagaccggcgagcuggugcaguuccugcugaacaaguacaucagaaaggagcccaucaccagagaggccaugcugaaggugaucaacagaaaguacaagcagcacuuccccgagauccugagaagaagcaccgagaacguggaggugguguucggccuguaccugaaggagauggaccccagcagacagagcuacgugcuggugggcaagcuggacuuccccaaccagggcagccugagcgacggcggcggcuucccccugagcggccugcugauggugcugcugagcaccaucuucaugcacggcaacagagccaccgaggaggagaugugggagugccugaacgcccugggcauguacaagggcagaaagcacuucaucuacggcgagccccaggagcuggugaccaaggaccuggugagagagggcuaccuggaguaccagcaggugcccagcagcgacccccccagauacgaguuccuguggggccccagagccagagccgagaccagcaagaugaaggugcuggaguucguggccaagcugaacgacaccguggccagcaccuacaagagcagauacgaggaggcccugagagaggaggaggagcaggccagagccagagccguggccagagacagcgccagagccagagccagcagaagcuuccagcccuga

SEQ ID NO: 2301 - RNA, 1011 nt, Artificial Sequence
  derived and/or modified sequence opt5 from MAGE-B17__Homo_sapiens__CCDS59524.1
augcccagaggccaggccagcaagcggcgcgcuagagagaaacggcgccaagccagaggggaagaccagugccugggaggcgcgcaggcuaccgccgccgagaaggaaaaacucccuuccucuagcuccccggcuugucagucucccccucagagcuuccccaacgccgggaucccucaagagucccagcgggcuucuuaccccagcuccccugccagcgcggugucucugacauccagcgaugaaggagccaagggccagaaaggggagucuccgaauagcuuucacggacccuccucuuccgagagcacgggccgcgaccuucugaacaccaagacaggcgaacucguccaauuccugcuuaauaaguauauuagaaaagagccuaucacccgggaagcuaugcugaagguuauuaaccgcaaauacaagcagcauuuucccgagauccucagacgguccacagagaauguggaaguggucuucgggcuguaucugaaagagauggauccuucucgccagagcuacgugcucguuggaaagcuggacuuucccaaccagggcucccuuagcgaugggggaggcuucccgcugucugggcuccugauggugcuucuguccaccauuuuuaugcacggaaauagagccacagaagaggaaaugugggagugccucaacgcucugggcauguauaagggccggaaacauuucaucuacggggagccucaagaacuggucaccaaggaccucgugcgcgagggauaucuggaauaccagcagguucccagcucugauccucccagauacgaguuucuuuggggcccccgggccagagcggaaacgagcaaaaugaaggugcuggaguucgucgccaaacucaaugacaccguggcuuccacauauaagucucgcuacgaggaagcccugcgggaggaagaggaacaagcuagagcccgcgccguggcucgggauagcgcgagagcccgcgcuucccggagcuuucagccuuga

SEQ ID NO: 2302 - protein, 347 aa, Artificial Sequence [sequence omitted]

SEQ ID NO: 2303 - RNA, 1044 nt, Artificial Sequence
  MAGE-_B1__Homo_sapiens__AAC23616
augccucggggucagaagaguaagcuccgugcucgugagaaacgccgcaaggcgcgagaggagacccagggucucaagguucgucacgccacugcagcagagaaagaggagugccccuccuccucuccuguuuuaggggauacucccacaagcuccccugcugcuggcauuccccagaagccucagggagcuccacccaccaccacugcugcugcagcugugucauguaccgaaucugacgaaggugccaaaugccaaggugaggaaaaugcaaguuucucccaggccacaacauccacugagagcucagucaaagauccuguagccugggaggcaggaaugcugaugcacuucauucuacguaaguauaaaaugagagagcccauuaugaaggcagauaugcugaagguuguugaugaaaaguacaaggaucacuucacugagauccucaauggagccucucgccgcuuggagcucgucuuuggccuugauuugaaggaagacaacccuaguagccacaccuacacccucgucaguaagcuaaaccucaccaaugauggaaaccugagcaaugauugggacuuucccaggaaugggcuucugaugccucuccugggugugaucuucuuaaagggcaacucugccaccgaggaagagaucuggaaauucaugaauguguugggagccuaugauggagaggagcacuuaaucuauggggaaccccguaaguucaucacccaagaucuggugcaggaaaaauaucugaaguacgagcaggugcccaacagugaucccccacgcuaucaauuccuaugggguccgagagccuaugcugaaaccaccaagaugaaaguccucgaguuuuuggccaagaugaauggugccacuccccgugacuucccaucccauuaugaagaggcuuugagagaugaggaagagagagcccaaguccgauccaguguuagagccaggcgucgcacuacugccacgacuuuuagagcgcguucuagagccccauucagcagguccucccaccccauguga

SEQ ID NO: 2304 - RNA, 1044 nt, Artificial Sequence
  derived and/or modified sequence opt1 from MAGE-_B1__Homo_sapiens__AAC23616
augccccgcggccagaaguccaagcugcgggcccgcgagaagcggcgcaaggcccgggaggagacccaggggcucaaggugcgccacgcgaccgccgccgagaaggaggagugcccgagcagcucccccguccugggcgacacgcccaccagcucccccgccgccgggaucccgcagaagccccagggcgcgccgcccaccaccacggccgccgccgcggugagcugcaccgaguccgacgagggggccaagugccagggcgaggagaacgccagcuucucccaggccaccaccagcacggaguccagcgugaaggaccccgucgccugggaggcgggcaugcugaugcacuucauccuccggaaguacaagaugcgcgagcccaucaugaaggccgacaugcugaaggugguggacgagaaguacaaggaccacuucaccgagauccugaacggggccucccggcgccucgagcuggucuucggccuggaccucaaggaggacaaccccagcucccacaccuacacccuggugagcaagcugaaccucacgaacgacgggaaccuguccaacgacugggacuucccccggaacggccugcucaugccgcugcugggggugaucuuccucaagggcaacagcgccaccgaggaggagaucuggaaguucaugaacguccugggcgccuacgacggggaggagcaccugaucuacggcgagccccgcaaguucaucacccaggaccucgugcaggagaaguaccugaaguacgagcagguccccaacuccgacccgccccgguaccaguuccugugggggccccgcgcguacgccgagaccacgaagaugaaggugcucgaguuccuggccaagaugaacggcgccacgccccgggacuuccccagccacuacgaggaggcccugcgcgacgaggaggagcgggcccaggugcgcagcuccgugcgggcgcgccggcgcaccaccgccaccaccuuccgcgcccggagccgcgccccguucucccggagcucccaccccauguga

SEQ ID NO: 2305 - RNA, 1044 nt, Artificial Sequence
  derived and/or modified sequence opt2 from MAGE-_B1__Homo_sapiens__AAC23616
augccccgcggccagaaguccaagcuccgcgcccgcgagaagcgccgcaaggcccgcgaggagacccagggccucaagguccgccacgccaccgccgccgagaaggaggagugccccuccuccucccccguccucggcgacacccccaccuccucccccgccgccggcaucccccagaagccccagggcgccccccccaccaccaccgccgccgccgccgucuccugcaccgaguccgacgagggcgccaagugccagggcgaggagaacgccuccuucucccaggccaccaccuccaccgaguccuccgucaaggaccccgucgccugggaggccggcaugcucaugcacuucauccuccgcaaguacaagaugcgcgagcccaucaugaaggccgacaugcucaaggucgucgacgagaaguacaaggaccacuucaccgagauccucaacggcgccucccgccgccucgagcucgucuucggccucgaccucaaggaggacaaccccuccucccacaccuacacccucgucuccaagcucaaccucaccaacgacggcaaccucuccaacgacugggacuucccccgcaacggccuccucaugccccuccucggcgucaucuuccucaagggcaacuccgccaccgaggaggagaucuggaaguucaugaacguccucggcgccuacgacggcgaggagcaccucaucuacggcgagccccgcaaguucaucacccaggaccucguccaggagaaguaccucaaguacgagcagguccccaacuccgaccccccccgcuaccaguuccucuggggcccccgcgccuacgccgagaccaccaagaugaagguccucgaguuccucgccaagaugaacggcgccaccccccgcgacuuccccucccacuacgaggaggcccuccgcgacgaggaggagcgcgcccagguccgcuccuccguccgcgcccgccgccgcaccaccgccaccaccuuccgcgcccgcucccgcgcccccuucucccgcuccucccaccccauguga

SEQ ID NO: 2306 - RNA, 1044 nt, Artificial Sequence
  derived and/or modified sequence opt3 from MAGE-_B1__Homo_sapiens__AAC23616
augcccagaggccaaaagagcaaacugagggcccgggagaagcgccgaaaagcucgugaagagacccaggggcucaaggugagacacgcaacagccgcggaaaaagaggaaugcccuuccucuucaccaguccuuggagacacuccgacgaguagccccgcugccgguaucccucagaagccacagggcgcacccccuaccacaacugccgcugcagccguuuccuguaccgagucugaugagggggcuaagugccagggagaagagaacgccucguucucacaagcgacaaccagcacugaaaguuccgugaaagacccaguagcaugggaggccggcaugcugaugcauuuuauuuugaggaaguacaaaaugcgggagcccauaaugaaggcugauauguuaaaaguggucgacgaaaaguauaaggaucacuucacagagauccugaauggugccucucgcagacuagaacucguguuugggcuggaccuuaaagaggauaacccuagcucccauaccuacacgcugguuucaaaguugaaucucacuaacgacggaaaucugaguaacgauugggacuucccaaggaauggccugcucaugccguuacugggcgugauuuuucuuaaagggaacagcgcaaccgaagaggagaucuggaaguucaugaaugucuugggagcuuaugauggugaggaacaccugauuuacggcgaaccccggaaauuuaucacacaggaccuagugcaggagaaguaucucaaauacgaacagguaccuaacucugauccaccccgcuaucaauuccugugggggccucgagccuacgcggagacuaccaagaugaagguucuugaguuucuggccaaaaugaauggagcaacaccaagagacuuccccucccauuacgaagaggcuuugagggacgaagaggaacgggcccaggugcguucaagcguccgcgcuagaaggcggaccacggccacuacauuucgagcacgcaguagagccccguucucuagguccagccacccuauguga

SEQ ID NO: 2307 - RNA, 1044 nt, Artificial Sequence
  derived and/or modified sequence opt4 from MAGE-_B1__Homo_sapiens__AAC23616
augcccagaggccagaagagcaagcugagagccagagagaagagaagaaaggccagagaggagacccagggccugaaggugagacacgccaccgccgccgagaaggaggagugccccagcagcagccccgugcugggcgacacccccaccagcagccccgccgccggcaucccccagaagccccagggcgccccccccaccaccaccgccgccgccgccgugagcugcaccgagagcgacgagggcgccaagugccagggcgaggagaacgccagcuucagccaggccaccaccagcaccgagagcagcgugaaggaccccguggccugggaggccggcaugcugaugcacuucauccugagaaaguacaagaugagagagcccaucaugaaggccgacaugcugaaggugguggacgagaaguacaaggaccacuucaccgagauccugaacggcgccagcagaagacuggagcugguguucggccuggaccugaaggaggacaaccccagcagccacaccuacacccuggugagcaagcugaaccugaccaacgacggcaaccugagcaacgacugggacuuccccagaaacggccugcugaugccccugcugggcgugaucuuccugaagggcaacagcgccaccgaggaggagaucuggaaguucaugaacgugcugggcgccuacgacggcgaggagcaccugaucuacggcgagcccagaaaguucaucacccaggaccuggugcaggagaaguaccugaaguacgagcaggugcccaacagcgacccccccagauaccaguuccuguggggccccagagccuacgccgagaccaccaagaugaaggugcuggaguuccuggccaagaugaacggcgccacccccagagacuuccccagccacuacgaggaggcccugagagacgaggaggagagagcccaggugagaagcagcgugagagccagaagaagaaccaccgccaccaccuucagagccagaagcagagcccccuucagcagaagcagccaccccauguga

SEQ ID NO: 2308 - RNA, 1044 nt, Artificial Sequence
  derived and/or modified sequence opt5 from MAGE-_B1__Homo_sapiens__AAC23616
augcccagaggccaaaagagcaaacugcgggcccgcgagaagagacggaaagcucgcgaagagacccaggggcucaaggugagacacgccacagcggcugaaaaagaggaaugcccuuccucuagcccgguccugggagacacgcccaccuccucuccugccgccggcaucccccagaagccucagggggcucccccuacaaccacagccgcugccgcgguuagcuguaccgaguccgaugagggagccaagugccagggcgaagagaacgcuucuuucagccaagccacaaccuccacggaaagcucugugaaagacccgguggcuugggaggccgggaugcuuaugcauuuuauucugcggaaguacaaaaugcgcgagcccaucaugaaggcggauaugcucaaagucguggacgaaaaguauaaggaucacuucaccgagauucugaauggagccuccagacggcuugaacugguuuuuggccucgaccugaaagaggauaacccuagcucucauacauacacccugguguccaagcucaaucugacaaacgacggcaaucuuagcaacgauugggacuucccccgcaaugggcugcucaugccucugcuuggagucaucuuucugaaaggcaacucugcuaccgaagaggagauuuggaaguucaugaaugugcucggggccuaugauggagaggaacaccugaucuacggcgaacccagaaaauuuaucacgcaggaccugguucaggagaaguaucucaaauacgaacaggugccgaacuccgauccuccccgguaucaauuccugugggggccucgcgcuuacgccgagacaaccaagaugaagguccuugaguuucuggccaaaaugaauggagcuacacccagagacuuccccagccauuacgaagaggcgcuccgggacgaagaggaacgcgcccaggugagauccucugugcgggcuagacgccggaccaccgccacaacguuuagagcccgcagccgggcuccuuucuccagaagcucucacccgauguga

SEQ ID NO: 2309 - protein, 319 aa, Artificial Sequence
  MAGE-B2__Homo_sapiens__O15479
MPRGQKSKLRAREKRRKARDETRGLNVPQVTEAEEEEAPCCSSSVSGGAASSSPAAGIPQEPQRAPTTAAAAAAGVSSTKSKKGAKSHQGEKNASSSQASTSTKSPSEDPLTRKSGSLVQFLLYKYKIKKSVTKGEMLKIVGKRFREHFPEILKKASEGLSVVFGLELNKVNPNGHTYTFIDKVDLTDEESLLSSWDFPRRKLLMPLLGVIFLNGNSATEEEIWEFLNMLGVYDGEEHSVFGEPWKLITKDLVQEKYLEYKQVPSSDPPRFQFLWGPRAYAETSKMKVLEFLAKVNGTTPCAFPTHYEEALKDEEKAGV

SEQ ID NO: 2310 - RNA, 960 nt, Artificial Sequence
  MAGE-B2__Homo_sapiens__AAD10635
augccucguggucagaagaguaagcuccgugcccgugagaaacgccgcaaggcccgagaugagacccggggucucaauguuccucaggucacugaagcagaggaagaagaggcccccugcuguuccucuucuguuucugggggugcugcuucaagcucuccugcugcuggcauuccccaggagccucagagagccccaaccacugccgcugcugcggcugcggguguuucauccacaaaaucuaaaaaaggugccaagagccaccaaggugagaaaaaugcaaguuccucccaggccucaacauccacuaagagcccaagcgaagauccucuaaccaggaagucagggucguuggugcaguuccuguuguacaaguauaaaauaaaaaaguccguuacaaagggagaaaugcugaaaauuguuggcaaaagguucagggagcacuucccugagauccucaagaaagccucugagggccucaguguugucuuuggccuugagcugaauaaagucaaccccaacggccacacuuacaccuucaucgacaagguagaccucacugaugaggaaucccugcucaguuccugggacuuucccaggagaaagcuucugaugccucuccugggugugaucuucuuaaauggcaacucagcuacugaggaagagaucugggaauuccugaauauguugggagucuaugauggagaggagcacucagucuuuggggaacccuggaagcucaucaccaaagaucuggugcaggaaaaauaucuggaguacaagcaggugcccagcagugaucccccacgcuuucaauuccugugggguccgagagccuaugcugaaaccagcaagaugaaaguccuggaguuuuuggccaagguaaaugguaccacccccugugccuucccaacccauuacgaagaagcuuugaaagaugaagagaaagccggagucuga

SEQ ID NO: 2311 - RNA, 960 nt, Artificial Sequence
  derived and/or modified sequence opt1 from MAGE-B2__Homo_sapiens__AAD10635
augccccgcggccagaaguccaagcugcgggcccgcgagaagcggcgcaaggcccgggacgagacccgcgggcucaacgugccgcaggucaccgaggcggaggaggaggaggcccccugcugcagcagcuccgugagcggcggggccgccuccagcucccccgccgcgggcaucccccaggagccgcagcgggcccccacgaccgccgccgcggccgccgccggggugagcuccaccaagagcaagaagggcgccaagucccaccagggcgagaagaacgcgagcuccagccaggccuccaccagcacgaagucccccagcgaggacccccugacccgcaaguccgggagccugguccaguuccuccuguacaaguacaagaucaagaaguccgugaccaagggcgagaugcugaagaucguggggaagcgguuccgcgagcacuucccggagauccucaagaaggccagcgagggccugagcgucguguucgggcuggagcucaacaaggugaaccccaacggccacaccuacacguucaucgacaaggucgaccugaccgacgaggagucccugcucagcuccugggacuucccccggcgcaagcugcugaugccccuccugggcgugaucuuccugaacgggaacagcgccaccgaggaggagaucugggaguuccucaacaugcugggcguguacgacggggaggagcacuccgucuucggcgagccguggaagcugaucaccaaggaccucgugcaggagaaguaccuggaguacaagcagguccccagcuccgacccgccccgguuccaguuccuguggggcccccgcgccuacgcggagacgagcaagaugaaggugcucgaguuccuggccaaggugaacgggaccacccccugcgccuuccccacccacuacgaggaggcccugaaggacgaggagaaggccggcguguga

SEQ ID NO: 2312 - RNA, 960 nt, Artificial Sequence
  derived and/or modified sequence opt2 from MAGE-B2__Homo_sapiens__AAD10635
augccccgcggccagaaguccaagcuccgcgcccgcgagaagcgccgcaaggcccgcgacgagacccgcggccucaacgucccccaggucaccgaggccgaggaggaggaggcccccugcugcuccuccuccgucuccggcggcgccgccuccuccucccccgccgccggcaucccccaggagccccagcgcgcccccaccaccgccgccgccgccgccgccggcgucuccuccaccaaguccaagaagggcgccaagucccaccagggcgagaagaacgccuccuccucccaggccuccaccuccaccaagucccccuccgaggacccccucacccgcaaguccggcucccucguccaguuccuccucuacaaguacaagaucaagaaguccgucaccaagggcgagaugcucaagaucgucggcaagcgcuuccgcgagcacuuccccgagauccucaagaaggccuccgagggccucuccgucgucuucggccucgagcucaacaaggucaaccccaacggccacaccuacaccuucaucgacaaggucgaccucaccgacgaggagucccuccucuccuccugggacuucccccgccgcaagcuccucaugccccuccucggcgucaucuuccucaacggcaacuccgccaccgaggaggagaucugggaguuccucaacaugcucggcgucuacgacggcgaggagcacuccgucuucggcgagcccuggaagcucaucaccaaggaccucguccaggagaaguaccucgaguacaagcagguccccuccuccgaccccccccgcuuccaguuccucuggggcccccgcgccuacgccgagaccuccaagaugaagguccucgaguuccucgccaaggucaacggcaccacccccugcgccuuccccacccacuacgaggaggcccucaaggacgaggagaaggccggcgucuga

SEQ ID NO: 2313 - RNA, 960 nt, Artificial Sequence
  derived and/or modified sequence opt3 from MAGE-B2__Homo_sapiens__AAD10635
augcccagaggccagaaaagcaaacugagggcccgggagaagcgccgaaaagcucgugacgaaaccagagggcucaacgugccucaagucacagaggcagaagaggaagaggccccaugcuguuccucuucaguuaguggaggugcggcuagcuccucuccggccgcaggcaucccccaggagccucagagggccccaacuacggcugcagccgcugccgcgggggugucgucaaccaagagcaaaaagggagcaaagagucaccagggcgaaaagaaugccuccucuagccaagcuaguacaucaacuaagagucccagcgaggauccucuuacccggaaaucugguucccugguacaguucuuguuauacaaguauaaaauuaagaagucagugacaaaaggggaaaugcugaagauagucggaaaacgcuuuagagagcauuucccagagauccuaaagaaagccagcgaaggccucagugugguuuuuggccuggagcuuaacaaggugaaucccaacgggcacaccuacacuuucauugacaaagucgaucugacagacgaagagucuuugcucuccagcugggauuuuccuaggcggaagcugcugaugccacucuuaggagugaucuuccugaaugguaacucggcaaccgaagaggagauuugggaauuucuuaauauguugggcguauaugacggggaggaacauucuguuuucggagagccguggaagcugaucacgaaagaucuagugcaggaaaaguaccucgaguauaaacagguccccuccucagacccuccacgcuuucaauuccuguggggcccccgagcuuacgccgagacuuccaagaugaaagugcuugaauuucuggcgaaggugaacgguaccacaccuugcgccuucccaacucacuaugaggaagcauugaaggaugaggaaaaagcuggggucuga

SEQ ID NO: 2314 - RNA, 960 nt, Artificial Sequence
  derived and/or modified sequence opt4 from MAGE-B2__Homo_sapiens__AAD10635
augcccagaggccagaagagcaagcugagagccagagagaagagaagaaaggccagagacgagaccagaggccugaacgugccccaggugaccgaggccgaggaggaggaggcccccugcugcagcagcagcgugagcggcggcgccgccagcagcagccccgccgccggcaucccccaggagccccagagagcccccaccaccgccgccgccgccgccgccggcgugagcagcaccaagagcaagaagggcgccaagagccaccagggcgagaagaacgccagcagcagccaggccagcaccagcaccaagagccccagcgaggacccccugaccagaaagagcggcagccuggugcaguuccugcuguacaaguacaagaucaagaagagcgugaccaagggcgagaugcugaagaucgugggcaagagauucagagagcacuuccccgagauccugaagaaggccagcgagggccugagcgugguguucggccuggagcugaacaaggugaaccccaacggccacaccuacaccuucaucgacaagguggaccugaccgacgaggagagccugcugagcagcugggacuuccccagaagaaagcugcugaugccccugcugggcgugaucuuccugaacggcaacagcgccaccgaggaggagaucugggaguuccugaacaugcugggcguguacgacggcgaggagcacagcguguucggcgagcccuggaagcugaucaccaaggaccuggugcaggagaaguaccuggaguacaagcaggugcccagcagcgacccccccagauuccaguuccuguggggccccagagccuacgccgagaccagcaagaugaaggugcuggaguuccuggccaaggugaacggcaccacccccugcgccuuccccacccacuacgaggaggcccugaaggacgaggagaaggccggcguguga

SEQ ID NO: 2315 - RNA, 960 nt, Artificial Sequence
  derived and/or modified sequence opt5 from MAGE-B2__Homo_sapiens__AAD10635
augcccagaggccaaaagagcaaacugcgggcccgcgagaagagacggaaagcucgcgacgaaaccagagggcucaacgugccucaggucacagaggccgaagaggaagaggcgccgugcuguuccucuagcguuuccggaggcgcugccucuagcucccccgccgcugggaucccucaggagccccagcgggccccuacgaccgcugccgcggccgcugccggagugucuagcacaaaguccaaaaagggcgcuaagagccaccagggggaaaagaaugccucuuccagccaagcgucuaccuccacaaagagccccucugaggauccucugacccgcaaauccggaagccuugugcaguuccugcucuacaaguauaaaauuaagaaguccgucacaaaaggcgaaaugcugaagaucgugggcaaaagauuucgggagcauuucccggagauucuuaagaaagccucugaagggcugagcguuguguuuggacucgagcugaacaaggucaaucccaacggccacaccuacacguucaucgacaaaguggaucugaccgacgaagagucccuccugagcucuugggauuuuccucgcagaaaacuucugaugccccuccuggggguuauuuuccuuaauggaaacuccgcuacagaagaggagaucugggaauuucugaauaugcucggcguguaugacggggaggaacauagcgucuucggagagccuuggaagcugaucaccaaagaucuggugcaggaaaaguaccucgaguauaaacaggugcccucuagcgacccgccucgguuucaauuccuguggggcccccgcgccuacgcugagacauccaagaugaaaguccuugaauuucuggccaagguuaacggcaccacgccuugcgccuuccccacacacuaugaggaagcucucaaggaugaggaaaaagcggggguguga

SEQ ID NO: 2316 - protein, 346 aa, Artificial Sequence
  MAGE-B3__Homo_sapiens__O15480
MPRGQKSTLHAREKRQQTRGQTQDHQGAQITATNKKKVSFSSPLILGATIQKKSAGRSRSALKKPQRALSTTTSVDVSYKKSYKGANSKIEKKQSFSQGLSSTVQSRTDPLIMKTNMLVQFLMEMYKMKKPIMKADMLKIVQKSHKNCFPEILKKASFNMEVVFGVDLKKVDSTKDSYVLVSKMDLPNNGTVTRGRGFPKTGLLLNLLGVIFMKGNCATEEKIWEFLNKMRIYDGKKHFIFGEPRKLITQDLVKLKYLEYRQVPNSNPARYEFLWGPRAHAETSKMKVLEFWAKVNKTVPSAFQFWYEEALRDEEERVQAAAMLNDGSSAMGRKCSKAKASSSSHA

SEQ ID NO: 2317 - RNA, 1041 nt, Artificial Sequence
  MAGE-B3__Homo_sapiens__AAD10636
augccucggggucagaagaguacgcuccaugcacgugagaaacgccagcagacccggggucagacccaggaucaccagggugcucagaucacugcaacuaacaagaaaaaaguauccuuuucauccccucuuauuuugggggcuacuauccagaaaaagucugcugguaggucacguagugcucucaagaagccucagagagcacuauccaccacuacaucuguagauguuucuuacaaaaagucauacaagggagccaacagcaaaauugagaaaaagcaaagcuucucucagggucuauccuccacugugcagucucgcacagacccucuaaucaugaagacaaauauguuggugcaguuccugauggaaauguacaagaugaaaaagcccauuaugaaagcagauaugcuaaaaauuguccaaaaaagccauaagaauugcuucccugagauccuuaaaaaagcuucuuucaacauggaggugguauuugguguugauuuaaagaaaguugauucuaccaaggacuccuauguccuugucagcaaaauggaucuccccaacaaugggacagugacucgugggaggggauuucccaagacaggucuccugcugaaucuccugggcgugaucuucaugaagggcaacugugccacugaggagaagaucugggaauuccugaauaagaugagaauauaugaugggaagaaacacuucauauuuggggagcccagaaagcucaucacccaagauuuggugaagcuuaaauaccuggaguaccgacaagugcccaacaguaauccugcacgcuaugaauuccugugggguccaagagcccaugcugaaaccagcaagaugaagguccuggaguuuugggccaaggucaauaaaacuguccccagugcguuccaguucugguaugaagaggcuuugagagaugaggaagaaagaguccaagcugcagcuaugcucaaugauggcaguagugccaugggcagaaaguguuccaaggccaaggcuagcagcucuucccacgccuag

SEQ ID NO: 2318 - RNA, 1041 nt, Artificial Sequence
  derived and/or modified sequence opt1 from MAGE-B3__Homo_sapiens__AAD10636
augccccgcggccagaaguccacccugcacgcccgggagaagcgccagcagacccgggggcagacgcaggaccaccagggcgcccagaucaccgcgaccaacaagaagaaggugagcuucagcuccccgcucauccugggggccaccauccagaagaaguccgccggccgcagccggagcgcccugaagaagccccagcgcgcccucuccacgaccaccagcgucgacguguccuacaagaaguccuacaagggggcgaacagcaagaucgagaagaagcagagcuucucccagggccugagcuccaccgugcagagccggacggacccccugaucaugaagaccaacaugcucguccaguuccugauggagauguacaagaugaagaagcccaucaugaaggccgacaugcugaagaucgugcagaagucccacaagaacugcuucccggagauccucaagaaggccagcuucaacauggagguggucuucggcguggaccugaagaagguggacuccaccaaggacagcuacguccuggugagcaagauggaccuccccaacaacgggaccgugacgcgcggccggggguuccccaagaccggccugcugcucaaccugcugggggucaucuucaugaagggcaacugcgccaccgaggagaagaucugggaguuccucaacaagaugcgcaucuacgacggcaagaagcacuucaucuucggggagccccggaagcugaucacccaggaccuggugaagcucaaguaccuggaguaccgccaggugccgaacuccaaccccgcgcgguacgaguuccuguggggcccccgcgcccacgccgagacgagcaagaugaagguccucgaguucugggccaaggugaacaagaccgugcccuccgccuuccaguucugguacgaggaggcgcugcgggacgaggaggagcgcguccaggccgccgccaugcugaacgacgggagcuccgccaugggccggaagugcagcaaggcgaaggccuccagcuccagccacgccuga

SEQ ID NO: 2319 - RNA, 1041 nt, Artificial Sequence
  derived and/or modified sequence opt2 from MAGE-B3__Homo_sapiens__AAD10636
augccccgcggccagaaguccacccuccacgcccgcgagaagcgccagcagacccgcggccagacccaggaccaccagggcgcccagaucaccgccaccaacaagaagaaggucuccuucuccuccccccucauccucggcgccaccauccagaagaaguccgccggccgcucccgcuccgcccucaagaagccccagcgcgcccucuccaccaccaccuccgucgacgucuccuacaagaaguccuacaagggcgccaacuccaagaucgagaagaagcaguccuucucccagggccucuccuccaccguccagucccgcaccgacccccucaucaugaagaccaacaugcucguccaguuccucauggagauguacaagaugaagaagcccaucaugaaggccgacaugcucaagaucguccagaagucccacaagaacugcuuccccgagauccucaagaaggccuccuucaacauggaggucgucuucggcgucgaccucaagaaggucgacuccaccaaggacuccuacguccucgucuccaagauggaccuccccaacaacggcaccgucacccgcggccgcggcuuccccaagaccggccuccuccucaaccuccucggcgucaucuucaugaagggcaacugcgccaccgaggagaagaucugggaguuccucaacaagaugcgcaucuacgacggcaagaagcacuucaucuucggcgagccccgcaagcucaucacccaggaccucgucaagcucaaguaccucgaguaccgccagguccccaacuccaaccccgcccgcuacgaguuccucuggggcccccgcgcccacgccgagaccuccaagaugaagguccucgaguucugggccaaggucaacaagaccguccccuccgccuuccaguucugguacgaggaggcccuccgcgacgaggaggagcgcguccaggccgccgccaugcucaacgacggcuccuccgccaugggccgcaagugcuccaaggccaaggccuccuccuccucccacgccuga

SEQ ID NO: 2320 - RNA, 1041 nt, Artificial Sequence
  derived and/or modified sequence opt3 from MAGE-B3__Homo_sapiens__AAD10636
augcccagaggccaaaagagcacccugcacgccagggagaaacggcaacagacacgcgggcagacucaggaccaucaaggagcucagaucacggcaaccaacaagaaaaagguguccuucucuucaccucucauucuuggugccacaauacagaaaaagagugcgggccgaagccguuccgcucugaagaaaccacagagagccuugucuacuaccacaucggucgauguuucauacaagaaaagcuauaagggggcaaauaguaaaaucgaaaagaagcaauccuuuucucagggauuaagcuccaccgugcagucaaggacugacccgcugauuaugaaaacaaacaugcuaguacaguuccucauggagauguacaagaugaaaaagcccaucaugaaagccgauaugcugaagauugugcagaaaagucacaagaauugcuuuccugaaauccuuaagaaagcuagcuucaacauggaggucguguuuggcguugaccugaagaaaguggauucuaccaaggacuccuaugucuuggugucaaaaauggaucucccaaauaacgguacgguaacucgggggcgcggauuccccaagaccggccugcugcucaauuuacugggcguuauauuuaugaaggggaacugugcaacagaagagaaaaucugggaguuccuuaauaagaugagaauuuacgacgguaaaaagcauuuuaucuucggagaaccuaggaaauugauuacucaggaucuggugaagcuaaaguaucucgaguaccggcaggucccaaacagcaaucccgcccgcuaugaauuucuguggggcccucgagcucacgccgagaccaguaaaaugaaggugcuugaguucugggcgaaagugaacaagacagucccaucugcauuucaauucugguacgaagaggcccugagagacgaagaggaaaggguucaggcugccgcaauguugaaugauggguccagcgcuaugggacggaaaugcucgaaggccaaggcgucuuccucaagucaugccuga

SEQ ID NO: 2321 - RNA, 1041 nt, Artificial Sequence
  derived and/or modified sequence opt4 from MAGE-B3__Homo_sapiens__AAD10636
augcccagaggccagaagagcacccugcacgccagagagaagagacagcagaccagaggccagacccaggaccaccagggcgcccagaucaccgccaccaacaagaagaaggugagcuucagcagcccccugauccugggcgccaccauccagaagaagagcgccggcagaagcagaagcgcccugaagaagccccagagagcccugagcaccaccaccagcguggacgugagcuacaagaagagcuacaagggcgccaacagcaagaucgagaagaagcagagcuucagccagggccugagcagcaccgugcagagcagaaccgacccccugaucaugaagaccaacaugcuggugcaguuccugauggagauguacaagaugaagaagcccaucaugaaggccgacaugcugaagaucgugcagaagagccacaagaacugcuuccccgagauccugaagaaggccagcuucaacauggaggugguguucggcguggaccugaagaagguggacagcaccaaggacagcuacgugcuggugagcaagauggaccugcccaacaacggcaccgugaccagaggcagaggcuuccccaagaccggccugcugcugaaccugcugggcgugaucuucaugaagggcaacugcgccaccgaggagaagaucugggaguuccugaacaagaugagaaucuacgacggcaagaagcacuucaucuucggcgagcccagaaagcugaucacccaggaccuggugaagcugaaguaccuggaguacagacaggugcccaacagcaaccccgccagauacgaguuccuguggggccccagagcccacgccgagaccagcaagaugaaggugcuggaguucugggccaaggugaacaagaccgugcccagcgccuuccaguucugguacgaggaggcccugagagacgaggaggagagagugcaggccgccgccaugcugaacgacggcagcagcgccaugggcagaaagugcagcaaggccaaggccagcagcagcagccacgccuga

SEQ ID NO: 2322 - RNA, 1041 nt, Artificial Sequence
  derived and/or modified sequence opt5 from MAGE-B3__Homo_sapiens__AAD10636
augcccagaggccaaaagagcacccugcacgcccgggagaaacgccaacagacaagagggcagacgcaggaccaucaaggagcucagaucaccgccacaaacaagaaaaagguguccuucucuagcccucucauucugggcgcgaccauccagaaaaaguccgcugggcggucucgcagcgcccuuaagaaaccgcagagagcccuguccacaaccacaucugucgauguuagcuacaagaaauccuauaagggagcuaauagcaaaauugaaaagaagcaaucuuuuucccagggccucagcucuaccgugcagucccggacggacccccugaucaugaaaaccaacaugcuugugcaguuccugauggagauguacaagaugaaaaagccuauuaugaaagccgauaugcucaagaucguccagaaaagccacaagaauugcuuucccgaaauccugaagaaagccucuuucaacauggaggugguuuuugggguggaccugaagaaagucgauuccacaaaggacagcuaugugcucguuuccaaaauggaucugccuaauaacggaaccgugacacgcggcagaggcuuccccaagaccgggcuucugcucaaucugcuuggagucauuuuuaugaagggcaacugugcuacggaagagaaaaucugggaguuccugaauaagaugcggauuuacgacgggaaaaagcauuuuaucuucggagaaccucgcaaacucauuacacaggaucuggugaagcugaaguaucucgaguacagacaggugccgaacucuaaucccgcgcgguaugaauuucuguggggcccucgcgcccacgcugagaccagcaaaaugaagguccuugaguucugggccaaaguuaacaagacagugcccuccgcuuuucaauucugguacgaagaggcccugagagacgaagaggaacgggugcaggcggccgcuaugcucaaugaugggagcucugccaugggacgcaaaugcuccaaggcuaaggccagcucuagcucccaugccuga

SEQ ID NO: 2323 - protein, 346 aa, Artificial Sequence
  MAGE-B4__Homo_sapiens__O15481
MPRGQKSKLRAREKRQRTRGQTQDLKVGQPTAAEKEESPSSSSSVLRDTASSSLAFGIPQEPQREPPTTSAAAAMSCTGSDKGDESQDEENASSSQASTSTERSLKDSLTRKTKMLVQFLLYKYKMKEPTTKAEMLKIISKKYKEHFPEIFRKVSQRTELVFGLALKEVNPTTHSYILVSMLGPNDGNQSSAWTLPRNGLLMPLLSVIFLNGNCAREEEIWEFLNMLGIYDGKRHLIFGEPRKLITQDLVQEKYLEYQQVPNSDPPRYQFLWGPRAHAETSKMKVLEFLAKVNDTTPNNFPLLYEEALRDEEERAGARPRVAARRGTTAMTSAYSRATSSSSSQPM

SEQ ID NO: 2324 - RNA, 1041 nt, Artificial Sequence
  MAGE-B4__Homo_sapiens__AAC23619
augccucggggucagaagaguaagcuccgugcccgugagaaacgccagcggacccguggucagacccaggaucucaagguuggucagccuacugcagcagagaaagaagagucuccuuccucuuccucaucuguuuugagggauacugccuccagcucccuugcuuuuggcauuccccaggagccucagagagagccacccaccaccucugcugcugcagcuaugucaugcacuggaucugauaaaggcgacgagagccaagaugaggaaaaugcaaguuccucccaggccucaacauccacugagagaucacucaaagauucucuaaccaggaagacgaagauguuagugcaguuccugcuguacaaguauaaaaugaaagagcccacuacaaaggcagaaaugcugaagaucaucagcaaaaaguacaaggagcacuucccugagaucuucaggaaagucucucagcgcacggagcuggucuuuggccuugccuugaaggaggucaaccccaccacucacuccuacauccucgucagcaugcuaggccccaacgauggaaaccagagcagugccuggacccuuccaaggaaugggcuucugaugccucuacugagugugaucuucuuaaauggcaacugugcccgugaagaggaaaucugggaauuccugaauaugcuggggaucuaugauggaaagaggcaccuuaucuuuggggaaccccgaaagcucaucacccaagaucuggugcaggaaaaauaucuggaauaccagcaggugcccaacagugaucccccacgcuaucaauuccugugggguccaagagcucaugcagaaaccagcaagaugaaaguccuggaguuuuuggccaaggugaaugacaccacccccaauaacuucccacuccuuuaugaagaggcuuugagagaugaagaagagagagcuggagcccggcccagaguugcagccaggcguggcacuacagccaugacuagugcguauuccagggccacauccaguagcucuucccaacccauguga

SEQ ID NO: 2325 - RNA, 1041 nt, Artificial Sequence
  derived and/or modified sequence opt1 from MAGE-B4__Homo_sapiens__AAC23619
augccccgcggccagaaguccaagcugcgggcccgcgagaagcggcagcgcacccgggggcagacccaggaccucaaggugggccagccgacggccgcggagaaggaggagagccccagcuccagcuccagcguccugcgcgacaccgccuccagcucccuggccuucgggaucccccaggagccccagcgggagccgcccaccaccagcgccgccgcggccauguccugcacgggcagcgacaagggggacgagucccaggacgaggagaacgccagcuccagccaggccuccaccagcaccgagcgcucccucaaggacagccugacccggaagacgaagaugcuggugcaguuccuccuguacaaguacaagaugaaggagcccaccaccaaggcggagaugcugaagaucaucagcaagaaguacaaggagcacuuccccgagaucuuccgcaaggugucccagcggaccgagcucgucuucggccuggcccugaaggaggugaacccgacgacccacagcuacauccucguguccaugcugggccccaacgacgggaaccagagcuccgccuggacccugccccgcaacggccuccugaugccccugcucagcgucaucuuccugaacgggaacugcgcccgggaggaggagaucugggaguuccugaacaugcucggcaucuacgacgggaagcgccaccugaucuucggcgagccgcggaagcugaucacccaggaccucgugcaggagaaguaccuggaguaccagcagguccccaacuccgacccgccccgcuaccaguuccuguggggcccccgggcccacgcggagacgagcaagaugaaggugcucgaguuccuggccaaggugaacgacaccacccccaacaacuucccccugcucuacgaggaggcccugcgcgacgaggaggagcgggccggggcccgcccccggguggcggcccgccgcggcaccacggccaugaccuccgccuacagccgggccaccuccagcuccagcucccagccgauguga

SEQ ID NO: 2326 - RNA, 1041 nt, Artificial Sequence
  derived and/or modified sequence opt2 from MAGE-B4__Homo_sapiens__AAC23619
augccccgcggccagaaguccaagcuccgcgcccgcgagaagcgccagcgcacccgcggccagacccaggaccucaaggucggccagcccaccgccgccgagaaggaggagucccccuccuccuccuccuccguccuccgcgacaccgccuccuccucccucgccuucggcaucccccaggagccccagcgcgagccccccaccaccuccgccgccgccgccauguccugcaccggcuccgacaagggcgacgagucccaggacgaggagaacgccuccuccucccaggccuccaccuccaccgagcgcucccucaaggacucccucacccgcaagaccaagaugcucguccaguuccuccucuacaaguacaagaugaaggagcccaccaccaaggccgagaugcucaagaucaucuccaagaaguacaaggagcacuuccccgagaucuuccgcaaggucucccagcgcaccgagcucgucuucggccucgcccucaaggaggucaaccccaccacccacuccuacauccucgucuccaugcucggccccaacgacggcaaccaguccuccgccuggacccucccccgcaacggccuccucaugccccuccucuccgucaucuuccucaacggcaacugcgcccgcgaggaggagaucugggaguuccucaacaugcucggcaucuacgacggcaagcgccaccucaucuucggcgagccccgcaagcucaucacccaggaccucguccaggagaaguaccucgaguaccagcagguccccaacuccgaccccccccgcuaccaguuccucuggggcccccgcgcccacgccgagaccuccaagaugaagguccucgaguuccucgccaaggucaacgacaccacccccaacaacuucccccuccucuacgaggaggcccuccgcgacgaggaggagcgcgccggcgcccgcccccgcgucgccgcccgccgcggcaccaccgccaugaccuccgccuacucccgcgccaccuccuccuccuccucccagcccauguga

SEQ ID NO: 2327 - RNA, 1041 nt, Artificial Sequence
  derived and/or modified sequence opt3 from MAGE-B4__Homo_sapiens__AAC23619
augcccagaggccaaaagagcaaacugagggcccgggagaagcgccagcgaacccgugggcagacacaggaccucaaagugggacagccuacugcugcagaaaaggaggaauccccaucuucaaguagcuccguccuuagagauacggccucuucgucacuggcguucgguaucccgcaagagccccagagggaaccuccaaccacaagcgcugccgcagccaugaguugcacuggcuccgacaaaggggaugagucucaggacgaggaaaacgcuagcuccucacaggcaaguaccagcacagagcggucuuugaaggauuccuuaacccgcaagacuaaaaugcugguucaauuucuacucuacaaguauaaaaugaaggaacccacaaccaaagccgagaugcugaagauuauaucaaagaaauacaaggagcacuucccugaaaucuuuagaaaagugagccagaggacggagcuuguauucggacuggcuuugaaggaagugaauccaacuacccauaguuauauucucgucucuaugcugggccccaacgacgguaaucaguccagcgccuggacacugccucggaacgggcucuuaaugccacugcuuucggugaucuuuuugaauggaaacugugcgcgcgaggaagagauuugggaguuccugaauaugcuaggcaucuacgauggcaaacgacaccucauauuuggggaaccgagaaagcugaucacucaggaccuuguucaagagaaauaucuggaauaccaacaggugcccaacucugauccuccaagguaucaguucuuguggggaccccgggcacaugccgagaccuccaagaugaagguccucgaauuucuggcuaaagugaaugacacaaccccuaacaauuucccauuacuguacgaggaggcccuccgugaugaagaggaacgcgcuggugcaagacccaggguagccgcgcggcgaggcacgacugccaugacaucagcauacagucgcgcuaccagcuccucuagcucacagccgauguga

SEQ ID NO: 2328 - RNA, 1041 nt, Artificial Sequence
  derived and/or modified sequence opt4 from MAGE-B4__Homo_sapiens__AAC23619
augcccagaggccagaagagcaagcugagagccagagagaagagacagagaaccagaggccagacccaggaccugaaggugggccagcccaccgccgccgagaaggaggagagccccagcagcagcagcagcgugcugagagacaccgccagcagcagccuggccuucggcaucccccaggagccccagagagagccccccaccaccagcgccgccgccgccaugagcugcaccggcagcgacaagggcgacgagagccaggacgaggagaacgccagcagcagccaggccagcaccagcaccgagagaagccugaaggacagccugaccagaaagaccaagaugcuggugcaguuccugcuguacaaguacaagaugaaggagcccaccaccaaggccgagaugcugaagaucaucagcaagaaguacaaggagcacuuccccgagaucuucagaaaggugagccagagaaccgagcugguguucggccuggcccugaaggaggugaaccccaccacccacagcuacauccuggugagcaugcugggccccaacgacggcaaccagagcagcgccuggacccugcccagaaacggccugcugaugccccugcugagcgugaucuuccugaacggcaacugcgccagagaggaggagaucugggaguuccugaacaugcugggcaucuacgacggcaagagacaccugaucuucggcgagcccagaaagcugaucacccaggaccuggugcaggagaaguaccuggaguaccagcaggugcccaacagcgacccccccagauaccaguuccuguggggccccagagcccacgccgagaccagcaagaugaaggugcuggaguuccuggccaaggugaacgacaccacccccaacaacuucccccugcuguacgaggaggcccugagagacgaggaggagagagccggcgccagacccagaguggccgccagaagaggcaccaccgccaugaccagcgccuacagcagagccaccagcagcagcagcagccagcccauguga

SEQ ID NO: 2329 - RNA, 1041 nt, Artificial Sequence
  derived and/or modified sequence opt5 from MAGE-B4__Homo_sapiens__AAC23619
augcccagaggccagaagucuaaacugcgggcccgcgagaagagacaacggacccgcgggcagacacaggaccucaaagugggacagccuacggcugccgaaaaggaggaauccccgucuagcuccucuagcguccugagagauaccgcguccucuagccuugcuuucggcaucccccaagagccucagcgggaacccccuacaaccuccgccgccgcugccaugagcugcacagggucugacaaaggagaugagucccaggacgaggaaaacgcuagcagcucccaggccagcaccucuacagagcgcucccugaaggauagccucaccagaaagacgaaaaugcugguucaauuucuucuguacaaguauaaaaugaaggaacccaccacaaaagcggagaugcucaagauuaucuccaagaaauacaaggagcacuucccugaaauuuuucggaaagugucucagcgcaccgagcugguguucggccuggcccucaaggaagucaauccgacaacccauagcuauauccugguguccaugcuugggcccaacgacggaaaucagagcucugcuuggacgcugccuagaaacggccuccugaugccccuucuguccguuauuuuucucaauggcaacugugcccgggaggaagagaucugggaguuccugaauaugcuggggaucuacgauggaaaacgccaccucauuuuuggcgaaccuagaaagcugaucacacaggaccuugugcaagagaaauaucuggaauaccagcagguccccaacagcgauccgccucgguaucaauuccucugggggccccgcgcucaugccgagaccucuaagaugaaggugcuggaauuucuugcgaaaguuaaugacacaaccccuaacaauuucccccugcucuacgaggaggcccugagagaugaagaggaacgggcuggagccagaccccgcguggcugcccggagaggcaccacagccaugacgagcgcuuacucccgcgcgaccucuagcuccagcucucagccuauguga

SEQ ID NO: 2330 - protein, 275 aa, Artificial Sequence
  MAGE-B5__Homo_sapiens__Q9BZ81
MTSAGVFNAGSDERANSRDEEYPCSSEVSPSTESSCSNFINIKVGLLEQFLLYKFKMKQRILKEDMLKIVNPRYQNQFAEIHRRASEHIEVVFAVDLKEVNPTCHLYDLVSKLKLPNNGRIHVGKVLPKTGLLMTFLVVIFLKGNCANKEDTWKFLDMMQIYDGKKYYIYGEPRKLITQDFVRLTYLEYHQVPCSYPAHYQFLWGPRAYTETSKMKVLEYLAKVNDIAPGAFSSQYEEALQDEEESPSQRCSRNWHYCSGQDCLRAKFSSFSQPY

SEQ ID NO: 2331 - RNA, 828 nt, Artificial Sequence
  MAGE-B5__Homo_sapiens__CCDS65233.1
augacuucugcagguguuuuuaaugcaggaucugacgaaagggcuaacaguagagaugaggaguacccauguuccucagaggucucacccuccacugagaguucaugcagcaauuucauaaauauuaagguggguuuguuggagcaguuccugcucuacaaguucaaaaugaaacagcguauuuugaaggaagauaugcugaagauugucaacccaagauaccaaaaccaguuugcugagauucacagaagagcuucugagcacauugagguugucuuugcaguugacuugaaggaagucaacccaacuugucacuuauaugaccuugucagcaagcugaaacuccccaacaaugggaggauucauguuggcaaaguguuacccaagacuggucuccucaugacuuuccugguugugaucuuccugaaaggcaacugugccaacaaggaagauaccuggaaauuucuggauaugaugcaaauauaugaugggaagaaguacuacaucuauggagagcccaggaagcucaucacucaggauuucgugaggcuaacguaccuggaguaccaccaggugcccugcaguuauccugcacacuaucaauuccuuugggguccaagagccuauacugaaaccagcaagaugaaaguccuggaauauuuggccaaggucaaugauauugcuccaggugccuucucaucacaauaugaagaggcuuugcaagaugaggaagagagcccaagccagagaugcagccgaaacuggcacuacugcaguggccaagacugucucagggcgaaguucagcagcuucucucaacccuauuga

SEQ ID NO: 2332 - RNA, 828 nt, Artificial Sequence
  derived and/or modified sequence opt1 from MAGE-B5__Homo_sapiens__CCDS65233.1
augaccagcgccggcguguucaacgccggguccgacgagcgcgcgaacagccgggacgaggaguaccccugcuccagcgaggucuccccgagcaccgaguccagcugcuccaacuucaucaacaucaaggugggccugcucgagcaguuccugcuguacaaguucaagaugaagcagcgcauccucaaggaggacaugcugaagaucgugaacccccgguaccagaaccaguucgccgagauccaccgccgggccagcgagcacaucgaggucguguucgccguggaccugaaggaggucaaccccacgugccaccucuacgaccugguguccaagcugaagcuccccaacaacgggcgcauccacgugggcaagguccugccgaagaccgggcugcucaugaccuuccugguggugaucuuccugaagggcaacugcgccaacaaggaggacaccuggaaguuccucgacaugaugcagaucuacgacggcaagaaguacuacaucuacggggagccccggaagcugaucacgcaggacuucguccgccugaccuaccucgaguaccaccaggugcccugcagcuaccccgcgcacuaccaguuccuguggggcccgcgggccuacaccgagaccuccaagaugaaggugcuggaguaccucgccaaggucaacgacaucgcccccggggcguucagcucccaguacgaggaggcccugcaggacgaggaggagagccccucccagcgcugcagccggaacuggcacuacugcuccggccaggacugccugcgcgccaaguucagcagcuucucccagcccuacuga

SEQ ID NO: 2333 - RNA, 828 nt, Artificial Sequence
  derived and/or modified sequence opt2 from MAGE-B5__Homo_sapiens__CCDS65233.1
augaccuccgccggcgucuucaacgccggcuccgacgagcgcgccaacucccgcgacgaggaguaccccugcuccuccgaggucucccccuccaccgaguccuccugcuccaacuucaucaacaucaaggucggccuccucgagcaguuccuccucuacaaguucaagaugaagcagcgcauccucaaggaggacaugcucaagaucgucaacccccgcuaccagaaccaguucgccgagauccaccgccgcgccuccgagcacaucgaggucgucuucgccgucgaccucaaggaggucaaccccaccugccaccucuacgaccucgucuccaagcucaagcuccccaacaacggccgcauccacgucggcaagguccuccccaagaccggccuccucaugaccuuccucgucgucaucuuccucaagggcaacugcgccaacaaggaggacaccuggaaguuccucgacaugaugcagaucuacgacggcaagaaguacuacaucuacggcgagccccgcaagcucaucacccaggacuucguccgccucaccuaccucgaguaccaccagguccccugcuccuaccccgcccacuaccaguuccucuggggcccccgcgccuacaccgagaccuccaagaugaagguccucgaguaccucgccaaggucaacgacaucgcccccggcgccuucuccucccaguacgaggaggcccuccaggacgaggaggagucccccucccagcgcugcucccgcaacuggcacuacugcuccggccaggacugccuccgcgccaaguucuccuccuucucccagcccuacuga

SEQ ID NO: 2334 - RNA, 828 nt, Artificial Sequence
  derived and/or modified sequence opt3 from MAGE-B5__Homo_sapiens__CCDS65233.1
augaccagcgccggcguguucaacgcuggguccgacgagagagcaaauucuagggaugaagaguaccccugcucaagugaagucagcccuuccacagagucuucguguucaaacuuuaucaauauuaagguuggacugcucgaacaguuccuucuguauaaauuuaagaugaaacaacggauauugaaggaggacauguuaaaaaucgugaacccacgcuaccagaaucaguucgccgagauucaccgacgugcgagcgaacauaucgagguaguguuugcugucgaucugaaggaagugaacccgacuugccaccuauaugaccucguuaguaagcugaaacuucccaauaacgguaggauucaugugggcaagguccugccuaaaacgggguugcucaugaccuuccuggugguaaucuuucugaagggaaauugugccaacaaagaggauacauggaaguuccucgacaugaugcagauauacgauggcaagaaauauuacaucuauggugagccaagaaaguuaauuacucaagacuuuguucggcugaccuaccuugaauaccaccaggugcccugcuccuauccugcacauuaccaguucuugugggggccacgcgccuauacagagaccucuaaaaugaagguccuggaauaccuagcuaaagugaaugauaucgcacccggagccuuuagcucccaguaugaggaagcucuccaagacgaggaggaaucaccuagucagagauguagcaggaacuggcacuacugcucuggccaggauugucugcgggccaaguucuccucauuuagccagccauauuga

SEQ ID NO: 2335 - RNA, 828 nt, Artificial Sequence
  derived and/or modified sequence opt4 from MAGE-B5__Homo_sapiens__CCDS65233.1
augaccagcgccggcguguucaacgccggcagcgacgagagagccaacagcagagacgaggaguaccccugcagcagcgaggugagccccagcaccgagagcagcugcagcaacuucaucaacaucaaggugggccugcuggagcaguuccugcuguacaaguucaagaugaagcagagaauccugaaggaggacaugcugaagaucgugaaccccagauaccagaaccaguucgccgagauccacagaagagccagcgagcacaucgaggugguguucgccguggaccugaaggaggugaaccccaccugccaccuguacgaccuggugagcaagcugaagcugcccaacaacggcagaauccacgugggcaaggugcugcccaagaccggccugcugaugaccuuccugguggugaucuuccugaagggcaacugcgccaacaaggaggacaccuggaaguuccuggacaugaugcagaucuacgacggcaagaaguacuacaucuacggcgagcccagaaagcugaucacccaggacuucgugagacugaccuaccuggaguaccaccaggugcccugcagcuaccccgcccacuaccaguuccuguggggccccagagccuacaccgagaccagcaagaugaaggugcuggaguaccuggccaaggugaacgacaucgcccccggcgccuucagcagccaguacgaggaggcccugcaggacgaggaggagagccccagccagagaugcagcagaaacuggcacuacugcagcggccaggacugccugagagccaaguucagcagcuucagccagcccuacuga

SEQ ID NO: 2336 - RNA, 828 nt, Artificial Sequence
  derived and/or modified sequence opt5 from MAGE-B5__Homo_sapiens__CCDS65233.1
augaccagcgccggcguguucaacgcuggguccgacgagagagccaauucucgggaugaagaguaccccugcagcuccgaagucucuccuagcacagaguccucuuguagcaacuuuaucaauauuaagguuggacugcucgaacaguuccugcuuuauaaauuuaagaugaaacaacgcauccugaaggaggacaugcucaaaauugugaacccgagauaccagaaucaguucgcggagauccaccggcgcgcuuccgaacauauugagguggucuuugccguggaucugaaggaaguuaaccccacgugccaccuuuaugaccuggugagcaagcucaaacugccuaauaacggcagaauccaugucgggaaggugcugcccaaaaccggacuccugaugacauuccuuguugugaucuuucugaagggcaauugugccaacaaagaggauaccuggaaguuccucgacaugaugcagauuuacgaugggaagaaauauuacaucuauggagagccucggaagcugauuacacaagacuuuguccgccuuaccuaccuggaauaccaccaggugcccugcucuuauccugcucauuaccaguuccucuggggcccgagagccuauacagagaccuccaaaaugaaggugcuggaauaccuggcuaaagucaaugauaucgcccccggcgcguuuagcucucaguaugaggaagcccuccaagacgaggaggaauccccuagccagcgguguucucgcaacuggcacuacugcuccgggcaggauugucugagagcuaaguucagcuccuuuucucagcccuauuga

SEQ ID NO: 2337 - protein, 407 aa, Artificial Sequence
  MAGE-B6__Homo_sapiens__Q8N7X4
MPRGHKSKLRTCEKRQETNGQPQGLTGPQATAEKQEESHSSSSSSRACLGDCRRSSDASIPQESQGVSPTGSPDAVVSYSKSDVAANGQDEKSPSTSRDASVPQESQGASPTGSPDAGVSGSKYDVAANGQDEKSPSTSHDVSVPQESQGASPTGSPDAGVSGSKYDVAAEGEDEESVSASQKAIIFKRLSKDAVKKKACTLAQFLQKKFEKKESILKADMLKCVRREYKPYFPQILNRTSQHLVVAFGVELKEMDSSGESYTLVSKLGLPSEGILSGDNALPKSGLLMSLLVVIFMNGNCATEEEVWEFLGLLGIYDGILHSIYGDARKIITEDLVQDKYVVYRQVCNSDPPCYEFLWGPRAYAETTKMRVLRVLADSSNTSPGLYPHLYEDALIDEVERALRLRA

SEQ ID NO: 2338 - RNA, 1224 nt, Artificial Sequence
  MAGE-B6__Homo_sapiens__AAH67286
augccucggggucacaagaguaagcuccguaccugugagaaacgccaagagaccaauggucagccacagggucucacggguccccaggccacugcagagaagcaggaagagucccacucuuccucauccucuucucgcgcuugucugggugauugucguaggucuucugaugccuccauuccucaggagucucagggagugucacccacugggucuccugaugcaguuguuucauauucaaaauccgauguggcugccaacggccaagaugagaaaaguccaagcaccucccgugaugccuccguuccucaggagucucagggagcuucacccacuggcucuccugaugcagguguuucaggcucaaaauaugauguggcugccaacggccaagaugagaaaaguccaagcacuucccaugaugucuccguuccucaggagucucagggagcuucacccacuggcucgccugaugcagguguuucaggcucaaaauaugauguggcugccgagggugaagaugaggaaaguguaagcgccucacagaaagccaucauuuuuaagcgcuuaagcaaagaugcuguaaagaagaaggcgugcacguuggcgcaauuccugcagaagaaguuugagaagaaagaguccauuuugaaggcagacaugcugaaguguguccgcagagaguacaagcccuacuucccucagauccucaacagaaccucccaacauuuggugguggccuuuggcguugaauugaaagaaauggauuccagcggcgaguccuacacccuugucagcaagcuaggccuccccagugaaggaauucugaguggugauaaugcgcugccgaagucgggucuccugaugucgcuccugguugugaucuucaugaacggcaacugugccacugaagaggaggucugggaguuccugggucuguuggggauauaugaugggauccugcauucaaucuauggggaugcucggaagaucauuacugaagauuuggugcaagauaaguacgugguuuaccggcaggugugcaacagugauccuccaugcuaugaguuccugugggguccacgagccuaugcugaaaccaccaagaugagaguccugcguguuuuggccgacagcaguaacaccagucccgguuuauacccacaucuguaugaagacgcuuugauagaugagguagagagagcauugagacugagagcuuaa

SEQ ID NO: 2339 - RNA, 1224 nt, Artificial Sequence
  derived and/or modified sequence opt1 from MAGE-B6__Homo_sapiens__AAH67286
augccccgcggccacaagagcaagcugcggaccugcgagaagcgccaggagaccaacgggcagccgcagggccucacggggccccaggccaccgccgagaagcaggaggagucccacagcuccagcuccagcucccgggcgugccugggcgacugccgccggagcuccgacgccagcaucccccaggagucccagggggugagccccaccggcuccccggacgccgucgugagcuacuccaagagcgacguggccgccaacggccaggacgagaagucccccagcaccucccgcgacgcgagcgucccccaggagagccagggggccucccccacgggcagcccggacgccgggguguccggcagcaaguacgacguggccgcgaacgggcaggacgagaagucccccagcaccucccacgacgucagcgugccccaggagucccagggcgccagccccaccggcuccccggacgccggggugagcggcuccaaguacgacgucgccgccgagggggaggacgaggagagcguguccgcgagccagaaggccaucaucuucaagcggcuguccaaggacgccgugaagaagaaggccugcacccucgcccaguuccugcagaagaaguucgagaagaaggagagcauccugaaggcggacaugcucaagugcguccgccgggaguacaagcccuacuucccccagauccugaaccgcacgucccagcaccuggugguggccuucggcgucgagcucaaggagauggacagcagcggcgaguccuacacccuggugagcaagcuggggcuccccuccgagggcauccugagcggggacaacgcccugccgaaguccggccuccugaugagccugcucguggucaucuucaugaacgggaacugcgccaccgaggaggaggugugggaguuccugggccugcucggcaucuacgacgggauccugcacuccaucuacggcgacgcccggaagaucaucaccgaggaccuggugcaggacaaguacgucguguaccgccaggugugcaacagcgacccgcccugcuacgaguuccucugggggccccgggcguacgccgagacgaccaagaugcgcguccugcgggugcuggccgacuccagcaacaccucccccggccucuacccccaccuguacgaggacgcccugaucgacgaggucgagcgcgcccuccggcugcgcgcguga

SEQ ID NO: 2340 - RNA, 1224 nt, Artificial Sequence
  derived and/or modified sequence opt2 from MAGE-B6__Homo_sapiens__AAH67286
augccccgcggccacaaguccaagcuccgcaccugcgagaagcgccaggagaccaacggccagccccagggccucaccggcccccaggccaccgccgagaagcaggaggagucccacuccuccuccuccuccucccgcgccugccucggcgacugccgccgcuccuccgacgccuccaucccccaggagucccagggcgucucccccaccggcucccccgacgccgucgucuccuacuccaaguccgacgucgccgccaacggccaggacgagaagucccccuccaccucccgcgacgccuccgucccccaggagucccagggcgccucccccaccggcucccccgacgccggcgucuccggcuccaaguacgacgucgccgccaacggccaggacgagaagucccccuccaccucccacgacgucuccgucccccaggagucccagggcgccucccccaccggcucccccgacgccggcgucuccggcuccaaguacgacgucgccgccgagggcgaggacgaggaguccgucuccgccucccagaaggccaucaucuucaagcgccucuccaaggacgccgucaagaagaaggccugcacccucgcccaguuccuccagaagaaguucgagaagaaggaguccauccucaaggccgacaugcucaagugcguccgccgcgaguacaagcccuacuucccccagauccucaaccgcaccucccagcaccucgucgucgccuucggcgucgagcucaaggagauggacuccuccggcgaguccuacacccucgucuccaagcucggccuccccuccgagggcauccucuccggcgacaacgcccuccccaaguccggccuccucaugucccuccucgucgucaucuucaugaacggcaacugcgccaccgaggaggaggucugggaguuccucggccuccucggcaucuacgacggcauccuccacuccaucuacggcgacgcccgcaagaucaucaccgaggaccucguccaggacaaguacgucgucuaccgccaggucugcaacuccgacccccccugcuacgaguuccucuggggcccccgcgccuacgccgagaccaccaagaugcgcguccuccgcguccucgccgacuccuccaacaccucccccggccucuacccccaccucuacgaggacgcccucaucgacgaggucgagcgcgcccuccgccuccgcgccuga

SEQ ID NO: 2341 - RNA, 1224 nt, Artificial Sequence
  derived and/or modified sequence opt3 from MAGE-B6__Homo_sapiens__AAH67286
augcccagaggccacaagagcaaacugaggaccugcgagaagcggcaggaaacaaacgggcaaccucagggacucacugguccacaggccacggcugagaaacaggaagagucccauucuucaaguagcuccucucgcgcaugucuuggcgacugccgacguucgucagaugccagcaucccgcaagaaagucagggggugucccccaccggaucuccugacgcggucguuagcuacuccaagucagauguggcugccaauggccaggacgagaaaaguccaagcacaucuagagaugcauccguaccccaggagucacaaggugccagcccuacugggaguccagacgcuggagugucuggcuccaaguaugaugucgcagccaacggccaggacgaaaagagccccucgaccucucacgauguguccguuccucaggagucacagggggcuaguccaacaggaagcccggacgccgguguguccggcucuaaauacgaugucgcggcagaaggggaggacgaggaaagcgugucagccagucaaaaggcuauuauauucaaaaggcuguccaaggaugccgugaaaaagaaggcauguaccuuggcucaguuuuuacagaaaaaguucgagaaaaaggaaagcauccugaaagccgacaugcuaaagugcguucggcgcgaguauaaacccuacuuuccucaaauucucaauagaacuucucagcaucugguggucgcguucggaguggaacuuaaggagauggacucaaguggcgagagcuauacacugguguccaaguugggucucccaucugaagggauccugucgggagauaacgcccugcccaaaagcggccucuuaaugucccugcuugucguuauuuuuaugaauggcaacugugcaaccgaggaagaggugugggaguucuuggggcugcuaggaaucuacgacgguauacuccacucaaucuauggcgaugcuaggaagauuaucacggaagaccugguacaggauaaauacguggucuaccggcagguaugcaauagugacccuccauguuaugaguuucuuugggggccccgcgccuacgcugaaacuaccaagaugcgaguucugagaguguuggccgauucuagcaacacauccccgggacucuauccucaucuguacgaggacgcauuaauugaugaagucgagagggcccugcggcuccgugcuuga

SEQ ID NO: 2342 - RNA, 1224 nt, Artificial Sequence
  derived and/or modified sequence opt4 from MAGE-B6__Homo_sapiens__AAH67286
augcccagaggccacaagagcaagcugagaaccugcgagaagagacaggagaccaacggccagccccagggccugaccggcccccaggccaccgccgagaagcaggaggagagccacagcagcagcagcagcagcagagccugccugggcgacugcagaagaagcagcgacgccagcaucccccaggagagccagggcgugagccccaccggcagccccgacgccguggugagcuacagcaagagcgacguggccgccaacggccaggacgagaagagccccagcaccagcagagacgccagcgugccccaggagagccagggcgccagccccaccggcagccccgacgccggcgugagcggcagcaaguacgacguggccgccaacggccaggacgagaagagccccagcaccagccacgacgugagcgugccccaggagagccagggcgccagccccaccggcagccccgacgccggcgugagcggcagcaaguacgacguggccgccgagggcgaggacgaggagagcgugagcgccagccagaaggccaucaucuucaagagacugagcaaggacgccgugaagaagaaggccugcacccuggcccaguuccugcagaagaaguucgagaagaaggagagcauccugaaggccgacaugcugaagugcgugagaagagaguacaagcccuacuucccccagauccugaacagaaccagccagcaccuggugguggccuucggcguggagcugaaggagauggacagcagcggcgagagcuacacccuggugagcaagcugggccugcccagcgagggcauccugagcggcgacaacgcccugcccaagagcggccugcugaugagccugcugguggugaucuucaugaacggcaacugcgccaccgaggaggaggugugggaguuccugggccugcugggcaucuacgacggcauccugcacagcaucuacggcgacgccagaaagaucaucaccgaggaccuggugcaggacaaguacgugguguacagacaggugugcaacagcgacccccccugcuacgaguuccuguggggccccagagccuacgccgagaccaccaagaugagagugcugagagugcuggccgacagcagcaacaccagccccggccuguacccccaccuguacgaggacgcccugaucgacgagguggagagagcccugagacugagagccuga

SEQ ID NO: 2343 - RNA, 1224 nt, Artificial Sequence
  derived and/or modified sequence opt5 from MAGE-B6__Homo_sapiens__AAH67286
augcccagaggccacaagagcaaacugcggaccugcgagaagcgccaggaaacaaacgggcaaccucagggacucacgggcccgcaggccaccgcugagaaacaggaagagucccauucuagcuccucuagcuccagagccugucugggggacugccggcgcucuagcgaugcguccaucccccaagaaagccagggagugucuccuacaggcucccccgacgcugucguuagcuacucuaaguccgauguggccgccaaugggcaggacgagaaaagcccuucuaccuccagagaugcuagcgugccccaggagucccaaggagccucuccuacaggcagcccggacgcuggcgucuccgggagcaaguaugauguggccgcgaacggacaggacgaaaagucucccuccaccagccacgauguuucugugccucaggagagccagggcgccucccccacagggucuccugacgcuggagucagcggcuccaaauacgauguggccgcugaaggggaggacgaggaaagcguuucugccucccaaaaggcgauuaucuucaaacggcuuagcaaggaugccgugaaaaagaaggcuuguacccuggcccaguuucuccagaaaaaguucgagaaaaaggaaucuauucugaaagcugacaugcuuaagugcguccgcagagaguauaaacccuacuuuccgcaaauccugaaucggacgucccagcaucucgugguggccuucggagucgaacugaaggagauggacagcuccggcgagucuuauacccugguuagcaagcucggccugccuuccgaagggauucuuucuggagauaacgcccugcccaaaagcggccuccugaugucccuucugguggugaucuuuaugaaugggaacugugcuacagaggaagaggucugggaguuccucggacugcugggcaucuacgacgggauucuccacagcaucuauggagaugcgcgcaagauuaucaccgaagaccuggugcaggauaaauacguuguguacagacaggucugcaauucugacccucccuguuaugaguuucuuuggggcccccgggccuacgcugaaacaaccaagaugcgcgugcugagaguucucgccgauuccagcaacacgucuccuggccuguauccgcaucuuuacgaggacgcccugauugaugaaguggagcgggcucuccgccugagagccuga

SEQ ID NO: 2344 - protein, 1142 aa, Artificial Sequence
  MAGE-C1__Homo_sapiens__O60732
MGDKDMPTAGMPSLLQSSSESPQSCPEGEDSQSPLQIPQSSPESDDTLYPLQSPQSRSEGEDSSDPLQRPPEGKDSQSPLQIPQSSPEGDDTQSPLQNSQSSPEGKDSLSPLEISQSPPEGEDVQSPLQNPASSFFSSALLSIFQSSPESTQSPFEGFPQSVLQIPVSAASSSTLVSIFQSSPESTQSPFEGFPQSPLQIPVSRSFSSTLLSIFQSSPERTQSTFEGFAQSPLQIPVSPSSSSTLLSLFQSFSERTQSTFEGFAQSSLQIPVSPSFSSTLVSLFQSSPERTQSTFEGFPQSPLQIPVSSSSSSTLLSLFQSSPERTHSTFEGFPQSLLQIPMTSSFSSTLLSIFQSSPESAQSTFEGFPQSPLQIPGSPSFSSTLLSLFQSSPERTHSTFEGFPQSPLQIPMTSSFSSTLLSILQSSPESAQSAFEGFPQSPLQIPVSSSFSYTLLSLFQSSPERTHSTFEGFPQSPLQIPVSSSSSSSTLLSLFQSSPECTQSTFEGFPQSPLQIPQSPPEGENTHSPLQIVPSLPEWEDSLSPHYFPQSPPQGEDSLSPHYFPQSPPQGEDSLSPHYFPQSPQGEDSLSPHYFPQSPPQGEDSMSPLYFPQSPLQGEEFQSSLQSPVSICSSSTPSSLPQSFPESSQSPPEGPVQSPLHSPQSPPEGMHSQSPLQSPESAPEGEDSLSPLQIPQSPLEGEDSLSSLHFPQSPPEWEDSLSPLHFPQFPPQGEDFQSSLQSPVSICSSSTSLSLPQSFPESPQSPPEGPAQSPLQRPVSSFFSYTLASLLQSSHESPQSPPEGPAQSPLQSPVSSFPSSTSSSLSQSSPVSSFPSSTSSSLSKSSPESPLQSPVISFSSSTSLSPFSEESSSPVDEYTSSSDTLLESDSLTDSESLIESEPLFTYTLDEKVDELARFLLLKYQVKQPITKAEMLTNVISRYTGYFPVIFRKAREFIEILFGISLREVDPDDSYVFVNTLDLTSEGCLSDEQGMSQNRLLILILSIIFIKGTYASEEVIWDVLSGIGVRAGREHFAFGEPRELLTKVWVQEHYLEYREVPNSSPPRYEFLWGPRAHSEVIKRKVVEFLAMLKNTVPITFPSSYKDALKDVEERAQAIIDTTDDSTATESASSSVMSPSFSSE

SEQ ID NO: 2345 - RNA, 3429 nt, Artificial Sequence
  MAGE-C1__Homo_sapiens__CCDS35417.1
augggggacaaggauaugccuacugcugggaugccgagucuucuccagaguuccucugagaguccucagaguuguccugagggggaggacucccagucuccucuccagauuccccagaguucuccugagagcgacgacacccuguauccucuccagaguccucagagucguucugagggggaggacuccucggauccucuccagagaccuccugaggggaaggacucccagucuccucuccagauuccccagaguucuccugagggcgacgacacccagucuccucuccagaauucucagaguucuccugaggggaaggacucccugucuccucuagagauuucucagagcccuccugagggugaggauguccagucuccucugcagaauccugcgaguuccuucuucuccucugcuuuauugaguauuuuccagaguuccccugagaguacucaaaguccuuuugaggguuuuccccagucuguucuccagauuccugugagcgccgccuccuccuccacuuuagugaguauuuuccagaguuccccugagaguacucaaaguccuuuugaggguuuuccccagucuccacuccagauuccugugagccgcuccuucuccuccacuuuauugaguauuuuccagaguuccccugagagaacucagaguacuuuugaggguuuugcccagucuccucuccagauuccugugagccccuccuccuccuccacuuuacugagucuuuuccagaguuucucugagagaacucagaguacuuuugaggguuuugcccagucuucucuccagauuccugugagccccuccuucuccuccacuuuagugagucuuuuccagaguuccccugagagaacucagaguacuuuugaggguuuuccccagucuccucuccagauuccugugagcuccuccuccuccuccacuuuauugagucuuuuccagaguuccccugagagaacucacaguacuuuugaggguuuuccccagucucuucuccagauuccuaugaccuccuccuucuccucuacuuuauugaguauuuuccagaguucuccugagagugcucaaaguacuuuugaggguuuuccccagucuccucuccagauuccugggagccccuccuucuccuccacuuuacugagucuuuuccagaguuccccugagagaacucacaguacuuuugaggguuuuccccagucuccucuccagauuccuaugaccuccuccuucuccucuacuuuauugaguauuuuacagaguucuccugagagugcucaaagugcuuuugaggguuuuccccagucuccucuccagauuccugugagcuccucuuucuccuacacuuuauugagucuuuuccagaguuccccugagagaacucacaguacuuuugaggguuuuccccagucuccucuccagauuccugugagcuccuccuccuccuccuccacuuuauugagucuuuuccagaguuccccugaguguacucaaaguacuuuugaggguuuuccccagucuccucuccagauuccucagaguccuccugaaggggagaauacccauucuccucuccagauuguuccaagucuuccugagugggaggacucccugucuccucacuacuuuccucagagcccuccucagggggaggacucccuaucuccucacuacuuuccucagagcccuccucagggggaggacucccugucuccucacuacuuuccucagagcccucagggggaggacucccugucuccucacuacuuuccucagagcccuccucagggggaggacuccaugucuccucucuacuuuccucagaguccucuucagggggaggaauuccagucuucucuccagagcccugugagcaucugcuccuccuccacuccauccagucuuccccagaguuucccugagaguucucagaguccuccugaggggccuguccagucuccucuccauaguccucagagcccuccugaggggaugcacucccaaucuccucuccagaguccugagagugcuccugagggggaggauucccugucuccucuccaaauuccucagaguccucuugagggagaggacucccugucuucucuccauuuuccucagaguccuccugagugggaggacucccucucuccucuccacuuuccucaguuuccuccucagggggaggacuuccagucuucucuccagaguccugugaguaucugcuccuccuccacuucuuugagucuuccccagaguuucccugagaguccucagaguccuccugaggggccugcucagucuccucuccagagaccugucagcuccuucuucuccuacacuuuagcgagucuucuccaaaguucccaugagaguccucagaguccuccugaggggccugcccagucuccucuccagaguccugugagcuccuuccccuccuccacuucaucgagucuuucccagaguucuccugugagcuccuuccccuccuccacuucaucgagucuuuccaagaguuccccugagaguccucuccagaguccugugaucuccuucuccuccuccacuucauugagcccauucagugaagaguccagcagcccaguagaugaauauacaaguuccucagacaccuugcuagagagugauuccuugacagacagcgaguccuugauagagagcgagcccuuguucacuuauacacuggaugaaaagguggacgaguuggcgcgguuucuucuccucaaauaucaagugaagcagccuaucacaaaggcagagaugcugacgaaugucaucagcagguacacgggcuacuuuccugugaucuucaggaaagcccgugaguucauagagauacuuuuuggcauuucccugagagaaguggacccugaugacuccuaugucuuuguaaacacauuagaccucaccucugaggggugucugagugaugagcagggcaugucccagaaccgccuccugauucuuauucugaguaucaucuucauaaagggcaccuaugccucugaggaggucaucugggaugugcugaguggaauaggggugcgugcugggagggagcacuuugccuuuggggagcccagggagcuccucacuaaaguuugggugcaggaacauuaccuagaguaccgggaggugcccaacucuucuccuccucguuacgaauuccugugggguccaagagcucauucagaagucauuaagaggaaaguaguagaguuuuuggccaugcuaaagaauaccgucccuauuaccuuuccauccucuuacaaggaugcuuugaaagauguggaagagagagcccaggccauaauugacaccacagaugauucgacugccacagaaagugcaagcuccagugucaugucccccagcuucucuucugaguga

SEQ ID NO: 2346 - RNA, 3429 nt, Artificial Sequence
  derived and/or modified sequence opt1 from MAGE-C1__Homo_sapiens__CCDS35417.1
augggcgacaaggacaugcccaccgccgggaugccgagccugcuccaguccagcuccgagagcccccaguccugccccgagggcgaggacagccagagcccccugcagaucccgcagagcucccccgagagcgacgacacccuguacccccuccagagcccccagucccgcuccgagggggaggacagcuccgacccgcugcagcggccgcccgagggcaaggacagccagagcccccugcagaucccccaguccucccccgagggggacgacacgcagagcccccuccagaacagccaguccagccccgagggcaaggacucccugagcccgcuggagaucucccagagcccgcccgagggcgaggacgugcagagcccccuccagaaccccgccuccuccuucuucagcuccgcgcugcugagcaucuuccaguccagccccgaguccacccagagccccuucgagggguucccccaguccguccuccagaucccggugagcgccgccuccagcagcacccugguguccaucuuccagagcucccccgagagcacccagucccccuucgagggcuucccccagagcccgcugcagauccccgucucccgcagcuucuccagcacgcuccuguccaucuuccagagcucccccgagcggacccagagcaccuucgagggguucgcccaguccccgcugcagauccccgugagccccuccagcagcuccacccuccugagccuguuccaguccuucagcgagcgcacgcaguccaccuucgagggcuucgcccagagcucccuccagauccccgugagcccguccuucagcuccacccuggucagccuguuccaguccagccccgagcggacccaguccacguucgagggguucccccagagcccccuccagaucccgguguccagcuccagcagcuccacccugcugagccucuuccaguccagccccgagcgcacccacuccaccuucgagggcuucccccagagccugcugcagauccccaugacguccagcuucuccagcacccuccuguccaucuuccagagcuccccggagagcgcgcaguccaccuucgagggcuucccccagagcccccugcagauccccggguccccgagcuucuccagcacccuccugagccuguuccaguccagccccgagcggacgcacuccaccuucgagggcuucccccagagcccccuccagaucccgaugaccuccagcuucuccagcacccugcuguccauccuccagagcucccccgagagcgcccaguccgccuucgagggguucccccagagcccccugcagaucccgguguccagcuccuucagcuacacgcugcucucccuguuccagagcagccccgagcgcacccacuccaccuucgagggcuucccccagagcccgcugcagauccccgucuccagcuccagcuccagcuccacccuccugagccuguuccaguccagccccgagugcacgcaguccaccuucgagggcuucccccagagcccgcuccagaucccccaguccccgcccgagggggagaacacccacagcccccugcagaucgugcccucccugcccgagugggaggacagccugagcccccacuacuucccgcaguccccgccccagggcgaggacagccucagcccccacuacuucccccaguccccgccccagggggaggacucccugagcccccacuacuucccccagagcccccagggcgaggacucccugagcccccacuacuucccccaguccccgccccagggggaggacuccaugagcccccucuacuucccccaguccccgcugcagggcgaggaguuccagagcucccugcagagccccguguccaucugcagcuccagcacccccuccagccucccgcagagcuuccccgaguccagccaguccccgcccgagggccccguccagagcccccugcacagcccccaguccccgcccgaggggaugcacucccagagcccccugcagucccccgaguccgcccccgagggcgaggacucccucagcccgcugcagaucccccagagcccccuggagggggaggacucccucuccagccugcacuucccccaguccccgcccgagugggaggacagccugagcccccuccacuucccccaguucccgccccagggcgaggacuuccaguccagccugcagucccccgugagcaucugcuccagcuccacgagccugucccucccccagagcuucccggagagcccccaguccccgcccgaggggcccgcgcagagcccccugcagcggcccguguccuccuucuucagcuacacccuggccucccuccugcagagcucccacgagagcccgcagagcccgcccgagggccccgcccagagcccccugcagucccccgucuccagcuuccccuccagcaccuccagcucccucagccaguccagccccguguccagcuucccguccagcaccuccagcucccugagcaagagcucccccgagagcccccugcagucccccgugaucagcuucuccagcuccacgagccucuccccguucagcgaggaguccagcucccccgucgacgaguacaccagcuccagcgacacccugcuggaguccgacagccucaccgacuccgagagccugaucgagagcgagccccuguucaccuacacgcucgacgagaagguggacgagcuggcccgcuuccugcuccugaaguaccaggugaagcagcccaucaccaaggccgagaugcugaccaacgucaucucccgguacaccggcuacuucccggugaucuuccgcaaggcgcgggaguucaucgagauccucuucgggaucagccugcgcgagguggaccccgacgacuccuacgucuucgugaacacgcuggaccucaccagcgagggcugccuguccgacgagcaggggaugagccagaaccggcugcucauccugauccuguccaucaucuucaucaagggcaccuacgccagcgaggaggucaucugggacgugcucuccgggaucggcgugcgcgccggccgggagcacuucgccuucggggagccccgcgagcugcugaccaaggucugggugcaggagcacuaccucgaguaccgggaggugcccaacagcuccccgccccgcuacgaguuccuguggggcccccgggcccacagcgaggucaucaagcgcaaggugguggaguuccuggcgaugcucaagaacacgguccccaucaccuucccguccagcuacaaggacgcccugaaggacguggaggagcgcgcccaggccaucaucgacaccaccgacgacuccacggccaccgagagcgcguccagcuccgugaugagccccagcuucuccagcgaguga

SEQ ID NO: 2347 - RNA, 3429 nt, Artificial Sequence
  derived and/or modified sequence opt2 from MAGE-C1__Homo_sapiens__CCDS35417.1
augggcgacaaggacaugcccaccgccggcaugcccucccuccuccaguccuccuccgaguccccccaguccugccccgagggcgaggacucccaguccccccuccagaucccccaguccucccccgaguccgacgacacccucuacccccuccaguccccccagucccgcuccgagggcgaggacuccuccgacccccuccagcgcccccccgagggcaaggacucccaguccccccuccagaucccccaguccucccccgagggcgacgacacccaguccccccuccagaacucccaguccucccccgagggcaaggacucccucuccccccucgagaucucccaguccccccccgagggcgaggacguccaguccccccuccagaaccccgccuccuccuucuucuccuccgcccuccucuccaucuuccaguccucccccgaguccacccagucccccuucgagggcuucccccaguccguccuccagauccccgucuccgccgccuccuccuccacccucgucuccaucuuccaguccucccccgaguccacccagucccccuucgagggcuucccccaguccccccuccagauccccgucucccgcuccuucuccuccacccuccucuccaucuuccaguccucccccgagcgcacccaguccaccuucgagggcuucgcccaguccccccuccagauccccgucucccccuccuccuccuccacccuccucucccucuuccaguccuucuccgagcgcacccaguccaccuucgagggcuucgcccaguccucccuccagauccccgucucccccuccuucuccuccacccucgucucccucuuccaguccucccccgagcgcacccaguccaccuucgagggcuucccccaguccccccuccagauccccgucuccuccuccuccuccuccacccuccucucccucuuccaguccucccccgagcgcacccacuccaccuucgagggcuucccccagucccuccuccagauccccaugaccuccuccuucuccuccacccuccucuccaucuuccaguccucccccgaguccgcccaguccaccuucgagggcuucccccaguccccccuccagauccccggcucccccuccuucuccuccacccuccucucccucuuccaguccucccccgagcgcacccacuccaccuucgagggcuucccccaguccccccuccagauccccaugaccuccuccuucuccuccacccuccucuccauccuccaguccucccccgaguccgcccaguccgccuucgagggcuucccccaguccccccuccagauccccgucuccuccuccuucuccuacacccuccucucccucuuccaguccucccccgagcgcacccacuccaccuucgagggcuucccccaguccccccuccagauccccgucuccuccuccuccuccuccuccacccuccucucccucuuccaguccucccccgagugcacccaguccaccuucgagggcuucccccaguccccccuccagaucccccaguccccccccgagggcgagaacacccacuccccccuccagaucguccccucccuccccgagugggaggacucccucuccccccacuacuucccccagucccccccccagggcgaggacucccucuccccccacuacuucccccagucccccccccagggcgaggacucccucuccccccacuacuucccccaguccccccagggcgaggacucccucuccccccacuacuucccccagucccccccccagggcgaggacuccauguccccccucuacuucccccaguccccccuccagggcgaggaguuccaguccucccuccagucccccgucuccaucugcuccuccuccacccccuccucccucccccaguccuuccccgaguccucccaguccccccccgagggccccguccaguccccccuccacuccccccaguccccccccgagggcaugcacucccaguccccccuccagucccccgaguccgcccccgagggcgaggacucccucuccccccuccagaucccccaguccccccucgagggcgaggacucccucuccucccuccacuucccccaguccccccccgagugggaggacucccucuccccccuccacuucccccaguuccccccccagggcgaggacuuccaguccucccuccagucccccgucuccaucugcuccuccuccaccucccucucccucccccaguccuuccccgaguccccccaguccccccccgagggccccgcccaguccccccuccagcgccccgucuccuccuucuucuccuacacccucgccucccuccuccaguccucccacgaguccccccaguccccccccgagggccccgcccaguccccccuccagucccccgucuccuccuuccccuccuccaccuccuccucccucucccaguccucccccgucuccuccuuccccuccuccaccuccuccucccucuccaaguccucccccgaguccccccuccagucccccgucaucuccuucuccuccuccaccucccucucccccuucuccgaggaguccuccucccccgucgacgaguacaccuccuccuccgacacccuccucgaguccgacucccucaccgacuccgagucccucaucgaguccgagccccucuucaccuacacccucgacgagaaggucgacgagcucgcccgcuuccuccuccucaaguaccaggucaagcagcccaucaccaaggccgagaugcucaccaacgucaucucccgcuacaccggcuacuuccccgucaucuuccgcaaggcccgcgaguucaucgagauccucuucggcaucucccuccgcgaggucgaccccgacgacuccuacgucuucgucaacacccucgaccucaccuccgagggcugccucuccgacgagcagggcaugucccagaaccgccuccucauccucauccucuccaucaucuucaucaagggcaccuacgccuccgaggaggucaucugggacguccucuccggcaucggcguccgcgccggccgcgagcacuucgccuucggcgagccccgcgagcuccucaccaaggucuggguccaggagcacuaccucgaguaccgcgagguccccaacuccucccccccccgcuacgaguuccucuggggcccccgcgcccacuccgaggucaucaagcgcaaggucgucgaguuccucgccaugcucaagaacaccguccccaucaccuuccccuccuccuacaaggacgcccucaaggacgucgaggagcgcgcccaggccaucaucgacaccaccgacgacuccaccgccaccgaguccgccuccuccuccgucaugucccccuccuucuccuccgaguga

SEQ ID NO: 2348 - RNA, 3429 nt, Artificial Sequence
  derived and/or modified sequence opt3 from MAGE-C1__Homo_sapiens__CCDS35417.1
augggcgacaaggauaugcccaccgccgggaugccuagccugcuccaguccucuucagagaguccacaaagcugcccggaaggagaggacucccagucuccccuucagaucccucagucgucaccagaaagcgaugacacacuguaccccuugcaaaguccucaguccagaucugagggugaagauagcuccgacccauuacagaggcccccugagggcaaagauucacagaguccacugcaaauuccgcagagcucucccgagggggacgauacucaguccccucuacagaacucacaaagcaguccagaaggaaaggacucucucuccccucuggagauaagccagucgcccccagaaggcgaggaugugcagucuccccuucaaaauccggcuuccucauucuuuaguagcgcacuguuguccaucuuccagucuagcccugagucaacgcagagucccuuugaagguuucccacaguccguccuccaaauuccuguuagcgccgcgucuucaaguacccuggugagcaucuuucaguccucucccgagucgacacagagcccauucgaaggguuuccccaguccccucugcaaauuccaguaucacggaguuucucuagcacucucuuauccaucuuucagucaagcccggagcgcacccagucuacauucgaaggauuugcucaguccccucugcaaauacccgugaguccauccucuuccucaacccuuuugagucuguuccagagcuuuucggagcgaacucaguccacauucgagggcuucgcccagucuagccuacaaauccccgucucaccuaguuuuuccucuacccucgugagccuguuccaguccucaccagaacguacgcagagcacuuuugagggcuucccccaaaguccgcuucagauuccuguuucuuccagcucgucaucuacccuguugagucucuuucaguccagcccagaaagaacacacucuacuuucgagggguuuccccagagccuguuacaaaucccuaugaccuccucauucaguagcacacugcucucuauuuuucaguccucacccgaaagugcacagagcaccuucgagggauuuccacaguccccucuucaaauccccgguucuccaucguucagcucaacgcuguugucccuauuucagaguucuccggagaggacucauagcacauucgaaggcuucccucaguccccacugcagauacccaugaccucaucuuuuagcaguacucuccuguccauucuucaaagcucucccgagucagcccaguccgcuuucgaaggguuuccucagaguccacugcaaauccccgugagcucgucuuucuccuauacauugcucagccuguuucagucaaguccugagcggacccacucuacguucgaaggauuuccgcaguccccauuacagauucccgucagcucaaguagcuccucuagcacccugcuaucccucuuccaaucaucuccugaguguacacagaguacuuuugagggcuucccacagucgccccugcagaucccucaaagcccgcccgaaggugagaacacccauuccccacuucagaucgugccuucuuugcccgaaugggaggacucacugagcccacacuacuuuccucaguccccaccccagggggaggauagucucucuccgcauuauuucccucaaucacccccacagggagaagacagccugagcccccacuacuuuccucagaguccacagggcgaggacagccuuucuccccacuauuucccucaauccccgccacagggcgaagauucaaugagcccccuguacuucccucagucgcccuugcaaggggaggaauuucagucuagucuccaguccccaguaagcauuugcucauccucuacaccuagcagucugccccaguccuucccagagagcucucaaucaccuccggagggacccguucagaguccauuacauuccccucagucucccccagaagguaugcacagccagucgccucugcaaucacccgagagcgcaccggaaggcgaggacucccuaaguccacuccagauaccucagucuccccuggaaggggaggauagccuuuccucauugcauuuuccacagagucccccugagugggaagacucucugagcccgcuccacuucccccaauuuccaccucagggagaggauuuccaguccucacugcaaagccccgugucuaucuguuccaguagcacuucguuaucccugccucagucuuuuccagaaucaccccagagcccuccagagggccccgcccagaguccgcuucaacgcccugucuccucuuucuuuagcuauaccuuggcuucacuccugcaguccagucacgaaagcccacagucucccccugaggguccagcccagucaccccuacaauccccggugagcucuuucccuaguucgacauccagcucacugucucagagcucccccgugaguucauuuccaucuagcaccuccaguagccucuccaaaucuucaccugagagcccccugcagucgccagucauuuccuucaguucuagcacuucacuuucccccuucucugaagagaguagcuccccuguugacgaauacacgucaagcucugauacauugcuggagagugacuccuuaaccgauagcgagucacucaucgaaucugagccacuguuuacuuacacccuugacgaaaagguggaugagcuggcgagauucuugcuccugaaauaucagguaaagcaaccgauaacaaaggcagaaaugcuaaccaaugugauuuccagguacacuggguauuuucccgucaucuuccggaaagcccgcgaguuuaucgagauucuguucggcaucucgcuccgagaaguggacccugacgauagcuacguuuuugugaacacacuggaccuuacgagugagggaugcuugucugaugaacagggcaugucccagaauagacuguuaauucucauacugagcaucauuuucaucaaggggaccuaugcuucagaggaagucaucugggacgugcuuaguggaauugguguaagggccggccgggagcauuuugcauucggggagccacgugaacugcuaacuaaaguuugggugcaggagcacuaccucgaauaucgcgagguccccaacuccagcccuccaagauacgaauuucuguggggacccagggcucauucugaggugauaaagcggaaagucguggaguucuuggccaugcugaagaauacaguuccuaucaccuuuccgucaagcuacaaggaugcguuaaaagacguggaggaacgagcccaagcaauuaucgauacaacugacgauuccaccgcuacggaaucugccaguucgagcguaauguccccaucauucucuagcgaguga

SEQ ID NO: 2349 - RNA, 3429 nt, Artificial Sequence
  derived and/or modified sequence opt4 from MAGE-C1__Homo_sapiens__CCDS35417.1
augggcgacaaggacaugcccaccgccggcaugcccagccugcugcagagcagcagcgagagcccccagagcugccccgagggcgaggacagccagagcccccugcagaucccccagagcagccccgagagcgacgacacccuguacccccugcagagcccccagagcagaagcgagggcgaggacagcagcgacccccugcagagaccccccgagggcaaggacagccagagcccccugcagaucccccagagcagccccgagggcgacgacacccagagcccccugcagaacagccagagcagccccgagggcaaggacagccugagcccccuggagaucagccagagcccccccgagggcgaggacgugcagagcccccugcagaaccccgccagcagcuucuucagcagcgcccugcugagcaucuuccagagcagccccgagagcacccagagccccuucgagggcuucccccagagcgugcugcagauccccgugagcgccgccagcagcagcacccuggugagcaucuuccagagcagccccgagagcacccagagccccuucgagggcuucccccagagcccccugcagauccccgugagcagaagcuucagcagcacccugcugagcaucuuccagagcagccccgagagaacccagagcaccuucgagggcuucgcccagagcccccugcagauccccgugagccccagcagcagcagcacccugcugagccuguuccagagcuucagcgagagaacccagagcaccuucgagggcuucgcccagagcagccugcagauccccgugagccccagcuucagcagcacccuggugagccuguuccagagcagccccgagagaacccagagcaccuucgagggcuucccccagagcccccugcagauccccgugagcagcagcagcagcagcacccugcugagccuguuccagagcagccccgagagaacccacagcaccuucgagggcuucccccagagccugcugcagauccccaugaccagcagcuucagcagcacccugcugagcaucuuccagagcagccccgagagcgcccagagcaccuucgagggcuucccccagagcccccugcagauccccggcagccccagcuucagcagcacccugcugagccuguuccagagcagccccgagagaacccacagcaccuucgagggcuucccccagagcccccugcagauccccaugaccagcagcuucagcagcacccugcugagcauccugcagagcagccccgagagcgcccagagcgccuucgagggcuucccccagagcccccugcagauccccgugagcagcagcuucagcuacacccugcugagccuguuccagagcagccccgagagaacccacagcaccuucgagggcuucccccagagcccccugcagauccccgugagcagcagcagcagcagcagcacccugcugagccuguuccagagcagccccgagugcacccagagcaccuucgagggcuucccccagagcccccugcagaucccccagagcccccccgagggcgagaacacccacagcccccugcagaucgugcccagccugcccgagugggaggacagccugagcccccacuacuucccccagagccccccccagggcgaggacagccugagcccccacuacuucccccagagccccccccagggcgaggacagccugagcccccacuacuucccccagagcccccagggcgaggacagccugagcccccacuacuucccccagagccccccccagggcgaggacagcaugagcccccuguacuucccccagagcccccugcagggcgaggaguuccagagcagccugcagagccccgugagcaucugcagcagcagcacccccagcagccugccccagagcuuccccgagagcagccagagcccccccgagggccccgugcagagcccccugcacagcccccagagcccccccgagggcaugcacagccagagcccccugcagagccccgagagcgcccccgagggcgaggacagccugagcccccugcagaucccccagagcccccuggagggcgaggacagccugagcagccugcacuucccccagagcccccccgagugggaggacagccugagcccccugcacuucccccaguuccccccccagggcgaggacuuccagagcagccugcagagccccgugagcaucugcagcagcagcaccagccugagccugccccagagcuuccccgagagcccccagagcccccccgagggccccgcccagagcccccugcagagacccgugagcagcuucuucagcuacacccuggccagccugcugcagagcagccacgagagcccccagagcccccccgagggccccgcccagagcccccugcagagccccgugagcagcuuccccagcagcaccagcagcagccugagccagagcagccccgugagcagcuuccccagcagcaccagcagcagccugagcaagagcagccccgagagcccccugcagagccccgugaucagcuucagcagcagcaccagccugagccccuucagcgaggagagcagcagccccguggacgaguacaccagcagcagcgacacccugcuggagagcgacagccugaccgacagcgagagccugaucgagagcgagccccuguucaccuacacccuggacgagaagguggacgagcuggccagauuccugcugcugaaguaccaggugaagcagcccaucaccaaggccgagaugcugaccaacgugaucagcagauacaccggcuacuuccccgugaucuucagaaaggccagagaguucaucgagauccuguucggcaucagccugagagagguggaccccgacgacagcuacguguucgugaacacccuggaccugaccagcgagggcugccugagcgacgagcagggcaugagccagaacagacugcugauccugauccugagcaucaucuucaucaagggcaccuacgccagcgaggaggugaucugggacgugcugagcggcaucggcgugagagccggcagagagcacuucgccuucggcgagcccagagagcugcugaccaaggugugggugcaggagcacuaccuggaguacagagaggugcccaacagcagcccccccagauacgaguuccuguggggccccagagcccacagcgaggugaucaagagaaaggugguggaguuccuggccaugcugaagaacaccgugcccaucaccuuccccagcagcuacaaggacgcccugaaggacguggaggagagagcccaggccaucaucgacaccaccgacgacagcaccgccaccgagagcgccagcagcagcgugaugagccccagcuucagcagcgaguga

SEQ ID NO: 2350 - RNA, 3429 nt, Artificial Sequence
  derived and/or modified sequence opt5 from MAGE-C1__Homo_sapiens__CCDS35417.1
augggcgacaaggauaugcccaccgccgggaugccuagccugcuccaguccucuagcgaguccccgcaaucuugccccgaaggagaggacagccaguccccucugcagaucccccagucuagcccugaauccgaugacacacuuuacccccugcaaagcccucagucuagauccgagggcgaagauagcucugacccgcuccagcggcccccugaggggaaagauucccagagcccccugcaaauuccucagucuucccccgagggagacgauacgcagagcccgcuucagaacucccaaucuagcccugaaggcaaggacucccugagcccccucgagaucucucaguccccucccgaaggggaggaugugcagagcccccugcaaaauccugcuucuagcuucuuuuccucugcccugcucagcauuuuccaguccagcccggagucuacccagucccccuuugaaggauucccucagagcguccugcaaauccccguuucugcggcuuccagcuccacacuugugucuauuuuucagagcuccccugagucuacccagagccccuucgaaggcuuuccgcaguccccucugcaaauccccgugagccgcucuuucuccagcacacuccugucuaucuuucaguccagcccugagagaacccagucuacauucgaaggcuuugcccagagcccccuucaaauuccugucucccccuccucuuccagcacccugcucucccuguuccagucuuuuagcgagcggacgcaguccaccuucgagggguucgcccagucuagccugcaaaucccgguguccccuucuuuuagcuccacacucguuagccuguuccagucuucccccgaacgcacccagagcacauuugagggauucccccaaucuccucuucagauuccgguguccuccucuuccagcuccacccugcucagccuguuucagucuagccccgaaagaacgcacuccacauucgagggcuuuccucagucucuucugcaaauccccaugaccagcuccuucucuagcacacuccuguccauuuuucagucuagcccugaauccgcucagagcaccuucgagggguuuccccagucuccucugcaaauccccggauccccgagcuucucuuccacccuccugagccuuuuucaguccucuccugagcggacacauagcacguucgaaggcuucccccaguccccucugcagauucccaugaccagcucuuuuuccagcacacuccugucuauccuucaaagcuccccggagucugcccagagcgcuuucgaaggguuuccucaguccccucugcaaauccccgucucuagcuccuucagcuauacccuccugucucuguuucaguccagccccgagcgcacacacuccaccuucgaaggauuuccccagucuccucuccagauuccggugagcuccucuagcuccagcucuacgcugcuuucccuguuccaaagcucucccgaguguacacaguccaccuuugagggcuucccucagagcccccuccagaucccucaaucucccccugaaggcgagaacacccauagcccgcugcagauuguucccucccugccugaaugggaggacucucuuagcccccacuacuuuccucaguccccgccccagggggaggauagccucuccccucauuauuucccccaaucucccccucagggagaagacagccuguccccucacuacuuuccccagucuccgcagggcgaggacagccuguccccucacuauuucccccaaucucccccucagggggaagauagcaugagcccccucuacuucccgcagagcccucugcaaggagaggaauuucagucuucccuucagagccccgugucuaucugcuccagcucuacaccuuccagccugccccaguccuucccugagagcucucaaagcccgcccgagggcccuguccagagcccccuccauucuccccagagcccuccggaagggaugcacucccagucuccccugcaaagcccugaguccgcccccgaaggagaggacucucugagcccucuucagauuccccaguccccucucgaaggcgaggauagccugucuucccugcauuuuccgcagagcccucccgagugggaagacucucucagcccccugcacuucccucaauuucccccgcagggcgaggauuuccaguccucccuucaaucuccugugagcaucuguuccagcucuaccucccugagccucccccagucuuuucccgaaagcccucaguccccucccgaggggccggcgcagucuccccugcaaagaccugugagcuccuucuuuucuuauacacuggccagccuucuccaguccagccacgaaucuccccaguccccucccgagggaccggcucagagcccucugcaaucccccgucucuagcuucccuuccucuacgagcuccagccugucucaguccagccccguuucuuccuuuccuagcucuaccuccagcucucucagcaaauccagccccgaguccccgcugcagucuccugugaucagcuucuccucuagcacaucccuuucucccuucagcgaagaguccagcucucccguggacgaauacaccuccagcucugauacacugcucgaguccgacagccugaccgauucugagucccugauugaaagcgagccucuuuuuacguacacccucgacgaaaaggucgaugagcuggcccgguuccugcuccugaaauaucaggugaagcaaccgaucacaaaggcugaaaugcuuaccaauguuauuucucgcuacacaggcuauuuucccgugaucuucagaaaagcccgggaguuuauugagauccuguucgggaucucccuccgcgaagucgacccugacgauagcuacguguuuguuaacacccuggaccugacgagcgagggaugccuuuccgaugaacagggcaugucucagaauagacugcucauucugauccucagcauuaucuucauuaaggggacauaugcguccgaggaagugaucugggacguccugucuggcauuggagugcgggccggccgcgagcauuuugcuuucggggagcccagagaacuucugaccaaagucugggugcaggagcacuaccucgaauaucgggagguuccuaacagcucucccccuagauacgaauuucuguggggaccccgcgcccauuccgaggugaucaagcggaaagucguggaguuccuggcuaugcuuaagaauacaguuccgaucaccuuuccuagcuccuacaaggaugcccugaaagacguggaagagagagcccaagcuauuaucgauaccacagacgauagcacggcgaccgaaucugccuccagcucugucaugucccccagcuucuccucugaguga

SEQ ID NO: 2351 - protein, 373 aa, Artificial Sequence
  MAGE-C2__Homo_sapiens__Q9UBF1
MPPVPGVPFRNVDNDSPTSVELEDWVDAQHPTDEEEEEASSASSTLYLVFSPSSFSTSSSLILGGPEEEEVPSGVIPNLTESIPSSPPQGPPQGPSQSPLSSCCSSFSWSSFSEESSSQKGEDTGTCQGLPDSESSFTYTLDEKVAELVEFLLLKYEAEEPVTEAEMLMIVIKYKDYFPVILKRAREFMELLFGLALIEVGPDHFCVFANTVGLTDEGSDDEGMPENSLLIIILSVIFIKGNCASEEVIWEVLNAVGVYAGREHFVYGEPRELLTKVWVQGHYLEYREVPHSSPPYYEFLWGPRAHSESIKKKVLEFLAKLNNTVPSSFPSWYKDALKDVEERVQATIDTADDATVMASESLSVMSSNVSFSE

SEQ ID NO: 2352 - RNA, 1122 nt, Artificial Sequence
  MAGE-C2__Homo_sapiens__AAF07210
augccucccguuccaggcguuccauuccgcaacguugacaacgacuccccgaccucaguugaguuagaagacuggguagaugcacagcaucccacagaugaggaagaggaggaagccuccuccgccucuuccacuuuguacuuaguauuuucccccucuucuuucuccacauccucuucucugauucuuggugguccugaggaggaggaggugcccucuggugugauaccaaaucuuaccgagagcauucccaguaguccuccacaggguccuccacaggguccuucccagaguccucugagcuccugcugcuccucuuuuucauggagcucauucagugaggaguccagcagccagaaaggggaggauacaggcaccugucagggccugccagacagugaguccucuuucacauauacacuagaugaaaagguggccgaguuaguggaguuccugcuccucaaauacgaagcagaggagccuguaacagaggcagagaugcugaugauugucaucaaguacaaagauuacuuuccugugauacucaagagagcccgugaguucauggagcuucuuuuuggccuugcccugauagaagugggcccugaccacuucuguguguuugcaaacacaguaggccucaccgaugaggguagugaugaugagggcaugcccgagaacagccuccugauuauuauucugagugugaucuucauaaagggcaacugugccucugaggaggucaucugggaagugcugaaugcaguagggguauaugcugggagggagcacuucgucuauggggagccuagggagcuccucacuaaaguuugggugcagggacauuaccuggaguaucgggaggugccccacaguucuccuccauauuaugaauuccugugggguccaagagcccauucagaaagcaucaagaagaaaguacuagaguuuuuagccaagcugaacaacacuguuccuaguuccuuuccauccugguacaaggaugcuuugaaagauguggaagagagaguccaggccacaauugauaccgcagaugaugccacugucauggccagugaaagccucagugucauguccagcaacgucuccuuuucugaguga

SEQ ID NO: 2353 - RNA, 1122 nt, Artificial Sequence
  derived and/or modified sequence opt1 from MAGE-C2__Homo_sapiens__AAF07210
augccgcccgugcccggcguccccuuccgcaacguggacaacgacagccccaccuccguggagcuggaggacugggucgacgcccagcaccccaccgacgaggaggaggaggaggccagcuccgcgagcuccacgcucuaccugguguucagccccuccagcuucuccaccagcuccagccugauccucgggggccccgaggaggaggaggugcccuccggggucaucccgaaccugaccgagagcauccccuccagcccgccccagggcccgccccaggggcccucccagagcccccuguccagcugcugcagcuccuucagcugguccagcuucuccgaggagagcuccagccagaagggcgaggacaccggcacgugccaggggcucccggacuccgagagcuccuucaccuacacccuggacgagaagguggccgagcugguggaguuccuccugcugaaguacgaggccgaggagcccgucaccgaggccgagaugcucaugaucgugaucaaguacaaggacuacuuccccgugauccugaagcgggcccgcgaguucauggagcuccuguucggccuggcgcugaucgaggucgggcccgaccacuucugcguguucgccaacacggugggccucaccgacgaggggagcgacgacgagggcaugccggagaacucccugcugaucaucauccucagcgucaucuucaucaagggcaacugcgccuccgaggaggugaucugggaggugcugaacgccgucgggguguacgcgggccgggagcacuucguguacggggagccccgcgagcugcucaccaaggucugggugcagggccacuaccuggaguaccgggaggugccccacagcuccccgcccuacuacgaguuccuguggggcccccgcgcccacagcgaguccaucaagaagaagguccucgaguuccuggccaagcugaacaacaccgugcccagcagcuuccccuccugguacaaggacgcccucaaggacgucgaggagcgggugcaggccacgaucgacaccgcggacgacgccaccgugauggccagcgagucccugagcgucauguccagcaacguguccuucagcgaguga

SEQ ID NO: 2354 - RNA, 1122 nt, Artificial Sequence
  derived and/or modified sequence opt2 from MAGE-C2__Homo_sapiens__AAF07210
augccccccguccccggcguccccuuccgcaacgucgacaacgacucccccaccuccgucgagcucgaggacugggucgacgcccagcaccccaccgacgaggaggaggaggaggccuccuccgccuccuccacccucuaccucgucuucucccccuccuccuucuccaccuccuccucccucauccucggcggccccgaggaggaggagguccccuccggcgucauccccaaccucaccgaguccauccccuccucccccccccagggccccccccagggccccucccaguccccccucuccuccugcugcuccuccuucuccugguccuccuucuccgaggaguccuccucccagaagggcgaggacaccggcaccugccagggccuccccgacuccgaguccuccuucaccuacacccucgacgagaaggucgccgagcucgucgaguuccuccuccucaaguacgaggccgaggagcccgucaccgaggccgagaugcucaugaucgucaucaaguacaaggacuacuuccccgucauccucaagcgcgcccgcgaguucauggagcuccucuucggccucgcccucaucgaggucggccccgaccacuucugcgucuucgccaacaccgucggccucaccgacgagggcuccgacgacgagggcaugcccgagaacucccuccucaucaucauccucuccgucaucuucaucaagggcaacugcgccuccgaggaggucaucugggagguccucaacgccgucggcgucuacgccggccgcgagcacuucgucuacggcgagccccgcgagcuccucaccaaggucuggguccagggccacuaccucgaguaccgcgaggucccccacuccuccccccccuacuacgaguuccucuggggcccccgcgcccacuccgaguccaucaagaagaagguccucgaguuccucgccaagcucaacaacaccguccccuccuccuuccccuccugguacaaggacgcccucaaggacgucgaggagcgcguccaggccaccaucgacaccgccgacgacgccaccgucauggccuccgagucccucuccgucauguccuccaacgucuccuucuccgaguga

SEQ ID NO: 2355 - RNA, 1122 nt, Artificial Sequence
  derived and/or modified sequence opt3 from MAGE-C2__Homo_sapiens__AAF07210
augcccccugugccaggcgucccguucagaaacguugacaaugauagccccaccuccguggagcuggaagacuggguagaugcccagcacccuacagacgaggaagaggaagaggcuucuucagcaaguagcacucucuaccuuguguuuuccccaucuucguucucaacgagcaguucccugaucuuagggggacccgaggaagaggaagucccuucuggugugauuccaaacuugaccgagagcauacccuccucaccuccacaaggcccgccccaggggccuagucagagcccacugucuuccugcuguagcucauuuaguuggucuuccuucagcgaggaaucgucuucccagaagggagaggauacaggcacuugccaaggucuacccgacucagaaaguagcuuuaccuauacacucgaugagaaaguugccgaacugguggaguuccuucuguugaaguacgaggcggaagaaccugucaccgaagcugagaugcucaugaucgugauuaaauauaaggacuacuuuccaguaauccugaaaagggcccgggaguucauggagcugcucuuuggguuagcacugauugagguuggacccgaucauuucuguguguuugccaauacugucggccuuacagacgaaggcuccgaugacgaggggaugccggaaaacucuuugcugaucauaauccuaagcgugauuuucaucaagggaaauugcgcuucagaggaagugauuugggagguccucaacgcaguugguguguaugccggccgcgagcacuuuguauacggggaaccucgagagcugcuuaccaagguguggguccagggacauuaucuggaauaccgugaggugccccacaguuccccaccuuacuaugaguucuuguggggccccagagcucauagcgaaucuaucaaaaagaaaguucucgaguuccuggccaaguuaaauaacacggugccaucaaguuuucccagcugguacaaagaugcgcugaaggacgucgaagagagggugcaggcaacuauagacaccgccgaugacgcuacaguaauggccuccgaaucucucucgguuaugagcuccaaugugucauucagugaguga

SEQ ID NO: 2356 - RNA, 1122 nt, Artificial Sequence
  derived and/or modified sequence opt4 from MAGE-C2__Homo_sapiens__AAF07210
augccccccgugcccggcgugcccuucagaaacguggacaacgacagccccaccagcguggagcuggaggacuggguggacgcccagcaccccaccgacgaggaggaggaggaggccagcagcgccagcagcacccuguaccugguguucagccccagcagcuucagcaccagcagcagccugauccugggcggccccgaggaggaggaggugcccagcggcgugauccccaaccugaccgagagcauccccagcagccccccccagggccccccccagggccccagccagagcccccugagcagcugcugcagcagcuucagcuggagcagcuucagcgaggagagcagcagccagaagggcgaggacaccggcaccugccagggccugcccgacagcgagagcagcuucaccuacacccuggacgagaagguggccgagcugguggaguuccugcugcugaaguacgaggccgaggagcccgugaccgaggccgagaugcugaugaucgugaucaaguacaaggacuacuuccccgugauccugaagagagccagagaguucauggagcugcuguucggccuggcccugaucgaggugggccccgaccacuucugcguguucgccaacaccgugggccugaccgacgagggcagcgacgacgagggcaugcccgagaacagccugcugaucaucauccugagcgugaucuucaucaagggcaacugcgccagcgaggaggugaucugggaggugcugaacgccgugggcguguacgccggcagagagcacuucguguacggcgagcccagagagcugcugaccaaggugugggugcagggccacuaccuggaguacagagaggugccccacagcagcccccccuacuacgaguuccuguggggccccagagcccacagcgagagcaucaagaagaaggugcuggaguuccuggccaagcugaacaacaccgugcccagcagcuuccccagcugguacaaggacgcccugaaggacguggaggagagagugcaggccaccaucgacaccgccgacgacgccaccgugauggccagcgagagccugagcgugaugagcagcaacgugagcuucagcgaguga

SEQ ID NO: 2357 - RNA, 1122 nt, Artificial Sequence
  derived and/or modified sequence opt5 from MAGE-C2__Homo_sapiens__AAF07210
augcccccugugccgggcguccccuucagaaacguugacaaugauagcccuaccuccguggagcuggaagacuggguggaugcccagcaccccacagacgaggaagaggaagaggcuucuagcgccuccucuacgcucuaccuggucuuuagcccuuccucuuucagcaccuccagcucucuuauccucgggggacccgaggaagaggaagugccuuccggcguuauuccgaaccugacagagagcauccccucuuccccuccccaagggccuccccagggaccgagccagucuccucuguccagcugcuguuccucuuuuagcugguccagcuucucugaggaauccagcucucagaagggcgaggauaccgggacaugccaaggacuucccgacagcgaauccucuuuuaccuauacacuggaugagaaaguggcggaacucgucgaguuccugcugcucaaguacgaggcugaagaaccugugaccgaagccgagaugcugaugauuguuaucaaauauaaggacuacuuucccgugauucuuaaacgggcccgcgaguucauggagcugcucuuuggccuggcucuuaucgaggucggccccgaucauuucuguguguuugccaauacgguggggcugaccgacgaaggaagcgaugacgagggcaugccugaaaacucccuccugaucauuauccugagcgucauuuucaucaaggggaauugcgcuucugaggaaguuauuugggaggugcucaacgccgugggagucuaugcgggcagagagcacuuuguguacggggaaccgcgggagcugcuuacaaagguuugggugcagggacauuaucuggaauaccgcgaggucccccacuccagcccucccuacuaugaguuccucuggggcccuagagcccauucugaauccaucaaaaagaaagugcuggaguuccuugcuaagcugaauaacaccguucccagcuccuuuccgucuugguacaaagaugcccucaaggacguggaggaacggguccaggcuacaauugacaccgccgaugacgcgacggugauggccagcgaaucccugucugucaugagcuccaaugugagcuucucugaguga

SEQ ID NO: 2358 - protein, 643 aa, Artificial Sequence
  MAGE-C3__Homo_sapiens__Q8TD91
MLLPCHWVLDATFSDGSLGQWVKNTCATYALSPVVLPPQPQPRKKATDKDYSAFHLGHLREVRLFLRGGTSDQRMDSLVLCPTYFKLWRTLSGSPGLQLSDLHFGSQPEGKFSLRRAVSVKQREEPQDWPLNEKRTLWKDSDLPTWRRGTGYTLSLPAVSPGKRLWGEKAGSLPESEPLFTYTLDEKVDKLVQFLLLKYQAKEPLTRAEMQMNVINTYTGYFPMIFRKAREFIEILFGISLTEVDPDHFYVFVNTLDLTCEGSLSDEQGMPQNRLLILILSVIFIKGNCASEEVIWEVLNAIGPWSALAGFADVLSRLALWESEGPEAFCEESGLRSAEGSVLDLANPQGLAGHRQEDGRRGLTEASPQQKKGGEDEDMPAAGMPPLPQSPPEIPPQGPPKISPQGPPQSPPQSPLDSCSSPLLWTRLDEESSSEEEDTATWHALPESESLPRYALDEKVAELVQFLLLKYQTKEPVTKAEMLTTVIKKYKDYFPMIFGKAHEFIELIFGIALTDMDPDNHSYFFEDTLDLTYEGSLIDDQGMPKNCLLILILSMIFIKGSCVPEEVIWEVLSAIGPIQRPAREVLEFLSKLSSIIPSAFPSWYMDALKDMEDRAQAIIDTTDDATAMASASPSVMSTNFCPE

SEQ ID NO: 2359 - RNA, 1932 nt, Artificial Sequence
  MAGE-C3__Homo_sapiens__AAM08355
augcugcugcccugccacuggguguuggaugccaccuucagugauggcagucuaggccagugggugaaaaacacaugugccacauaugccuuauccccaguggugcucccaccucagccccagccccggaaaaaggccacagauaaggacuauucugccuuucaucuugggcaucugagggaggugaggcuuuuucugagggguggaacuucagaucagcgaauggauagucuuguccucugccccacauacuucaagcucuggaggacccuaucaggguccccagguuuacaacuuucugacuugcauuuugggagucagccggaggggaaguuuucucugaggagggcaguuucaguuaagcagagggaggaaccccaggacuggccacucaacgagaagagaacucuguggaaggacagugaccuuccaacauggaggagaggcacaggcuacacccuuucccuuccugccgucagcccuggaaaaagguuguggggggagaaagcggggagcuugccagagagcgagcccuuguucacuuauacacuggaugaaaagguggacaaguuggugcaguuucuucuccucaaauaucaagcaaaagagccucucacaagagcagagaugcagaugaaugucaucaacacauacacgggcuacuuuccuaugaucuucaggaaagcccgugaguucauagagauucuuuuuggcauuucccugacagaaguggaccccgaccauuucuaugucuuuguaaacacauuagaccucaccugugaggggagucugagugaugagcagggcaugccccagaaccgccuccugauucuuauucugagugugaucuucauaaagggcaacugugcaucugaggaggucaucugggaagugcugaaugcaauagggcccuggucagccuuggcaggguucgcggaugugcuuucccgacuugcacugugggagucugaaggaccugaagcauuuugcgaggagucuggacucaggucagcagagggaagcgucuuagaccuggccaauccucaaggacuugcaggccacagacaggaagauggccgccgagggcugaccgaggcguccccacaacagaagaagggaggagaagaugaggauaugccugcugcugggaugccaccucuuccccagaguccuccugagauuccuccccaggguccucccaagaucucuccccaggguccuccgcagaguccuccccagaguccucuagacuccugcucauccccucuuuuguggacccgauuggaugaggaguccagcagugaagaggaggauacagcuacuuggcaugccuugccagaaagugaauccuugcccagguaugcccuggaugaaaagguggcugaguuggugcaguuucuucuccucaaauaucaaacaaaagagccugucacaaaggcagagaugcugacgacugucaucaagaaguauaaggacuauuuucccaugaucuucgggaaagcccaugaguucauagagcuaauuuuuggcauugcccugacugauauggaccccgacaaccacuccuauuucuuugaagacacauuagaccucaccuaugagggaagccugauugaugaccagggcaugcccaagaacugucuccugauucuuauucucaguaugaucuucauaaagggcagcuguguccccgaggaggucaucugggaaguguugagugcaauagggcccauucagaggccagcaagagaagucuuagaguuuuuauccaagcuauccaguaucaucccuagugccuuuccauccugguacauggaugcuuugaaagauauggaagacagagcccaggccauaauugacaccacagaugaugcuacugccauggccagugcaagccccagugucauguccaccaacuucuguccugaguga

SEQ ID NO: 2360 - RNA, 1932 nt, Artificial Sequence
  derived and/or modified sequence opt1 from MAGE-C3__Homo_sapiens__AAM08355
augcugcuccccugccacugggugcuggacgccaccuucagcgacggcucccuggggcagugggucaagaacaccugcgccacguacgcgcucagcccgguggugcugcccccccagccccagccgcgcaagaaggccaccgacaaggacuacuccgccuuccaccugggccaccuccgggagguccgccuguuccugcgggggggcaccagcgaccagcgcauggacucccucgugcugugccccaccuacuucaagcuguggcggacgcucagcgggucccccggccugcagcugagcgaccuccacuucggcucccagcccgaggggaaguucagccugcgccgggccguguccgucaagcagcgcgaggagccgcaggacuggccccugaacgagaagcggacccucuggaaggacagcgaccugcccaccuggcgccggggcaccggguacacgcugucccuccccgccgugagcccgggcaagcgccuguggggggagaaggcgggcucccugcccgagagcgagccccucuucaccuacacccuggacgagaagguggacaagcugguccaguuccuccugcugaaguaccaggccaaggagccccucacccgggccgagaugcagaugaacgugaucaacacguacaccggcuacuucccgaugaucuuccgcaaggcccgggaguucaucgagauccuguucgggaucucccugaccgagguggaccccgaccacuucuacgucuucgugaacacccucgaccugacgugcgagggcagccuguccgacgagcaggggaugccccagaaccgccuccugauccugauccucagcgugaucuucaucaagggcaacugcgcgagcgaggaggucaucugggaggugcugaacgccaucggccccugguccgcccuggccggguucgccgacgugcucagccggcuggcgcugugggaguccgagggcccggaggccuucugcgaggagagcgggcuccgcuccgccgagggcagcguccuggaccuggccaacccccaggggcucgccggccaccggcaggaggacggccgccgggggcugaccgaggcguccccccagcagaagaagggcggggaggacgaggacaugcccgccgccggcaugccgccccugccccagagccccccggagauccccccccaggggccgcccaagaucuccccccagggccccccgcagagccccccccaguccccccuggacagcugcuccagcccgcuccuguggacccgccuggacgaggaguccagcuccgaggaggaggacaccgccacguggcacgcccuccccgagagcgagucccugccccgcuacgcgcuggacgagaagguggccgagcucgugcaguuccugcugcucaaguaccagaccaaggagcccgucaccaaggccgagaugcugaccacggugaucaagaaguacaaggacuacuucccgaugaucuucggcaaggcccacgaguucaucgagcugaucuucgggaucgcccucaccgacauggaccccgacaaccacagcuacuucuucgaggacacccuggaccugaccuacgagggcagccucaucgacgaccaggggaugcccaagaacugccugcugauccucauccuguccaugaucuucaucaagggcagcugcgugcccgaggaggucaucugggaggugcuguccgcgaucgggccgauccagcggcccgcccgcgagguccucgaguuccugagcaagcuguccagcaucauccccuccgccuuccccagcugguacauggacgcccucaaggacauggaggaccgggcgcaggccaucaucgacacgaccgacgacgccaccgccauggccuccgcgagcccguccgugaugagcaccaacuucugccccgaguga

SEQ ID NO: 2361 - RNA, 1932 nt, Artificial Sequence
  derived and/or modified sequence opt2 from MAGE-C3__Homo_sapiens__AAM08355
augcuccuccccugccacuggguccucgacgccaccuucuccgacggcucccucggccagugggucaagaacaccugcgccaccuacgcccucucccccgucguccuccccccccagccccagccccgcaagaaggccaccgacaaggacuacuccgccuuccaccucggccaccuccgcgagguccgccucuuccuccgcggcggcaccuccgaccagcgcauggacucccucguccucugccccaccuacuucaagcucuggcgcacccucuccggcucccccggccuccagcucuccgaccuccacuucggcucccagcccgagggcaaguucucccuccgccgcgccgucuccgucaagcagcgcgaggagccccaggacuggccccucaacgagaagcgcacccucuggaaggacuccgaccuccccaccuggcgccgcggcaccggcuacacccucucccuccccgccgucucccccggcaagcgccucuggggcgagaaggccggcucccuccccgaguccgagccccucuucaccuacacccucgacgagaaggucgacaagcucguccaguuccuccuccucaaguaccaggccaaggagccccucacccgcgccgagaugcagaugaacgucaucaacaccuacaccggcuacuuccccaugaucuuccgcaaggcccgcgaguucaucgagauccucuucggcaucucccucaccgaggucgaccccgaccacuucuacgucuucgucaacacccucgaccucaccugcgagggcucccucuccgacgagcagggcaugccccagaaccgccuccucauccucauccucuccgucaucuucaucaagggcaacugcgccuccgaggaggucaucugggagguccucaacgccaucggccccugguccgcccucgccggcuucgccgacguccucucccgccucgcccucugggaguccgagggccccgaggccuucugcgaggaguccggccuccgcuccgccgagggcuccguccucgaccucgccaacccccagggccucgccggccaccgccaggaggacggccgccgcggccucaccgaggccuccccccagcagaagaagggcggcgaggacgaggacaugcccgccgccggcaugcccccccucccccaguccccccccgagauccccccccagggcccccccaagaucuccccccagggccccccccagucccccccccaguccccccucgacuccugcuccuccccccuccucuggacccgccucgacgaggaguccuccuccgaggaggaggacaccgccaccuggcacgcccuccccgaguccgagucccucccccgcuacgcccucgacgagaaggucgccgagcucguccaguuccuccuccucaaguaccagaccaaggagcccgucaccaaggccgagaugcucaccaccgucaucaagaaguacaaggacuacuuccccaugaucuucggcaaggcccacgaguucaucgagcucaucuucggcaucgcccucaccgacauggaccccgacaaccacuccuacuucuucgaggacacccucgaccucaccuacgagggcucccucaucgacgaccagggcaugcccaagaacugccuccucauccucauccucuccaugaucuucaucaagggcuccugcguccccgaggaggucaucugggagguccucuccgccaucggccccauccagcgccccgcccgcgagguccucgaguuccucuccaagcucuccuccaucauccccuccgccuuccccuccugguacauggacgcccucaaggacauggaggaccgcgcccaggccaucaucgacaccaccgacgacgccaccgccauggccuccgccucccccuccgucauguccaccaacuucugccccgaguga

SEQ ID NO: 2362 - RNA, 1932 nt, Artificial Sequence
  derived and/or modified sequence opt3 from MAGE-C3__Homo_sapiens__AAM08355
augcugcuccccugccacugggugcuugacgccaccuucagcgauggcucccuggggcagugggucaagaacacaugugcuacuuacgcauugucuccuguuguguuaccaccgcaaccccagccucggaaaaaggccacggacaaagauuauucagcguuucaucugggacaccuaagggagguaagacucuuccugcgcgguggcaccagugaccagcgaauggauagccuugugcugugcccaacauacuuuaaguuguggcguacucucuccgggucucccggacugcagcugucggaccuccauuucggcucacaaccugaagguaaauuuagcuuaagaagggcugucagugugaagcagcgggaggaaccacaggauuggccccugaaugagaagcgcacccuuuggaaagacuccgauuugccuacauggagaagggggaccggauauacucugucucuaccagccguuagcccgggcaagcggcucuggggcgaaaaagcagggucccugcccgagucagagccucuuuucacauacacccuggacgaaaagguggauaaauugguccaguuucuccuguuaaaguaucaagccaaggagccacugacgcgcgcugaaaugcagaugaacgugaucaauacuuacaccggauauuuccccaugauuuuucgaaaagcaagagaguucauagagauccucuuugguauuagucuuacagaaguagacccugaucacuucuacguuuuugugaacacucuggacuugaccugugagggcagccuaucugacgaacaggggaugccacagaauaggcugcucauccugauucuuuccgucaucuucauaaagggaaacugcgccucagaggaagugaucugggaggugcugaaugcuauuggccccuggagcgccuuggcggguuucgcagauguccucagucggcuggccuuaugggagucugaagggccggaggcuuuuugugaagaguccggacugcguagcgccgaaggcucgguucuagaccucgcaaacccucaaggccuggcugggcaucgccaggaggauggaagaaggggucuuacagaggccucuccccagcagaaaaagggcggggaagacgaggauaugccagcggccggaaugccucccuugccacaaucacccccugaaaucccaccgcagggcccucccaaaauuuccccacagggucccccucaaaguccaccccagagcccgcuggacuccugcucuagcccucuccuguggacccggcuugaugaggaaucaaguuccgaggaggaagacacggcaacuuggcacgcucugccagagagcgaaucuuugccccgauacgcccucgaugagaagguggcugagcugguacaguucuuacugcuaaaauaucagacaaaggaaccugugaccaaggccgagaugcucacuacagucaucaaaaaguacaaagacuauuuucccaugauauucgggaaggcacacgaauuuauugagcugaucuucggcauugcccuuaccgauauggacccagacaaucauucauacuuuuucgaagauacguuggaccugaccuaugagggaagucucaucgaugaccaaggcaugccuaaaaacugucuguuaauccugauucuuagcaugauauuuaucaagggguccugcgugcccgaggaaguuauuugggagguguugucugcuaucggaccaauacagcgcccggcgagagaaguccucgaguuccugucgaagcuaagcuccauuaucccuucagcauuucccaguugguacauggaugcccugaaagacauggaagauagggcucaggccaucauugacacaacugaugacgcaaccgccauggcuucugccagcccauccgugaugucaacaaauuucugucccgaguga

SEQ ID NO: 2363 - RNA, 1932 nt, Artificial Sequence
  derived and/or modified sequence opt4 from MAGE-C3__Homo_sapiens__AAM08355
augcugcugcccugccacugggugcuggacgccaccuucagcgacggcagccugggccagugggugaagaacaccugcgccaccuacgcccugagccccguggugcugcccccccagccccagcccagaaagaaggccaccgacaaggacuacagcgccuuccaccugggccaccugagagaggugagacuguuccugagaggcggcaccagcgaccagagaauggacagccuggugcugugccccaccuacuucaagcuguggagaacccugagcggcagccccggccugcagcugagcgaccugcacuucggcagccagcccgagggcaaguucagccugagaagagccgugagcgugaagcagagagaggagccccaggacuggccccugaacgagaagagaacccuguggaaggacagcgaccugcccaccuggagaagaggcaccggcuacacccugagccugcccgccgugagccccggcaagagacuguggggcgagaaggccggcagccugcccgagagcgagccccuguucaccuacacccuggacgagaagguggacaagcuggugcaguuccugcugcugaaguaccaggccaaggagccccugaccagagccgagaugcagaugaacgugaucaacaccuacaccggcuacuuccccaugaucuucagaaaggccagagaguucaucgagauccuguucggcaucagccugaccgagguggaccccgaccacuucuacguguucgugaacacccuggaccugaccugcgagggcagccugagcgacgagcagggcaugccccagaacagacugcugauccugauccugagcgugaucuucaucaagggcaacugcgccagcgaggaggugaucugggaggugcugaacgccaucggccccuggagcgcccuggccggcuucgccgacgugcugagcagacuggcccugugggagagcgagggccccgaggccuucugcgaggagagcggccugagaagcgccgagggcagcgugcuggaccuggccaacccccagggccuggccggccacagacaggaggacggcagaagaggccugaccgaggccagcccccagcagaagaagggcggcgaggacgaggacaugcccgccgccggcaugcccccccugccccagagcccccccgagauccccccccagggcccccccaagaucagcccccagggccccccccagagccccccccagagcccccuggacagcugcagcagcccccugcuguggaccagacuggacgaggagagcagcagcgaggaggaggacaccgccaccuggcacgcccugcccgagagcgagagccugcccagauacgcccuggacgagaagguggccgagcuggugcaguuccugcugcugaaguaccagaccaaggagcccgugaccaaggccgagaugcugaccaccgugaucaagaaguacaaggacuacuuccccaugaucuucggcaaggcccacgaguucaucgagcugaucuucggcaucgcccugaccgacauggaccccgacaaccacagcuacuucuucgaggacacccuggaccugaccuacgagggcagccugaucgacgaccagggcaugcccaagaacugccugcugauccugauccugagcaugaucuucaucaagggcagcugcgugcccgaggaggugaucugggaggugcugagcgccaucggccccauccagagacccgccagagaggugcuggaguuccugagcaagcugagcagcaucauccccagcgccuuccccagcugguacauggacgcccugaaggacauggaggacagagcccaggccaucaucgacaccaccgacgacgccaccgccauggccagcgccagccccagcgugaugagcaccaacuucugccccgaguga

SEQ ID NO: 2364 - RNA, 1932 nt, Artificial Sequence
  derived and/or modified sequence opt5 from MAGE-C3__Homo_sapiens__AAM08355
augcugcuccccugccacugggugcuggacgccaccuucagcgauggcucccuugggcagugggucaagaacacaugugcuacguacgcccugucuccuguugugcucccgccccaaccucagccccggaaaaaggcgaccgacaaagauuauagcgcuuuucaucugggacaccuuagagaggugcgccuguuccucagaggcgggacauccgaccagcggauggauucucugguccugugcccuaccuacuuuaagcucuggcgcacacugagcggaucccccggccuucagcugucugaccuccauuucgggagccaaccugaaggaaaauuuucccugagacgggccgugagcguuaagcagcgcgaggaaccgcaggauuggccccuuaaugagaagagaacccuguggaaagacucugaucucccuacauggcggcgcggcaccggcuauacgcugucccugcccgccgugagcccugggaagagacucuggggagaaaaagcuggcucucugcccgaguccgagccgcuuuucaccuacacacuggacgaaaaggucgauaaacucgugcaguuucugcuucugaaguaucaagccaaggagccucucacccgggcugaaaugcagaugaacguuaucaauacauacaccggguauuuccccaugauuuuucgcaaagccagagaguucaucgagauucuguuuggaaucagccugacggaaguggacccugaucacuucuacgucuuugugaacacacucgaccugaccugugagggcucucuuuccgacgaacaggggaugccccagaaucggcugcucauucugauccuuagcgugaucuucauuaagggaaacugcgcguccgaggaagucaucugggagguucugaaugccauuggccccuggucugcucucgccggcuucgcugaugugcugagccgccuggcccucugggaguccgaagggccugaggcguuuugugaagagagcggacugagaucugccgaaggcuccgugcuugaccuggcuaacccgcaagggcucgccggacaucggcaggaggauggcagacgcgggcugacagaggcuagcccccagcagaaaaagggaggcgaagacgaggauaugccugccgccggcaugcccccucugccccaaucuccgccugaaauucccccucaggggcccccuaaaaucagcccccagggaccgccucaauccccuccccagucuccccuugacagcugcuccagcccgcuccuguggacccggcuggaugaggaaucuuccagcgaggaggaagacaccgcuacauggcacgcgcuccccgagucugaaucccugccuagauacgcccuugaugagaaggucgcugagcuggugcaguuccuccugcugaaauaucagacgaaggaacccguuaccaaggccgagaugcuuacaaccgugaucaaaaaguacaaagacuauuuuccuaugauuuucggcaaggcccacgaauuuaucgagcucaucuucgggauugcucugacagauauggaccccgacaaucauagcuacuuuuucgaagauacccuggaccucacguaugagggaucccugaucgaugaccaaggcaugccuaaaaacugucuucugauucucauccugucuaugauuuuuaucaaggggagcugcguccccgaggaagugaucugggagguucuguccgccauuggcccgauccagcgcccugcgcgggaagugcuugaguuccucucuaagcugagcuccauuauccccagcgcuuuuccuucuugguacauggaugcccugaaagacauggaagauagagcccaggcuauuaucgacacaaccgaugacgccaccgcuauggccuccgcgagccccucugucauguccacaaauuucuguccggaguga

SEQ ID NO: 2365 - protein, 778 aa, Artificial Sequence
  MAGE-D1__Homo_sapiens__Q9Y5V3
MAQKMDCGAGLLGFQAEASVEDSALLMQTLMEAIQISEAPPTNQATAAASPQSSQPPTANEMADIQVSAAAARPKSAFKVQNATTKGPNGVYDFSQAHNAKDVPNTQPKAAFKSQNATPKGPNAAYDFSQAATTGELAANKSEMAFKAQNATTKVGPNATYNFSQSLNANDLANSRPKTPFKAWNDTTKAPTADTQTQNVNQAKMATSQADIETDPGISEPDGATAQTSADGSQAQNLESRTIIRGKRTRKINNLNVEENSSGDQRRAPLAAGTWRSAPVPVTTQNPPGAPPNVLWQTPLAWQNPSGWQNQTARQTPPARQSPPARQTPPAWQNPVAWQNPVIWPNPVIWQNPVIWPNPIVWPGPVVWPNPLAWQNPPGWQTPPGWQTPPGWQGPPDWQGPPDWPLPPDWPLPPDWPLPTDWPLPPDWIPADWPIPPDWQNLRPSPNLRPSPNSRASQNPGAAQPRDVALLQERANKLVKYLMLKDYTKVPIKRSEMLRDIIREYTDVYPEIIERACFVLEKKFGIQLKEIDKEEHLYILISTPESLAGILGTTKDTPKLGLLLVILGVIFMNGNRASEAVLWEALRKMGLRPGVRHPLLGDLRKLLTYEFVKQKYLDYRRVPNSNPPEYEFLWGLRSYHETSKMKVLRFIAEVQKRDPRDWTAQFMEAADEALDALDAAAAEAEARAEARTRMGIGDEAVSGPWSWDDIEFELLTWDEEGDFGDPWSRIPFTFWARYHQNARSRFPQTFAGPIIGPGGTASANFAANFGAIGFFWVE

SEQ ID NO: 2366 - RNA, 2337 nt, Artificial Sequence
  MAGE-D1__Homo_sapiens__AAG23757
auggcucagaaaauggacuguggugcgggccuccucggcuuccaggcugaggccuccguagaagacagcgccuugcuuaugcagaccuugauggaggccauccagaucucagaggcuccaccuacuaaccaggccaccgcagcugcuaguccccagaguucacagcccccaacugccaaugagauggcugacauucagguuucagcagcugccgcuaggccuaagucagccuuuaaaguccagaaugccaccacaaaaggcccaaauggugucuaugauuucucucaggcucauaaugccaaggaugugcccaacacgcagcccaaggcagccuuuaagucccaaaaugcuaccccaaaggguccaaaugcugccuaugauuuuucccaggcagcaaccacuggugaguuagcugcuaacaagucugagauggccuucaaggcccagaaugccacuacuaaagugggcccaaaugccaccuacaauuucucucagucucucaaugccaaugaccuggccaacagcaggccuaagaccccuuucaaggcuuggaaugauaccacuaaggccccaacagcugauacccagacccagaauguaaaucaggccaaaauggccacuucccaggcugacauagagaccgacccagguaucucugaaccugacggugcaacugcacagacaucagcagaugguucccaggcucagaaucuggagucccggacaauaauucggggcaagaggacccgcaagauuaauaacuugaauguugaagagaacagcaguggggaucagaggcgggccccacuggcugcagggaccuggaggucugcaccaguuccagugaccacucagaacccaccuggcgcaccccccaaugugcucuggcagacgccauuggcuuggcagaaccccucaggcuggcaaaaccagacagccaggcagaccccaccagcacgucagagcccuccagcuaggcagaccccaccagccuggcagaacccagucgcuuggcagaacccagugauuuggccaaacccaguaaucuggcagaacccagugaucuggccaaaccccauugucuggcccggcccuguugucuggccgaauccacuggccuggcagaauccaccuggauggcagacuccaccuggauggcagaccccaccgggcuggcaggguccuccagacuggcaagguccuccugacuggccgcuaccacccgacuggccacugccaccugauuggccacuucccacugacuggccacuaccaccugacuggauccccgcugauuggccaauuccaccugacuggcagaaccugcgccccucgccuaaccugcgcccuucucccaacucgcgugccucacagaacccaggugcugcacagccccgagauguggcccuucuucaggaaagagcaaauaaguuggucaaguacuugaugcuuaaggacuacacaaaggugcccaucaagcgcucagaaaugcugagagauaucauccgugaauacacugauguuuauccagaaaucauugaacgugcaugcuuuguccuagagaagaaauuugggauucaacugaaagaaauugacaaagaagaacaccuguauauucucaucaguacccccgagucccuggcuggcauacugggaacgaccaaagacacacccaagcucggucuccucuuggugauucugggugucaucuucaugaauggcaaccgugccagugaggcuguccucugggaggcacuacgcaagaugggacugcguccuggggugagacauccccuccuuggagaucuaaggaaacuucucaccuaugaguuuguaaagcagaaauaccuggacuacagacgagugcccaacagcaaccccccggaguaugaguuccucuggggccuccguuccuaccaugagacuagcaagaugaaagugcugagauucauugcagagguucagaaaagagacccucgugacuggacugcacaguucauggaggcugcagaugaggccuuggaugcucuggaugcugcugcagcugaggccgaagccagggcugaagcaagaacccgcaugggaauuggagaugaggcugugucugggcccuggagcugggaugacauugaguuugagcugcugaccugggaugaggaaggagauuuuggagaucccugguccagaauuccauuuaccuucugggccagauaccaccagaaugcccgcuccagauucccucagaccuuugccggucccauuauugguccuggugguacagccagugccaacuucgcugccaacuuuggugccauugguuucuucuggguugaguga

SEQ ID NO: 2367 - RNA, 2337 nt, Artificial Sequence
  derived and/or modified sequence opt1 from MAGE-D1__Homo_sapiens__AAG23757
auggcccagaagauggacugcggcgccgggcugcucggcuuccaggcggaggccagcguggaggacuccgcccugcugaugcagacccucauggaggccauccagaucagcgaggcccccccgaccaaccaggcgacggccgccgccuccccccagagcucccagccccccaccgcgaacgagauggccgacauccaggucagcgccgccgccgcgcgcccgaaguccgccuucaaggugcagaacgccaccaccaaggggcccaacggcguguacgacuucagccaggcccacaacgccaaggacguccccaacacgcagcccaaggcggccuucaagucccagaacgccaccccgaaggggcccaacgccgccuacgacuucagccaggcggccaccaccggcgagcuggccgccaacaaguccgagauggccuucaaggcgcagaacgccacgaccaaggugggccccaacgccaccuacaacuucagccagucccugaacgccaacgaccucgcgaacagccggcccaagaccccguucaaggccuggaacgacacgaccaaggcccccaccgccgacacccagacgcagaacgugaaccaggccaagauggcgaccucccaggccgacaucgagaccgaccccgggaucagcgagcccgacggcgccaccgcccagacguccgccgacgggagccaggcgcagaaccuggagucccgcaccaucauccggggcaagcgcacccggaagaucaacaaccugaacgucgaggagaacagcagcggggaccagcgccgggccccgcucgccgccggcaccuggcgcuccgcccccgugcccgugacgacccagaaccccccgggcgcgccccccaacguccuguggcagaccccccuggccuggcagaacccgagcggguggcagaaccagaccgcccggcagacgccccccgcccgccagucccccccggcgcggcagaccccccccgccuggcagaacccgguggccuggcagaaccccgugaucuggcccaaccccgucaucuggcagaacccggugaucuggcccaaccccaucguguggcccggcccggucguguggcccaacccccucgccuggcagaaccccccgggguggcagaccccccccggcuggcagacccccccgggcuggcaggggccccccgacuggcagggccccccggacuggccccugccccccgacuggccgcugccccccgacuggccgcuccccacggacuggccccugcccccggacuggauccccgccgacuggcccauccccccggacuggcagaaccugcgccccagccccaaccuccggcccuccccgaacagccgcgcgucccagaaccccggggccgcccagccccgggacguggcccugcugcaggagcgcgccaacaagcucgucaaguaccugaugcugaaggacuacaccaaggugcccaucaagcggagcgagaugcuccgcgacaucauccgggaguacaccgacguguacccggagaucaucgagcgcgcgugcuucguccuggagaagaaguucggcauccagcugaaggagaucgacaaggaggagcaccucuacauccugaucuccacccccgagagccuggccgggauccucggcacgaccaaggacacccccaagcugggccugcuccuggugauccugggggugaucuucaugaacggcaaccgggccuccgaggccguccucugggaggcccugcgcaagauggggcugcgccccggcgugcggcacccgcuccugggggaccugcgcaagcuccugaccuacgaguucgucaagcagaaguaccuggacuaccggcgcgugcccaacagcaacccccccgaguacgaguuccucuggggccugcgguccuaccacgagaccagcaagaugaaggugcugcgcuucaucgcggagguccagaagcgggacccgcgcgacuggacggcccaguucauggaggccgccgacgaggcgcucgacgcccuggacgccgccgccgcggaggccgaggcccgggccgaggcccgcacccggaugggcaucggggacgaggcgguguccggccccuggagcugggacgacaucgaguucgagcugcugaccugggacgaggagggggacuucggcgaccccuggucccgcauccccuucaccuucugggcccgguaccaccagaacgcccgcagccgguucccgcagacguucgccgggcccaucaucggccccggcgggaccgccuccgcgaacuucgccgccaacuucggcgccaucggguucuucuggguggaguga

SEQ ID NO: 2368 - RNA, 2337 nt, Artificial Sequence
  derived and/or modified sequence opt2 from MAGE-D1__Homo_sapiens__AAG23757
auggcccagaagauggacugcggcgccggccuccucggcuuccaggccgaggccuccgucgaggacuccgcccuccucaugcagacccucauggaggccauccagaucuccgaggccccccccaccaaccaggccaccgccgccgccuccccccaguccucccagccccccaccgccaacgagauggccgacauccaggucuccgccgccgccgcccgccccaaguccgccuucaagguccagaacgccaccaccaagggccccaacggcgucuacgacuucucccaggcccacaacgccaaggacguccccaacacccagcccaaggccgccuucaagucccagaacgccacccccaagggccccaacgccgccuacgacuucucccaggccgccaccaccggcgagcucgccgccaacaaguccgagauggccuucaaggcccagaacgccaccaccaaggucggccccaacgccaccuacaacuucucccagucccucaacgccaacgaccucgccaacucccgccccaagacccccuucaaggccuggaacgacaccaccaaggcccccaccgccgacacccagacccagaacgucaaccaggccaagauggccaccucccaggccgacaucgagaccgaccccggcaucuccgagcccgacggcgccaccgcccagaccuccgccgacggcucccaggcccagaaccucgagucccgcaccaucauccgcggcaagcgcacccgcaagaucaacaaccucaacgucgaggagaacuccuccggcgaccagcgccgcgccccccucgccgccggcaccuggcgcuccgcccccguccccgucaccacccagaacccccccggcgccccccccaacguccucuggcagaccccccucgccuggcagaaccccuccggcuggcagaaccagaccgcccgccagaccccccccgcccgccaguccccccccgcccgccagaccccccccgccuggcagaaccccgucgccuggcagaaccccgucaucuggcccaaccccgucaucuggcagaaccccgucaucuggcccaaccccaucgucuggcccggccccgucgucuggcccaacccccucgccuggcagaacccccccggcuggcagaccccccccggcuggcagaccccccccggcuggcagggcccccccgacuggcagggcccccccgacuggccccucccccccgacuggccccucccccccgacuggccccuccccaccgacuggccccucccccccgacuggauccccgccgacuggcccaucccccccgacuggcagaaccuccgccccucccccaaccuccgccccucccccaacucccgcgccucccagaaccccggcgccgcccagccccgcgacgucgcccuccuccaggagcgcgccaacaagcucgucaaguaccucaugcucaaggacuacaccaagguccccaucaagcgcuccgagaugcuccgcgacaucauccgcgaguacaccgacgucuaccccgagaucaucgagcgcgccugcuucguccucgagaagaaguucggcauccagcucaaggagaucgacaaggaggagcaccucuacauccucaucuccacccccgagucccucgccggcauccucggcaccaccaaggacacccccaagcucggccuccuccucgucauccucggcgucaucuucaugaacggcaaccgcgccuccgaggccguccucugggaggcccuccgcaagaugggccuccgccccggcguccgccacccccuccucggcgaccuccgcaagcuccucaccuacgaguucgucaagcagaaguaccucgacuaccgccgcguccccaacuccaacccccccgaguacgaguuccucuggggccuccgcuccuaccacgagaccuccaagaugaagguccuccgcuucaucgccgagguccagaagcgcgacccccgcgacuggaccgcccaguucauggaggccgccgacgaggcccucgacgcccucgacgccgccgccgccgaggccgaggcccgcgccgaggcccgcacccgcaugggcaucggcgacgaggccgucuccggccccugguccugggacgacaucgaguucgagcuccucaccugggacgaggagggcgacuucggcgaccccuggucccgcauccccuucaccuucugggcccgcuaccaccagaacgcccgcucccgcuucccccagaccuucgccggccccaucaucggccccggcggcaccgccuccgccaacuucgccgccaacuucggcgccaucggcuucuucugggucgaguga

SEQ ID NO: 2369 - RNA, 2337 nt, Artificial Sequence
  derived and/or modified sequence opt3 from MAGE-D1__Homo_sapiens__AAG23757
auggcccagaagauggacugcggcgcugggcugcucggauuccaagcagaggccagcguggaagauuccgcgcuucugaugcagaccuugauggaggcuauccagauuucugaagcacccccuacaaaccaggccacugccgcugcaucaccacaaaguagccagccgcccacggccaaugagauggcugacauacaggucuccgccgcggcagccagaccuaaaucugcuuuuaagguucagaacgccaccacaaaagguccaaauggcguguacgauuucucgcaagcacacaacgcuaaggacguacccaauacucagccuaaagccgcguuuaagucacagaacgccaccccaaaggggcccaaugcagcuuaugauuucagccaggccgcuacaaccggagaauuagccgcaaacaaaagugagauggccuuuaaggcucaaaaugcgacuacaaaagugggcccuaacgcaaccuacaauuucucccagucucugaacgccaaugaccuagcuaacagcaggccaaagacgccguuuaaagccuggaaugauacuaccaaggcacccacagccgacacucagacccaaaacgucaaccaggcuaagauggccacaucccaggcagauaucgagaccgacccugguauuucagaaccagauggggcgacggcucagacaagugccgacggaagccaagcacagaaucucgagucucggacuaucauucgcggcaaacgaacccguaagaucaacaaucugaacguggaagaaaauuccucaggcgaucagagaagggcuccccuugccgccgggacuuggcggagcgcaccuguuccagugacaacccagaaucccccgggagcuccucccaacguccuguggcaaacgccauuggccuggcagaacccuagugguuggcagaaucagaccgcgcgccaaacacccccagccagacagucucccccugcuaggcagacuccaccggcauggcagaaccccguggccuggcaaaauccuguaauauggccaaaccccguuaucuggcagaauccugugauuuggccaaaccccaucgucuggccgggcccugugguguggccaaauccccucgcuuggcagaacccucccggguggcaaaccccaccuggauggcagacacccccaggcuggcaggguccgccugacuggcaggggcccccagacuggccccugccuccagauuggccccugccuccggacuggccacuccccacugauuggccuuuaccacccgacuggauuccugccgauuggccgauacccccagacuggcaaaaccugcggccuucccccaaucuucgcccaagcccuaacucgcgagcaucucagaaucccggagcggcccagccaagagaugucgcuuugcugcaggagagggccaacaagcuaguuaaauaucucaugcugaaagacuacaccaaggugccgaucaaacgguccgagaugcuucgugauauuauccgcgaguauacagacguauacccugaaauuaucgagagagcauguuucgugcuggaaaagaaguuuggcauccaauugaaagagauugauaaggaggaacaucucuauauacugaucucaacccccgagaguuuagcuggcauucuggggacuacgaaagacacaccaaagcucggacuucuguuggucauccuaggugugauauucaugaauggcaacagggccagcgaagcaguucugugggaggcccuccggaaaauggggcugcgacccggagugcgccacccucuucugggcgacuugagaaagcuccugaccuacgaauuugucaagcagaaauacuuagauuauaggcgggugccaaauuccaaucccccugaguacgaguuccuguggggucuacgcucuuaucaugaaacuagcaagaugaaaguacucagauuuauugcugagguucagaagagggacccgcgugauuggaccgcgcaguucauggaagccgcagacgaggcucuggaugcccuugacgccgcugcagccgaagcggaggcucgggccgaggcacgaacaagaauggggaucggcgaugaagccgugucaggaccauggaguugggacgauaucgaguucgaauugcugaccugggacgaggagggcgauuuuggggaccccugguccaggauuccuuucacuuuuugggcucgcuaccaccaaaacgcacggagcagauucccccagacauuugccggaccaaucauugguccuggcgggacggcgucugcuaacuucgccgcaaauuuuggagccauaggcuucuuuugggucgaauga

SEQ ID NO: 2370 - RNA, 2337 nt, Artificial Sequence
  derived and/or modified sequence opt4 from MAGE-D1__Homo_sapiens__AAG23757
auggcccagaagauggacugcggcgccggccugcugggcuuccaggccgaggccagcguggaggacagcgcccugcugaugcagacccugauggaggccauccagaucagcgaggccccccccaccaaccaggccaccgccgccgccagcccccagagcagccagccccccaccgccaacgagauggccgacauccaggugagcgccgccgccgccagacccaagagcgccuucaaggugcagaacgccaccaccaagggccccaacggcguguacgacuucagccaggcccacaacgccaaggacgugcccaacacccagcccaaggccgccuucaagagccagaacgccacccccaagggccccaacgccgccuacgacuucagccaggccgccaccaccggcgagcuggccgccaacaagagcgagauggccuucaaggcccagaacgccaccaccaaggugggccccaacgccaccuacaacuucagccagagccugaacgccaacgaccuggccaacagcagacccaagacccccuucaaggccuggaacgacaccaccaaggcccccaccgccgacacccagacccagaacgugaaccaggccaagauggccaccagccaggccgacaucgagaccgaccccggcaucagcgagcccgacggcgccaccgcccagaccagcgccgacggcagccaggcccagaaccuggagagcagaaccaucaucagaggcaagagaaccagaaagaucaacaaccugaacguggaggagaacagcagcggcgaccagagaagagccccccuggccgccggcaccuggagaagcgcccccgugcccgugaccacccagaacccccccggcgccccccccaacgugcuguggcagaccccccuggccuggcagaaccccagcggcuggcagaaccagaccgccagacagaccccccccgccagacagagcccccccgccagacagaccccccccgccuggcagaaccccguggccuggcagaaccccgugaucuggcccaaccccgugaucuggcagaaccccgugaucuggcccaaccccaucguguggcccggccccgugguguggcccaacccccuggccuggcagaacccccccggcuggcagaccccccccggcuggcagaccccccccggcuggcagggcccccccgacuggcagggcccccccgacuggccccugccccccgacuggccccugccccccgacuggccccugcccaccgacuggccccugccccccgacuggauccccgccgacuggcccaucccccccgacuggcagaaccugagacccagccccaaccugagacccagccccaacagcagagccagccagaaccccggcgccgcccagcccagagacguggcccugcugcaggagagagccaacaagcuggugaaguaccugaugcugaaggacuacaccaaggugcccaucaagagaagcgagaugcugagagacaucaucagagaguacaccgacguguaccccgagaucaucgagagagccugcuucgugcuggagaagaaguucggcauccagcugaaggagaucgacaaggaggagcaccuguacauccugaucagcacccccgagagccuggccggcauccugggcaccaccaaggacacccccaagcugggccugcugcuggugauccugggcgugaucuucaugaacggcaacagagccagcgaggccgugcugugggaggcccugagaaagaugggccugagacccggcgugagacacccccugcugggcgaccugagaaagcugcugaccuacgaguucgugaagcagaaguaccuggacuacagaagagugcccaacagcaacccccccgaguacgaguuccuguggggccugagaagcuaccacgagaccagcaagaugaaggugcugagauucaucgccgaggugcagaagagagaccccagagacuggaccgcccaguucauggaggccgccgacgaggcccuggacgcccuggacgccgccgccgccgaggccgaggccagagccgaggccagaaccagaaugggcaucggcgacgaggccgugagcggccccuggagcugggacgacaucgaguucgagcugcugaccugggacgaggagggcgacuucggcgaccccuggagcagaauccccuucaccuucugggccagauaccaccagaacgccagaagcagauucccccagaccuucgccggccccaucaucggccccggcggcaccgccagcgccaacuucgccgccaacuucggcgccaucggcuucuucuggguggaguga

SEQ ID NO: 2371 - RNA, 2337 nt, Artificial Sequence
  derived and/or modified sequence opt5 from MAGE-D1__Homo_sapiens__AAG23757
auggcccagaagauggacugcggcgcugggcugcucggauuccaagccgaggcgagcguggaagauuccgcucugcuuaugcagacccugauggaggccauccagauuucugaagcucccccuacaaaccaggcuacggccgcugccagcccgcaauccucucagcccccuaccgcgaaugagauggccgacauccaggucagcgcugccgcugccagacccaaauccgcguuuaagguucagaacgccacaaccaaaggcccuaaugggguguacgauuucucucaagcucacaacgccaaggacgugcccaauacacagccuaaagcugccuuuaagagccagaacgccaccccgaagggacccaaugcugcguaugauuucucccaggccgcuacaaccggcgaacucgccgccaacaaaagcgagauggcuuuuaaggcccaaaaugcgacgaccaaagucgggccuaacgcuacauacaauuucucucagucccugaacgccaaugaccuugccaacagccggcccaagaccccuuuuaaagccuggaaugauacaaccaaggcccccacggcugacacacagacccaaaacgugaaccaggccaagauggcgacaucucaggccgauauugagaccgacccgggaaucuccgaaccugauggcgcuaccgcccagacaagcgcugacggcucucaagcccagaaucuggagucccgcacgauuaucagagggaaacggacccgcaagaucaacaaucucaacguugaagagaauagcuccggagaucagagacgggcgccccuggccgcuggcacauggcgcucugccccugugcccgucaccacacagaaucccccuggggcuccgcccaacgugcuguggcaaaccccucucgccuggcagaaccccagcggauggcagaaucagacggccagacaaacaccucccgcucggcaguccccgccugcgcgccagaccccucccgccuggcagaaccccguugcuuggcaaaauccugugauuuggcccaacccggucaucuggcagaauccugugauuuggcccaaccccaucguguggccuggcccggucguuuggcccaauccucuggccuggcagaaucccccuggguggcaaaccccucccggauggcagacacccccgggcuggcagggcccucccgacuggcaggggccucccgacuggccgcuuccucccgauuggccucugccucccgacuggccccucccgaccgauuggccccugccucccgacuggauuccugccgauuggcccaucccuccggacuggcaaaaccuuagacccagcccuaaccugcggcccucuccuaacucccgcgcuagccagaaucccggagccgcgcagccgagagauguggcucuccugcaggagcgggccaacaaacuggugaaguaucucaugcugaaagacuacacaaaggucccuauuaaacgcucugaaaugcuuagagauaucauccgggaguauacggacguguaccccgaaauuaucgagagagccuguuucguucuggaaaagaaguuuggcauucaacucaaagagaucgauaaggaggaacaucuguauauucuuaucagcacccccgagucccuggcugggauccucggaacaaccaaagacacaccuaagcugggccugcuccuggugauucuuggggucaucuucaugaauggaaaccgcgccucugaagcggugcugugggaggcucuccggaaaaugggccugagacccggcguucgccacccucuucugggggaccuccggaagcugcugaccuacgaauuugugaagcagaaauaccucgauuauagacgcgucccgaauagcaaucccccugaguacgaguuccuguggggacuucgguccuaucaugaaacgagcaagaugaaagugcugagauuuauugccgagguccagaagcgcgacccccgggauuggaccgcccaguucauggaagcugccgacgaggcucucgaugcccuggacgcggccgcugccgaagcugaggccagagccgaggcucgcacacggaugggcaucggggaugaagcggugucuggaccuugguccugggacgauauugaguucgaacugcuuaccugggacgaggagggcgauuuuggggaccccuggagcagaaucccguucacauuuugggcccgguaccaccaaaacgcucgcucuagauucccucagaccuuugccggccccaucauuggaccuggcgggacggccuccgcuaacuucgccgcgaauuuuggagcuaucggcuucuuuuggguugaauga

SEQ ID NO: 2372 - protein, 606 aa, Artificial Sequence
  MAGE-D2__Homo_sapiens__Q9UNF1
MSDTSESGAGLTRFQAEASEKDSSSMMQTLLTVTQNVEVPETPKASKALEVSEDVKVSKASGVSKATEVSKTPEAREAPATQASSTTQLTDTQVLAAENKSLAADTKKQNADPQAVTMPATETKKVSHVADTKVNTKAQETEAAPSQAPADEPEPESAAAQSQENQDTRPKVKAKKARKVKHLDGEEDGSSDQSQASGTTGGRRVSKALMASMARRASRGPIAFWARRASRTRLAAWARRALLSLRSPKARRGKARRRAAKLQSSQEPEAPPPRDVALLQGRANDLVKYLLAKDQTKIPIKRSDMLKDIIKEYTDVYPEIIERAGYSLEKVFGIQLKEIDKNDHLYILLSTLEPTDAGILGTTKDSPKLGLLMVLLSIIFMNGNRSSEAVIWEVLRKLGLRPGIHHSLFGDVKKLITDEFVKQKYLDYARVPNSNPPEYEFFWGLRSYYETSKMKVLKFACKVQKKDPKEWAAQYREAMEADLKAAAEAAAEAKARAEIRARMGIGLGSENAAGPCNWDEADIGPWAKARIQAGAEAKAKAQESGSASTGASTSTNNSASASASTSGGFSAGASLTATLTFGLFAGLGGAGASTSGSSGACGFSYK

SEQ ID NO: 2373 - RNA, 1821 nt, Artificial Sequence
  MAGE-D2__Homo_sapiens__AAD28598
augucugacacaagcgagaguggugcaggucuaacucgcuuccaggcugaagcuucagaaaaggacaguagcucgaugaugcagacucuguugacagugacccagaauguggaggucccagagacaccgaaggccucaaaggcacuggaggucucagaggaugugaaggucucaaaagccucuggggucucaaaggccacagaggucucaaagaccccagaggcucgggaggcaccugccacccaggccucgucuacuacucagcugacugauacccagguucuggcagcugaaaacaagagucuagcagcugacaccaagaaacagaaugcugacccgcaggcugugacaaugccugccacugagaccaaaaaggucagccauguggcugauacgaaggucaauacaaaggcucaggagacugaggcugcacccucucaggccccagcagaugaaccugagccugagagugcagcugcccagucucaggagaaucaggauacucggcccaaggucaaagccaagaaagcccgaaaggugaagcaucuggauggggaagaggauggcagcagugaucagagucaggcuucuggaaccacagguggccgaagggucucaaaggcucuaauggccucaauggcccgcagggcuucaaggggucccauagccuuuugggcccgcagggcaucaaggacucgguuggcugcuugggcccggagagccuugcucucccugagaucaccuaaagcccguaggggcaaggcucgccguagagcugccaagcuccagucaucccaagagccugaagcaccaccaccucgggauguggcccuuuugcaagggagggcaaaugauuuggugaaguaccuuuuggcuaaagaccagacgaagauucccaucaagcgcucggacaugcugaaggacaucaucaaagaauacacugauguguaccccgaaaucauugaacgagcaggcuauucuuuggagaagguauuugggauucaauugaaggaaauugauaagaaugaccacuuguacauucuucucagcaccuuagagcccacugaugcaggcauacugggaacgacuaaggacucacccaagcugggucugcucauggugcuucuuagcaucaucuucaugaauggaaaucgguccagugaggcugucaucugggaggugcugcgcaaguuggggcugcgcccugggauacaucauucacucuuuggggacgugaagaagcucaucacugaugaguuugugaagcagaaguaccuggacuaugccagaguccccaauagcaaucccccugaauaugaguucuucuggggccugcgcucuuacuaugagaccagcaagaugaaaguccucaaguuugccugcaagguacaaaagaaggaucccaaggaaugggcagcucaguaccgagaggcgauggaagcggauuugaaggcugcagcugaggcugcagcugaagccaaggcuagggccgagauuagagcucgaaugggcauugggcucggcucggagaaugcugccgggcccugcaacugggacgaagcugauaucggacccugggccaaagcccggauccaggcgggagcagaagcuaaagccaaagcccaagagaguggcagugccagcacuggugccaguaccaguaccaauaacagugccagugccagugccagcaccagugguggcuucagugcuggugccagccugaccgccacucucacauuugggcucuucgcuggccuugguggagcuggugccagcaccaguggcagcucuggugccugugguuucuccuacaaguga

SEQ ID NO: 2374 - RNA, 1821 nt, Artificial Sequence
  derived and/or modified sequence opt1 from MAGE-D2__Homo_sapiens__AAD28598
augagcgacaccuccgagagcggcgccgggcugacccgcuuccaggccgaggcguccgagaaggacagcuccagcaugaugcagacgcugcugaccgugacccagaacgucgaggugcccgagaccccgaaggccuccaaggcccuggaggugagcgaggacgucaagguguccaaggccagcggcguguccaaggccacggaggucagcaagacccccgaggcgcgggaggcccccgccacccaggccuccagcaccacgcagcucaccgacacccaggugcuggcggccgagaacaagucccuggccgccgacaccaagaagcagaacgccgacccccaggcggugacgaugccggccaccgagaccaagaaggucagccacguggccgacaccaaggugaacacgaaggcccaggagaccgaggccgcgcccucccaggcccccgccgacgagcccgagccggagagcgccgccgcgcagucccaggagaaccaggacacccgccccaaggucaaggccaagaaggcccggaaggugaagcaccucgacggggaggaggacggcagcagcgaccagucccaggccagcgggaccacgggcggccgccggguguccaaggcccugauggcgagcauggcccgccgggccucccgcgggcccaucgccuucugggcgcggcgcgccagccggacccgccuggccgccugggcccggcgcgcgcuccugucccugcggagccccaaggcccgccggggcaaggcccgccggcgcgccgccaagcuccaguccagccaggagccggaggcgcccccgccccgggacgucgcccugcugcaggggcgcgccaacgaccucgugaaguaccugcuggccaaggaccagaccaagauccccaucaagcgcuccgacaugcucaaggacaucaucaaggaguacaccgacguguaccccgagaucaucgagcgggccggcuacagccuggagaaggucuucgggauccagcugaaggagaucgacaagaacgaccaccucuacauccugcuguccacgcucgagcccaccgacgcgggcauccugggcaccaccaaggacagccccaagcuggggcuccugauggugcugcucuccaucaucuucaugaacggcaaccgcagcuccgaggccgugaucugggagguccugcggaagcuggggcuccgcccgggcauccaccacagccuguucggcgacgugaagaagcugaucacggacgaguucgugaagcagaaguaccucgacuacgcccggguccccaacuccaacccgcccgaguacgaguucuucugggggcugcgcagcuacuacgagaccagcaagaugaaggugcugaaguucgccugcaagguccagaagaaggaccccaaggagugggcggcccaguaccgggaggccauggaggccgaccucaaggccgcggccgaggccgccgccgaggcgaaggcccgcgccgagauccgggcccgcaugggcaucgggcugggcuccgagaacgccgcggggcccugcaacugggacgaggccgacaucggccccugggccaaggcccggauccaggcgggcgccgaggccaaggccaaggcccaggagagcggguccgcgagcaccggcgccuccaccagcacgaacaacuccgccagcgccuccgccagcaccuccgggggcuucagcgcgggggccucccugaccgccacccucacguucggccuguucgccggccucgggggcgccggggcgagcaccuccggcagcuccggggccugcggcuucagcuacaaguga

SEQ ID NO: 2375 - RNA, 1821 nt, Artificial Sequence
  derived and/or modified sequence opt2 from MAGE-D2__Homo_sapiens__AAD28598
auguccgacaccuccgaguccggcgccggccucacccgcuuccaggccgaggccuccgagaaggacuccuccuccaugaugcagacccuccucaccgucacccagaacgucgagguccccgagacccccaaggccuccaaggcccucgaggucuccgaggacgucaaggucuccaaggccuccggcgucuccaaggccaccgaggucuccaagacccccgaggcccgcgaggcccccgccacccaggccuccuccaccacccagcucaccgacacccagguccucgccgccgagaacaagucccucgccgccgacaccaagaagcagaacgccgacccccaggccgucaccaugcccgccaccgagaccaagaaggucucccacgucgccgacaccaaggucaacaccaaggcccaggagaccgaggccgcccccucccaggcccccgccgacgagcccgagcccgaguccgccgccgcccagucccaggagaaccaggacacccgccccaaggucaaggccaagaaggcccgcaaggucaagcaccucgacggcgaggaggacggcuccuccgaccagucccaggccuccggcaccaccggcggccgccgcgucuccaaggcccucauggccuccauggcccgccgcgccucccgcggccccaucgccuucugggcccgccgcgccucccgcacccgccucgccgccugggcccgccgcgcccuccucucccuccgcucccccaaggcccgccgcggcaaggcccgccgccgcgccgccaagcuccaguccucccaggagcccgaggccccccccccccgcgacgucgcccuccuccagggccgcgccaacgaccucgucaaguaccuccucgccaaggaccagaccaagauccccaucaagcgcuccgacaugcucaaggacaucaucaaggaguacaccgacgucuaccccgagaucaucgagcgcgccggcuacucccucgagaaggucuucggcauccagcucaaggagaucgacaagaacgaccaccucuacauccuccucuccacccucgagcccaccgacgccggcauccucggcaccaccaaggacucccccaagcucggccuccucaugguccuccucuccaucaucuucaugaacggcaaccgcuccuccgaggccgucaucugggagguccuccgcaagcucggccuccgccccggcauccaccacucccucuucggcgacgucaagaagcucaucaccgacgaguucgucaagcagaaguaccucgacuacgcccgcguccccaacuccaacccccccgaguacgaguucuucuggggccuccgcuccuacuacgagaccuccaagaugaagguccucaaguucgccugcaagguccagaagaaggaccccaaggagugggccgcccaguaccgcgaggccauggaggccgaccucaaggccgccgccgaggccgccgccgaggccaaggcccgcgccgagauccgcgcccgcaugggcaucggccucggcuccgagaacgccgccggccccugcaacugggacgaggccgacaucggccccugggccaaggcccgcauccaggccggcgccgaggccaaggccaaggcccaggaguccggcuccgccuccaccggcgccuccaccuccaccaacaacuccgccuccgccuccgccuccaccuccggcggcuucuccgccggcgccucccucaccgccacccucaccuucggccucuucgccggccucggcggcgccggcgccuccaccuccggcuccuccggcgccugcggcuucuccuacaaguga

SEQ ID NO: 2376 - RNA, 1821 nt, Artificial Sequence
  derived and/or modified sequence opt3 from MAGE-D2__Homo_sapiens__AAD28598
augagcgacaccuccgagucuggcgccgggcugacaagauuccaggcugaagcaucagagaaggauaguagcuccaugaugcaaacucuccuuacggugacccagaacgucgaaguucccgagacaccuaaagccucuaaggcgcuggaagugucggaggacguaaaagugucaaaggcuagcggagucaguaaagccacugagguguccaagaccccagaagcaagggaggccccggcuacacaggcaucuagcaccacucaguugacagauacccaaguuuuagccgcugaaaauaagucccuggccgcggacacgaaaaagcagaacgcagauccccaggccgugacuaugccugcuaccgagacuaaaaaggucucacacguggccgacacuaaaguaaauaccaaggcacaggagacagaagcugccccaagucaagcgcccgccgaugagccugaaccagagagcgcagcugcccagucucaggaaaaccaggacacccggcccaagguuaaagcuaagaaagcccgcaaggugaaacaucuagauggugaggaggacggcuccucagaucaaagccaggcaagugggacgacuggaggccgacgugucucuaaggcccucauggcuuccauggcgagaagggcaagccgggguccuaucgccuuuugggcucgcagagccucgaggacacggcuggcagccugggcucgccgagcccuucugucuuugagauccccaaaagcaaggcgggggaaggcgcgucgcagagcugccaagcuccagucaagucaagaaccggaggcacccccuccaagggacguggcccugcugcagggacgggcuaaugaucucgugaaauacuuacuggccaaggaccagaccaaaauucccauaaagcgaagcgacaugcuuaaagauaucauuaaggaauauacugacgucuacccugagaucauugaacgcgcaggcuauuccuuggagaagguuuucggcauccagcugaaagagauagauaagaacgaccaccuauacauccuccugucuacacuugaaccaaccgaugcugggauucugggaacgaccaaagacagccccaaguugggucuccugaugguguuacugucaaucauuuuuaugaauggcaacagaaguuccgaggccguaaucugggaagugcucaggaaacuugggcugcggccgggaauacaucacagcuuguucggcgaugucaagaagcuaauuacagacgaguuugugaaacaaaaguaucuggauuacgcgcgcguuccuaauucuaaucccccagaauaugaguucuuuuggggucucagaucauacuacgagacaaguaaaaugaaggugcugaaauucgccugcaagguccagaagaaagacccuaaggaaugggcugcacaguauagggaggccauggaagcugaucuuaaagccgcagcggaggccgcugccgaggcaaaggcucgugccgaaauccgggcacgaauggggauuggacugggcagcgagaacgccgcuggccccuguaacugggacgaagcggacaucgggccaugggccaaagcaagaauccaggcuggagccgaggccaaggcuaaagcacaagaauccgguucugccucgaccggcgcgagcacauccacuaauaacucagcuagugccucugcaagcaccuccgggggauuuucagccggcgcuagcuugacagcaacccucacuuucggucuguuugccggguuaggcggagcgggcgcuucuacguccgggaguagcggagccugcgguuucucuuacaaguga

SEQ ID NO: 2377 - RNA, 1821 nt, Artificial Sequence
  derived and/or modified sequence opt4 from MAGE-D2__Homo_sapiens__AAD28598
augagcgacaccagcgagagcggcgccggccugaccagauuccaggccgaggccagcgagaaggacagcagcagcaugaugcagacccugcugaccgugacccagaacguggaggugcccgagacccccaaggccagcaaggcccuggaggugagcgaggacgugaaggugagcaaggccagcggcgugagcaaggccaccgaggugagcaagacccccgaggccagagaggcccccgccacccaggccagcagcaccacccagcugaccgacacccaggugcuggccgccgagaacaagagccuggccgccgacaccaagaagcagaacgccgacccccaggccgugaccaugcccgccaccgagaccaagaaggugagccacguggccgacaccaaggugaacaccaaggcccaggagaccgaggccgcccccagccaggcccccgccgacgagcccgagcccgagagcgccgccgcccagagccaggagaaccaggacaccagacccaaggugaaggccaagaaggccagaaaggugaagcaccuggacggcgaggaggacggcagcagcgaccagagccaggccagcggcaccaccggcggcagaagagugagcaaggcccugauggccagcauggccagaagagccagcagaggccccaucgccuucugggccagaagagccagcagaaccagacuggccgccugggccagaagagcccugcugagccugagaagccccaaggccagaagaggcaaggccagaagaagagccgccaagcugcagagcagccaggagcccgaggcccccccccccagagacguggcccugcugcagggcagagccaacgaccuggugaaguaccugcuggccaaggaccagaccaagauccccaucaagagaagcgacaugcugaaggacaucaucaaggaguacaccgacguguaccccgagaucaucgagagagccggcuacagccuggagaagguguucggcauccagcugaaggagaucgacaagaacgaccaccuguacauccugcugagcacccuggagcccaccgacgccggcauccugggcaccaccaaggacagccccaagcugggccugcugauggugcugcugagcaucaucuucaugaacggcaacagaagcagcgaggccgugaucugggaggugcugagaaagcugggccugagacccggcauccaccacagccuguucggcgacgugaagaagcugaucaccgacgaguucgugaagcagaaguaccuggacuacgccagagugcccaacagcaacccccccgaguacgaguucuucuggggccugagaagcuacuacgagaccagcaagaugaaggugcugaaguucgccugcaaggugcagaagaaggaccccaaggagugggccgcccaguacagagaggccauggaggccgaccugaaggccgccgccgaggccgccgccgaggccaaggccagagccgagaucagagccagaaugggcaucggccugggcagcgagaacgccgccggccccugcaacugggacgaggccgacaucggccccugggccaaggccagaauccaggccggcgccgaggccaaggccaaggcccaggagagcggcagcgccagcaccggcgccagcaccagcaccaacaacagcgccagcgccagcgccagcaccagcggcggcuucagcgccggcgccagccugaccgccacccugaccuucggccuguucgccggccugggcggcgccggcgccagcaccagcggcagcagcggcgccugcggcuucagcuacaaguga

SEQ ID NO: 2378 - RNA, 1821 nt, Artificial Sequence
  derived and/or modified sequence opt5 from MAGE-D2__Homo_sapiens__AAD28598
augagcgacaccuccgagucuggcgccgggcugacaagauuccaggcugaagccagcgagaaggauuccucuagcaugaugcaaacgcuccugaccgugacacagaacgucgaaguucccgagaccccuaaagcguccaaggcucuugaagugucugaggacgugaaagucagcaaggccuccggagugagcaaagccacagagguuucuaagaccccggaagcucgggaggcccccgcuacacaggccuccagcaccacgcagcugaccgauacacaagugcucgcggccgaaaauaagucucuggcugccgacaccaaaaagcagaacgcugauccucaggccgucacaaugcccgcgaccgagacgaaaaaggugucccacguugccgacacaaaagugaauaccaaggcucaggagacagaagccgcuccuagccaagcccccgccgaugagccugaaccggagucugcugcggcccagucccaggaaaaccaggacacccgccccaaggucaaagcuaagaaagccagaaaggugaaacaucuugauggcgaggaggacgggagcuccgaucaaucucaggccagcggaaccacaggcgggcggcgcguguccaaggcucugauggccagcauggcgagacgggcuucucgcggaccuaucgccuuuugggccagacgggcuucccgcacgagacucgccgcuugggcccggcgcgcgcugcugagccucagaucucccaaagcccggcgcggcaaggcuagacggagagccgcuaagcugcagagcucccaagaaccugaggccccgccgccucgcgacgucgcgcuucugcagggccgggccaaugaucucguuaaauaccugcuugcuaaggaccagaccaaaauucccaucaagagaucugacaugcugaaagauauuaucaaggaauauacagacguguacccugagauuaucgaacgcgccggguauagccucgagaagguguucggaauccagcugaaagagauugauaagaacgaccaccuguacauccuccuguccacccuugaacccacagaugcuggcauucuggggaccacgaaagacagccccaagcucggacugcuuaugguccugcucucuaucauuuuuaugaauggcaaccgguccagcgaggccgugaucugggaaguucugagaaaacuggggcuccgcccuggcauucaucacucucuguucggagaugugaagaaacuuaucacagacgaguuugucaagcaaaaguaucuggauuacgcccgggugcccaauuccaaucccccugaauaugaguucuuuuggggccucagaagcuacuacgagaccuccaaaaugaagguucugaaauucgcuugcaaggugcagaagaaagaccccaaggaaugggcggcccaguaucgcgaggcuauggaagccgaucuuaaagccgcugccgaggcggcugccgaggccaaggcucgggccgaaaucagagcgcgcauggggauuggacugggcucugagaacgcugccgggccuuguaacugggacgaagccgacaucggacccugggcuaaagcccggauucaggcuggcgccgaggcgaaggccaaagcucaagaaagcggguccgccucuaccggagcuagcacauccaccaauaacagcgccucugccuccgcuagcacaucuggcggcuuuuccgcgggggccagccucacggcuacccugacauucggacuguuugccggccucgggggagccggcgcuucuaccagcggguccagcggcgccugcggauucucuuacaaguga

SEQ ID NO: 2379 - protein, 741 aa, Artificial Sequence
  MAGE-D4__Homo_sapiens__Q96JG8
MAEGSFSVQSESYSVEDMDEGSDEVGEEEMVEGNDYEEFGAFGGYGTLTSFDIHILRAFGSLGPGLRILSNEPWELENPVLAQTLVEALQLDPETLANETAARAANVARAAASNRAARAAAAAARTAFSQVVASHRVATPQVSGEDTQPTTYAAEAQGPTPEPPLASPQTSQMLVTSKMAAPEAPATSAQSQTGSPAQEAATEGPSSACAFSQAPCAREVDANRPSTAFLGQNDVFDFTQPAGVSGMAFPRPKRPAPAQEAATEGPSAASGVPQTGPGREVAATRPKTTKSGKALAKTRWVEPQNVVAAAAAKAKMATSIPEPEGAAAATAQHSAEPWARMGGKRTKKSKHLDDEYESSEEERETPAVPPTWRASQPSLTVRAQLAPRPPMAPRSQIPSRHVLCLPPRNVTLLQERANKLVKYLMIKDYKKIPIKRADMLKDVIREYDEHFPEIIERATYTLEKKFGIHLKEIDKEEHLYILVCTRDSSARLLGKTKDTPRLSLLLVILGVIFMNGNRASEAVLWEALRKMGLRPGVRHPFLGDLRKLITDDFVKQKYLEYKKIPNSNPPEYEFLWGLRARHETSKMRVLRFIAQNQNRDPREWKAHFLEAVDDAFKTMDVDMAEEHARAQMRAQMNIGDEALIGRWSWDDIQVELLTWDEDGDFGDAWARIPFAFWARYHQYILNSNRANRRATWRAGVSSGTNGGASTSVLDGPSTSSTIRTRNAARAGASFFSWIQHR

SEQ ID NO: 2380 - RNA, 2226 nt, Artificial Sequence
  MAGE-D4__Homo_sapiens__AAH63838
auggcugagggaagcuucagcgugcaaucggaaagcuacaguguugaagacauggaugaggguagcgacgaagucggggaggaagagaugguugaaggcaacgacuaugaagaauucggugcguuugguggcuauggcacccucaccagcuuugacauccauauccucagagccuucggaagcuuggguccaggccuucgcaucuuaucgaaugagcccugggaacuggaaaacccugugcuggcccagacccugguggaggcauugcagcuggauccggaaacacuugccaaugagacggccgcccgugcugccaacguagcccgcgccgccgccuccaaccgugcggcucgggccgcugccgccgcugcccguaccgccuucagucagguggucgcuagccaccggguggccacgccgcaggucucaggagaggauacccagcccacgaccuacgccgccgaggcucaggggcccaccccugagccaccccuugcuucuccgcagaccucccagauguuagucaccaguaagauggcugcccccgaggcuccggcaaccuccgcacagucccagacaggcuccccggcccaggaggcugcuacugagggcccuaguagcgccugugcuuucucucaggcuccgugugccagggagguggacgccaaccggcccagcacagccuuccugggccagaaugaugucuucgauuucacucagccggcaggugucaguggcauggccuucccgcgccccaagagaccugccccagcccaagaggcugccacagagggccccagugcugccucuggugugccccagacgggaccuggcagggagguggcagccacccggcccaagaccaccaagucggggaaggcgcuggccaagacucgguggguggagccucagaauguuguggcagcagcugcugccaaggccaagauggccacgagcaucccugagccggagggugcagcugcugccacugcucagcacagugcugagcccugggccaggaugggaggcaagaggaccaagaaguccaagcaccuggaugaugaguaugagagcagcgaggaggagagagagacucccgcggucccacccaccuggagagcaucacagcccucauugacggugcgggcucaguuggccccucggcccccgauggccccgaggucccagauacccucaaggcacguacugugccugcccccccgcaacgugacccuucugcaggagagggcaaauaaguuggugaaauaccugaugauuaaggacuacaagaagauccccaucaagcgcgcagacaugcugaaggaugucaucagagaauaugaugaacauuucccugagaucauugaacgagcaacguacacccuggaaaagaaguuugggauccaccugaaggagaucgacaaggaagaacaccuguauauucuugucugcacacgggacuccucagcucgccuccuuggaaaaaccaaggacacucccaggcugagucuccucuuggugauucugggcgucaucuucaugaauggcaaccgugccagcgaggcuguccucugggaggcacuacgcaagaugggacugcgcccuggggugaggcacccauuccucggcgaucugaggaagcucaucacagaugacuuugugaagcagaaguaccuggaauacaagaagauccccaacagcaacccaccugaguaugaauuccucuggggccugcgagcccgccaugagaccagcaagaugaggguccugagauucaucgcccagaaucagaaccgagacccccgggaauggaaggcucauuucuuggaggcuguggaugaugcuuucaagacaauggauguggauauggccgaggaacaugccagggcccagaugagggcccagaugaauaucggggaugaagcgcugauuggacgguggagcugggaugacauacaagucgagcuccugaccugggaugaggacggagauuuuggcgaugccugggccaggauccccuuugcuuucugggccagauaccaucaguacauucugaauagcaaccgugccaacaggagggccacguggagagcuggcgucagcaguggcaccaauggaggggccagcaccagcguccuagauggccccagcaccagcuccaccauccggaccagaaaugcugccagagcuggcgccagcuucuucuccuggauccagcaccguuga

SEQ ID NO: 2381 - RNA, 2226 nt, Artificial Sequence
  derived and/or modified sequence opt1 from MAGE-D4__Homo_sapiens__AAH63838
auggccgagggcagcuucuccgugcagagcgaguccuacagcgucgaggacauggacgagggguccgacgaggugggcgaggaggagaugguggaggggaacgacuacgaggaguucggcgccuucgggggcuacggcacccugaccagcuucgacauccacauccuccgcgcguucgggucccugggccccgggcugcggauccucagcaacgagccgugggagcuggagaaccccguccuggcccagacgcucguggaggcccugcagcuggaccccgagacccucgccaacgagaccgccgcgcgcgccgccaacguggcccgggcggccgccuccaaccgcgccgcccgggcggccgccgccgccgcgcgcaccgccuucagccaggucguggccucccaccggguggccacgccccaggucagcggcgaggacacccagccgaccaccuacgccgcggaggcccaggggcccacgcccgagcccccgcuggccagcccccagaccagccagaugcuggugaccuccaagauggccgcccccgaggcgcccgccaccagcgcccagucccagacgggcagcccggcccaggaggcggccaccgagggccccuccagcgccugcgccuucagccaggcccccugcgcgcgcgagguggacgccaaccggcccuccaccgccuuccucgggcagaacgacgucuucgacuucacccagccggccggcgugagcgggauggccuucccccgccccaagcggcccgcgccggcccaggaggccgccacggagggccccuccgccgcgagcggcgugccccagaccgggcccggccgcgaggucgccgccacccggccgaagaccacgaaguccgggaaggcccuggcgaagacccgcuggguggagccccagaacguggucgccgccgccgccgcgaaggccaagauggccaccagcauccccgagcccgagggcgccgccgcggccaccgcccagcacuccgccgagccgugggcccggaugggcgggaagcgcacgaagaaguccaagcaccuggacgacgaguacgaguccagcgaggaggagcgggagacccccgcggugcccccgaccuggcgcgccucccagcccagccucaccgugcgggcccagcuggccccgcgcccgcccauggcgccccggucccagauccccagccgccacguccugugccucccgccccgcaacgugacgcugcugcaggagcgggccaacaagcucgugaaguaccugaugaucaaggacuacaagaagauccccaucaagcgcgccgacaugcugaaggacgucauccgggaguacgacgagcacuuccccgagaucaucgagcgcgccaccuacacccucgagaagaaguucggcauccaccugaaggagaucgacaaggaggagcaccuguacauccucgugugcacccgggacuccagcgcccgccugcuggggaagacgaaggacacgccccggcucucccugcugcucgucauccugggcgugaucuucaugaacgggaaccgcgcgagcgaggccgugcugugggaggcccuccggaagaugggccugcgccccgggguccggcaccccuuccugggcgaccuccgcaagcugaucaccgacgacuucgugaagcagaaguaccuggaguacaagaagauccccaacuccaacccgcccgaguacgaguuccucuggggccugcgggcccgccacgagaccagcaagaugcgggugcugcgcuucaucgcccagaaccagaaccgggacccccgcgaguggaaggcgcacuuccucgaggccgucgacgacgccuucaagaccauggacguggacauggccgaggagcacgcccgggcgcagaugcgcgcccagaugaacaucggggacgaggcccugaucggccgcuggagcugggacgacauccagguggagcugcucaccugggacgaggacggggacuucggcgacgccugggcccggauccccuucgcguucugggcccgcuaccaccaguacauccugaacuccaaccgggccaaccgccgggccaccuggcgcgcgggggucagcuccggcaccaacggcggggccagcaccuccgugcuggacggccccagcacguccagcaccauccggacccgcaacgccgcccgggccggggcguccuucuucagcuggauccagcaccgcuga

SEQ ID NO: 2382 - RNA, 2226 nt, Artificial Sequence
  derived and/or modified sequence opt2 from MAGE-D4__Homo_sapiens__AAH63838
auggccgagggcuccuucuccguccaguccgaguccuacuccgucgaggacauggacgagggcuccgacgaggucggcgaggaggagauggucgagggcaacgacuacgaggaguucggcgccuucggcggcuacggcacccucaccuccuucgacauccacauccuccgcgccuucggcucccucggccccggccuccgcauccucuccaacgagcccugggagcucgagaaccccguccucgcccagacccucgucgaggcccuccagcucgaccccgagacccucgccaacgagaccgccgcccgcgccgccaacgucgcccgcgccgccgccuccaaccgcgccgcccgcgccgccgccgccgccgcccgcaccgccuucucccaggucgucgccucccaccgcgucgccaccccccaggucuccggcgaggacacccagcccaccaccuacgccgccgaggcccagggccccacccccgagcccccccucgccuccccccagaccucccagaugcucgucaccuccaagauggccgcccccgaggcccccgccaccuccgcccagucccagaccggcucccccgcccaggaggccgccaccgagggccccuccuccgccugcgccuucucccaggcccccugcgcccgcgaggucgacgccaaccgccccuccaccgccuuccucggccagaacgacgucuucgacuucacccagcccgccggcgucuccggcauggccuucccccgccccaagcgccccgcccccgcccaggaggccgccaccgagggccccuccgccgccuccggcgucccccagaccggccccggccgcgaggucgccgccacccgccccaagaccaccaaguccggcaaggcccucgccaagacccgcugggucgagccccagaacgucgucgccgccgccgccgccaaggccaagauggccaccuccauccccgagcccgagggcgccgccgccgccaccgcccagcacuccgccgagcccugggcccgcaugggcggcaagcgcaccaagaaguccaagcaccucgacgacgaguacgaguccuccgaggaggagcgcgagacccccgccgucccccccaccuggcgcgccucccagcccucccucaccguccgcgcccagcucgccccccgcccccccauggccccccgcucccagauccccucccgccacguccucugccuccccccccgcaacgucacccuccuccaggagcgcgccaacaagcucgucaaguaccucaugaucaaggacuacaagaagauccccaucaagcgcgccgacaugcucaaggacgucauccgcgaguacgacgagcacuuccccgagaucaucgagcgcgccaccuacacccucgagaagaaguucggcauccaccucaaggagaucgacaaggaggagcaccucuacauccucgucugcacccgcgacuccuccgcccgccuccucggcaagaccaaggacaccccccgccucucccuccuccucgucauccucggcgucaucuucaugaacggcaaccgcgccuccgaggccguccucugggaggcccuccgcaagaugggccuccgccccggcguccgccaccccuuccucggcgaccuccgcaagcucaucaccgacgacuucgucaagcagaaguaccucgaguacaagaagauccccaacuccaacccccccgaguacgaguuccucuggggccuccgcgcccgccacgagaccuccaagaugcgcguccuccgcuucaucgcccagaaccagaaccgcgacccccgcgaguggaaggcccacuuccucgaggccgucgacgacgccuucaagaccauggacgucgacauggccgaggagcacgcccgcgcccagaugcgcgcccagaugaacaucggcgacgaggcccucaucggccgcugguccugggacgacauccaggucgagcuccucaccugggacgaggacggcgacuucggcgacgccugggcccgcauccccuucgccuucugggcccgcuaccaccaguacauccucaacuccaaccgcgccaaccgccgcgccaccuggcgcgccggcgucuccuccggcaccaacggcggcgccuccaccuccguccucgacggccccuccaccuccuccaccauccgcacccgcaacgccgcccgcgccggcgccuccuucuucuccuggauccagcaccgcuga

SEQ ID NO: 2383 - RNA, 2226 nt, Artificial Sequence
  derived and/or modified sequence opt3 from MAGE-D4__Homo_sapiens__AAH63838
auggccgagggcagcuucuccgugcagucugaaucauacagugucgaggacauggaugaagggagcgacgagguuggagaagaggagaugguggaagguaacgauuaugaggaauuuggcgcuuucgggggauacggcacccugacauccuuugacauccacauucucagagcauucgguucucuugggcccggacugaggauauugucgaaugagccuugggaguuagaaaacccaguacuggcccaaacucuaguggaggcgcuccagcuggauccggaaacgcuugcuaaugagaccgccgcacgggccgcuaacgucgcacgcgccgcugccucaaaucgagcggcacgugccgcugccgcagcugccagaacagcguuuagccaggugguugccagucauaggguggcaacuccccaggucuccggcgaagacacccaaccuacaaccuaugcugccgaggcucagggcccaacucccgagccuccacuggccucuccccagacaagccagauguuggugaccuccaagauggcagccccugaagcuccagcgacgucagcacaaagucagacugggagcccggcccaggaggcugccaccgaaggacccucuuccgcaugcgccuucucacaggcuccuugugcccgggagguagaugcaaaccgcccaagcacagcguuucucggucaaaaugacguuuucgauuuuacucagcccgcuggcgugagugggauggccuucccuagaccaaaaaggcccgcaccggcccaggaagcugccaccgagggaccuucugcagcuuccggcgucccccaaacagguccagggcgggagguggccgcgacccgcccuaagacgacuaaaagcggaaaggcccuggcuaaaacacgauggguggaaccccagaacgucguugcagccgcugccgcaaaggcgaagauggccaccucgaucccagagcccgaaggcgcugccgcagcuacugcccagcacucugcagagccuugggccagaaugggcgggaaaaggacaaagaaauccaagcaucuggacgaugaauacgagucaagugaggaggaacgggaaaccccagcugugccgcccacguggcgugcgagccagccuucccucaccguacgcgcccaauuagcaccaagacccccuauggcuccaaggucucagauucccagccggcacgugcugugccuuccgccucgaaaugucacauugcugcaggagcgcgccaacaagcuagugaaauaucucaugaucaaggacuacaaaaagauuccaaucaaaagagccgauaugcugaaggacguuauaagggaguaugacgaacauuuucccgagaucauugaacgggcuacuuacacccuugagaaaaaguucggaauccaccugaaagaaauugauaaggaggagcacuuguacauccucguguguacacgcgacucaagugcaagacuguuagguaagacuaaagauaccccuaggcugucccuccuucuggucauauugggcgugauuuuuaugaaugggaaccgugccagcgaagcgguacuaugggaggcucugcggaagaugggacuccgacccggcguuagacauccauuccugggugaccuuaggaaacugaucacagaugacuucgugaagcagaaauauuuggaauacaagaagauuccuaauucuaaucccccagaguaugaauuucucugggggcugcgcgcccggcacgagaccucaaaaaugagagucuuaagguucaucgcacaaaaccagaaccgcgauccgcgagaguggaaggcccauuuucuggaagcuguggacgaugcauucaaaacuauggacgucgauauggccgaggaacacgcgcgggcucagaugcgugcccagaugaacaucggcgacgaggcacuaauuggaagauggaguugggacgauauacaaguggaacuccugacgugggacgaggauggcgacuuuggggaugccugggcuaggaucccuuucgccuuuugggcacgcuaccaccaguauauucuuaauagcaaccgggcuaauagaagggccacauggcgagcgggaguuuccucugguaccaacggcggggccucgacuagcguguuggacggacccuccaccucaaguacaauccgcacccggaaugcagcuagagccggcgcuucuuucuuuagcuggauacagcauagguga

SEQ ID NO: 2384 - RNA, 2226 nt, Artificial Sequence
  derived and/or modified sequence opt4 from MAGE-D4__Homo_sapiens__AAH63838
auggccgagggcagcuucagcgugcagagcgagagcuacagcguggaggacauggacgagggcagcgacgaggugggcgaggaggagaugguggagggcaacgacuacgaggaguucggcgccuucggcggcuacggcacccugaccagcuucgacauccacauccugagagccuucggcagccugggccccggccugagaauccugagcaacgagcccugggagcuggagaaccccgugcuggcccagacccugguggaggcccugcagcuggaccccgagacccuggccaacgagaccgccgccagagccgccaacguggccagagccgccgccagcaacagagccgccagagccgccgccgccgccgccagaaccgccuucagccaggugguggccagccacagaguggccaccccccaggugagcggcgaggacacccagcccaccaccuacgccgccgaggcccagggccccacccccgagcccccccuggccagcccccagaccagccagaugcuggugaccagcaagauggccgcccccgaggcccccgccaccagcgcccagagccagaccggcagccccgcccaggaggccgccaccgagggccccagcagcgccugcgccuucagccaggcccccugcgccagagagguggacgccaacagacccagcaccgccuuccugggccagaacgacguguucgacuucacccagcccgccggcgugagcggcauggccuuccccagacccaagagacccgcccccgcccaggaggccgccaccgagggccccagcgccgccagcggcgugccccagaccggccccggcagagagguggccgccaccagacccaagaccaccaagagcggcaaggcccuggccaagaccagauggguggagccccagaacgugguggccgccgccgccgccaaggccaagauggccaccagcauccccgagcccgagggcgccgccgccgccaccgcccagcacagcgccgagcccugggccagaaugggcggcaagagaaccaagaagagcaagcaccuggacgacgaguacgagagcagcgaggaggagagagagacccccgccgugccccccaccuggagagccagccagcccagccugaccgugagagcccagcuggcccccagaccccccauggcccccagaagccagauccccagcagacacgugcugugccugccccccagaaacgugacccugcugcaggagagagccaacaagcuggugaaguaccugaugaucaaggacuacaagaagauccccaucaagagagccgacaugcugaaggacgugaucagagaguacgacgagcacuuccccgagaucaucgagagagccaccuacacccuggagaagaaguucggcauccaccugaaggagaucgacaaggaggagcaccuguacauccuggugugcaccagagacagcagcgccagacugcugggcaagaccaaggacacccccagacugagccugcugcuggugauccugggcgugaucuucaugaacggcaacagagccagcgaggccgugcugugggaggcccugagaaagaugggccugagacccggcgugagacaccccuuccugggcgaccugagaaagcugaucaccgacgacuucgugaagcagaaguaccuggaguacaagaagauccccaacagcaacccccccgaguacgaguuccuguggggccugagagccagacacgagaccagcaagaugagagugcugagauucaucgcccagaaccagaacagagaccccagagaguggaaggcccacuuccuggaggccguggacgacgccuucaagaccauggacguggacauggccgaggagcacgccagagcccagaugagagcccagaugaacaucggcgacgaggcccugaucggcagauggagcugggacgacauccagguggagcugcugaccugggacgaggacggcgacuucggcgacgccugggccagaauccccuucgccuucugggccagauaccaccaguacauccugaacagcaacagagccaacagaagagccaccuggagagccggcgugagcagcggcaccaacggcggcgccagcaccagcgugcuggacggccccagcaccagcagcaccaucagaaccagaaacgccgccagagccggcgccagcuucuucagcuggauccagcacagauga

SEQ ID NO: 2385 - RNA, 2226 nt, Artificial Sequence
  derived and/or modified sequence opt5 from MAGE-D4__Homo_sapiens__AAH63838
auggccgagggcagcuucuccgugcagucugaaagcuacuccgucgaggacauggaugaagggucugacgagguuggagaagaggagaugguggaaggcaacgauuaugaggaauuuggggcuuucggaggcuacgggacccugacauccuuugacauccacauucucagagccuucggaucccugggccccggccuucggauccugucuaaugagccuugggagcucgaaaacccggugcuggcgcaaacgcuugucgaggcucugcagcucgaucccgaaacccuggccaaugagacagccgcucgcgccgcuaacguggccagagcggccgcuagcaaucgggccgcucgcgccgcggccgcugccgcuagaaccgccuuuucccagguuguggccagccaucgggucgcuacaccucaggugucuggggaagacacccaacccacaaccuaugcggccgaggcucagggaccuacgcccgagccuccgcuggccagcccccagaccagccagaugcucguuacaucuaagauggccgcuccugaagcccccgcgaccuccgcucaaagccagacaggcucuccugcccaggaggccgcuaccgaagggcccuccagcgccugcgcuuucucccaggccccgugugcgcgcgagguggaugccaacagaccuucuacggcuuuucugggacaaaaugacgucuucgauuuuacacagcccgccggcgugagcgggauggcuuucccucggcccaaacgccccgccccugcgcaggaagccgcuaccgagggaccguccgccgcuagcggcgugccccaaacaggcccugggagagaggucgccgccacccggcccaagaccacaaaaucuggaaaggcucuugcgaaaacgcgcuggguugaaccucagaacgugguggccgcugccgccgcuaaggccaagauggcgaccuccauucccgagccggaaggcgcugccgccgcuacagcccagcacagcgcggagccuugggcuagaaugggagggaaacggaccaagaaaucuaagcaucuggacgaugaauacgagagcuccgaggaggaacgcgaaacacccgccgucccucccaccuggagagccucucagccuagccucacggugcgggcucaacuggcccccagaccgccuauggcuccccgcucccagauccccagccggcacguucuuugccugccuccgagaaaugugacacuccugcaggagcgcgccaacaaacuggucaaguaucucaugauuaaggacuacaaaaagauccccaucaaacgggcggauaugcugaaggacgugauuagagaguaugacgaacauuuuccugagaucauugaacgcgccaccuacacccuugagaaaaaguucggcauccaccugaaagaaauugauaaggaggagcaccucuacauccugguuuguacacgggacucuuccgcuagacuucuggggaagaccaaagauacaccccgccucagccugcugcucgugauucugggagucaucuuuaugaauggcaaccgggccucugaagcugugcuuugggaggcccugagaaagaugggccuccgcccugggguccggcaucccuuccugggagaccuuagaaaacugaucacggaugacuucgugaagcagaaauaucucgaauacaagaagauuccuaauuccaaucccccggaguaugaauuucuguggggccugcgggcccgccacgagaccagcaaaaugagaguucuccgguucaucgcucaaaaucagaacagagauccucgcgaguggaaggcgcauuuucuggaagccguggacgaugcuuucaaaacaauggacgucgauauggccgaggaacacgcccgggcucagaugagagcccagaugaacauuggggacgaggcgcuuaucggacgcugguccugggacgauauucaaguggaacugcucaccugggacgaggauggcgacuuuggggaugcuugggccagaauccccuucgccuuuugggcucgguaccaccaguauauccugaacucuaaccgcgccaauagacgggcgacauggcgcgcuggcguuagcuccggaaccaacggcggggccucuacgagcgugcuggacggaccuuccaccagcucuacaauuagaacccggaaugccgcucgcgccggcgcuuccuucuuuagcuggauccagcauagauga

SEQ ID NO: 2386 - protein, 373 aa, Artificial Sequence [sequence omitted]

SEQ ID NO: 2387 - RNA, 1122 nt, Artificial Sequence
  MAGE-_E1__Homo_sapiens__CAG33449
augccucccguuccaggcguuccauuccgcaacguugacaacgacuccccgaccucaguugaguuagaagacuggguagaugcacagcaucccacagaugaggaagaggaggaagccuccuccgccucuuccacuuuguacuuaguauuuucccccucuucuuucuccacauccucuucucugauucuuggugguccugaggaggaggaggugcccucuggugugauaccaaaucuuaccgagagcauucccaguaguccuccacaggguccuccacaggguccuucccagaguccucugagcuccugcugcuccucuuuuucauggagcucauucagugaggaguccagcagccagaaaggggaggauacaggcaccugucagggccugccagacagugaguccucuuucacauauacacuagaugaaaagguggccgaguuaguggaguuccugcuccucaaauacgaagcagaggagccuguaacagaggcagagaugcugaugauugucaucaaguacaaagauuacuuuccugugauacucaagagagcccgugaguucauggagcuucuuuuuggccuugcccugauagaagugggcccugaccacuucuguguguuugcaaacacaguaggccucaccgaugaggguagugaugaugagggcaugcccgagaacagccuccugauuauuauucugagugugaucuucauaaagggcaacugugccucugaggaggucaucugggaagugcugaaugcaguagggguauaugcugggagggagcacuucgucuauggggagccuagggagcuccucacuaaaguuugggugcagggacauuaccuggaguaucgggaggugccccacaguucuccuccauauuaugaauuccugugggguccaagagcccauucagaaagcaucaagaagaaaguacuagaguuuuuagccaagcugaacaacacuguuccuaguuccuuuccauccugguacaaggaugcuuugaaagauguggaagagagaguccaggccacaauugauaccgcagaugaugccacugucauggccagugaaagccucagugucauguccagcaacgucuccuuuucugauuaa

SEQ ID NO: 2388 - RNA, 1122 nt, Artificial Sequence
  derived and/or modified sequence opt1 from MAGE-_E1__Homo_sapiens__CAG33449
augccgcccgugcccggcguccccuuccgcaacguggacaacgacagccccaccuccguggagcuggaggacugggucgacgcccagcaccccaccgacgaggaggaggaggaggccagcuccgcgagcuccacgcucuaccugguguucagccccuccagcuucuccaccagcuccagccugauccucgggggccccgaggaggaggaggugcccuccggggucaucccgaaccugaccgagagcauccccuccagcccgccccagggcccgccccaggggcccucccagagcccccuguccagcugcugcagcuccuucagcugguccagcuucuccgaggagagcuccagccagaagggcgaggacaccggcacgugccaggggcucccggacuccgagagcuccuucaccuacacccuggacgagaagguggccgagcugguggaguuccuccugcugaaguacgaggccgaggagcccgucaccgaggccgagaugcucaugaucgugaucaaguacaaggacuacuuccccgugauccugaagcgggcccgcgaguucauggagcuccuguucggccuggcgcugaucgaggucgggcccgaccacuucugcguguucgccaacacggugggccucaccgacgaggggagcgacgacgagggcaugccggagaacucccugcugaucaucauccucagcgucaucuucaucaagggcaacugcgccuccgaggaggugaucugggaggugcugaacgccgucgggguguacgcgggccgggagcacuucguguacggggagccccgcgagcugcucaccaaggucugggugcagggccacuaccuggaguaccgggaggugccccacagcuccccgcccuacuacgaguuccuguggggcccccgcgcccacagcgaguccaucaagaagaagguccucgaguuccuggccaagcugaacaacaccgugcccagcagcuuccccuccugguacaaggacgcccucaaggacgucgaggagcgggugcaggccacgaucgacaccgcggacgacgccaccgugauggccagcgagucccugagcgucauguccagcaacguguccuucagcgacuga

SEQ ID NO: 2389 - RNA, 1122 nt, Artificial Sequence
  derived and/or modified sequence opt2 from MAGE-_E1__Homo_sapiens__CAG33449
augccccccguccccggcguccccuuccgcaacgucgacaacgacucccccaccuccgucgagcucgaggacugggucgacgcccagcaccccaccgacgaggaggaggaggaggccuccuccgccuccuccacccucuaccucgucuucucccccuccuccuucuccaccuccuccucccucauccucggcggccccgaggaggaggagguccccuccggcgucauccccaaccucaccgaguccauccccuccucccccccccagggccccccccagggccccucccaguccccccucuccuccugcugcuccuccuucuccugguccuccuucuccgaggaguccuccucccagaagggcgaggacaccggcaccugccagggccuccccgacuccgaguccuccuucaccuacacccucgacgagaaggucgccgagcucgucgaguuccuccuccucaaguacgaggccgaggagcccgucaccgaggccgagaugcucaugaucgucaucaaguacaaggacuacuuccccgucauccucaagcgcgcccgcgaguucauggagcuccucuucggccucgcccucaucgaggucggccccgaccacuucugcgucuucgccaacaccgucggccucaccgacgagggcuccgacgacgagggcaugcccgagaacucccuccucaucaucauccucuccgucaucuucaucaagggcaacugcgccuccgaggaggucaucugggagguccucaacgccgucggcgucuacgccggccgcgagcacuucgucuacggcgagccccgcgagcuccucaccaaggucuggguccagggccacuaccucgaguaccgcgaggucccccacuccuccccccccuacuacgaguuccucuggggcccccgcgcccacuccgaguccaucaagaagaagguccucgaguuccucgccaagcucaacaacaccguccccuccuccuuccccuccugguacaaggacgcccucaaggacgucgaggagcgcguccaggccaccaucgacaccgccgacgacgccaccgucauggccuccgagucccucuccgucauguccuccaacgucuccuucuccgacuga

SEQ ID NO: 2390 - RNA, 1122 nt, Artificial Sequence
  derived and/or modified sequence opt3 from MAGE-_E1__Homo_sapiens__CAG33449
augcccccugugccaggcgucccguucagaaacguugacaaugauagccccaccuccguggagcuggaagacuggguagaugcccagcacccuacagacgaggaagaggaagaggcuucuucagcaaguagcacucucuaccuuguguuuuccccaucuucguucucaacgagcaguucccugaucuuagggggacccgaggaagaggaagucccuucuggugugauuccaaacuugaccgagagcauacccuccucaccuccacaaggcccgccccaggggccuagucagagcccacugucuuccugcuguagcucauuuaguuggucuuccuucagcgaggaaucgucuucccagaagggagaggauacaggcacuugccaaggucuacccgacucagaaaguagcuuuaccuauacacucgaugagaaaguugccgaacugguggaguuccuucuguugaaguacgaggcggaagaaccugucaccgaagcugagaugcucaugaucgugauuaaauauaaggacuacuuuccaguaauccugaaaagggcccgggaguucauggagcugcucuuuggguuagcacugauugagguuggacccgaucauuucuguguguuugccaauacugucggccuuacagacgaaggcuccgaugacgaggggaugccggaaaacucuuugcugaucauaauccuaagcgugauuuucaucaagggaaauugcgcuucagaggaagugauuugggagguccucaacgcaguugguguguaugccggccgcgagcacuuuguauacggggaaccucgagagcugcuuaccaagguguggguccagggacauuaucuggaauaccgugaggugccccacaguuccccaccuuacuaugaguucuuguggggccccagagcucauagcgaaucuaucaaaaagaaaguucucgaguuccuggccaaguuaaauaacacggugccaucaaguuuucccagcugguacaaagaugcgcugaaggacgucgaagagagggugcaggcaacuauagacaccgccgaugacgcuacaguaauggccuccgaaucucucucgguuaugagcuccaaugugucauucagugauuga

SEQ ID NO: 2391 - RNA, 1122 nt, Artificial Sequence
  derived and/or modified sequence opt4 from MAGE-_E1__Homo_sapiens__CAG33449
augccccccgugcccggcgugcccuucagaaacguggacaacgacagccccaccagcguggagcuggaggacuggguggacgcccagcaccccaccgacgaggaggaggaggaggccagcagcgccagcagcacccuguaccugguguucagccccagcagcuucagcaccagcagcagccugauccugggcggccccgaggaggaggaggugcccagcggcgugauccccaaccugaccgagagcauccccagcagccccccccagggccccccccagggccccagccagagcccccugagcagcugcugcagcagcuucagcuggagcagcuucagcgaggagagcagcagccagaagggcgaggacaccggcaccugccagggccugcccgacagcgagagcagcuucaccuacacccuggacgagaagguggccgagcugguggaguuccugcugcugaaguacgaggccgaggagcccgugaccgaggccgagaugcugaugaucgugaucaaguacaaggacuacuuccccgugauccugaagagagccagagaguucauggagcugcuguucggccuggcccugaucgaggugggccccgaccacuucugcguguucgccaacaccgugggccugaccgacgagggcagcgacgacgagggcaugcccgagaacagccugcugaucaucauccugagcgugaucuucaucaagggcaacugcgccagcgaggaggugaucugggaggugcugaacgccgugggcguguacgccggcagagagcacuucguguacggcgagcccagagagcugcugaccaaggugugggugcagggccacuaccuggaguacagagaggugccccacagcagcccccccuacuacgaguuccuguggggccccagagcccacagcgagagcaucaagaagaaggugcuggaguuccuggccaagcugaacaacaccgugcccagcagcuuccccagcugguacaaggacgcccugaaggacguggaggagagagugcaggccaccaucgacaccgccgacgacgccaccgugauggccagcgagagccugagcgugaugagcagcaacgugagcuucagcgacuga

SEQ ID NO: 2392 - RNA, 1122 nt, Artificial Sequence
  derived and/or modified sequence opt5 from MAGE-_E1__Homo_sapiens__CAG33449
augcccccugugccgggcguccccuucagaaacguugacaaugauagcccuaccuccguggagcuggaagacuggguggaugcccagcaccccacagacgaggaagaggaagaggcuucuagcgccuccucuacgcucuaccuggucuuuagcccuuccucuuucagcaccuccagcucucuuauccucgggggacccgaggaagaggaagugccuuccggcguuauuccgaaccugacagagagcauccccucuuccccuccccaagggccuccccagggaccgagccagucuccucuguccagcugcuguuccucuuuuagcugguccagcuucucugaggaauccagcucucagaagggcgaggauaccgggacaugccaaggacuucccgacagcgaauccucuuuuaccuauacacuggaugagaaaguggcggaacucgucgaguuccugcugcucaaguacgaggcugaagaaccugugaccgaagccgagaugcugaugauuguuaucaaauauaaggacuacuuucccgugauucuuaaacgggcccgcgaguucauggagcugcucuuuggccuggcucuuaucgaggucggccccgaucauuucuguguguuugccaauacgguggggcugaccgacgaaggaagcgaugacgagggcaugccugaaaacucccuccugaucauuauccugagcgucauuuucaucaaggggaauugcgcuucugaggaaguuauuugggaggugcucaacgccgugggagucuaugcgggcagagagcacuuuguguacggggaaccgcgggagcugcuuacaaagguuugggugcagggacauuaucuggaauaccgcgaggucccccacuccagcccucccuacuaugaguuccucuggggcccuagagcccauucugaauccaucaaaaagaaagugcuggaguuccuugcuaagcugaauaacaccguucccagcuccuuuccgucuugguacaaagaugcccucaaggacguggaggaacggguccaggcuacaauugacaccgccgaugacgcgacggugauggccagcgaaucccugucugucaugagcuccaaugugagcuucucugauuga

SEQ ID NO: 2393 - protein, 957 aa, Artificial Sequence
  MAGE-E1_(MAGE1)__Homo_sapiens__Q9HCI5
MSLVSQNSRRRRRRVAKATAHNSSWGEMQAPNAPGLPADVPGSDVPQGPSDSQILQGLCASEGPSTSVLPTSAEGPSTFVPPTISEASSASGQPTISEGPGTSVLPTPSEGLSTSGPPTISKGLCTSVTLAASEGRNTSRPPTSSEEPSTSVPPTASEVPSTSLPPTPGEGTSTSVPPTAYEGPSTSVVPTPDEGPSTSVLPTPGEGPGTSVPLAATEGLSTSVQATPDEGPSTSVPPTATEGLSTPVPPTRDEGPSTSVPATPGEGPSTSVLPAASDGQSISLVPTRGKGSSTSVPPTATEGLSTSVQPTAGEGSSTSVPPTPGGGLSTSVPPTATEELSTSVPPTPGEGPSTSVLPIPGEGLSTSVPPTASDGSDTSVPPTPGEGASTLVQPTAPDGPGSSVLPNPGEGPSTLFSSSASVDRNPSKCSLVLPSPRVTKASVDSDSEGPKGAEGPIEFEVLRDCESPNSISIMGLNTSRVAITLKPQDPMEQNVAELLQFLLVKDQSKYPIRESEMREYIVKEYRNQFPEILRRAAAHLECIFRFELRELDPEAHTYILLNKLGPVPFEGLEESPNGPKMGLLMMILGQIFLNGNQAKEAEIWEMLWRMGVQRERRLSIFGNPKRLLSVEFVWQRYLDYRPVTDCKPVEYEFFWGPRSHLETTKMKILKFMAKIYNKDPMDWPEKYNEALEEDAARAFAEGWQALPHFRRPFFEEAAAEVPSPDSEVSSYSSKYAPHSWPESRLESKARKLVQLFLLMDSTKLPIPKKGILYYIGRECSKVFPDLLNRAARTLNHVYGTELVVLDPRNHSYTLYNRREMEETEEIVDSPNRPGNNFLMQVLSFIFIMGNHARESAVWAFLRGLGVQAGRKHVITCRYLSQRYIDSLRVPDSDPVQYEFVWGPRARLETSKMKALRYVARIHRKEPQDWPQQYREAMEDEANRADVGHRQIFVHNFR

SEQ ID NO: 2394 - RNA, 2874 nt, Artificial Sequence
  MAGE-E1_(MAGE1)__Homo_sapiens__AAM08354
augucucugguaagccagaauucgcgccgccgccgccgccgcguugcaaaggcuacugcgcacaacagcagcuggggcgaaaugcaggccccuaaugcccccggucuccccgcugaugugccaggcucagacgucccccagggucccagcgauucccagauccuccagggccucugcgccucugagggcccaagcaccuccguucugcccaccuccgcugagggcccaagcaccuuugugccgcccaccaucucugaggccucaagcgccuccgggcagcccaccaucucugagggaccuggcaccuccgugcugcccacccccagugagggccuaagcaccuccgggccucccaccaucucuaaggggcugugcaccucugugacgcuugccgccucugagggccggaacaccuccaggccgcccacuuccucugaggaaccuagcaccuccgugccgcccaccgccucugagguaccgagcaccucccugccgcccaccccuggugagggaacgagcaccuccgugccgcccacagccuaugagggaccaagcaccuccguggugcccaccccugaugagggaccaagcaccuccgugcugccuacaccuggugagggaccaggcaccuccgugccgcucgccgccacugagggccugagcaccuccgugcaggccacuccugaugagggaccgagcaccuccgugccgcccaccgccacugagggccuaagcacccccgugccacccacccgugaugagggaccgagcaccuccgugccggccacuccuggugagggaccgagcaccuccgugcugcccgccgccucugacggacaaagcaucuccuuggugcccacccgcgguaagggaucaagcaccuccgugccccccaccgccaccgagggccugagcaccuccgugcagcccacugcuggugagggaucgagcaccuccgugccgcccaccccuggugggggacugagcaccuccgugccgcccaccgccacugaggaguugagcaccuccgugccgcccacucccggugagggaccaagcacuuccguacugccaauccccggugagggacugagcaccucugugccgcccaccgccucugauggaucggacaccuccgugccgcccacuccuggugagggcgcaagcaccuuagugcagcccaccgccccugacggaccgggaagcuccgugcugccuaacccuggugagggcccgagcacauuguuuagcucuagugcuucuguggaccggaaccccuccaaguguucccuuguuuugccaagcccuaggguaaccaaggccuccguggacucagauucugaggguccuaagggugcagaaggcccuauagaauucgagguccugagagacugugagagccccaacuccauuaguauuaugggccucaauacuucccggguugcaauuacccugaagccccaagacccuauggaacagaacguagcugagcuguugcaguuccugcuggugaaggaucagagcaaguacccuauccgggagucugaaaugcgggaauauauuguuaaagaauaucgcaaccaguuuccugagauacucaggcgagcagcagcccaccuggagugcauuuuuagguuugaauugagagaacuugacccugaggcacacaccuacauucuguuaaacaaacugggaccugugcccuuugaaggguuagaagagagcccaaaugggccaaagaugggccuccugaugaugauucuaggccaaauauuccugaauggcaaccaagccaaggaggcugagauuugggaaaugcucuggaggaugggggugcagcgggaaaggaggcuuuccauuuuugggaacccaaagagacuucugucuguggaguuuguauggcagcguuacuuagacuacaggccaguaacugacuguaaaccaguggaguaugaguuuuucuggggcccaagaucccaccuagaaaccaccaagaugaaaauucugaaguucauggcgaaaauauauaacaaagauccuauggauuggccagagaaauacaacgaagcucuggaagaagaugcugccagagccuuugcugaggguuggcaggcucucccucacuuuaggaggcccuuuuuugaggaagcugcugcagagguaccauccccugauucagagguuuccagcuauuccucaaaauaugccccacauucauggccugagucaagauuggagagcaaggcaaggaagcuggugcaguuauuucugcuuauggauucaacuaagcugccuauaccaaagaaaggaauucuguacuacauuggccgagagugcagcaaaguguucccugaccuccugaaucgugcugcccgcacccugaaccaugucuaugggacagaacuagugguacuugaucccaggaaucacuccuauacucuguacaaccgaagggagauggaagaaacugaggagaucguagacaguccaaacaggccuggcaacaacuuuuugaugcagguccuaagcuucaucuuuauuaugggcaaccaugccagggagucugcagucugggccuuucugcggggcuuagggguucaagcugggagaaagcaugugauuaccugcagauacuugagucagcgcuauauagacaguuuacggguuccugacagugauccagugcaauaugaguuuguaugggguccuagagcccguuuggaaaccucuaagaugaaagccuugcgauauguggccagaauccacagaaaggaaccacaggacuggccacagcaguacagggaggcaauggaagaugaggccaauagagcugauguugggcacaggcaaaucuuuguucacaacuucagguag

SEQ ID NO: 2395 - RNA, 2874 nt, Artificial Sequence
  derived and/or modified sequence opt1 from MAGE-E1_(MAGE1)__Homo_sapiens__AAM08354
augagccuggugucccagaacagccgccggcgccggcgccgggucgccaaggccaccgcgcacaacuccagcuggggcgagaugcaggcccccaacgccccggggcuccccgccgacgugcccggcuccgacgugccccaggggccgagcgacucccagauccugcagggccugugcgccagcgaggggcccuccaccagcguccuccccacguccgcggagggccccagcaccuucgugccgcccaccaucuccgaggccagcuccgccagcggccagcccaccaucuccgaggggcccggcacgagcgugcugccgacccccuccgaggggcugagcaccagcggcccgcccaccaucuccaaggggcucugcacgagcgucacccuggccgcguccgagggccgcaacaccagccggccgcccaccuccagcgaggagcccuccacgagcgugccgcccaccgccuccgaggugcccagcaccucccugccgcccacccccggcgaggggacgagcaccuccgucccgcccaccgccuacgagggccccagcaccuccguggugcccacgcccgacgaggggcccagcaccuccguccuccccacccccggcgagggccccgggaccagcgugccccuggccgccacggagggccuguccaccagcgugcaggcgaccccggacgaggggcccagcaccuccgucccgcccacggccaccgagggccucagcacccccgugccgcccacccgcgacgaggggcccuccacgagcgugcccgccacccccggcgagggccccuccaccagcguccugcccgccgccuccgacgggcagagcaucucccuggugccgacccggggcaaggggagcuccacgagcgugccgcccaccgcgaccgagggccucuccaccagcguccagcccaccgccggggagggcuccagcacguccgugccgcccacccccggcgggggccugagcaccagcgugccgcccaccgccacggaggagcuguccaccagcgucccgcccacccccggggagggccccuccaccagcgugcuccccauccccggggagggccuguccacgagcgucccgcccaccgccuccgacggcagcgacaccuccgugccgcccacccccggggagggcgccagcacgcuggugcagcccaccgcgcccgacgggcccggcuccagcguccuccccaaccccggcgaggggcccuccacccuguucagcuccagcgccuccguggaccgcaaccccagcaagugcucccuggugcucccgagcccccgggucaccaaggccagcguggacuccgacagcgagggccccaagggggccgagggccccaucgaguucgaggugcugcgcgacugcgaguccccgaacagcaucuccaucauggggcugaacacgagccgggucgccaucacccucaagccccaggaccccauggagcagaacguggcggagcugcugcaguuccuccuggugaaggaccaguccaaguaccccauccgcgagagcgagaugcgggaguacaucgucaaggaguaccgcaaccaguucccggagauccugcggcgcgccgccgcccaccucgagugcaucuuccgguucgagcugcgcgagcuggaccccgaggcgcacaccuacauccuccugaacaagcugggccccgugcccuucgagggccucgaggaguccccgaacgggcccaagaugggccugcugaugaugauccucgggcagaucuuccugaacggcaaccaggccaaggaggccgagaucugggagaugcuguggcggaugggggugcagcgcgagcgccggcucagcaucuucggcaaccccaagcgccugcuguccgucgaguucguguggcagcgguaccucgacuaccgcccggugaccgacugcaagcccgucgaguacgaguucuucuggggcccccggagccaccuggagacgaccaagaugaagauccugaaguucauggccaagaucuacaacaaggaccccauggacuggccggagaaguacaacgaggcccuggaggaggacgcggcccgcgccuucgccgagggguggcaggcccucccccacuuccggcgccccuucuucgaggaggcggccgccgaggugcccuccccggacagcgagguguccagcuacuccagcaaguacgcgccccacuccuggcccgagagccggcuggagagcaaggcccgcaagcugguccagcuguuccuccugauggacuccaccaagcuccccaucccgaagaagggcauccuguacuacaucgggcgggagugcagcaagguguuccccgaccugcucaaccgcgccgcccggacccugaaccacguguacggcacggagcuggucgugcucgacccccgcaaccacuccuacacccuguacaaccggcgcgagauggaggagaccgaggagaucguggacagccccaaccggccggggaacaacuuccugaugcagguccucuccuucaucuucaucaugggcaaccacgcccgcgagagcgccgugugggcguuccugcggggccugggggugcaggccggccgcaagcacgucaucacgugccgcuaccucucccagcgguacaucgacagccugcgcgugcccgacuccgaccccgugcaguacgaguucgucugggggccccgggcccgccuggagaccagcaagaugaaggcccuccgguacguggcccgcauccaccggaaggagccgcaggacuggccccagcaguaccgcgaggcgauggaggacgaggccaaccgggccgacgugggccaccgccagaucuucguccacaacuuccgguga

SEQ ID NO: 2396 - RNA, 2874 nt, Artificial Sequence
  derived and/or modified sequence opt2 from MAGE-E1_(MAGE1)__Homo_sapiens__AAM08354
augucccucgucucccagaacucccgccgccgccgccgccgcgucgccaaggccaccgcccacaacuccuccuggggcgagaugcaggcccccaacgcccccggccuccccgccgacguccccggcuccgacgucccccagggccccuccgacucccagauccuccagggccucugcgccuccgagggccccuccaccuccguccuccccaccuccgccgagggccccuccaccuucgucccccccaccaucuccgaggccuccuccgccuccggccagcccaccaucuccgagggccccggcaccuccguccuccccacccccuccgagggccucuccaccuccggcccccccaccaucuccaagggccucugcaccuccgucacccucgccgccuccgagggccgcaacaccucccgcccccccaccuccuccgaggagcccuccaccuccgucccccccaccgccuccgagguccccuccaccucccucccccccacccccggcgagggcaccuccaccuccgucccccccaccgccuacgagggccccuccaccuccgucguccccacccccgacgagggccccuccaccuccguccuccccacccccggcgagggccccggcaccuccgucccccucgccgccaccgagggccucuccaccuccguccaggccacccccgacgagggccccuccaccuccgucccccccaccgccaccgagggccucuccacccccgucccccccacccgcgacgagggccccuccaccuccguccccgccacccccggcgagggccccuccaccuccguccuccccgccgccuccgacggccaguccaucucccucguccccacccgcggcaagggcuccuccaccuccgucccccccaccgccaccgagggccucuccaccuccguccagcccaccgccggcgagggcuccuccaccuccgucccccccacccccggcggcggccucuccaccuccgucccccccaccgccaccgaggagcucuccaccuccgucccccccacccccggcgagggccccuccaccuccguccuccccauccccggcgagggccucuccaccuccgucccccccaccgccuccgacggcuccgacaccuccgucccccccacccccggcgagggcgccuccacccucguccagcccaccgcccccgacggccccggcuccuccguccuccccaaccccggcgagggccccuccacccucuucuccuccuccgccuccgucgaccgcaaccccuccaagugcucccucguccuccccuccccccgcgucaccaaggccuccgucgacuccgacuccgagggccccaagggcgccgagggccccaucgaguucgagguccuccgcgacugcgagucccccaacuccaucuccaucaugggccucaacaccucccgcgucgccaucacccucaagccccaggaccccauggagcagaacgucgccgagcuccuccaguuccuccucgucaaggaccaguccaaguaccccauccgcgaguccgagaugcgcgaguacaucgucaaggaguaccgcaaccaguuccccgagauccuccgccgcgccgccgcccaccucgagugcaucuuccgcuucgagcuccgcgagcucgaccccgaggcccacaccuacauccuccucaacaagcucggccccguccccuucgagggccucgaggagucccccaacggccccaagaugggccuccucaugaugauccucggccagaucuuccucaacggcaaccaggccaaggaggccgagaucugggagaugcucuggcgcaugggcguccagcgcgagcgccgccucuccaucuucggcaaccccaagcgccuccucuccgucgaguucgucuggcagcgcuaccucgacuaccgccccgucaccgacugcaagcccgucgaguacgaguucuucuggggcccccgcucccaccucgagaccaccaagaugaagauccucaaguucauggccaagaucuacaacaaggaccccauggacuggcccgagaaguacaacgaggcccucgaggaggacgccgcccgcgccuucgccgagggcuggcaggcccucccccacuuccgccgccccuucuucgaggaggccgccgccgagguccccucccccgacuccgaggucuccuccuacuccuccaaguacgccccccacuccuggcccgagucccgccucgaguccaaggcccgcaagcucguccagcucuuccuccucauggacuccaccaagcuccccauccccaagaagggcauccucuacuacaucggccgcgagugcuccaaggucuuccccgaccuccucaaccgcgccgcccgcacccucaaccacgucuacggcaccgagcucgucguccucgacccccgcaaccacuccuacacccucuacaaccgccgcgagauggaggagaccgaggagaucgucgacucccccaaccgccccggcaacaacuuccucaugcagguccucuccuucaucuucaucaugggcaaccacgcccgcgaguccgccgucugggccuuccuccgcggccucggcguccaggccggccgcaagcacgucaucaccugccgcuaccucucccagcgcuacaucgacucccuccgcguccccgacuccgaccccguccaguacgaguucgucuggggcccccgcgcccgccucgagaccuccaagaugaaggcccuccgcuacgucgcccgcauccaccgcaaggagccccaggacuggccccagcaguaccgcgaggccauggaggacgaggccaaccgcgccgacgucggccaccgccagaucuucguccacaacuuccgcuga

SEQ ID NO: 2397 - RNA, 2874 nt, Artificial Sequence
  derived and/or modified sequence opt3 from MAGE-E1_(MAGE1)__Homo_sapiens__AAM08354
augagccuggugucccagaacucuagaaggcggcgccgacgugucgccaaggcuaccgcacacaauucaaguuggggcgagaugcaagcccccaacgcgccugggcucccagcugacguuccgggaagcgaugugccccaggguccuuccgacucucagauccuucagggccugugcgccucggaagggccaucaacaagcguauugcccacgagugcagagggaccuuccacuuucgugccacccaccauuucugaagccagcuccgcuucaggccaaccuacaauaagugaggguccagggacuagcgucuuaccgacccccucugaaggacuguccacaucaggcccuccaaccaucagcaaaggccuauguacaagugugacucucgcagccucugaggggagaaauaccuccaggcccccuacgagcucggaggaaccaucuacuuccguucccccgaccgcuucagaggugccuaguacaagccugcccccaacuccuggagaagguaccuccacaucugucccuccaaccgccuacgagggccccagcacgucagugguaccuacuccagaugaggggccgaguacauccguucuucccaccccuggagaaggcccagguacuagcgugccccuggcggcaacagagggguugucuaccucaguccaggccacgccugacgaaggaccaaguaccagcgugcccccgacagcuacugagggccucuccaccccugugccacccacacgggaugaaggcccuucuacuucgguccccgccaccccaggggagggaccuagcacauccguucugcccgcagcuucagacggucagaguauuucucuggugccaacccgcggcaaggggagcuccacuucaguaccgccuacggccacagagggacucagcaccucugugcagcccacugcgggcgaagguuccaguaccagcgucccacccacaccugggggcggauuaucuaccuccgugccacccacugccacagaggaacugucaacgaguguuccuccgaccccaggcgaggggcccagcacuucggugcuuccuaucccaggagaagguuuguccacaucugugcccccuaccgcaagcgauggcucagacacaagugucccgcccacuccaggggagggagcuuccacccugguacaaccuacggcccccgauggcccagguucuagcguucuaccuaaccccggggagggcccauccacccucuuuucaagcagugcuucuguggacagaaauccguccaaaugcagccugguccuuccuucgcccagggugacaaaggccucagucgauucugacagugaaggaccaaaaggcgcagaggggcccauugaguucgaagugcugcgggauugugaauccccuaacagcaucucuauaaugggauugaauacuagccgcguugccaucacccucaagccacaggaccccauggagcagaacguggcugagcuguuacaguuucugcucguaaaggaccaauccaaauauccuauucgagaaucagagaugagagaauacaucgucaaggaguauaggaaucaguucccggagauucuucggcgugcggcagcccaucuggaaugcaucuuucgcuucgaguugagagaacuagauccagaggcucacacauacauacugcucaacaaacugggucccgugccuuuugaaggccuugaggagagucccaaugggccaaagaugggacuguugaugaugauucucggccagaucuuccugaacgguaaucaagccaaagaagcagagauuugggaaauguuauggaggauggggguucagcgggagcgacgccugagcaucuuuggcaacccuaagagacuacucucuguggaguucgucuggcagagguaucuggacuaccggcccgugacugauuguaagccaguagaauaugaguuuuucuggggaccucgcucccaucuugaaaccacgaaaaugaagaucuugaaauuuauggccaagauuuacaauaaagacccgauggauuggcccgagaaguacaacgaagcucuggaggaagacgccgcaagagcguucgcugagggcuggcaggcccucccacacuucaggcgucccuuuuucgaggaagcagccgcugaggugcccucaccagauagugaaguuagcuccuauucuucgaaauacgccccucauagcuggcccgagucacggcuggaguccaaggcacgaaaacuuguccaacuguuuuugcucauggacaguacaaagcugccgauaccaaagaaagggaucuuauauuacauuggaagagaaugcucuaagguguucccugaucugcuaaacagggcugcccgcacccucaaucacguguauggcacugagcuggucguucuugacccccggaaccacagcuacacauuguauaauagaagggaaauggaggaaaccgaggagaucguggauuccccaaaccgccccgguaauaacuuucugaugcaagugcucucauucauauuuauuauggggaaucaugcgcgagaaucugccguaugggcuuuccugcggggauuaggcguccaggcaggucguaaacacgugaucacuuguagauaccugagccagagguacaucgacagucuucgcguuccugacuccgauccggugcaguaugaguuugucuggggcccccgggccagauuggaaaccagcaagaugaaggcucucagguacguggcccgcauucaucgaaaagagccacaggacuggccucagcaguaucgggaagcaauggaggaugaggcgaacagagccgacguugggcacaggcaaaucuucgugcacaauuuucguuga

SEQ ID NO: 2398 - RNA, 2874 nt, Artificial Sequence
  derived and/or modified sequence opt4 from MAGE-E1_(MAGE1)__Homo_sapiens__AAM08354
augagccuggugagccagaacagcagaagaagaagaagaagaguggccaaggccaccgcccacaacagcagcuggggcgagaugcaggcccccaacgcccccggccugcccgccgacgugcccggcagcgacgugccccagggccccagcgacagccagauccugcagggccugugcgccagcgagggccccagcaccagcgugcugcccaccagcgccgagggccccagcaccuucgugccccccaccaucagcgaggccagcagcgccagcggccagcccaccaucagcgagggccccggcaccagcgugcugcccacccccagcgagggccugagcaccagcggcccccccaccaucagcaagggccugugcaccagcgugacccuggccgccagcgagggcagaaacaccagcagaccccccaccagcagcgaggagcccagcaccagcgugccccccaccgccagcgaggugcccagcaccagccugccccccacccccggcgagggcaccagcaccagcgugccccccaccgccuacgagggccccagcaccagcguggugcccacccccgacgagggccccagcaccagcgugcugcccacccccggcgagggccccggcaccagcgugccccuggccgccaccgagggccugagcaccagcgugcaggccacccccgacgagggccccagcaccagcgugccccccaccgccaccgagggccugagcacccccgugccccccaccagagacgagggccccagcaccagcgugcccgccacccccggcgagggccccagcaccagcgugcugcccgccgccagcgacggccagagcaucagccuggugcccaccagaggcaagggcagcagcaccagcgugccccccaccgccaccgagggccugagcaccagcgugcagcccaccgccggcgagggcagcagcaccagcgugccccccacccccggcggcggccugagcaccagcgugccccccaccgccaccgaggagcugagcaccagcgugccccccacccccggcgagggccccagcaccagcgugcugcccauccccggcgagggccugagcaccagcgugccccccaccgccagcgacggcagcgacaccagcgugccccccacccccggcgagggcgccagcacccuggugcagcccaccgcccccgacggccccggcagcagcgugcugcccaaccccggcgagggccccagcacccuguucagcagcagcgccagcguggacagaaaccccagcaagugcagccuggugcugcccagccccagagugaccaaggccagcguggacagcgacagcgagggccccaagggcgccgagggccccaucgaguucgaggugcugagagacugcgagagccccaacagcaucagcaucaugggccugaacaccagcagaguggccaucacccugaagccccaggaccccauggagcagaacguggccgagcugcugcaguuccugcuggugaaggaccagagcaaguaccccaucagagagagcgagaugagagaguacaucgugaaggaguacagaaaccaguuccccgagauccugagaagagccgccgcccaccuggagugcaucuucagauucgagcugagagagcuggaccccgaggcccacaccuacauccugcugaacaagcugggccccgugcccuucgagggccuggaggagagccccaacggccccaagaugggccugcugaugaugauccugggccagaucuuccugaacggcaaccaggccaaggaggccgagaucugggagaugcuguggagaaugggcgugcagagagagagaagacugagcaucuucggcaaccccaagagacugcugagcguggaguucguguggcagagauaccuggacuacagacccgugaccgacugcaagcccguggaguacgaguucuucuggggccccagaagccaccuggagaccaccaagaugaagauccugaaguucauggccaagaucuacaacaaggaccccauggacuggcccgagaaguacaacgaggcccuggaggaggacgccgccagagccuucgccgagggcuggcaggcccugccccacuucagaagacccuucuucgaggaggccgccgccgaggugcccagccccgacagcgaggugagcagcuacagcagcaaguacgccccccacagcuggcccgagagcagacuggagagcaaggccagaaagcuggugcagcuguuccugcugauggacagcaccaagcugcccauccccaagaagggcauccuguacuacaucggcagagagugcagcaagguguuccccgaccugcugaacagagccgccagaacccugaaccacguguacggcaccgagcugguggugcuggaccccagaaaccacagcuacacccuguacaacagaagagagauggaggagaccgaggagaucguggacagccccaacagacccggcaacaacuuccugaugcaggugcugagcuucaucuucaucaugggcaaccacgccagagagagcgccgugugggccuuccugagaggccugggcgugcaggccggcagaaagcacgugaucaccugcagauaccugagccagagauacaucgacagccugagagugcccgacagcgaccccgugcaguacgaguucguguggggccccagagccagacuggagaccagcaagaugaaggcccugagauacguggccagaauccacagaaaggagccccaggacuggccccagcaguacagagaggccauggaggacgaggccaacagagccgacgugggccacagacagaucuucgugcacaacuucagauga

SEQ ID NO: 2399 - RNA, 2874 nt, Artificial Sequence
  derived and/or modified sequence opt5 from MAGE-E1_(MAGE1)__Homo_sapiens__AAM08354
augagccuggugucccagaacucuagacggcgcagacggcgcgucgccaaggcuaccgcccacaauagcuccuggggcgagaugcaagcgcccaacgcuccugggcucccggccgacguucccggaucugaugugccucagggccccagcgacucccagauccugcaggggcuuugcgccucugaaggaccuagcacauccgugcugcccacgagcgcugagggcccuucuaccuucgucccgcccacaauuuccgaagccagcucugcuuccgggcaaccuaccaucagcgagggacccggcacaucugugcucccuacccccuccgaaggccugagcacauccgggccgccuaccauuucuaaaggacuuuguacgagcguuacccuggccgcguccgagggcagaaauacaagccggcccccuaccucuuccgaggaacccagcacaucugugcccccuaccgccagcgaggucccguccacgucucugcccccuacacccggggaaggaaccagcacauccgugccucccaccgcuuacgagggcccgagcaccucuguugugccuacacccgaugaggggccuuccacgagcguccuccccaccccuggagaaggccccggcacaucugugccgcuggccgcuaccgaggggcucuccacaagcgugcaggccaccccugacgaaggacccuccacgucugugcccccuacagcgaccgagggccugagcaccccgguucccccuacacgcgaugaagggcccuccaccucugugccugccacacccggagagggcccuagcacguccgugcuucccgcugccagcgacgggcagucuaucucccuggucccgaccagaggaaagggcagcucuacauccgugccucccaccgcuacagagggccucagcaccucuguucagccuacggccggggaaggaagcuccaccagcgugcccccgacaccuggcgggggacugucuaccuccgugcccccuacagccaccgaggaacuuagcacguccgucccucccacacccggcgaggggccgucuaccagcguucugcccauuccuggcgaaggacucuccacaucugugcccccuaccgcuagcgauggcuccgacaccucugugcccccuacaccgggggagggagcgagcacgcugguccaacccaccgccccugauggccccggguccagcguccugccuaaccccggagagggcccgucuacacucuuuuccagcucugcuuccguggaccggaauccuagcaaaugcucucugguucuucccagcccccgcgugaccaaggccuccgucgauuccgacagcgaagggccuaaaggcgccgagggacccaucgaguucgaagugcugagagauugugaaucuccuaacagcaucuccauuaugggccucaauacaucucggguugcuaucacccugaagccgcaggaccccauggagcagaacguggccgagcuucugcaguuucuccuggucaaggaccaaagcaaauauccuauucgcgaauccgagaugagagaauacaucgugaaggaguaucggaaucaguuccccgagauucugcgcagagcggcugcccaucucgaaugcaucuuucgguucgagcugagagaacuugauccugaggcccacacguacauucugcucaacaaacuggggcccgugccguuugaaggacuugaggagucuccuaauggccccaagauggggcugcucaugaugauccugggacagaucuuccugaacggcaaucaagcuaaagaagccgagauuugggaaaugcucuggcgcauggggguucagcgggagagacgccugagcaucuuuggcaacccuaagcggcuucuguccgucgaguucguguggcagagauaucucgacuaccgccccgugacagauuguaagccugucgaauaugaguuuuucuggggaccccggucucaucuggaaaccaccaaaaugaagauucugaaauuuauggcuaagaucuacaauaaagacccgauggauuggccugagaaguacaacgaagcccuugaggaagacgcggccagagcuuucgccgagggcuggcaggcucucccccacuuccgccggcccuuuuucgaggaagccgcggccgaggugccuagcccggauuccgaaguuagcucuuauuccagcaaauacgcuccccauucuuggccugaguccagacuggagagcaaggcccgcaagcuggugcaacucuuucugcuuauggacuccacaaaacugcccauuccuaagaaagggauccucuauuacaucggacgggaaugcucuaaggucuuccccgaucugcugaacagagcugcccggacccuuaaucacguguauggcacagagcucguugugcuggacccucgcaaccacagcuacacgcuguauaauagacgggaaauggaggaaaccgaggagauugucgauuccccgaacagacccgggaauaacuuucucaugcagguccugagcuucaucuuuauuaugggaaaucaugcccgcgaaucugcuguuugggcguuccuucggggccugggggugcaggccggcagaaaacacgucaucacaugucgcuaccucucccagagauacauugacagccugcgggugccugacucugaucccgugcaauaugaguuugucuggggaccucgcgcuagacuggaaaccagcaagaugaaggcccuucgguacguugcccgcauccauagaaaagagccccaggacuggccgcagcaguaucgggaagcuauggaggaugaggccaaccgcgcggacgugggccacagacaaaucuucgugcacaauuuucgguga

SEQ ID NO: 2400 - protein, 523 aa, Artificial Sequence
  MAGE-E2__Homo_sapiens__Q8TD90
MSLVSQNARHCSAEITADYGDGRGEIQATNASGSPTSMLVVDAPQCPQAPINSQCVNTSQAVQDPNDLEVLIDEQSRRLGALRVHDPLEDRSIALVNFMRMKSQTEGSIQQSEMLEFLREYSDQFPEILRRASAHLDQVFGLNLRVIDPQADTYNLVSKRGFQITDRIAESLDMPKASLLALVLGHILLNGNRAREASIWDLLLKVDMWDKPQRINNLFGNTRNLLTTDFVCMRFLEYWPVYGTNPLEFEFLWGSRAHREITKMEALKFVSDAHDEEPWSWPEEYNKALEGDKTKERSLTAGLEFWSEDTMNDKANDLVQLAISVTEEMLPIHQDELLAHTGKEFEDVFPNILNRATLILDMFYGLSLIEVDTSEHIYLLVQQPESEEEQVMLESLGRPTQEYVMPILGLIFLMGNRVKEANVWNLLRRFSVDVGRKHSITRKLMRQRYLECRPLSYSNPVEYELLWGPRAHHETIKMKVLEYMARLYRKRPQNWPEQYREAVEDEEARAKSEATIMFFLDPT

SEQ ID NO: 2401 - RNA, 1572 nt, Artificial Sequence
  MAGE-E2__Homo_sapiens__AAH93964
augucucugguaagccagaaugcacgccacuguagcgcagagaucacugcagauuacggcgacggcagaggugaaauacaagcuacuaacgccuccgggucccccaccuccaugcuagucguugaugccccccagugcccucaggcgccaaucaacucucagugugucaacacuucccaggccguucaggacccgaaugaccuggagguccugaucgacgagcaguccagacguuugggggcgcucaggguccaugacccucuagaagacaggucgauugcuuuggugaauuucaugagaaugaaaagccagacggaggggucuauccagcaguccgagaugcuggaguuucucagagaguacucagaucaguucccugagauccucagacgagccucagcucaccuggaccaggucuuuggguugaaccugagaguuauugauccucaggcugacaccuacaauuuagucagcaaacgggguuuccagaucaccgauaggauagcggagucccuggacaugccaaaagcaagucuccuggcccuaguccuaggccacauccucuugaaugggaaccgagcaagagaggccuccauuugggacuugcugcuaaaaguugauaugugggauaagccucagaggaucaacaaccucuuugggaacacaaggaaccuccucacuacugacuuugugugcaugcgauucuuggaguacuggccgguguauggcacuaauccccuugaguuugaguucuuguggggcucuagagcccacagggaaaucacaaagauggaagcccugaaguuugugucagaugcccaugaugaagaacccuggagcuggccagaagaauauaauaaggcccuggaaggugacaaaaccaaagaaagaagccugacugcuggcuuagaguucuggucggaggacacuaugaaugauaaggcaaaugauuugguccaguuggcuauuagugucacugaggagaugcugccuauacaucaggaugagcuauuggcucacacuggcaaagaauuugaggauguguucccaaauauccucaauagagcuacucuaauucuugauauguucuauggguugucucugauugagguugauaccagugagcacaucuaccuccuuguccagcaaccagaaucagaggaagagcaagugaugcuagagagccuggggagacccacucaagaauauguaaugccaauccuagguuugaucuuccugaugggcaaccgugucaaagaggccaaugucuggaacuugcuucgaagauuuaguguggauguagggagaaagcauuccaucacccguaagcuuaugagacagcgcuaucuggaaugcaggccacuguccuacucuaauccaguugaauaugagcuucuaugggguccucgagcucaccaugaaaccaucaaaaugaaagucuuggaguacauggccaggcucuacagaaagcgaccacagaacuggccagaacaauauagggaggcuguggaagaugaggaggccagagccaaaucugaggcaacuaucauguuuuuccuugaccccacguga

SEQ ID NO: 2402 - RNA, 1572 nt, Artificial Sequence
  derived and/or modified sequence opt1 from MAGE-E2__Homo_sapiens__AAH93964
augagccuggugucccagaacgcccgccacugcagcgccgagaucaccgcggacuacggcgacgggcggggcgagauccaggccaccaacgccuccgggagccccacguccaugcucgucguggacgccccgcagugcccccaggcccccaucaacagccagugcgugaacaccucccaggcgguccaggaccccaacgaccuggaggugcugaucgacgagcagagccgccggcucggcgcccugcgcgugcacgacccgcuggaggaccgguccaucgcccucgucaacuucaugcgcaugaagucccagaccgaggggagcauccagcagagcgagaugcuggaguuccugcgggaguacuccgaccaguuccccgagauccuccgccgggccagcgcgcaccuggaccagguguucggccugaaccuccgcgugaucgacccccaggccgacaccuacaaccuggucuccaagcggggcuuccagaucacggaccgcaucgccgagagccuggacaugcccaaggccucccuccuggcccuggugcucgggcacauccugcugaacggcaaccgggcgcgcgaggccagcaucugggaccuccugcugaagguggacaugugggacaagccgcagcggaucaacaaccucuucgggaacacccgcaaccugcugaccaccgacuucgucugcaugcgguuccucgaguacuggcccguguacggcacgaacccccuggaguucgaguuccugugggggucccgcgcccaccgggagaucaccaagauggaggcccucaaguucgugagcgacgcccacgacgaggagcccuggagcuggccggaggaguacaacaaggcgcuggagggcgacaagaccaaggagcgcucccugaccgccggccucgaguucuggagcgaggacacgaugaacgacaaggccaacgaccugguccagcuggccaucuccgugaccgaggagaugcuccccauccaccaggacgagcugcuggcccacaccgggaaggaguucgaggacguguuccccaacauccucaaccgggcgacccugauccuggacauguucuacggccucagccugaucgaggucgacacguccgagcacaucuaccugcucgugcagcagcccgagagcgaggaggagcaggucaugcuggagucccuggggcgcccgacccaggaguacgugaugcccauccucggccugaucuuccugaugggcaaccgcgugaaggaggccaacguguggaaccugcuccggcgcuucagcgucgacguggggcggaagcacuccaucacccgcaagcugaugcggcagcgcuaccuggagugccggccccucagcuacuccaaccccgucgaguacgagcugcuguggggcccgcgcgcccaccacgagaccaucaagaugaaggugcucgaguacauggcccggcuguaccgcaagcggccccagaacuggcccgagcaguaccgcgaggccguggaggacgaggaggcgcgggccaagagcgaggccacgaucauguucuuccuggaccccaccuga

SEQ ID NO: 2403 - RNA, 1572 nt, Artificial Sequence
  derived and/or modified sequence opt2 from MAGE-E2__Homo_sapiens__AAH93964
augucccucgucucccagaacgcccgccacugcuccgccgagaucaccgccgacuacggcgacggccgcggcgagauccaggccaccaacgccuccggcucccccaccuccaugcucgucgucgacgccccccagugcccccaggcccccaucaacucccagugcgucaacaccucccaggccguccaggaccccaacgaccucgagguccucaucgacgagcagucccgccgccucggcgcccuccgcguccacgacccccucgaggaccgcuccaucgcccucgucaacuucaugcgcaugaagucccagaccgagggcuccauccagcaguccgagaugcucgaguuccuccgcgaguacuccgaccaguuccccgagauccuccgccgcgccuccgcccaccucgaccaggucuucggccucaaccuccgcgucaucgacccccaggccgacaccuacaaccucgucuccaagcgcggcuuccagaucaccgaccgcaucgccgagucccucgacaugcccaaggccucccuccucgcccucguccucggccacauccuccucaacggcaaccgcgcccgcgaggccuccaucugggaccuccuccucaaggucgacaugugggacaagccccagcgcaucaacaaccucuucggcaacacccgcaaccuccucaccaccgacuucgucugcaugcgcuuccucgaguacuggcccgucuacggcaccaacccccucgaguucgaguuccucuggggcucccgcgcccaccgcgagaucaccaagauggaggcccucaaguucgucuccgacgcccacgacgaggagcccugguccuggcccgaggaguacaacaaggcccucgagggcgacaagaccaaggagcgcucccucaccgccggccucgaguucugguccgaggacaccaugaacgacaaggccaacgaccucguccagcucgccaucuccgucaccgaggagaugcuccccauccaccaggacgagcuccucgcccacaccggcaaggaguucgaggacgucuuccccaacauccucaaccgcgccacccucauccucgacauguucuacggccucucccucaucgaggucgacaccuccgagcacaucuaccuccucguccagcagcccgaguccgaggaggagcaggucaugcucgagucccucggccgccccacccaggaguacgucaugcccauccucggccucaucuuccucaugggcaaccgcgucaaggaggccaacgucuggaaccuccuccgccgcuucuccgucgacgucggccgcaagcacuccaucacccgcaagcucaugcgccagcgcuaccucgagugccgcccccucuccuacuccaaccccgucgaguacgagcuccucuggggcccccgcgcccaccacgagaccaucaagaugaagguccucgaguacauggcccgccucuaccgcaagcgcccccagaacuggcccgagcaguaccgcgaggccgucgaggacgaggaggcccgcgccaaguccgaggccaccaucauguucuuccucgaccccaccuga

SEQ ID NO: 2404 - RNA, 1572 nt, Artificial Sequence
  derived and/or modified sequence opt3 from MAGE-E2__Homo_sapiens__AAH93964
augagccuggugucccagaacgccagacacugcucugcugagaucaccgcagacuacggcgaugggaggggagaaauucaagccacaaaugcgucagguagucccacuagcaugcucgucguugacgcuccucaguguccacaggccccgauaaacucccagugcgugaauacgucucaagcaguacaggaucccaacgaccuugaggugcugaucgaugaacagucgcggcgcuugggcgccuuacgaguccaugacccucuggaggaucguucaauugcucuagugaauuucaugagaaugaaaagccagaccgaagggaguauccaacaguccgagaugcucgaguuucugagggaauauucugaccaguucccagagauucuucggcgcgcaagcgcccaccuggaucagguuuuuggauugaaccucagagugaucgacccccaagcugauacauacaaucuggucuccaagaggggcuuccagauaacugaccggaucgccgaaucacuggauaugccuaaggcgagucucuuagcacuggugcuuggucauauuuugcugaacgggaaucgcgcccgagaggcuagcaucugggaccuacuccugaaaguagacaugugggauaagccacagagaauuaacaaucuuuuuggaaacaccaggaaucuguugacaaccgacuucguuuguaugcgguuucucgaguauuggcccguguacggcacuaacccucuggaguucgaguuuuuauggggcucucgugcccaccgcgaaaucacaaaaauggaggcacugaaguucgucuccgaugcucaugacgaagaaccauggucauggccggaggaauauaauaaggcccucgagggggauaaaaccaaggaaagaagccuuacggcgggacuggaguuuuggagugaagacacuaugaacgauaaagccaacgacuuggugcaacuagcaauaucugugaccgaggagaugcugcccauucaccaggaugaacuccuggcucacacagguaaggaguucgaagacgucuuuccuaauauccuuaacagggccacucugauuuuggauauguucuacggccucucccugaucgagguugacaccagcgaacauaucuauuuacuggugcagcagccagagucggaggaggaacaaguaaugcuagaaucucucgggcggcccacacaggaguacgugaugccuauucugggacuuauauucuugaugggcaaucgagucaaagaggcuaacguguggaaucugcuccgcagauuuuccguugacguggguaggaagcacucaaucacccggaagcugaugcgccagagauaccuugaaugcaggccacugaguuauagcaaccccgucgaguacgaauugcucugggggccgcgugcccaucacgagacgauuaaaaugaaggugcuggaauauauggcacgguuauaccgaaaaagaccucagaauuggcccgagcaauauagggaggccguagaagaugaggaagcucgcgcgaaguccgaggcaacuaucauguucuuucuggacccaacauga

SEQ ID NO: 2405 - RNA, 1572 nt, Artificial Sequence
  derived and/or modified sequence opt4 from MAGE-E2__Homo_sapiens__AAH93964
augagccuggugagccagaacgccagacacugcagcgccgagaucaccgccgacuacggcgacggcagaggcgagauccaggccaccaacgccagcggcagccccaccagcaugcuggugguggacgccccccagugcccccaggcccccaucaacagccagugcgugaacaccagccaggccgugcaggaccccaacgaccuggaggugcugaucgacgagcagagcagaagacugggcgcccugagagugcacgacccccuggaggacagaagcaucgcccuggugaacuucaugagaaugaagagccagaccgagggcagcauccagcagagcgagaugcuggaguuccugagagaguacagcgaccaguuccccgagauccugagaagagccagcgcccaccuggaccagguguucggccugaaccugagagugaucgacccccaggccgacaccuacaaccuggugagcaagagaggcuuccagaucaccgacagaaucgccgagagccuggacaugcccaaggccagccugcuggcccuggugcugggccacauccugcugaacggcaacagagccagagaggccagcaucugggaccugcugcugaagguggacaugugggacaagccccagagaaucaacaaccuguucggcaacaccagaaaccugcugaccaccgacuucgugugcaugagauuccuggaguacuggcccguguacggcaccaacccccuggaguucgaguuccuguggggcagcagagcccacagagagaucaccaagauggaggcccugaaguucgugagcgacgcccacgacgaggagcccuggagcuggcccgaggaguacaacaaggcccuggagggcgacaagaccaaggagagaagccugaccgccggccuggaguucuggagcgaggacaccaugaacgacaaggccaacgaccuggugcagcuggccaucagcgugaccgaggagaugcugcccauccaccaggacgagcugcuggcccacaccggcaaggaguucgaggacguguuccccaacauccugaacagagccacccugauccuggacauguucuacggccugagccugaucgagguggacaccagcgagcacaucuaccugcuggugcagcagcccgagagcgaggaggagcaggugaugcuggagagccugggcagacccacccaggaguacgugaugcccauccugggccugaucuuccugaugggcaacagagugaaggaggccaacguguggaaccugcugagaagauucagcguggacgugggcagaaagcacagcaucaccagaaagcugaugagacagagauaccuggagugcagaccccugagcuacagcaaccccguggaguacgagcugcuguggggccccagagcccaccacgagaccaucaagaugaaggugcuggaguacauggccagacuguacagaaagagaccccagaacuggcccgagcaguacagagaggccguggaggacgaggaggccagagccaagagcgaggccaccaucauguucuuccuggaccccaccuga

SEQ ID NO: 2406 - RNA, 1572 nt, Artificial Sequence
  derived and/or modified sequence opt5 from MAGE-E2__Homo_sapiens__AAH93964
augagccuggugucccagaacgccagacacugcucugcugagaucaccgccgacuacggcgaugggcggggagaaauucaagcgacaaaugcuagcggcucccccacgucuaugcucgucguugacgccccucaguguccgcaggcccccaucaacagccagugcgugaauaccucccaagcugugcaggauccuaacgaccuggagguccuuauugaugaacagucucgcagacugggggcccuccgggugcaugacccccuggaggaucgcagcaucgcucuuguuaauuucaugagaaugaagucccagacagaaggaagcauucaacagucugagaugcuggaguuucuccgggaauauuccgaccaguucccugagauccugcgcagagccagcgcgcaccuggaucagguguuuggccucaaccugcgggucaucgacccccaagccgauaccuacaaucuugugucuaaacgcggguuccagauuacagacagaaucgcugaaucccuggauaugccuaaggccagccuccuggcucuuguucugggacauauucuccugaacggcaaucgggcccgcgaggcgucuaucugggaccugcuccugaaaguggacaugugggauaagccgcagagaauuaacaaucuuuuuggcaacacccggaaucugcucacaaccgacuucgucuguaugcgcuuucuggaguauuggcccguguacgggacgaacccucuugaguucgaguuucuguggggauccagagcccaccgggaaaucaccaaaauggaggcucucaaguucgugagcgaugcccaugacgaagaacccugguccuggccugaggaauauaauaaggcucuggagggcgauaaaacaaaggaaagaucucugaccgccgggcucgaguuuuggagcgaagacacaaugaacgauaaagccaacgaccugguccaacuugcuauuuccguuaccgaggagaugcugcccauccaccaggaugaacuccuggcgcacacgggaaaggaguucgaagacguguuuccgaauauccuuaaccgcgccacacugauucucgauauguucuacggccugagccugaucgagguggacaccucugaacauauuuaucuccugguccagcagccugaguccgaggaggaacaagugaugcuugaaagccuggggcggcccacacaggaguacguuaugccuauccucggacugauuuuccugaugggcaauagagugaaagaggcuaacgucuggaaucuucuccgccgguuuucuguggacguuggcagaaagcacagcaucacccgcaagcugaugcggcagagauaccuggaaugccgcccccucuccuauucuaaccccguggaguacgaacugcuuugggggccucgggcccaucacgagaccaucaaaaugaagguccuggaauauauggccagacucuaccgcaaacggccgcagaauuggcccgagcaauauagagaggcuguggaagaugaggaagcccgggcuaagagcgaggcgacaauuauguucuuucuggacccuacguga

SEQ ID NO: 2407 - protein, 307 aa, Artificial Sequence
  MAGE-F1__Homo_sapiens__Q9HAY2
MLQTPESRGLPVPQAEGEKDGGHDGETRAPTASQERPKEELGAGREEGAAEPALTRKGARALAAKALARRRAYRRLNRTVAELVQFLLVKDKKKSPITRSEMVKYVIGDLKILFPDIIARAAEHLRYVFGFELKQFDRKHHTYILINKLKPLEEEEEEDLGGDGPRLGLLMMILGLIYMRGNSAREAQVWEMLRRLGVQPSKYHFLFGYPKRLIMEDFVQQRYLSYRRVPHTNPPEYEFSWGPRSNLEISKMEVLGFVAKLHKKEPQHWPVQYREALADEADRARAKARAEASMRARASARAGIHLW

SEQ ID NO: 2408 - RNA, 924 nt, Artificial Sequence
  MAGE-F1__Homo_sapiens__CCDS3269.1
auguugcagacaccagagagcagggggcucccggucccgcaggccgagggggagaaggauggcggccaugauggugagacccgggccccgaccgccucgcaggagcgccccaaggaggagcuuggcgccgggagggaggagggggcugcggagcccgcccucacccggaaaggcgcgagggccuuggcggccaaagccuuggcaaggcgcagggccuaccgccggcugaaucggacgguggcggaguuggugcaguuccuccuggugaaagacaagaagaagagucccaucacacgcucggagauggugaaauacguuauuggagacuugaagauucuguucccggacaucaucgcaagggccgcagagcaucugcgguaugucuuugguuuugagcugaaacaguuugaccgcaagcaccacacuuacauccugaucaacaaacuaaaaccucuggaggaggaggaggaggaggaucugggaggagauggccccagauugggucuguuaaugaugauccugggccuuaucuauaugagagguaauagcgccagggaggcccaggucugggagaugcugcgucgguugggggugcaacccucaaaguaucauuuccucuuuggguauccgaagaggcuuauuauggaagauuuugugcagcagcgauaucucaguuacaggcgggugccucacaccaauccaccagaauaugaauucucuugggguccccgaagcaaccuggaaaucagcaagauggaaguccugggguucguggccaaacugcauaagaaggaaccgcagcacuggccagugcaguaccgugaggcccuagcagacgaggccgacagggccagagccaaggccagagcugaagccaguaugagggccagggccagugcuagggccggcauccaccucugguga

SEQ ID NO: 2409 - RNA, 924 nt, Artificial Sequence
  derived and/or modified sequence opt1 from MAGE-F1__Homo_sapiens__CCDS3269.1
augcugcagacccccgagagccgcggccucccggugccccaggccgagggggagaaggacggcgggcacgacggcgagacccgggcccccacggcgucccaggagcgccccaaggaggagcugggggccggccgggaggagggcgccgccgagccggcccugacccgcaagggggcgcgggcccucgccgccaaggcgcuggcccgccggcgcgccuaccggcgccugaaccggaccgucgccgagcucgugcaguuccugcuggugaaggacaagaagaagucccccaucacccgcagcgagauggucaaguacgugaucggcgaccucaagauccuguuccccgacaucaucgcccgggcggccgagcaccuccgcuacguguucggguucgagcugaagcaguucgaccggaagcaccacacguacauccugaucaacaagcugaagccccucgaggaggaggaggaggaggaccugggcggggacggcccgcgccugggccuccugaugaugauccuggggcucaucuacaugcggggcaacagcgcccgcgaggcccaggucugggagaugcugcggcgccugggggugcagcccuccaaguaccacuuccucuucggcuaccccaagcggcugaucauggaggacuucgugcagcagcgcuaccugagcuaccgccgggucccccacaccaacccgcccgaguacgaguucuccuggggcccccgcagcaaccucgagaucuccaagauggaggugcugggguucguggccaagcugcacaagaaggagccccagcacuggccgguccaguaccgggaggcgcucgccgacgaggccgaccgcgcccgggccaaggcgcgcgccgaggccagcaugcgggcccgcgccuccgcgcgggccggcauccaccugugguga

SEQ ID NO: 2410 - RNA, 924 nt, Artificial Sequence
  derived and/or modified sequence opt2 from MAGE-F1__Homo_sapiens__CCDS3269.1
augcuccagacccccgagucccgcggccuccccgucccccaggccgagggcgagaaggacggcggccacgacggcgagacccgcgcccccaccgccucccaggagcgccccaaggaggagcucggcgccggccgcgaggagggcgccgccgagcccgcccucacccgcaagggcgcccgcgcccucgccgccaaggcccucgcccgccgccgcgccuaccgccgccucaaccgcaccgucgccgagcucguccaguuccuccucgucaaggacaagaagaagucccccaucacccgcuccgagauggucaaguacgucaucggcgaccucaagauccucuuccccgacaucaucgcccgcgccgccgagcaccuccgcuacgucuucggcuucgagcucaagcaguucgaccgcaagcaccacaccuacauccucaucaacaagcucaagccccucgaggaggaggaggaggaggaccucggcggcgacggcccccgccucggccuccucaugaugauccucggccucaucuacaugcgcggcaacuccgcccgcgaggcccaggucugggagaugcuccgccgccucggcguccagcccuccaaguaccacuuccucuucggcuaccccaagcgccucaucauggaggacuucguccagcagcgcuaccucuccuaccgccgcgucccccacaccaacccccccgaguacgaguucuccuggggcccccgcuccaaccucgagaucuccaagauggagguccucggcuucgucgccaagcuccacaagaaggagccccagcacuggcccguccaguaccgcgaggcccucgccgacgaggccgaccgcgcccgcgccaaggcccgcgccgaggccuccaugcgcgcccgcgccuccgcccgcgccggcauccaccucugguga

SEQ ID NO: 2411 - RNA, 924 nt, Artificial Sequence
  derived and/or modified sequence opt3 from MAGE-F1__Homo_sapiens__CCDS3269.1
augcugcagacccccgagagcagaggccucccugugccacaagccgaaggggagaaggacggaggucacgauggcgaaacaagggcuccgacugcaucccaggagcggcccaaagaagaacuuggggccggacgcgaggaaggcgcggcugagccugcccugacgcgaaagggugcacgugccuuggcugcaaaagccuuagcuagaaggcgggccuaccgcagacugaacaggaccgucgcggagcuaguucaguuccuccuggugaaggacaaaaagaagucuccaaucacacggucagagaugguaaaauaugugauuggggaucuuaagauacuguuucccgacaucauugcacgcgccgcugagcauuugcgauacgucuucggauuugaacucaaacaguucgauagaaagcaccauacuuauauccugauuaauaaacugaagccucucgaggaagaggaagaggaggacuuaggcggcgaugggccaaggcugggacuuuugaugaugauccugggucuaauauacaugcggggcaacagugcccgugaagcacaagugugggagaugcuccgcagacuggggguucagcccagcaaguaucacuuucuuuucggauacccuaaaaggcugaucauggaagacuuugugcagcagcgguauuuguccuaccgacgcgucccacauaccaauccgcccgaguacgaguucucuuggggcccuagaucgaaccucgaaauuucaaagauggaggugcuggguuuuguagcuaaauuacacaagaaagaaccacaacacuggcccguucaguauagggaggcccuggcggaugaagccgaccgggcacgcgcuaaggccagagcugaggccagcaugagggcacgugccagugcucgggcggggauccaucucugguga

SEQ ID NO: 2412 - RNA, 924 nt, Artificial Sequence
  derived and/or modified sequence opt4 from MAGE-F1__Homo_sapiens__CCDS3269.1
augcugcagacccccgagagcagaggccugcccgugccccaggccgagggcgagaaggacggcggccacgacggcgagaccagagcccccaccgccagccaggagagacccaaggaggagcugggcgccggcagagaggagggcgccgccgagcccgcccugaccagaaagggcgccagagcccuggccgccaaggcccuggccagaagaagagccuacagaagacugaacagaaccguggccgagcuggugcaguuccugcuggugaaggacaagaagaagagccccaucaccagaagcgagauggugaaguacgugaucggcgaccugaagauccuguuccccgacaucaucgccagagccgccgagcaccugagauacguguucggcuucgagcugaagcaguucgacagaaagcaccacaccuacauccugaucaacaagcugaagccccuggaggaggaggaggaggaggaccugggcggcgacggccccagacugggccugcugaugaugauccugggccugaucuacaugagaggcaacagcgccagagaggcccaggugugggagaugcugagaagacugggcgugcagcccagcaaguaccacuuccuguucggcuaccccaagagacugaucauggaggacuucgugcagcagagauaccugagcuacagaagagugccccacaccaacccccccgaguacgaguucagcuggggccccagaagcaaccuggagaucagcaagauggaggugcugggcuucguggccaagcugcacaagaaggagccccagcacuggcccgugcaguacagagaggcccuggccgacgaggccgacagagccagagccaaggccagagccgaggccagcaugagagccagagccagcgccagagccggcauccaccugugguga

SEQ ID NO: 2413 - RNA, 924 nt, Artificial Sequence
  derived and/or modified sequence opt5 from MAGE-F1__Homo_sapiens__CCDS3269.1
augcugcagacccccgagagcagaggccucccugugccgcaagccgaaggggagaaggacggaggccacgauggggaaacacgggcucccacggccucccaggagcgcccuaaagaagaacugggagcgggcagagaggaaggggcugccgagcccgcccuuacccggaagggagcucgcgcccuggcugccaaagcgcucgccagacggcgcgcuuacagacggcugaaccgcacagucgccgaacuuguucaguuccugcucgugaaggacaaaaagaagucuccuaucaccagaagcgagauggugaaauaugucauuggcgaucugaagauccuguuucccgacauuaucgcucgggccgcggagcaucuccgcuacguguucggcuuugaacugaaacaguucgauagaaagcaccauacauauauucuuaucaauaaacugaagccucucgaggaagaggaagaggaggaccuugggggagauggcccgcggcuggggcugcucaugaugauccugggacugauuuacaugcgcggcaacuccgccagagaagcucaaguuugggagaugcuccggagacugggggugcagcccucuaaguaucacuuucuuuucggauacccuaaacgccugaucauggaagacuuuguccagcagcgguaucucagcuacagacgcgugccccauaccaauccucccgaguacgaguucuccuggggcccgcggucuaaccuggagauuagcaagauggagguucuuggcuuuguggccaaacugcacaagaaagaaccucaacacuggcccguccaguauagagaggcucucgccgaugaagccgaccgcgcucgggcgaaggccagagcugaggccuccaugcgcgcccgggcuagcgccagagcggggauccaucugugguga

SEQ ID NO: 2414 - protein, 219 aa, Artificial Sequence
  MAGE-H1__Homo_sapiens__Q9H213
MPRGRKSRRRRNARAAEENRNNRKIQASEASETPMAASVVASTPEDDLSGPEEDPSTPEEASTTPEEASSTAQAQKPSVPRSNFQGTKKSLLMSILALIFIMGNSAKEALVWKVLGKLGMQPGRQHSIFGDPKKIVTEEFVRRGYLIYKPVPRSSPVEYEFFWGPRAHVESSKLKVMHFVARVRNRCSKDWPCNYDWDSDDDAEVEAILNSGARGYSAP

SEQ ID NO: 2415 - RNA, 660 nt, Artificial Sequence
  MAGE-H1__Homo_sapiens__AAD31314
augccucggggacgaaagagucggcgccgccguaaugcgagagccgcagaagagaaccgcaacaaucgcaaaauccaggccucagaggccuccgagaccccuauggccgccucugugguagcgagcacccccgaagacgaccugagcggccccgaggaagacccgagcacuccagaggaggccucuaccaccccugaagaagccucgagcacugcccaagcacaaaagccuucagugccccggagcaauuuucagggcaccaagaaaagucuccugaugucuauauuagcgcucaucuucaucaugggcaacagcgccaaggaagcucuggucuggaaagugcuggggaaguuaggaaugcagccuggacgucagcacagcaucuuuggagauccgaagaagaucgucacagaagaguuugugcgcagaggguaccugauuuauaaaccggugccccguagcaguccgguggaguaugaguucuucugggggccccgagcacacguggaaucgagcaaacugaaagucaugcauuuuguggcaaggguucguaaccgaugcucuaaagacuggccuuguaauuaugacugggauucggacgaugaugcagagguugaggcuauccucaauucaggugcuagggguuauuccgccccuuaa

SEQ ID NO: 2416 - RNA, 660 nt, Artificial Sequence
  derived and/or modified sequence opt1 from MAGE-H1__Homo_sapiens__AAD31314
augccccgcggccgcaagagccggcggcgccggaacgcccgcgccgcggaggagaaccggaacaaccgcaagauccaggccuccgaggccagcgagaccccgauggccgccuccguggucgcgagcacccccgaggacgaccuguccgggcccgaggaggaccccagcacgccggaggaggccuccaccacccccgaggaggccagcuccaccgcccaggcgcagaagcccagcgugccccgguccaacuuccagggcacgaagaagucccuccugaugagcauccuggcccucaucuucaucauggggaacagcgccaaggaggcccugguguggaagguccugggcaagcucgggaugcagccgggccgccagcacuccaucuucggcgaccccaagaagaucgugaccgaggaguucgugcggcgcggguaccugaucuacaagcccgucccccggagcuccccgguggaguacgaguucuucuggggcccccgcgcccacguggagagcuccaagcugaaggucaugcacuucguggcgcgggugcgcaaccggugcagcaaggacuggcccugcaacuacgacugggacagcgacgacgacgccgaggucgaggccauccucaacuccggggcccgcggcuacagcgcccccuga

SEQ ID NO: 2417 - RNA, 660 nt, Artificial Sequence
  derived and/or modified sequence opt2 from MAGE-H1__Homo_sapiens__AAD31314
augccccgcggccgcaagucccgccgccgccgcaacgcccgcgccgccgaggagaaccgcaacaaccgcaagauccaggccuccgaggccuccgagacccccauggccgccuccgucgucgccuccacccccgaggacgaccucuccggccccgaggaggaccccuccacccccgaggaggccuccaccacccccgaggaggccuccuccaccgcccaggcccagaagcccuccgucccccgcuccaacuuccagggcaccaagaagucccuccucauguccauccucgcccucaucuucaucaugggcaacuccgccaaggaggcccucgucuggaagguccucggcaagcucggcaugcagcccggccgccagcacuccaucuucggcgaccccaagaagaucgucaccgaggaguucguccgccgcggcuaccucaucuacaagcccgucccccgcuccucccccgucgaguacgaguucuucuggggcccccgcgcccacgucgaguccuccaagcucaaggucaugcacuucgucgcccgcguccgcaaccgcugcuccaaggacuggcccugcaacuacgacugggacuccgacgacgacgccgaggucgaggccauccucaacuccggcgcccgcggcuacuccgcccccuga

SEQ ID NO: 2418 - RNA, 660 nt, Artificial Sequence
  derived and/or modified sequence opt3 from MAGE-H1__Homo_sapiens__AAD31314
augcccagaggcaggaagucgcggcgccgacguaacgccagagcugcagaggaaaauaggaacaaucggaaaauccaggccuccgaggcgucugaaaccccuauggcugccucaguggucgcaaguacaccagaggacgaucugagcgggccggaagaggaccccuccacuccugaggaagccucuacgaccccagaggaagcuagcucaacagcacaagcccagaagcccagcguuccucgcaguaacuuccagggaacuaaaaagucccuccuuaugucuauucuggcuuugauauuuaucauggguaauagcgccaaagaggcguuaguguggaagguacugggcaagcuagggaugcagccaggaagacaacacuccauuuucggcgaucccaaaaagaucgugaccgaggaauuugucaggcgggguuaccucauuuauaaaccugugccacgcucaaguccgguugaguacgaguucuuuugggggccccgagcacauguggaaagcucuaagcugaaagucaugcacuucguggccagaguaaggaaccggugcuccaaggacuggccuuguaauuaugauugggacucagaugacgaugcugaaguugaggccauccuuaacagcggagcacguggcuacagugcuccauga

SEQ ID NO: 2419 - RNA, 660 nt, Artificial Sequence
  derived and/or modified sequence opt4 from MAGE-H1__Homo_sapiens__AAD31314
augcccagaggcagaaagagcagaagaagaagaaacgccagagccgccgaggagaacagaaacaacagaaagauccaggccagcgaggccagcgagacccccauggccgccagcgugguggccagcacccccgaggacgaccugagcggccccgaggaggaccccagcacccccgaggaggccagcaccacccccgaggaggccagcagcaccgcccaggcccagaagcccagcgugcccagaagcaacuuccagggcaccaagaagagccugcugaugagcauccuggcccugaucuucaucaugggcaacagcgccaaggaggcccugguguggaaggugcugggcaagcugggcaugcagcccggcagacagcacagcaucuucggcgaccccaagaagaucgugaccgaggaguucgugagaagaggcuaccugaucuacaagcccgugcccagaagcagccccguggaguacgaguucuucuggggccccagagcccacguggagagcagcaagcugaaggugaugcacuucguggccagagugagaaacagaugcagcaaggacuggcccugcaacuacgacugggacagcgacgacgacgccgagguggaggccauccugaacagcggcgccagaggcuacagcgcccccuga

SEQ ID NO: 2420 - RNA, 660 nt, Artificial Sequence
  derived and/or modified sequence opt5 from MAGE-H1__Homo_sapiens__AAD31314
augcccagaggccggaagucucgcagacggcgcaacgccagagcugccgaggaaaaucggaacaaucgcaaaauccaggcguccgaggcuucugaaaccccuauggccgccagcguggucgcuuccacaccggaggacgaucugucugggcccgaagaggacccuagcacgcccgaggaagccuccaccacaccugaggaagcuagcagcaccgcccaagcgcagaagcccuccguuccuagaagcaacuuccagggaacaaagaagucucuccugauguccauucuugcccugaucuuuauuaugggcaauagcgcuaaagaggcccucguguggaaggugcuggggaaacuuggaaugcagccgggccggcaacacucuaucuucggggaucccaaaaagauugucaccgaggaauuugugcgcagaggauaccugaucuauaaaccuguuccccgguccagcccuguggaguacgaguucuuuuggggcccccgcgcucaugucgaaucuuccaagcucaaagugaugcacuucguugccagagugcggaaccgcugcagcaaggacuggccguguaauuaugauugggacuccgaugacgaugcggaagucgaggccauccugaacucuggcgcuagaggguacagcgccccuuga

SEQ ID NO: 2421 - protein, 1249 aa, Artificial Sequence
  MAGEL2__Homo_sapiens__Q9UJ55
MSQLSKNLGDSSPPAEAPKPPVYSRPTVLMRAPPASSRAPPVPWDPPPIDLQASLAAWQAPQPAWEAPQGQLPAPVVPMTQPPALGGPIVPAPPLGGPMGKPPTPGVLMVHPPPPGAPMAQPPTPGVLMVHPSAPGAPMAHPPPPGTPMSHPPPPGTPMAHPPPPGTPMAHPPPPGTPMVHPPPPGTPMAHPPPPGTPMAHPPPPGTPMAHPPPPGTPMAHPPPPGTPMAQPPAPGVLMAQPLTPGVLMVQPAAPGAPMVQPPPAAMMTQPQPSGAPMAKPPGPGVLMIHPPGARAPMTQPPASGAPMAQPAAPPAQPMAPPAQPMASWAPQAQPLILQIQSQVIRAPPQVPQGPQAPPAQLATPPGWQATSPGWQATQQGWQATPLTWQTTQVTWQAPAVTWQVPPPMRQGPPPIRPGPPPIRPGPPPVRQAPPLIRQAPPVIRQAPPVIRQAPPVIRQAPAVIRQAPPVIRQAPPVIRQAPPVIRQAPPLIRQAPPPIRPAPQVLATQPPLWQALPPPPPLRQAPQARLPAPQVQAAPQVPTAPPATQVPAAPPAGPQVPQPVLPAPLSAPLSAPQAVHCPSIIWQAPKGQPPVPHEIPTSMEFQEVQQTQALAWQAQKAPTHIWQPLPAQEAQRQAPPLVQLEQPFQGAPPSQKAVQIQLPPQQAQASGPQAEVPTLPLQPSWQAPPAVLQAQPGPPVAAANFPLGSAKSLMTPSGECRASSIDRRGSSKERRTSSKERRAPSKDRMIFAATFCAPKAVSAARAHLPAAWKNLPATPETFAPSSSVFPATSQFQPASLNAFKGPSAASETPKSLPYALQDPFACVEALPAVPWVPQPNMNASKASQAVPTFLMATAAAPQATATTQEASKTSVEPPRRSGKATRKKKHLEAQEDSRGHTLAFHDWQGPRPWENLNLSDWEVQSPIQVSGDWEHPNTPRGLSGWEGPSTSRILSGWEGPSASWALSAWEGPSTSRALGLSESPGSSLPVVVSEVASVSPGSSATQDNSKVEAQPLSPLDERANALVQFLLVKDQAKVPVQRSEMVKVILREYKDECLDIINRANNKLECAFGYQLKEIDTKNHAYIIINKLGYHTGNLVASYLDRPKFGLLMVVLSLIFMKGNCVREDLIFNFLFKLGLDVRETNGLFGNTKKLITEVFVRQKYLEYRRIPYTEPAEYEFLWGPRAFLETSKMLVLRFLAKLHKKDPQSWPFHYLEALAECEWEDTDEDEPDTGDSAHGPTSRPPPR

SEQ ID NO: 2422 - RNA, 3750 nt, Artificial Sequence
  MAGEL2__Homo_sapiens__CCDS73700.1
augucgcagcuaaguaagaaucugggugacucgaguccuccggcggaggccccgaagccgccugucuauagccgcccuacgguucugaugcgggccccgcccgcuuccucccgggcuccgccagucccuugggauccaccuccaauugacuugcaggcuucauuggccgcuuggcaggcaccucagccugccugggaggccccacagggccagcugcccgccccggugguuccgaugacccagccuccugcccuagggggcccgauagucccggcucccccgcuggggggcccgauggguaagccuccgacucccgggguccugauggugcauccuccaccuccgggagccccgauggcccagccuccgaccccgggaguccugauggugcauccuucagcucccggagcucccauggcccauccuccuccuccggggaccccaaugucccacccucccccuccggggaccccaauggcccauccuccuccuccggggaccccgauggcccauccuccuccuccggggaccccgauggugcauccuccuccuccggggaccccgauggcucauccucccccuccggggacaccgauggcucauccucccccuccggggacaccgauggcucauccuccaccuccggggacaccgauggcucauccucccccuccggguacaccgauggcccagccuccagcuccgggaguccugauggcccagccucugacuccgggaguccugaugguccagccugcugcuccgggagcaccgaugguccagccgccuccagcagccaugaugacccagccucagccuucaggagcaccgauggccaagccuccagguccaggaguccugaugauucauccuccaggugcgagagcuccgaugacccagccuccagcuucaggagcaccgauggcacagccggcggccccaccugcacagccgauggccccaccugcacagccgauggcuucuugggccccgcaggcucagccucugauccugcaaauccagucucaaguuauaagggcuccuccgcagguuccccagggcccgcaggcacccccagcgcagcuagccacacccccgggcuggcaggcgaccucgccaggauggcaggccacgcagcaaggcuggcaggccacuccccugacuuggcagaccacgcaggucaccuggcaggcaccagccguuaccuggcaggugccgccgcccaugcgccaggggcccccgcccauccgcccuggcccaccacccauccgcccuggcccaccaccggugcgacaggccccaccgcugauccgccaggccccaccggugauccgccaggccccacccgugauccgccaggccccacccgugauccgccaggcccccgcugugauccgccaggccccaccugugauccgccaggccccaccugugauccgccaggcuccaccugugauccgccaggccccgccgcugauccgccaggcgccgccgcccauccgaccugccccacagguccuggccacccagccaccgcucuggcaggcccugccacccccaccuccacugcggcaggccccgcaggcuaggcugccggccccgcaggugcaggcggcgccgcaggugccuacggccccaccugcuacgcagguacccgcggcgccgcccgcuggcccgcaggugccccagccugugcugccggccccgcugucugccccacugucugccccgcaggcugugcacugcccuuccaucaucuggcaggcccccaaaggucagcccccggugccacacgagauuccaacgucaauggaauuccaggaggugcagcagacacaggcgcuggccuggcaggcccagaaggcccccacucacaucuggcagccccugccugcccaggaggcccagaggcaggcuccccccuugguccagcuggagcagcccuuucagggagccccgcccucccaaaaagccgugcaaauccagcuacccccccagcaggcccaggcaucggguccgcaagcggaggugcccacacugccgcuccagccuuccuggcaggcaccgccugcagucuugcaggcccagcccggacccccgguagcagcggcaaauuuuccccugggcuccgcuaaaucauugaugacuccaucaggagaaugcagggccucuucuauagaccgcaggggcuccucuaaagagcgcaggaccuccucgaaggagcgcagggccccuucaaaagaccgcaugaucuuugcugccaccuucugugcucccaaggcagugucagcugcgcgagcacaccugccagcugccuggaaaaaccugccugccacaccggagaccuuugcucccuccucaagugucuucccagcuaccucccaguuucagccugccucucugaaugccuuuaaaggccccucugcugccucagagaccccaaagucacugccauaugcucugcaggaucccuuugccuguguagaggcccugccugcaguuccaugggucccacagcccaauaugaaugccucaaaggcaucgcaggcagugcccaccuuccugauggcuacagcagcugccccccaggcaacugccaccacucaagaggccuccaagaccuccgucgagccgccacgccgcuccggcaaggccacccggaagaagaagcaucuggaagcccaagaggacagccguggccacacgcuagccuuucaugacuggcagggcccaaggcccugggagaaucuaaaucugagugacugggagguccaaagcccuauccaggucucgggugacugggagcacccaaacaccccccguggccugagugguugggagggcccuagcaccuccaggauccugaguggcugggaagggcccagcgcauccugggcccugagugccugggagggcccgagcaccuccagggcccugggucucucugaaagcccagggagcucucugcccguaguugugucugaggucgcaagugucucuccgggauccagugccacccaggauaauuccaagguggaggcacagcccuugucucccuuggaugagagggcaaaugcguuggugcaguuccucuuagucaaggaccaagccaaggugccuguccagcgcucggagauggugaaagucauccuccgagaguauaaagaugagugcuuagauaucaucaaccgugccaacaauaagcuggagugugccuuugguuaucaauugaaagaaauugauaccaaaaaccacgccuauauuaucaucaacaagcugggcuaccauacagggaauuugguggcauccuauuuagacaggcccaaguuuggccuucugaugguggucuugagccucaucuuuaugaaaggcaacugugucagggaggaucugaucuuuaauuuucuguucaaguuaggguuggauguccgggagacaaacggucucuuuggaaauacuaagaagcucaucaccgaaguguuugucaggcagaaguaccuagaguacaggcgaaucccuuacacugagcccgcagaguaugaguuccucuggggcccucgagcauuccuggaaaccagcaagaugcuuguccugagguuuuuggccaagcuccauaagaaagauccacagagcuggccauuccauuaccuugaagcgcucgcagagugugagugggaagacacagaugaggaugaaccugacaccggugacagugcccacggccccaccagcaggcccccuccccgcuaa

SEQ ID NO: 2423 - RNA, 3750 nt, Artificial Sequence
  derived and/or modified sequence opt1 from MAGEL2__Homo_sapiens__CCDS73700.1
augagccagcuguccaagaaccucggcgacagcucccccccggccgaggcccccaagccccccguguacagccgcccgaccguccugaugcgggcgccccccgccuccagccgcgcccccccggugcccugggacccccccccgaucgaccugcaggccucccucgccgcguggcaggccccccagcccgccugggaggccccccaggggcagcugccggcgcccgugguccccaugacccagcccccggcccugggcgggcccaucgugcccgcccccccgcucggcgggcccaugggcaagccccccacgccgggcgugcugaugguccacccccccccgcccggggcccccauggcccagcccccgacccccggcgugcugauggugcaccccagcgcgcccggggccccgauggcccaccccccccccccgggcacccccaugucccacccccccccgcccgggacccccauggcccaccccccgccccccggcacgcccauggcccacccgccccccccgggcacccccaugguccacccccccccgcccgggacccccauggcgcaccccccgccccccggcacccccauggcccacccgcccccccccgggacgccgauggcccaccccccccccccgggcacccccauggcccacccccccccgcccggcacccccauggcccagcccccggcgcccggggugcucauggcccagccccugaccccgggcgugcugaugguccagcccgccgcccccggggcccccauggugcagccgccccccgcggccaugaugacgcagccccagccgagcggcgcccccauggccaagccccccgggccgggcgugcucaugauccacccccccggcgcgcgggcccccaugacccagccgcccgccuccggggcccccauggcccagcccgcggccccgcccgcccagcccauggcccccccggcccagcccauggcgagcugggccccccaggcccagccccugauccugcagauccagucccaggucauccgcgccccgccccaggugccccagggcccgcaggccccccccgcgcagcucgccacccccccgggguggcaggccaccagccccggcuggcaggccacgcagcagggguggcaggcgaccccccugaccuggcagaccacgcaggugaccuggcaggcccccgccgucaccuggcaggugccgccccccaugcggcagggccccccgcccauccgccccggccccccgcccauccggcccgggcccccgcccgugcgccaggcccccccccugauccggcaggccccgcccgucauccgccaggcgcccccggugauccggcaggccccccccgugauccgccaggcccccgccgucauccggcaggccccgcccgugauccgccaggcgccccccgucauccggcaggccccgcccgugauccgccaggcccccccccucauccggcaggccccgccccccauccgccccgccccgcaggugcuggcgacccagcccccccuguggcaggcccuccccccgccccccccccugcggcaggccccgcaggcccgccugcccgcgccccagguccaggccgccccccaggugccgacggccccccccgccacccaggugccggcggccccccccgccggcccccaggucccgcagcccgugcuccccgccccccuguccgccccgcugagcgcgccccaggccgugcacugccccuccaucaucuggcaggcccccaaggggcagccgcccgucccccacgagauccccaccagcauggaguuccaggaggugcagcagacccaggcccucgccuggcaggcgcagaaggccccgacgcacaucuggcagccccugcccgcccaggaggcccagcggcaggcccccccgcuggugcagcucgagcagcccuuccagggcgcgccccccucccagaaggccguccagauccagcugccgccccagcaggcccaggccagcgggccccaggcggaggugcccacccugccgcuccagcccagcuggcaggcccccccggccgugcugcaggcccagcccggcccccccgucgccgcggccaacuucccgcugggcuccgccaagagccucaugacccccuccggggagugccgcgccagcuccaucgaccgccggggcagcuccaaggagcgccggaccagcuccaaggagcgccgggcccccagcaaggaccgcaugaucuucgcggccacguucugcgcccccaaggccguguccgccgcgcgggcccaccugccggccgccuggaagaaccugcccgcgacccccgagaccuucgcccccagcuccagcguguucccggccaccucccaguuccagcccgccagccucaacgccuucaaggggcccuccgcggccagcgagacgcccaagucccugccguacgcccugcaggaccccuucgccugcgucgaggcccuccccgcggugcccugggugccgcagcccaacaugaacgccagcaaggccagccaggccguccccaccuuccugauggccaccgcggccgccccccaggccaccgcgaccacgcaggaggccuccaagaccagcguggagccgccccgccgguccggcaaggccacccgcaagaagaagcaccuggaggcccaggaggacagccggggccacacccucgccuuccacgacuggcaggggccccgccccugggagaaccugaaccuguccgacugggaggugcagagcccgauccaggucuccggcgacugggagcaccccaacacgccccgggggcucagcggcugggaggggccguccaccagccgcauccuguccggcugggagggccccagcgcguccugggcccugagcgccugggaggggcccuccaccagccgggcccugggccucuccgagagccccgggagcucccugccggugguggucagcgagguggccuccgugagccccggcuccagcgcgacccaggacaacuccaaggucgaggcccagccccugagcccccucgacgagcgcgccaacgcccuggugcaguuccugcucgugaaggaccaggccaaggucccggugcagcgguccgagauggugaaggucauccugcgcgaguacaaggacgagugccuggacaucaucaaccgggcgaacaacaagcucgagugcgccuucggguaccagcugaaggagaucgacacgaagaaccacgccuacaucaucaucaacaagcugggcuaccacaccggcaaccucguggccagcuaccuggaccgccccaaguucgggcugcucauggugguccugucccugaucuucaugaagggcaacugcgugcgcgaggaccucaucuucaacuuccuguucaagcuggggcucgacgugcgggagaccaacggccuguucgggaacaccaagaagcugaucacggaggucuucgugcgccagaaguaccucgaguaccggcgcauccccuacaccgagcccgccgaguacgaguuccuguggggcccgcgggcguuccuggagaccagcaagaugcucgugcugcgcuuccuggccaagcuccacaagaaggacccccaguccuggcccuuccacuaccuggaggcccuggccgagugcgagugggaggacaccgacgaggacgagcccgacacgggcgacagcgcgcacgggccgaccucccggccccccccccgcuga

SEQ ID NO: 2424 - RNA, 3750 nt, Artificial Sequence
  derived and/or modified sequence opt2 from MAGEL2__Homo_sapiens__CCDS73700.1
augucccagcucuccaagaaccucggcgacuccuccccccccgccgaggcccccaagccccccgucuacucccgccccaccguccucaugcgcgccccccccgccuccucccgcgccccccccguccccugggaccccccccccaucgaccuccaggccucccucgccgccuggcaggccccccagcccgccugggaggccccccagggccagcuccccgcccccgucguccccaugacccagccccccgcccucggcggccccaucguccccgcccccccccucggcggccccaugggcaagccccccacccccggcguccucaugguccacccccccccccccggcgcccccauggcccagccccccacccccggcguccucaugguccaccccuccgcccccggcgcccccauggcccacccccccccccccggcacccccaugucccacccccccccccccggcacccccauggcccacccccccccccccggcacccccauggcccacccccccccccccggcacccccaugguccacccccccccccccggcacccccauggcccacccccccccccccggcacccccauggcccacccccccccccccggcacccccauggcccacccccccccccccggcacccccauggcccacccccccccccccggcacccccauggcccagccccccgcccccggcguccucauggcccagccccucacccccggcguccucaugguccagcccgccgcccccggcgcccccaugguccagcccccccccgccgccaugaugacccagccccagcccuccggcgcccccauggccaagccccccggccccggcguccucaugauccacccccccggcgcccgcgcccccaugacccagccccccgccuccggcgcccccauggcccagcccgccgccccccccgcccagcccauggccccccccgcccagcccauggccuccugggccccccaggcccagccccucauccuccagauccagucccaggucauccgcgcccccccccaggucccccagggcccccaggccccccccgcccagcucgccaccccccccggcuggcaggccaccucccccggcuggcaggccacccagcagggcuggcaggccaccccccucaccuggcagaccacccaggucaccuggcaggcccccgccgucaccuggcagguccccccccccaugcgccagggccccccccccauccgccccggccccccccccauccgccccggccccccccccguccgccaggcccccccccucauccgccaggccccccccgucauccgccaggccccccccgucauccgccaggccccccccgucauccgccaggcccccgccgucauccgccaggccccccccgucauccgccaggccccccccgucauccgccaggccccccccgucauccgccaggcccccccccucauccgccaggcccccccccccauccgccccgccccccagguccucgccacccagcccccccucuggcaggcccucccccccccccccccccuccgccaggccccccaggcccgccuccccgccccccagguccaggccgccccccagguccccaccgccccccccgccacccagguccccgccgccccccccgccggcccccaggucccccagcccguccuccccgccccccucuccgccccccucuccgccccccaggccguccacugccccuccaucaucuggcaggcccccaagggccagccccccgucccccacgagauccccaccuccauggaguuccaggagguccagcagacccaggcccucgccuggcaggcccagaaggcccccacccacaucuggcagccccuccccgcccaggaggcccagcgccaggcccccccccucguccagcucgagcagcccuuccagggcgccccccccucccagaaggccguccagauccagcuccccccccagcaggcccaggccuccggcccccaggccgagguccccacccucccccuccagcccuccuggcaggccccccccgccguccuccaggcccagcccggcccccccgucgccgccgccaacuucccccucggcuccgccaagucccucaugacccccuccggcgagugccgcgccuccuccaucgaccgccgcggcuccuccaaggagcgccgcaccuccuccaaggagcgccgcgcccccuccaaggaccgcaugaucuucgccgccaccuucugcgcccccaaggccgucuccgccgcccgcgcccaccuccccgccgccuggaagaaccuccccgccacccccgagaccuucgcccccuccuccuccgucuuccccgccaccucccaguuccagcccgccucccucaacgccuucaagggccccuccgccgccuccgagacccccaagucccuccccuacgcccuccaggaccccuucgccugcgucgaggcccuccccgccguccccugggucccccagcccaacaugaacgccuccaaggccucccaggccguccccaccuuccucauggccaccgccgccgccccccaggccaccgccaccacccaggaggccuccaagaccuccgucgagcccccccgccgcuccggcaaggccacccgcaagaagaagcaccucgaggcccaggaggacucccgcggccacacccucgccuuccacgacuggcagggcccccgccccugggagaaccucaaccucuccgacugggagguccagucccccauccaggucuccggcgacugggagcaccccaacaccccccgcggccucuccggcugggagggccccuccaccucccgcauccucuccggcugggagggccccuccgccuccugggcccucuccgccugggagggccccuccaccucccgcgcccucggccucuccgagucccccggcuccucccuccccgucgucgucuccgaggucgccuccgucucccccggcuccuccgccacccaggacaacuccaaggucgaggcccagccccucuccccccucgacgagcgcgccaacgcccucguccaguuccuccucgucaaggaccaggccaagguccccguccagcgcuccgagauggucaaggucauccuccgcgaguacaaggacgagugccucgacaucaucaaccgcgccaacaacaagcucgagugcgccuucggcuaccagcucaaggagaucgacaccaagaaccacgccuacaucaucaucaacaagcucggcuaccacaccggcaaccucgucgccuccuaccucgaccgccccaaguucggccuccucauggucguccucucccucaucuucaugaagggcaacugcguccgcgaggaccucaucuucaacuuccucuucaagcucggccucgacguccgcgagaccaacggccucuucggcaacaccaagaagcucaucaccgaggucuucguccgccagaaguaccucgaguaccgccgcauccccuacaccgagcccgccgaguacgaguuccucuggggcccccgcgccuuccucgagaccuccaagaugcucguccuccgcuuccucgccaagcuccacaagaaggacccccaguccuggcccuuccacuaccucgaggcccucgccgagugcgagugggaggacaccgacgaggacgagcccgacaccggcgacuccgcccacggccccaccucccgcccccccccccgcuga

SEQ ID NO: 2425 - RNA, 3750 nt, Artificial Sequence
  derived and/or modified sequence opt3 from MAGEL2__Homo_sapiens__CCDS73700.1
augagccagcuguccaagaaccucggcgacucuucacccccugccgaggcuccaaaaccgcccguguacaguagaccuaccguccuuaugagggcaccacccgccagcucccgggcgccuccaguucccugggauccuccaccgaucgaccugcaggcuucuuuggccgcauggcaagcuccccagccugccugggaagcaccacaggggcaauuacccgccccugugguaccaaugacacagcccccggcucugggagguccuauugugcccgccccaccucuaggcgggcccaugggaaagccacccacuccuggcguccucauggugcacccaccgcccccuggugcgccaauggcacagcccccuacgccagggguucugauggugcaucccucggccccgggagcuccuauggcccacccacccccucccggcaccccaaugucacauccucccccaccgggcacaccuauggcacacccaccacccccugggacuccaauggcucaucccccuccgccaggaacccccaugguccacccuccacccccugguacaccgauggcccaucccccaccucccggcaccccaauggcgcacccucccccaccggggacuccuauggcccacccaccacccccuggaacaccaauggcacaucccccuccgccaggcacccccauggcucagccucccgccccaggugugcuuauggcucaaccucugacgcccgggguauugaugguucagccagccgcaccuggagccccgauggugcagcccccucccgcugcgaugaugacucagccccaaccaagcggcgcaccuauggccaaacccccgggcccagggguccucaugauacacccucccggagcucgcgccccaaugacccagcccccugcaaguggugccccgauggcucagcccgccgcacccccugcgcaacccauggcuccuccagcccagcccauggcauccugggccccucaggcucagccacugauccugcaaauucagucucaggugauccgagccccgccccaggugccucaaggcccacaggcacccccugcucagcucgccacaccacccggguggcaggcgacuagcccgggauggcaagccacccagcagggcuggcaggcuacaccuuuaaccuggcaaacgacucaggucacauggcaggcacccgccguuaccuggcaagugccaccucccaugcgucaggguccacccccuauuagaccagggccgcccccuaucaggccaggacccccuccaguacggcaggcucccccucugauacgccaggccccgccagugaucagacaagcacccccugucauuaggcaggcgcccccagugauccggcaggccccugcuguuauucgccaggcacccccagugauccgacaagccccgccugucauaagacaggcucccccagugauuaggcaggcacccccucuuauccggcaggccccacccccuauucguccggccccacaaguauuggcuacucagcccccucuguggcaggcgcuaccacccccucccccacuccgccaagccccgcaggcaagacugccugcuccccagguucaggccgccccacaagugccuacagcucccccagcaacccaggucccugccgcgcccccggcuggcccacaggugccucagcccguccuuccagcaccccuguccgccccuuugucagccccgcaagcugugcacugcccaaguaucaucuggcaggcacccaagggccagccucccguuccacaugagauuccuacgagcauggaguuccaggaagugcaacagacccaggcccucgcguggcaggcucaaaaagcccccacacacauauggcagccacugccugcacaggaagcccaaaggcaggcuccgcccuuaguacagcuggagcagccauuucaaggggccccucccucucagaaggcaguccagauccagcucccaccucaacaggcucaggccuccggaccccaggcggaggugccgacucuuccacugcaaccuucauggcaggcacccccagccguuuugcaggcucaacccgguccucccguggccgcugcaaauuucccacuaggcagcgccaagagucugaugaccccuucuggggaaugucgggccuccagcauugaucgacgcggaucgucuaaagagagaaggacauccucaaaggaacggcgcgcuccgaguaaagacagaaugaucuuugcggcaacuuucugcgcccccaaggcugucagcgccgcaagggcccaucucccagcugcguggaaaaaccugccugccacccccgagacauuugcaccauccucuagcguguucccugcuaccucacaguuucagcccgccagucuuaaugcauucaagggcccguccgccgcuagcgagacuccuaagucucugccauaugccuugcaggaucccuuugcguguguagaagcacucccugccgugccauggguuccccaaccuaacaugaaugcuucaaaagccagucaggcugucccaacguuccugauggcaacagccgcugcaccccaggccaccgcgacuacccaggaggccagcaagacauccguggaaccgccucgucggucugguaaagcuacccgaaagaaaaagcacuuagaggcccaagaagacucgagagggcauacucuggcauuucacgauuggcagggccccaggccaugggagaaccuaaaucucagcgacugggaggugcagucccccauacaggucucaggagauugggaacacccuaacacaccacgcggccugagugggugggagggacccucuacgagccggauucuuuccgguugggaaggcccuucagcuagcugggccuugucugcaugggaggggccauccaccaguagagcccugggacucagcgaaucuccgggcuccucacugcccguuguggugagugagguagcuagcgucucgccugguuccucugcgacucaagacaauagcaaaguggaggcccagccacuuucaccccuggaugaaagggcaaacgcuuugguucaguuccuccuggugaaggaccaggccaaggucccugugcaacgcagugagaugguuaaagugaucuuacgagaauacaaggaugagugccuggacaucauuaaucgggccaacaauaaacuagaaugugcauuuggguaucagcucaaggagaucgacaccaaaaaccaugcuuacauuauaaucaauaagcugggcuaucacacaggaaaccuuguagccuccuacuuggaucguccaaaguucggccugcucauggucgugcugucuuuaauuuucaugaaagggaacugcgugagagaggaccugaucuuuaauuuccuuuuuaaguugggacucgaugucagggaaacaaacggccuguucgguaauacuaaaaagcuaaucaccgagguuuuugugcgccagaaauaucuggaauaccggaggauucccuacacggagccggcggaguaugaguuccucugggggccuagagcuuuucuggaaaccagcaagaugcuuguauugcgauuccuggccaaguuacauaaaaaggacccacaauccuggcccuuucacuaccucgaagcacuggccgagugugaaugggaggauacagacgaggaugaaccugacacuggagauucagcucacggccccaccagccgcccaccgccucgguga

SEQ ID NO: 2426 - RNA, 3750 nt, Artificial Sequence
  derived and/or modified sequence opt4 from MAGEL2__Homo_sapiens__CCDS73700.1
augagccagcugagcaagaaccugggcgacagcagcccccccgccgaggcccccaagccccccguguacagcagacccaccgugcugaugagagccccccccgccagcagcagagccccccccgugcccugggaccccccccccaucgaccugcaggccagccuggccgccuggcaggccccccagcccgccugggaggccccccagggccagcugcccgcccccguggugcccaugacccagccccccgcccugggcggccccaucgugcccgcccccccccugggcggccccaugggcaagccccccacccccggcgugcugauggugcacccccccccccccggcgcccccauggcccagccccccacccccggcgugcugauggugcaccccagcgcccccggcgcccccauggcccacccccccccccccggcacccccaugagccacccccccccccccggcacccccauggcccacccccccccccccggcacccccauggcccacccccccccccccggcacccccauggugcacccccccccccccggcacccccauggcccacccccccccccccggcacccccauggcccacccccccccccccggcacccccauggcccacccccccccccccggcacccccauggcccacccccccccccccggcacccccauggcccagccccccgcccccggcgugcugauggcccagccccugacccccggcgugcugauggugcagcccgccgcccccggcgcccccauggugcagcccccccccgccgccaugaugacccagccccagcccagcggcgcccccauggccaagccccccggccccggcgugcugaugauccacccccccggcgccagagcccccaugacccagccccccgccagcggcgcccccauggcccagcccgccgccccccccgcccagcccauggccccccccgcccagcccauggccagcugggccccccaggcccagccccugauccugcagauccagagccaggugaucagagcccccccccaggugccccagggcccccaggccccccccgcccagcuggccaccccccccggcuggcaggccaccagccccggcuggcaggccacccagcagggcuggcaggccaccccccugaccuggcagaccacccaggugaccuggcaggcccccgccgugaccuggcaggugcccccccccaugagacagggccccccccccaucagacccggccccccccccaucagacccggccccccccccgugagacaggcccccccccugaucagacaggccccccccgugaucagacaggccccccccgugaucagacaggccccccccgugaucagacaggcccccgccgugaucagacaggccccccccgugaucagacaggccccccccgugaucagacaggccccccccgugaucagacaggcccccccccugaucagacaggcccccccccccaucagacccgccccccaggugcuggccacccagcccccccuguggcaggcccugccccccccccccccccugagacaggccccccaggccagacugcccgccccccaggugcaggccgccccccaggugcccaccgccccccccgccacccaggugcccgccgccccccccgccggcccccaggugccccagcccgugcugcccgccccccugagcgccccccugagcgccccccaggccgugcacugccccagcaucaucuggcaggcccccaagggccagccccccgugccccacgagauccccaccagcauggaguuccaggaggugcagcagacccaggcccuggccuggcaggcccagaaggcccccacccacaucuggcagccccugcccgcccaggaggcccagagacaggcccccccccuggugcagcuggagcagcccuuccagggcgccccccccagccagaaggccgugcagauccagcugcccccccagcaggcccaggccagcggcccccaggccgaggugcccacccugccccugcagcccagcuggcaggccccccccgccgugcugcaggcccagcccggcccccccguggccgccgccaacuucccccugggcagcgccaagagccugaugacccccagcggcgagugcagagccagcagcaucgacagaagaggcagcagcaaggagagaagaaccagcagcaaggagagaagagcccccagcaaggacagaaugaucuucgccgccaccuucugcgcccccaaggccgugagcgccgccagagcccaccugcccgccgccuggaagaaccugcccgccacccccgagaccuucgcccccagcagcagcguguuccccgccaccagccaguuccagcccgccagccugaacgccuucaagggccccagcgccgccagcgagacccccaagagccugcccuacgcccugcaggaccccuucgccugcguggaggcccugcccgccgugcccugggugccccagcccaacaugaacgccagcaaggccagccaggccgugcccaccuuccugauggccaccgccgccgccccccaggccaccgccaccacccaggaggccagcaagaccagcguggagccccccagaagaagcggcaaggccaccagaaagaagaagcaccuggaggcccaggaggacagcagaggccacacccuggccuuccacgacuggcagggccccagacccugggagaaccugaaccugagcgacugggaggugcagagccccauccaggugagcggcgacugggagcaccccaacacccccagaggccugagcggcugggagggccccagcaccagcagaauccugagcggcugggagggccccagcgccagcugggcccugagcgccugggagggccccagcaccagcagagcccugggccugagcgagagccccggcagcagccugcccgugguggugagcgagguggccagcgugagccccggcagcagcgccacccaggacaacagcaagguggaggcccagccccugagcccccuggacgagagagccaacgcccuggugcaguuccugcuggugaaggaccaggccaaggugcccgugcagagaagcgagauggugaaggugauccugagagaguacaaggacgagugccuggacaucaucaacagagccaacaacaagcuggagugcgccuucggcuaccagcugaaggagaucgacaccaagaaccacgccuacaucaucaucaacaagcugggcuaccacaccggcaaccugguggccagcuaccuggacagacccaaguucggccugcugaugguggugcugagccugaucuucaugaagggcaacugcgugagagaggaccugaucuucaacuuccuguucaagcugggccuggacgugagagagaccaacggccuguucggcaacaccaagaagcugaucaccgagguguucgugagacagaaguaccuggaguacagaagaauccccuacaccgagcccgccgaguacgaguuccuguggggccccagagccuuccuggagaccagcaagaugcuggugcugagauuccuggccaagcugcacaagaaggacccccagagcuggcccuuccacuaccuggaggcccuggccgagugcgagugggaggacaccgacgaggacgagcccgacaccggcgacagcgcccacggccccaccagcagacccccccccagauga

SEQ ID NO: 2427 - RNA, 3750 nt, Artificial Sequence
  derived and/or modified sequence opt5 from MAGEL2__Homo_sapiens__CCDS73700.1
augagccagcuguccaagaaccucggcgacucuagcccgccugccgaggcuccgaaacccccuguguacuccagacccaccguccugaugcgggccccucccgcgucuagccgcgcuccuccgguucccugggauccucccccuaucgaccuucaagccucccuggccgcuuggcaggcgccccagccggcuugggaagccccucaggggcaacuccccgcgccuguggugcccaugacacagcccccugcccugggaggcccgauuguccccgcuccuccccuugggggaccuaugggcaagcccccgacgccuggggugcugaugguucaucccccucccccuggagcccccauggcucagccgccuacccccggcgugcucaugguccaccccucugccccuggcgcgccgauggcccaucccccucccccugggacacccaugagccacccucccccgccuggaacccccauggcucacccucccccgccuggcacacccauggcccauccuccuccgcccgggacccccauggugcaucccccucccccuggaacacccauggcucacccuccgcccccuggcacccccauggcccacccucccccgccugggacgcccauggcccaucccccucccccuggaaccccgauggcucaucccccucccccuggcacacccauggcgcagccgccugcccccggcguucugauggcucaaccucugacccccggggugcucaugguccagccugccgcccccggagcuccgauggugcagccuccucccgccgcgaugaugacacagccccaaccguccggcgcucccauggccaaaccucccgggccuggagugcugaugauccaucccccuggcgccagagcuccgaugacccagcccccugccagcggggcucccauggcccagccugcggcucccccggcccaaccuauggccccucccgcucagcccauggccucuugggcgccccaggcccagccucuuauucugcaaauccagucccaggucauucgggcuccgccccagguuccucaaggaccccaggccccucccgcucagcucgccacgccgccuggcuggcaggccacaagccccggcuggcaagcuacccagcagggguggcaggcgacaccucugaccuggcaaaccacacaggugacguggcaggcccccgcugugaccuggcaagucccucccccgaugcgccagggaccuccucccaucagacccggcccgcccccuauccggcccgggccucccccugugcgccaggcucccccgcuuauuagacaggccccucccguuauccggcaagccccucccgugauucgccaggccccgccugucaucagacaggcgcccgcugugauucggcaggcucccccuguuauccgccaagcgcccccugugauuagacaggccccgcccgucauccggcaggccccuccccugauccgccaggccccucccccuauuagaccggcuccccaagugcucgccacacagccuccccuguggcaggcccugccucccccgccuccccuccggcaagcuccccaggccagacugccugcuccccagguccaggccgcgccucaagugccgaccgcucccccugccacacagguucccgccgcuccucccgccggaccccaggugccucagcccguccuuccugcuccccugucugccccgcucuccgcgccucaagccgugcacugccccagcaucauuuggcaggcucccaagggccagccucccguuccucacgagaucccgaccucuauggaguuccaggaagugcaacagacgcaggcccuggccuggcaggcucaaaaagcccccacacacauuuggcagccucuucccgcgcaggaagcucaacgccaggccccuccccugguccagcucgagcagccuuuucaaggggccccgcccucccagaaggcugugcagauccagcugccuccccaacaggcccaggcgagcggcccucaggcugaggugcccacccugccgcuccaaccuuccuggcaggccccucccgccguucugcaggcucaacccggacccccugucgccgcugccaauuucccgcuuggcucugccaagagccugaugacccccuccggggaaugucgggccagcucuaucgauagacgcggauccagcaaagagcggagaacaucuagcaaggaacgccgggcuccuuccaaagacagaaugauuuuugccgcuaccuucugcgcccccaaggccgugucugcugcgcgcgcccaccucccugcugccuggaaaaaccugcccgccacaccggagacguuugcuccuagcuccagcguguuccccgccaccucucaguuucagccugcgucccuuaaugcuuucaagggccccagcgccgccucugagacaccuaagucccugcccuaugcucuccaggauccguuugccugugucgaagcgcugcccgccgugccuuggguuccccaaccuaacaugaaugcuagcaaagccucccaggcugugccgaccuuccugauggccacagcugccgcgccccaggccaccgcuacgacccaggaggccucuaagacaagcgucgaaccuccccggagauccgggaaagcuacccgcaagaaaaagcaccucgaggcccaagaagacucucggggacauacacuggccuuucacgauuggcagggcccuagacccugggagaaccuuaaucugagcgacugggaggugcaguccccuauccagguuagcggggauugggaacaccccaacaccccgcggggccucucuggaugggagggcccuuccacgagccgcauucugucugggugggaaggacccuccgcuagcugggcgcugucugccugggagggcccuagcacauccagagcucuugggcucagcgaaucucccggauccagccugccgguggucguguccgagguugccucugugagcccuggcuccucugccacccaagacaauagcaaagucgaggcucagccccugucuccccucgaugaacgggccaacgcgcuggugcaguuccuucuggugaaggaccaggccaaggucccuguucaaagauccgagauggugaaagugauccuccgcgaauacaaggaugagugccuggacauuaucaaucgggcuaacaauaaacuggaaugugccuuuggguaucagcuuaaggagaucgacaccaaaaaccaugcuuacauuaucauuaauaagcucggcuaucacacaggaaaccuggucgccagcuaccuggauagacccaaguucggccuccugauggugguucuuucccugaucuucaugaaagggaacugcgugcgcgaggaccucauuuuuaauuuccuguuuaagcugggacuugaugucagagaaaccaacggccucuucgggaauacgaaaaagcugaucacagagguguuuguucggcagaaauaucuggaauaccgccggauuccuuacaccgagccggcggaguaugaguuccucuggggacccagagccuuucuggaaacaagcaagaugcuugugcugcgcuuccucgcuaagcugcauaaaaaggacccucaaucuuggcccuuucacuaccuggaagcccuugcugagugugaaugggaggauaccgacgaggaugaaccugacacaggcgauuccgcccacgggcccaccagcagaccgccuccccgguga

SEQ ID NO: 2428 - protein, 93 aa, Artificial Sequence
  mammaglobin_A__Homo_sapiens__Q13296
MKLLMVLMLAALSQHCYAGSGCPLLENVISKTINPQVSKTEYKELLQEFIDDNATTNAIDELKECFLNQTDETLSNVEVFMQLIYDSSLCDLF

SEQ ID NO: 2429 - RNA, 282 nt, Artificial Sequence
  mammaglobin_A__Homo_sapiens__AAC39608
augaaguugcugaugguccucaugcuggcggcccucucccagcacugcuacgcaggcucuggcugccccuuauuggagaaugugauuuccaagacaaucaauccacaagugucuaagacugaauacaaagaacuucuucaagaguucauagacgacaaugccacuacaaaugccauagaugaauugaaggaauguuuucuuaaccaaacggaugaaacucugagcaauguugagguguuuaugcaauuaauauaugacagcagucuuugugauuuauuuuaa

SEQ ID NO: 2430 - RNA, 282 nt, Artificial Sequence
  derived and/or modified sequence opt1 from mammaglobin_A__Homo_sapiens__AAC39608
augaagcugcucauggugcugaugcuggccgcccucagccagcacugcuacgcgggcuccgggugcccgcugcuggagaacgucaucagcaagaccaucaacccccagguguccaagaccgaguacaaggagcuccugcaggaguucaucgacgacaacgccacgaccaacgccaucgacgagcugaaggagugcuuccucaaccagaccgacgagacccugagcaacguggaggucuucaugcagcugaucuacgacuccagccucugcgaccuguucuga

SEQ ID NO: 2431 - RNA, 282 nt, Artificial Sequence
  derived and/or modified sequence opt2 from mammaglobin_A__Homo_sapiens__AAC39608
augaagcuccucaugguccucaugcucgccgcccucucccagcacugcuacgccggcuccggcugcccccuccucgagaacgucaucuccaagaccaucaacccccaggucuccaagaccgaguacaaggagcuccuccaggaguucaucgacgacaacgccaccaccaacgccaucgacgagcucaaggagugcuuccucaaccagaccgacgagacccucuccaacgucgaggucuucaugcagcucaucuacgacuccucccucugcgaccucuucuga

SEQ ID NO: 2432 - RNA, 282 nt, Artificial Sequence
  derived and/or modified sequence opt3 from mammaglobin_A__Homo_sapiens__AAC39608
augaagcugcucauggugcuuaugcuggccgcuuugagccagcacugcuacgcaggcuccgggugucccuuacuggagaacgucaucucuaaaaccauuaauccucaaguuucaaagacagaauauaaagagcuacuccaggaguucauagacgauaacgccacuacgaaugcgaucgacgaacugaaggaaugcuuucuuaaccagaccgaugagacacugaguaauguggagguauucaugcaguugauuuacgacagcucccucugugaucuguuuuga

SEQ ID NO: 2433 - RNA, 282 nt, Artificial Sequence
  derived and/or modified sequence opt4 from mammaglobin_A__Homo_sapiens__AAC39608
augaagcugcugauggugcugaugcuggccgcccugagccagcacugcuacgccggcagcggcugcccccugcuggagaacgugaucagcaagaccaucaacccccaggugagcaagaccgaguacaaggagcugcugcaggaguucaucgacgacaacgccaccaccaacgccaucgacgagcugaaggagugcuuccugaaccagaccgacgagacccugagcaacguggagguguucaugcagcugaucuacgacagcagccugugcgaccuguucuga

SEQ ID NO: 2434 - RNA, 282 nt, Artificial Sequence
  derived and/or modified sequence opt5 from mammaglobin_A__Homo_sapiens__AAC39608
augaagcugcucauggugcugaugcuugccgcucugagccagcacugcuacgccggcuccggguguccccuccuggagaacgucaucucuaaaaccauuaauccucaaguuagcaagacagaauauaaagagcuucugcaggaauuuaucgacgauaacgcgacgaccaaugcuauugacgagcucaaggaaugcuuucugaaccagacagaugagacccuguccaauguggagguguucaugcagcucaucuacgacucuagccugugugaucuuuucuga

SEQ ID NO: 2435 - protein, 120 aa, Artificial Sequence
  mammaglobin_A__Homo_sapiens__Q6NX70
MKLLMVLMLAALSQHCYAGSGCPLLENVISKTINPQVSKTEYKELLQEFIDDNATTNAIDELKECFLNQTDETLSNVEVFMVISFSSYKLFKSPDQGQVGSSFLTDNAKATSEQAFSYIG

SEQ ID NO: 2436 - RNA, 363 nt, Artificial Sequence
  mammaglobin_A__Homo_sapiens__AAH67220
augaaguugcugaugguccucaugcuggcggcccucucccagcacugcuacgcaggcucuggcugccccuuauuggagaaugugauuuccaagacaaucaauccacaagugucuaagacugaauacaaagaacuucuucaagaguucauagacgacaaugccacuacaaaugccauagaugaauugaaggaauguuuucuuaaccaaacggaugaaacucugagcaauguugagguguuuaugguaauuucauuuucuuccuauaagcuuuuuaaauccccugaccagggacaagugggcucuucauuucucacugacaaugccaaagccacuagugaacaagccuuuucuuacauugguuaa

SEQ ID NO: 2437 - RNA, 363 nt, Artificial Sequence
  derived and/or modified sequence opt1 from mammaglobin_A__Homo_sapiens__AAH67220
augaagcugcucauggugcugaugcuggccgcccucagccagcacugcuacgcgggcuccgggugcccccugcuggagaacgucaucagcaagaccaucaacccccagguguccaagaccgaguacaaggagcuccugcaggaguucaucgacgacaacgccacgaccaacgccaucgacgagcugaaggagugcuuccucaaccagaccgacgagacccugagcaacguggaggucuucauggugaucuccuucagcuccuacaagcuguucaagagcccggaccagggccaggugggguccagcuuccucacggacaacgccaaggccaccuccgagcaggcguucagcuacaucggcuga

SEQ ID NO: 2438 - RNA, 363 nt, Artificial Sequence
  derived and/or modified sequence opt2 from mammaglobin_A__Homo_sapiens__AAH67220
augaagcuccucaugguccucaugcucgccgcccucucccagcacugcuacgccggcuccggcugcccccuccucgagaacgucaucuccaagaccaucaacccccaggucuccaagaccgaguacaaggagcuccuccaggaguucaucgacgacaacgccaccaccaacgccaucgacgagcucaaggagugcuuccucaaccagaccgacgagacccucuccaacgucgaggucuucauggucaucuccuucuccuccuacaagcucuucaagucccccgaccagggccaggucggcuccuccuuccucaccgacaacgccaaggccaccuccgagcaggccuucuccuacaucggcuga

SEQ ID NO: 2439 - RNA, 363 nt, Artificial Sequence
  derived and/or modified sequence opt3 from mammaglobin_A__Homo_sapiens__AAH67220
augaagcugcucauggugcuuaugcuggccgcuuugagccagcacugcuacgcaggcuccgggugucccuuacuggagaacgucaucucuaaaaccauuaauccucaaguuucaaagacagaauauaaagagcuacuccaggaguucauagacgauaacgccacuacgaaugcgaucgacgaacugaaggaaugcuuucuuaaccagaccgaugagacacugaguaauguggagguauucauggugauuagcuuuuccucuuacaaauuguucaagucgccagaccagggacaagucgguagcucauuucucacugauaacgcuaaggccaccagugaacaggcauucuccuauaucggcuga

SEQ ID NO: 2440 - RNA, 363 nt, Artificial Sequence
  derived and/or modified sequence opt4 from mammaglobin_A__Homo_sapiens__AAH67220
augaagcugcugauggugcugaugcuggccgcccugagccagcacugcuacgccggcagcggcugcccccugcuggagaacgugaucagcaagaccaucaacccccaggugagcaagaccgaguacaaggagcugcugcaggaguucaucgacgacaacgccaccaccaacgccaucgacgagcugaaggagugcuuccugaaccagaccgacgagacccugagcaacguggagguguucauggugaucagcuucagcagcuacaagcuguucaagagccccgaccagggccaggugggcagcagcuuccugaccgacaacgccaaggccaccagcgagcaggccuucagcuacaucggcuga

SEQ ID NO: 2441 - RNA, 363 nt, Artificial Sequence
  derived and/or modified sequence opt5 from mammaglobin_A__Homo_sapiens__AAH67220
augaagcugcucauggugcugaugcuugccgcucugagccagcacugcuacgccggcuccggguguccccuccuggagaacgucaucucuaaaaccauuaauccucaaguuagcaagacagaauauaaagagcuucugcaggaguucaucgacgauaacgcgacgaccaaugcuauugacgaacucaaggaaugcuuucugaaccagacagaugagacccuguccaauguggagguguucauggucaucucuuuuagcuccuacaaacucuucaagucuccggaccagggacaagugggcagcuccuuucugacagauaacgccaaggccaccagcgaacaggcuuucucuuauauuggguga

SEQ ID NO: 2442 - protein, 118 aa, Artificial Sequence
  MART-1/melan-A__Homo_sapiens__Q16655
MPREDAHFIYGYPKKGHGHSYTTAEEAAGIGILTVILGVLLLIGCWYCRRRNGYRALMDKSLHVGTQCALTRRCPQEGFDHRDSKVSLQEKNCEPVVPNAPPAYEKLSAEQSPPPYSP

SEQ ID NO: 2443 - RNA, 357 nt, Artificial Sequence
  MART-1/melan-A__Homo_sapiens__AAA19238
augccaagagaagaugcucacuucaucuaugguuaccccaagaaggggcacggccacucuuacaccacggcugaagaggccgcugggaucggcauccugacagugauccugggagucuuacugcucaucggcuguugguauuguagaagacgaaauggauacagagccuugauggauaaaagucuucauguuggcacucaaugugccuuaacaagaagaugcccacaagaaggguuugaucaucgggacagcaaagugucucuucaagagaaaaacugugaaccugugguucccaaugcuccaccugcuuaugagaaacucucugcagaacagucaccaccaccuuauucaccuuaa

SEQ ID NO: 2444 - RNA, 357 nt, Artificial Sequence
  derived and/or modified sequence opt1 from MART-1/melan-A__Homo_sapiens__AAA19238
augccccgcgaggacgcccacuucaucuacggcuaccccaagaaggggcacggccacagcuacaccaccgccgaggaggcggccgggaucggcauccugacggugauccucgggguccugcugcucaucggcugcugguacugccggcgccggaacggcuaccgcgcccugauggacaagucccugcacguggggacccagugcgcccucacccggcgcugcccccaggagggcuucgaccaccgggacagcaaggugucccugcaggagaagaacugcgagcccgucgugcccaacgccccgcccgcguacgagaagcugagcgccgagcaguccccgccgcccuacagccccuga

SEQ ID NO: 2445 - RNA, 357 nt, Artificial Sequence
  derived and/or modified sequence opt2 from MART-1/melan-A__Homo_sapiens__AAA19238
augccccgcgaggacgcccacuucaucuacggcuaccccaagaagggccacggccacuccuacaccaccgccgaggaggccgccggcaucggcauccucaccgucauccucggcguccuccuccucaucggcugcugguacugccgccgccgcaacggcuaccgcgcccucauggacaagucccuccacgucggcacccagugcgcccucacccgccgcugcccccaggagggcuucgaccaccgcgacuccaaggucucccuccaggagaagaacugcgagcccgucguccccaacgccccccccgccuacgagaagcucuccgccgagcagucccccccccccuacucccccuga

SEQ ID NO: 2446 - RNA, 357 nt, Artificial Sequence
  derived and/or modified sequence opt3 from MART-1/melan-A__Homo_sapiens__AAA19238
augcccagagaggacgcccacuucaucuacggcuauccuaagaaagggcauggacacagcuacaccacagcugaagaggcagccgguauuggcauacugacugugauccucgggguccuucuguugauuggaugcugguauuguaggcggcgcaacggcuaccgagcguuaauggauaagucccugcauguugguacgcagugcgcucuaacccguagauguccacaagaaggguuugaccacagggauucuaaagugucacuccaggagaagaauugcgaaccgguagugcccaacgccccuccagcauaugagaaacugagugccgagcagagcccucccccauacucccccuga

SEQ ID NO: 2447 - RNA, 357 nt, Artificial Sequence
  derived and/or modified sequence opt4 from MART-1/melan-A__Homo_sapiens__AAA19238
augcccagagaggacgcccacuucaucuacggcuaccccaagaagggccacggccacagcuacaccaccgccgaggaggccgccggcaucggcauccugaccgugauccugggcgugcugcugcugaucggcugcugguacugcagaagaagaaacggcuacagagcccugauggacaagagccugcacgugggcacccagugcgcccugaccagaagaugcccccaggagggcuucgaccacagagacagcaaggugagccugcaggagaagaacugcgagcccguggugcccaacgccccccccgccuacgagaagcugagcgccgagcagagccccccccccuacagccccuga

SEQ ID NO: 2448 - RNA, 357 nt, Artificial Sequence
  derived and/or modified sequence opt5 from MART-1/melan-A__Homo_sapiens__AAA19238
augcccagagaggacgcccacuucaucuacggcuauccuaagaaagggcauggacacagcuacaccacagcugaagaggccgcgggcauugggauccugacggugauucucggaguccugcuucugaucggcugcugguauugucggcgcagaaacggguaccgggcucucauggauaagucccugcauguuggaacccagugcgcccuuacacgcagauguccgcaagaaggcuuugaccaccgggauucuaaagugagccugcaggagaagaauugcgaacccguggucccuaacgcucccccugccuaugagaaacucuccgccgagcagucucccccuccguacagccccuga

SEQ ID NO: 2449 - protein, 493 aa, Artificial Sequence
  MART-2__Homo_sapiens__Q5VTY9
MLPRWELALYLLASLGFHFYSFYEVYKVSREHEEELDQEFELETDTLFGGLKKDATDFEWSFWMEWGKQWLVWLLLGHMVVSQMATLLARKHRPWILMLYGMWACWCVLGTPGVAMVLLHTTISFCVAQFRSQLLTWLCSLLLLSTLRLQGVEEVKRRWYKTENEYYLLQFTLTVRCLYYTSFSLELCWQQLPAASTSYSFPWMLAYVFYYPVLHNGPILSFSEFIKQMQQQEHDSLKASLCVLALGLGRLLCWWWLAELMAHLMYMHAIYSSIPLLETVSCWTLGGLALAQVLFFYVKYLVLFGVPALLMRLDGLTPPALPRCVSTMFSFTGMWRYFDVGLHNFLIRYVYIPVGGSQHGLLGTLFSTAMTFAFVSYWHGGYDYLWCWAALNWLGVTVENGVRRLVETPCIQDSLARYFSPQARRRFHAALASCSTSMLILSNLVFLGGNEVGKTYWNRIFIQGWPWVTLSVLGFLYCYSHVGIAWAQTYATD

SEQ ID NO: 2450 - RNA, 1482 nt, Artificial Sequence
  MART-2__Homo_sapiens__EAW93427
augcugccccgaugggaacuggcacuuuaccuacuugccucacuaggcuuccacuucuauuccuucuaugaaguuuacaaagucuccagagaacacgaagaggagcuggaccaggaauuugagcuggagacugacacuuuauuuggaggauuaaagaaggaugcgaccgacuuugaguggagcuucuggauggaaugggggaagcaguggcugguguggcuucuccuuggccacaugguagugucucaaauggccacacugcuggcaagaaagcacagacccuggauucucaugcucuaugggaugugggccugcuggugugugcuggggaccccugguguggcuaugguuuugcuccauaccaccaucucuuucugcguggcccaguuccggucucagcuccugacguggcucuguucucuccuccuccucuccacacugaggcugcaggguguggaagaaguuaagagaaggugguacaagacagaaaacgaguacuaccugcugcaguucacgcugaccguucgcugccucuacuacaccagcuucagccuggagcucugcuggcagcagcugccugcugcaucgaccuccuacuccuuucccuggaugcuggccuaugucuuuuauuauccagucuuacacaaugggcccauccucagcuucucggaguucaucaaacagaugcagcagcaggagcaugacucccugaaggccagccuguguguccuggcccuggggcugggccgccuucuuugcuggugguggcuggccgagcugauggcucaccugauguacaugcaugccaucuacagcagcaucccccuccuggagacugucucuuguuggaccuuaggaggacuggcguuagcccaggugcucuuuuucuacgugaaguacuuggugcucuuuggcgugccugcucugcucaugcgccuggauggacucacuccacccgcccucccccgcugcgugagcaccauguucaguuucaccgggauguggagguauuuugauguuggacugcauaauuucuuaaucagguauguguacauuccagugggcgggucccagcauggccugcuggggacacuguuuuccacggcgaugacauuugcauuugugagcuacuggcauggcggcuacgacuaccucuggugcugggcagcgcucaacuggcugggagucacuguggagaauggaguccggaggcugguggagacucccugcauccaggacagucuggcccgauacuucuccccacaagcucgccgucgauuccacgcugcccuugcuucuuguuccaccucgaugcugauccuguccaaccugguauuucuugggggcaaugagguugggaaaaccuacuggaauaggaucuucauacaaggcuggccuugggugacccucucuguccugggauuccuguacugcuacucccacgugggcauugccugggcccagaccuacgccacggacuaa

(The sequence listing continues in the following parts.)
